United States Patent Application Publication US 2026/0022370 A1 - sequence listing, part 6

SEQ ID NO: 29510 - DNA, 664 bp, Homo sapiens
  source 1..664: mol_type = other DNA
gccctaggccttcctagccctgaggctgcagccagctcgccggctccggaataggagggggcactggggaggagctccttccttctcgatcctgtgcagggctgcgggggggggtggcagttcgagggataccctctcccagaccctgtccctaccctgccgcccacctgggctctggggtgcgcaggagccggtgctccgcggcgcctccccaacacgctgaggaaacaggaccctgactgggccctcaggatcggggggcattcgggagaggtcccgggagtcctgcctgcaggtgcccatcgctggccggcgccgtcgagggccaggccgaggctaagggagcatccccccgcccggccccaggcctctgggagcactctcgccccgcgattcccgctccgagctttcacagcggcactctccggccggagactcccggtctgcggggaagggggtctggcgggacccgtcggctggggtcccgctgagctcccggagtgggctgcccgggggcccccagcccaagccgcgctcggctggcaccaggggctagggtgcggcggggcggggggcggggcgggcggccggggaggtgatctcactcctccctccctctcctgcccctgcgcgcacgcccgccccgccccgccacagccgctgc

SEQ ID NO: 29511 - DNA, 254 bp, Homo sapiens
  source 1..254: mol_type = other DNA
gcagattcaaggctggcaaggcggtgccatggcaggcgcttggcacgccagtggccctggcaagcgcacaacctgggggaccctgctccgtgctctgtaccatgggccctgtcccaggtgtggccaagcccccaggcccagggagcccagggagcattgactggggagtccccgcacgctggcggtccctgaggccatgggcagggggctgaggggggtccccacttccgggctaaactgctgtcctcagccct

SEQ ID NO: 29512 - DNA, 632 bp, Homo sapiens
  source 1..632: mol_type = other DNA
tgcctggggtacacccttggtgctgccgaggggactggggggtccactggagaagagcccccctcatctgcctcgctctgccctgaacctcagggacgcccagctggagagcctgggggatggtgagggcgatgggcagagagccccaccctgtccccacccaccccctctcctccccagacctggagggggtcgtggaggctgtggcctgctttgcctacacgggccgcacagcccaggagctgagcttccggcggggggacgtactgcggctgcacgagagggcctcgagcgactggtggcggggggagcacaacggcatgcggggcctcatcccccacaacacgctgcccgccgggtgagtgagccgcgccctcaggccccagggctcccggagtcgttagattctgaaggtctgggctgggccagagaacagagcctctctgaccactcctggctggcgcggagctgctggccctggaccccgtgcagggaggccggtccttcccaccgcaggacggagaaggctgcagactgcaggggagtctgggagcagtcccgagggcctcctggcatcggagctggtccaccacaccccaggatgggaggagccactgcccagctagctcagg

SEQ ID NO: 29513 - DNA, 570 bp, Homo sapiens
  source 1..570: mol_type = other DNA
cctgtggtagagggtggaggaaagccccaccacccctggatgaggggggcccccctcactccgagggggctgcccccctcaggcctatgacgggcaggtgcagctgcaggggaagggaggcagagcagtctcttccggcagcaggatgaactctcctcccctaccaagggggcctggagggaacggcagccagctgctgaggttctgctctctcaaggctccctggggctccctgggcctctctgggggctgacttgggaagggaggaccccacctggggcagcaatggtgttcatggccactggtacagtgggccagcggccccgctgtgaatggtacagtctggcagtggtgaccagggacgtgggatggcagcctgggatgccagcttacgttgctccggctgcttggcagcggggctttgggcacaaggcgggcacagtggggctggaaggggcgccctgcccccccaggagcccctcgcgggcagtgccagccctgggccgccccgccccaccgggagccgcgctgggggcggggctgggcggagcccgcgcagggtgctggccg

SEQ ID NO: 29514 - DNA, 367 bp, Homo sapiens
  source 1..367: mol_type = other DNA
gtggccaggcccaggaggccccgtgtgcctagcacactcctggcagttggcccgctaagtcagcaatcctcatgtcttaggcctggcagggccagcctaggccattgagtccagctccagggacatggccacgcgagtctgcacacacacctgcccagtgtagtcacggccccagagctgctcaggcagggcgctgaattcagggcttcagctccgggccgctgtgtcctggagcctttgctggagagaacagagggcagggttgtctcaggatggagccttcagggagaaaacatggcaccttgctccagtagccacgaggaggagggtgtccccgggatacaggcccccaggatcagtgaagtgg

SEQ ID NO: 29515 - DNA, 465 bp, Homo sapiens
  source 1..465: mol_type = other DNA
cagggtgctgggatttggagccacgtcacctggggtcaacccaggctctgacccccagagggcaaggtggccctctccatcaagggaggtccttgggagagggcggggccgcaggggttgcgcctctcggctgcccccggccctcaggctgctccacgtgccgcggtgcctagccatgtgcgaggagatgctgggcgccctgctgagccgccccgcccccgccccctcccccgcccccacccccgcctgccgaggcgcggaatacgcgggaggggggctgtcgcgccgagggaggggccggctccagctccggggcagcgcccgccccgcccccaggcccgccccgcgctgaccggctccgcgcattggcccgccccgtgcgctggcctgtcccgcgcattggccaagcggccgggaggacgggcccggcggccgtgcacttccggccggtggccggcccggcgc

SEQ ID NO: 29516 - DNA, 398 bp, Homo sapiens
  source 1..398: mol_type = other DNA
gttctttgtttctttgaatcaacgtaaccacgactacaatcacaatagagaacttttttgtttgtttgtttgagatggagtctcgctctgtcacccaggctggagcgcaatggcgtgatctcagctcactgcaacagggtgctgggatttggagccacgtcacctggggtcaacccaggctctgacccccagagggcaaggtggccctctccatcaagggaggtccttgggagagggcggggccgcaggggttgcgcctctcggctgcccccggccctcaggctgctccacgtgccgcggtgcctagccatgtgcgaggagatgctgggcgccctgctgagccgccccgcccccgccccctcccccgcccccacccccgcctgccgaggcgcggaata

SEQ ID NO: 29517 - DNA, 381 bp, Homo sapiens
  source 1..381: mol_type = other DNA
gcacctgtaatcccagctactccagaggcctgcactccagccccacacctgtggtcccacctactcaggaggctgaggtgggaggatcgcttgagcctggcaggtcaaggctgcagtgagctgcctgggcgacaggacagtctaccctgtgtggtgacaggtcagagggacctcctgccccacaggcttggtagggccaaggccctcagccgccctgccggggcccctggtgtagggcggggtgggtggcagccccgttccccctcatcccaggaccagagctcccagcaggggccctggagggactggcgggggtcgggctcaaagccccgccccaggcccagcggagggtgagccgggcgcggctgtgtcagctgagtg

SEQ ID NO: 29518 - DNA, 314 bp, Homo sapiens
  source 1..314: mol_type = other DNA
ttgagaccagcctggcgcacctgtaatcccagctactccagaggcctgcactccagccccacacctgtggtcccacctactcaggaggctgaggtgggaggatcgcttgagcctggcaggtcaaggctgcagtgagctgcctgggcgacaggacagtctaccctgtgtggtgacaggtcagagggacctcctgccccacaggcttggtagggccaaggccctcagccgccctgccggggcccctggtgtagggcggggtgggtggcagccccgttccccctcatcccaggaccagagctcccagcaggggccct

SEQ ID NO: 29519 - DNA, 548 bp, Homo sapiens
  source 1..548: mol_type = other DNA
gcccgcggacggccgggcgaggggaagtggcaagatggcggctcccagggcggaggcgtggaggctcgcccggtgggggggccgtggggcggggcgcgcctgcgcctgcacctgatgagcgcgactcgagctttagcccagcgcgcggcagcgccgacccccacccccgccgcgaggcagcgcaggggtcctttaagaggcttgggcccaggggcgagtggggggaagcggtgacgtcacccggctccgcctcctcgcccgaccgccggcgccgctgccgccaggaggaggcacaagatggcggctcccacggcggcaggcgcagcctgagcagcagaggagacttcacaagccgtacggcgcgagcccccaaacggccctcgagagctcgagctggtcgggagcggcggctgcacggctcccacaattgtggtctgagcgccggcggggctgcgacgaccgcggcgcttgtggctcctttccacccgccccggaagccggccagtgctggggacttgggggtgtgggaaccgggccggggctccgcc

SEQ ID NO: 29520 - DNA, 821 bp, Homo sapiens
  source 1..821: mol_type = other DNA
gaaattcaggatccgagcagcgccggtgcgcctgcgcgcagggcgggactcgaagcctgggaagcgggcggggcgaggtgacgcgagatgacgcggacgcctcccgcggtcgcccgcccggctcgtgcgccaccggcccgactgcgggcctctcggcagtgggggcggccgagcgcgcggcggtctggggcgcgcggcccggctcattttgctgcggcgcgggcggaggcggtggcgcccgagggcgggccccgcagcctgggagcctgggagcgggcggaggctccacccccgggcgccggcgctcggctgcgtcgcctcccactgtcgccccgcccccggctcccccgcggcgcgcctcgggccgcctcctgcggctgctgggtgtgcagggcgcgaaaatgctcgcttcccggccgcaggcgcggctgcagtggctgttcgccaaccccggccacctgcgtgccgctgtccccagtgctggccgttcccaagggggcggggccgagcgcgtcgcgggcatttccgagatgccgccgcccgcggacggccgggcgaggggaagtggcaagatggcggctcccagggcggaggcgtggaggctcgcccggtgggggggccgtggggcggggcgcgcctgcgcctgcacctgatgagcgcgactcgagctttagcccagcgcgcggcagcgccgacccccacccccgccgcgaggcagcgcaggggtcctttaagaggcttgggcccaggggcgagtggggggaagcggtgacgtcacccggctccgcctcctcgcccgaccgccggcgccgctgccgcca

SEQ ID NO: 29521 - DNA, 562 bp, Homo sapiens
  source 1..562: mol_type = other DNA
cccccgccggaaatggcggagccccggcccggttcccacacccccaagtccccagcactggccggcttccggggcgggtggaaaggagccacaagcgccgcggtcgtcgcagccccgccggcgctcagaccacaattgtgggagccgtgcagccgccgctcccgaccagctcgagctctcgagggccgtttgggggctcgcgccgtacggcttgtgaagtctcctctgctgctcaggctgcgcctgccgccgtgggagccgccatcttgtgcctcctcctggcggcagcggcgccggcggtcgggcgaggaggcggagccgggtgacgtcaccgcttccccccactcgcccctgggcccaagcctcttaaaggacccctgcgctgcctcgcggcgggggtgggggtcggcgctgccgcgcgctgggctaaagctcgagtcgcgctcatcaggtgcaggcgcaggcgcgccccgccccacggcccccccaccgggcgagcctccacgcctccgccctgggagccgccatcttgccacttcccctcgcccggccgtccgcgggc

SEQ ID NO: 29522 - DNA, 526 bp, Homo sapiens
  source 1..526: mol_type = other DNA
acaagcgccgcggtcgtcgcagccccgccggcgctcagaccacaattgtgggagccgtgcagccgccgctcccgaccagctcgagctctcgagggccgtttgggggctcgcgccgtacggcttgtgaagtctcctctgctgctcaggctgcgcctgccgccgtgggagccgccatcttgtgcctcctcctggcggcagcggcgccggcggtcgggcgaggaggcggagccgggtgacgtcaccgcttccccccactcgcccctgggcccaagcctcttaaaggacccctgcgctgcctcgcggcgggggtgggggtcggcgctgccgcgcgctgggctaaagctcgagtcgcgctcatcaggtgcaggcgcaggcgcgccccgccccacggcccccccaccgggcgagcctccacgcctccgccctgggagccgccatcttgccacttcccctcgcccggccgtccgcgggcggcggcatctcggaaatgcccgcgacgcgctcggccccgcccccttgggaacgg

SEQ ID NO: 29523 - DNA, 784 bp, Homo sapiens
  source 1..784: mol_type = other DNA
tgcctcctcctggcggcagcggcgccggcggtcgggcgaggaggcggagccgggtgacgtcaccgcttccccccactcgcccctgggcccaagcctcttaaaggacccctgcgctgcctcgcggcgggggtgggggtcggcgctgccgcgcgctgggctaaagctcgagtcgcgctcatcaggtgcaggcgcaggcgcgccccgccccacggcccccccaccgggcgagcctccacgcctccgccctgggagccgccatcttgccacttcccctcgcccggccgtccgcgggcggcggcatctcggaaatgcccgcgacgcgctcggccccgcccccttgggaacggccagcactggggacagcggcacgcaggtggccggggttggcgaacagccactgcagccgcgcctgcggccgggaagcgagcattttcgcgccctgcacacccagcagccgcaggaggcggcccgaggcgcgccgcgggggagccgggggcggggcgacagtgggaggcgacgcagccgagcgccggcgcccgggggtggagcctccgcccgctcccaggctcccaggctgcggggcccgccctcgggcgccaccgcctccgcccgcgccgcagcaaaatgagccgggccgcgcgccccagaccgccgcgcgctcggccgcccccactgccgagaggcccgcagtcgggccggtggcgcacgagccgggcgggcgaccgcgggaggcgtccgcgtcatctcgcgtcacctcgccccgcccgcttcccaggcttcgagt

SEQ ID NO: 29524 - DNA, 574 bp, Homo sapiens
  source 1..574: mol_type = other DNA
catctcagtaagccatgccacagtggtggtggcttcaggaaagagactccaacaggggccagctgtgggccttgggcacttctgggtggggaaccccttcgctgtcaggccatctcagggcggggaccgggggtggggcaggagctctgccggcgggctcaggaagccttcaccacagctgcctgagctcacccttgccaaatgagggctggggcatcaaggctgctgccgtgtgcaggcaggcagggctcctggtaacagccctgcaggccgcagtggagagcagggttccggcagggccgcccaggagctttcggaaggcccggccccggcccctttccgagcagcccgggcctccgccctgccctccccaacgccgggagccgccgttcgtcctccagagccccgcccgggcgagcccgggaggccgatcgccgctcgcggaacccgccgggacccgggccctccccggcgcggggcgcccccgtgtgacccagcgcgcggccgcggcgcgcaagatggcggcgggcccgggcaccgccccttccgccccgccgggcgtcgcacgaggccg

SEQ ID NO: 29525 - DNA, 360 bp, Homo sapiens
  source 1..360: mol_type = other DNA
tctctctgtgagctttcattacagcatgtccctggacacaggtagctgccttcaggcctgccacgagcggccaagggaagcctcctccatatgctggcctcgctaggcacactgctccagcgtgtgacgggacagacccgtatggtaggggctggatgtgctgtggtgcttttggacacccccacccccgcaggctgtggctgggtttgcccaaagggggcccccttgttactgcagcctcaccaggttaccctcggaaggcctggccttcaaaggtcatctcagtaagccatgccacagtggtggtggcttcaggaaagagactccaacaggggccagctgtgggccttgggcacttct

SEQ ID NO: 29526 - DNA, 357 bp, Homo sapiens
  source 1..357: mol_type = other DNA
ttagctaacagttttctcatacctccctctctggggcaacgtgctccaggggcaactttgatgaaacgcttattgcagcgcactcggtgcatctgtggacagagggtcaatcgcccctcagagcagcgcccaagcctaggccttcactcagctggaggggtccgcccccttttccctggccgaaatggacaggaaatctcgccaattgacggcgtcccagcccggccatcacagccaatgacgggcgggctcgcagcggcgccgagggcggggcgcgggcgcgcaggtgcagcagcgcgcgggccggccaagagggcggggcgcgacgtcggccgtgcggggtcccggcgtcggcgg

SEQ ID NO: 29527 - DNA, 703 bp, Homo sapiens
  source 1..703: mol_type = other DNA
cgtcccagcccggccatcacagccaatgacgggcgggctcgcagcggcgccgagggcggggcgcgggcgcgcaggtgcagcagcgcgcgggccggccaagagggcggggcgcgacgtcggccgtgcggggtcccggcgtcggcggcgcgcgcgctccctcctctcggagagagggctgaaaatggccgccgccgccgccgccgcgccgagcggaggaggaggaggaggcggaccgccgtggccgcgggcggggacccttgccggggggcgggggtcaggggcgggacgtggcgcgggaggggcccgcggggtcggacgacacggctggcggatggcgtccctcccccctcccgccgccgccggtggcgactctcccctcggcccgtcacccctgctcgcgggtgaccgtcctcggcgcggcctccctggagccgcccgacgcgcatcccggcccccggccccgcgggcgcccctgtcgccggggcttcgcctgtcggggctgcgcgcgctcctgcccttctcggggctttgggccgcggcgccgtcgcgcgcccgcggccccggcctctccctggatcccccccaccggcgcgcgtgcgcacttcgcctcccgtcgggagagtgcgccacaagggctcctgagctctcaccgagcgagtaggtccaccggctcctttccccatctagcaggcaagtaggtggg

SEQ ID NO: 29528 - DNA, 547 bp, Homo sapiens
  source 1..547: mol_type = other DNA
ataaaaaaaaataactatctgattccatttatatgaggttcctacagcagtgaaattcagtgaataggcccaccaagtatttgtttggctttgagccaccaccggaggcccagatggactctcagctgggagcaggtgggtgggagggggactcgccttgaacctcccattgagagcctttgttcatattaggacaaaataaggaatttgtactgggcccaatggccccatctctaccaaaaatttaaaaacttagctgggcgtggtggtgcacacctgtggtcccagctactcaggtggaggctgcagtgagccatgatcctccagcctgggccatacagcaagaccctaaagaaaagaaattcaaattcacttcatggtcctgatcttcactaactgcatgcctagatttctttattaaacgcatgtttcctagcactgtccaaaaaaaaggctgcggcttcggaaacggctgggcaaacggccgtgggacccggagccccagaacagctcccagcggtgagctgaacgcctctgcgaagcccct

SEQ ID NO: 29529 - DNA, 419 bp, Homo sapiens
  source 1..419: mol_type = other DNA
taagcttacgtgcccctgcgaagcgtggggacacagggacagcagagatggcctgtctggacactctgtcgacggggggccgtgagcaggcgctgccgtgggctgatgtgggcactgcatgtgcaccctggcggccaaaggacctacagcaggatgtgcgcagtcagtctgccccccctacactggaggaggagccccccggcacaaatctcgcccgtttgggcccacggacatggctggcctcgcaaggaggatccggttccaggcctctgacccgtgggtccacctgccccaaaggccacagcggctcccacagtcaccgccaccttcctggcggggatgggtggggcgtctgagtttggttcccagcaaatccctctgagccgcccttgcgggctcgcctcaggagcaggggagca

SEQ ID NO: 29530 - DNA, 264 bp, Homo sapiens
  source 1..264: mol_type = other DNA
attaaaagcaacaattaaatactattttctcatgtcacataccctgggaatctaaacagattcagggttttcctcccaagtagctgggagtacaggtatttgccactaagagaaacactcctgacctcaggagatctacccgccttggcctcccaaagtgctgggattacaggcgcccagccgtgtagctgggattacaggtttccagcaaatccctctgagccgcccccgggggctcgcctcaggagcaaggcccgggctgat

SEQ ID NO: 29531 - DNA, 310 bp, Homo sapiens
  source 1..310: mol_type = other DNA
cgtcctgggtagctgggactacaggtgtgcaccaccactccagaggctggtcttgacctcctgagctcaagagatctatgtacatatgtagccaggctggagtgcagtggcgcagtctcggctcagtgctgggattacagctgtgagccacccggcccgggtcctcctgcctcagcatcctgagtagctgggaccacaggtgcacactaaacagttgttgaattcttacatttgtcactttagtctaaccccacagttgacagttggggtgtagaattttaggctgggaaatcatttttccctcagaatt

SEQ ID NO: 29532 - DNA, 484 bp, Homo sapiens
  source 1..484: mol_type = other DNA
acacggcctcatggccaccaggcctgaagccaccgggcccgtggccctgcatagcggctggccatatcttgcaacacctgcaaggtgcccctgtcaggtctggccttggagtctgaagacccactcctacgtctccggcgtctgaagagcgaatggcgcctgcgagctgcggctccctccgcgcgggtgcagggtcttctttctctgcacaaaaagttccggcactagctgtgtggtgccgcacgtgtcagggggtggtgccgcacgtgtcagggggtggtgccgcacgtgtcagggggtggtgccgcacgtgtcagggggtggtgccgcacgtgtcagggggtggtgctgcacgtgggacgtgcagctgcaaccacccctcccccacaacagcccaggctatggcgggcagggtgggggtggtgagacggttggcgcctgcgccagcctcctttccttttttaaaacattctatgaggcaact

SEQ ID NO: 29533 - DNA, 355 bp, Homo sapiens
  source 1..355: mol_type = other DNA
cgagccactgtggcggaccaggcggcctgacgtgctggcacagttgcctcatagaatgttttaaaaaaggaaaggaggctggcgcaggcgccaaccgtctcaccacccccaccctgcccgccatagcctgggctgttgtgggggaggggtggttgcagctgcacgtcccacgtgcagcaccaccccctgacacgtgcggcaccaccccctgacacgtgcggcaccaccccctgacacgtgcggcaccaccccctgacacgtgcggcaccaccccctgacacgtgcggcaccacacagctagtgccggaactttttgtgcagagaaagaagaccctgcacccgcgcggagggagcc

SEQ ID NO: 29534 - DNA, 347 bp, Homo sapiens
  source 1..347: mol_type = other DNA
tgtggcggaccaggcggcctgacgtgctggcacagttgcctcatagaatgttttaaaaaaggaaaggaggctggcgcaggcgccaaccgtctcaccacccccaccctgcccgccatagcctgggctgttgtgggggaggggtggttgcagctgcacgtcccacgtgcagcaccaccccctgacacgtgcggcaccaccccctgacacgtgcggcaccaccccctgacacgtgcggcaccaccccctgacacgtgcggcaccaccccctgacacgtgcggcaccacacagctagtgccggaactttttgtgcagagaaagaagaccctgcacccgcgcggagggagcc

SEQ ID NO: 29535 - DNA, 773 bp, Homo sapiens
  source 1..773: mol_type = other DNA
ccctgccctggccacgctgggctgaggggactttccgacaggagaggaccccccgcttcagctccccccagtgccccgggtgaactggcatgaagggttaggcgggcacacgtctctgcatgcatcgcacggcgccctctgcccgcgcccactggcgtgcccgtgggcatgcccggacccctcctggagtgccggcggcctcctggcccagtgccccatatcctcccgggtggagacaggtgcgcgggcgagggccctacggactgggaaggcgggcccgtggcagggggtctgcggggaccgcgtaggcgcaggccttgccctgcagccgcttccgccctcggcagtgcctggtccggggctgccgctctccagggttggccccttcccgccgctgccgggccggcggacggggatgccgccggggaaccctaggccctgggggcccggggaaggggggccaccccaccccccgcaggggccctggggaaggaaagtcccttgtaaggcgcgccggctgcaggccaagcagtcccgcgccagacactgctcagcctttcctcgctctagggcgcgtttcctgcagcgccaacgcgaggctgcggggctgggagcatccttgcccaccccactgcccagcgacccaccctggagcccgggtttcgcgtctgatcagccgaacccgggggcgggcggggcggggtggggcaggcgcgccctcgaagccccaccccacggcccctccccgcaggaggcccgccctctggccccgc

SEQ ID NO: 29536 - DNA, 379 bp, Homo sapiens
  source 1..379: mol_type = other DNA
caattctagtaataattaatttattgggttggccagcacgtcatgccctacatgacacgtggtggggctgtgatccgcccagcacattcacttcggggcagcctgtggccccactggtttttcccactagtagtggtgttagggggtgcaaatggcattttccagtactgaagacacacctgcaccaagtgcgcctgggcgtctgggggctgggaagggggaacccatacagacccctccctgcacgggccccattcaagacgggcttgaagttgtcctcagggaaactgagtcagcctagcttttccctatttagaggaaacaaggaagatcccaccagatcgggcagccagaccctcccactgggaggtatagccca

SEQ ID NO: 29537 - DNA, 735 bp, Homo sapiens
  source 1..735: mol_type = other DNA
ccctctgcccgcgcccactggcgtgcccgtgggcatgcccggacccctcctggagtgccggcggcctcctggcccagtgccccatatcctcccgggtggagacaggtgcgcgggcgagggccctacggactgggaaggcgggcccgtggcagggggtctgcggggaccgcgtaggcgcaggccttgccctgcagccgcttccgccctcggcagtgcctggtccggggctgccgctctccagggttggccccttcccgccgctgccgggccggcggacggggatgccgccggggaaccctaggccctgggggcccggggaaggggggccaccccaccccccgcaggggccctggggaaggaaagtcccttgtaaggcgcgccggctgcaggccaagcagtcccgcgccagacactgctcagcctttcctcgctctagggcgcgtttcctgcagcgccaacgcgaggctgcggggctgggagcatccttgcccaccccactgcccagcgacccaccctggagcccgggtttcgcgtctgatcagccgaacccgggggcgggcggggcggggtggggcaggcgcgccctcgaagccccaccccacggcccctccccgcaggaggcccgccctctggccccgccgcgcgcctaggtgcctgcgactttaattaaagggccgtcccctcgccgaggctgcagcaccgcccccccggcttctcgcgcctcaaaatgagtag

SEQ ID NO: 29538 - DNA, 504 bp, Homo sapiens
  source 1..504: mol_type = other DNA
agggtttcactgtgtgacccaggcctgagcagctgagactacagtgctaggattatttttctttaagatcagaatcttcttaatactaaacaaactcaccccaggccagacctggcagcgcctgatccatggcagcatcccagggctcggagccctgcagtcccgtcccggggccctgcctgacgtaggcgcaacaatcccggcttgggacagacaccagtgcgcttggctcccccagaggatccttgtgattgggcctagacacgagccctgcagtccctgtgggcgctggaggcgactcccccacgaagccctccctcccccagggcctggcggccctcgccggcggtgagctcatctcggggggcggcgtcgcccggcggcgggtcgctggagctcacggcgtgcccccgcacccccgccccccacgcacccccgggctttctcgccgggccgggccgggcgcggggcgggcgcggggcgggggtgcggccaacaagaagg

SEQ ID NO: 29539 - DNA, 693 bp, Homo sapiens
  source 1..693: mol_type = other DNA
cgagagccccgcagactgggaaggcgggcccatggcagggggtctgcggggatcgcgtaggcgcgggccttgccctgcagccgcttcccgggcgatgcgcacacaaagcgccctcggcagcgcctggcccggggcccgcgctctcttagggtccgggcccttcccgccgctgctggggcggccgaccgggatgcggccggggaaccctaggctctggggccctgggtcgcccgctcgcacgtcccgggtccctcgcgcgcaggccccgcccaccccgccgcacgccacagggtgacgtctgggctcccagccgcatcgccctgactcccgcgcgggccccgccccccgcgcgggccccgccccctacgccgctagcatgcattagtggcgtccgggctcgcagtaccgctcgctcccaccgcgagaccttctgctccgcgcccgcgcgggccctgtgacgtatgggctcgcggccccgctcgctcccaccgcgagaccttttgctccgcgcccgcgcgggccccgccccctcccggccccgcccgctcccatcgcgagaccggttcccaccgccctgactcccgggcgggccccgccctctccgccgctagtgatgacgtttgggctcgcggccccagcctcccagctctcagggcacggccggtctgtgccggctgctcccgcggttaggtc

SEQ ID NO: 29540 - DNA, 673 bp, Homo sapiens
  source 1..673: mol_type = other DNA
cttcctgtcaaaggacggggcgcacctctccccggatgctgccccgtgggcgggtgggggcggccctgcttccccacgacccccagacgcacccggagggactcttggcccaggcgagagcggctcatgggaggcggcgcccgagacgcagctggtcgggacggtgcgggtcgggctagagatgccccggggtttcccaggccatgagtctccgtggagatttctcctcgacctcttccccggcgaaccctgggtctccaggaaacggggatacggggcatggctcccagcaaggcctggtccagcctctccggtaggggaatgggtctccccctccggcctcccgggttgacggaccgggccaccgccggggcctctagcctagaaggaggcacggagcgcgtgtccgagacccgtgcaagctcagggacactctcgcggtcgccgggaggcccacctatctcagaaatatacgtctgtcacagaagatggccagccggaagcgggcttctcgcgaccatgtggcgaagccccattcgtcagctggccgcccgcggccctggtacccggtcactgcgcatgtgctgggctacgcccgggcgcaagcgccaagagcggctgcgtctatggtcatgacgtctgaccgcgcgcagacagaccgcctatataagcc

SEQ ID NO: 29541 - DNA, 270 bp, Homo sapiens
  source 1..270: mol_type = other DNA
tctttaagataaactcccggcagtgaagggtgtgtgcattttaaaaggtctcagatatggccaaatcattatggcagccctgggctggcacatgcagccttggaggctctggcgtcagggacccccatgggttcctggcttcagccccaaaccctggctgtatatcagccttggtgggagccctaggcttccctctccggcagaaggcaacttcctcctgagccacccggccaggaagggcctggctgggccggacgccccacccttgcc

SEQ ID NO: 29542 - DNA, 400 bp, Homo sapiens
  source 1..400: mol_type = other DNA
ctcacctgagtaattatgattttttaaaattgaagccaggacgttggactgccagctccctgggtctcctcctattcagcacgactgtggccagatcacacgcccttggggtgcccggtctcgtggcatcaggcatgctcctgcgccttccccagcaactgctgactggggacccagaccgggagctgagcgacgggcctggcgagcgaagctcggggtctcactcaccccaggcttgagtgactcacaggtctgtcatgtcccgctggcccgggaaggcgggccaggcctggtgctggtcctccttgttggcggcgaggcggagacggggcgggcctgcctgttggcaagggtggggcgtccggcccagccaggcccttcctggccgggtggctcagga

SEQ ID NO: 29543 - DNA, 685 bp, Homo sapiens
  source 1..685: mol_type = other DNA
cgcacctctccccggatgctgccccgtgggcgggtgggggcggccctgcttccccacgacccccagacgcacccggagggactcttggcccaggcgagagcggctcatgggaggcggcgcccgagacgcagctggtcgggacggtgcgggtcgggctagagatgccccggggtttcccaggccatgagtctccgtggagatttctcctcgacctcttccccggcgaaccctgggtctccaggaaacggggatacggggcatggctcccagcaaggcctggtccagcctctccggtaggggaatgggtctccccctccggcctcccgggttgacggaccgggccaccgccggggcctctagcctagaaggaggcacggagcgcgtgtccgagacccgtgcaagctcagggacactctcgcggtcgccgggaggcccacctatctcagaaatatacgtctgtcacagaagatggccagccggaagcgggcttctcgcgaccatgtggcgaagccccattcgtcagctggccgcccgcggccctggtacccggtcactgcgcatgtgctgggctacgcccgggcgcaagcgccaagagcggctgcgtctatggtcatgacgtctgaccgcgcgcagacagaccgcctatataagccatgcgcaggcggaggagcgcctctttcccttc

SEQ ID NO: 29544 - DNA, 372 bp, Homo sapiens
  source 1..372: mol_type = other DNA
tcccagctacttgcaatgagctgagatctcgtcactgcactccagcctgagagggtggactgcctgagcgggcgtggcgacctgcgcctgtagtcccagctactcaggaggcactgcactccagtctaataataataaataaataaatataaaataatcagaactagctgacattgtgactgtatcagatggtataaaatactgtttcttgtattacatatgatacacaatatgtttgtatatattgctgtatatattgtatattttgccatacagtagattatacattgctacatacacatagtatcatgtagtactgtaactatgtcaaattcacggctgtcatcccaacactttgggaggccgaggccg

SEQ ID NO: 29545 - DNA, 536 bp, Homo sapiens
  source 1..536: mol_type = other DNA
ggtggactgcctgagcgggcgtggcgacctgcgcctgtagtcccagctactcaggaggcactgcactccagtctaataataataaataaataaatataaaataatcagaactagctgacattgtgactgtatcagatggtataaaatactgtttcttgtattacatatgatacacaatatgtttgtatatattgctgtatatattgtatattttgccatacagtagattatacattgctacatacacatagtatcatgtagtactgtaactatgtcaaattcacggctgtcatcccaacactttgggaggccgaggccgcctgtggtcccagctactcgggaggctgaggcaggagaatcgctttgcagtgagccatgatcccagcactccagcctgggtctggctggaccctgtgtcaaggctgccaggaagcgggagccccacggggtgacggccacttcccgccgccccggggctggcctcgctgccgtcaagcggcccgtgcgcgctttgcgacagtcggtcgggctgggca

SEQ ID NO: 29546 - DNA, 309 bp, Homo sapiens
  source 1..309: mol_type = other DNA
agtctagggcagccagggtgagctctgaagggctccagtgtggctgaagccaggacactgggcttccagtccctggcccagaacttcggatatcccaaatttttcccaagactgtggggccctggatggtagagaatgccctgtggccgttccttggtcctgctccatgatgctccctcagggatgctgcaggagccacaacagccctggggcaggctgggcccgtcccgcccagcacactggcccgggtaccccagagtcgtctgaggggcgtggccgggcctcgcttctcgatgagctcgtacagca

SEQ ID NO: 29547 - DNA, 301 bp, Homo sapiens
  source 1..301: mol_type = other DNA
gtgcagtggcgcgatctcggcccactgcaacgttcaagtgattctcctgcgtggcaacaccacttttgcaattttaaggggtgcggcgatgcgcgcctgtagtcccacttaggatcgcttgagcccggggactcgagaccacgcgtcgggtgggcgtagggttccgcgaagcctccctgcccactcggagcgtgaggagtggccgcgagtggcatgcacttggtccaattacctgcggccctgccggtcggcccgcgctggggccaatggaggtgcgaggccaacggtcacctgatctgcg

SEQ ID NO: 29548 - DNA, 440 bp, Homo sapiens
  source 1..440: mol_type = other DNA
gcagcatgaactgcaagctccatattctgcgtagatgctagaccccagcttcccagggttcgtcgtgctaacaataagaagtacacttcccaccgggagtgccgggcagaataaacgcgggtcgccgcgtgctcgcccaagctgggccctaaccgctcagggtagggaggggcggtcgggccgagtcccggtgcgcttcggcgtctcaggaggccgtcgtgacaatggcagccttcgcgtcgtgagggggccgccccaggctgccgcagcggcgcgcgcccggccgcggggccgcgccgagactcccgggggggtgggcgggggggcgggcgcgcgcggggcggggcggggcggggcgcggcgggtggggcggggcgcgcgcggctcccgcgcacggattcttcctgggccgcagcaccggccgccggcccgccccgccc

SEQ ID NO: 29549 - DNA, 557 bp, Homo sapiens
  source 1..557: mol_type = other DNA
tgctaacaataagaagtacacttcccaccgggagtgccgggcagaataaacgcgggtcgccgcgtgctcgcccaagctgggccctaaccgctcagggtagggaggggcggtcgggccgagtcccggtgcgcttcggcgtctcaggaggccgtcgtgacaatggcagccttcgcgtcgtgagggggccgccccaggctgccgcagcggcgcgcgcccggccgcggggccgcgccgagactcccgggggggtgggcgggggggcgggcgcgcgcggggcggggcggggcggggcgcggcgggtggggcggggcgcgcgcggctcccgcgcacggattcttcctgggccgcagcaccggccgccggcccgccccgcccgccccgccccgcgcctctctagactctcggcgagcagcgtcgcccgcggagccgcgctggtgctgtggcccgggccctggcagccctcccgggaggcgagccggggaggcggtggcccctgccggttgcggcggggcgcgggaagaggcgttgacgcggcggaggggtcgggcgacggccga

SEQ ID NO: 29550 - DNA, 321 bp, Homo sapiens
  source 1..321: mol_type = other DNA
tgcacctgtaatcccagctactcgggttgtggtgagccgagatcacaccactgcactccagcagggcctcctgagccaggaaggcccttagagcccatcccctaagatcacaggacagctgggctgttgctgcattgatgcagagagaaacggcgcttccgcaatgtttggaccccaagacttgacccccagactaccagcatgcgtgacgtctaccggaatgggccaggatgtcacagagtgaggggaagctgggtggtggcagccccctcgcccggcccgcccccacccattcagggtggtgggaagatcccccagcca

SEQ ID NO: 29551 - DNA, 669 bp, Homo sapiens
  source 1..669: mol_type = other DNA
cagtgagccatgatccaatgccgctacactgcagcctggaaaaatctgtctatctatctatctctccatatatgtgtttaataaaaatgggcaaatgacttgaatagacatttcttcacatcgtttgagcctggggcggtcgaggctgcagtgagctatgatctcaccactgcactccagcccgggtgacagagcggacggctgtcccgcaggccctccgggttagagaccgtcgggggcgtgtcttgagctggggacgcgactcctcggcgggggtgcacctgagaggccgggaccagcgaggccgcgccccggtggcaggtgaccccgggcgcgtctccgagcgccagggtggggcgaggcggacgcgcgccccaggcccgagggggtgtggcgcgggcgcgcgcgggttccggggtcgcccgaggcggcgggcggggagccggggcgcgggggaggcgcgcgccgcggacgcggccatcgagcgaagggggtcggctggccgggcgggtcccccttcaggtcgcgggggtcagggctgcgcgcgaggtccctggccccggggagcagcggccccgcctgcgtcccctgccgccgcgtccccctcggccgggcgtccccggacgcccccgccccgcgcggtggtacggtccgggtttaaaaggctcc

SEQ ID NO: 29552 - DNA, 423 bp, Homo sapiens
  source 1..423: mol_type = other DNA
gccccagcccctcccagcccttgcccagcctgggggagtggggaaggcttgggcatttgtgttctgtggtacttgctgagagaaaagaaaatatcttgcaaagtgaatgtgtcccccctctggatctttgacttaaagcttaaggctatcgatgctggcaccaggactgcagccctcagtgctcaatgcatcctggcctctggcttgaaaggagagggcaccggggcccagccttggctcgggttaacgtcgaggcagcgcgggaattcagcctccggggtccacaggagccggcggcgggggctggggcgggagtccacgcaggaccaggggcggtctccggcggggcggggcgggcggtggtcacgctccgggccagctggcgcgcggcggggcggggcatccgtgcgtctcctggtggct

SEQ ID NO: 29553 - DNA, 452 bp, Homo sapiens
  source 1..452: mol_type = other DNA
agctaacttttaaaatttatttttgtattttttcaagtgatcctcctcccttggccttccaaagtgctgggattccaagcgggggccacttggttaccaccgcaacatggacgttgtgccaggaagccgtccaggcaccgcagggcctcactggggcctccagggacaagggggaaggccccgccagcgcaggcgcgctaaggtcacaaggcgcgcttaggggcggagcctcgcggggtgcgcctctgggataggcgacggaccgactgtgggtcagtttgcaccagcggttacgcgcgagggcatcagcctctcaaccgctgaccgggtctcagaaggcccccggcagggccgcttggcgggaactgaccacgcgccagtcaggctctccagggacctgcgcaggcgcgtgtgggcggagtcgtgcgcaggggcgtaggacctgcgcttcg

SEQ ID NO: 29554 - DNA, 327 bp, Homo sapiens
  source 1..327: mol_type = other DNA
cgatcacggctaactgcagcctcgtcctcccatctcagcctccctagtagctgggaccacaggtgtcccagctaacttttaaaatttatttttgtattttttcaagtgatcctcctcccttggccttccaaagtgctgggattccaagcgggggccacttggttaccaccgcaacatggacgttgtgccaggaagccgtccaggcaccgcagggcctcactggggcctccagggacaagggggaaggccccgccagcgcaggcgcgctaaggtcacaaggcgcgcttaggggcggagcctcgcggggtgcgcctctgggataggcga

SEQ ID NO: 29555 - DNA, 604 bp, Homo sapiens
  source 1..604: mol_type = other DNA
gtggcgctgagcggcacctccgagatgctggccttggtcagtcagttccctgaggcctctgggtcaagccactcagaaaaatccaggcttattttttttactgaaataaaagagagaagcaagcttgggtcccttctactctttgggccagcttgggtgacacggtgacccctgcataggctttccctatcagccctccccgggggtgtccccactctgggagaggtgggaggatgagggcagaggcgtagcccccctgccccctctcgggagcgggggcgggccgtctgtgggtatgcagggccaggcgccgccagcagtcctggcgcgtgaggtgggccaggcagtccgcgggggcgagcgtaccttctgggggaggggtccgccggccagggcggtcgatgcgcgcatgctaggcgggaccccggggggactcctcccggggcgcaattgggccggggggcggggccggggcgcggacggggcaggagggcggggccgggaagcgcgggcggcgggcgcgcccctctcgctgcttccggcggcggcgggcggttccagcgcgcgcccggggcggcggcgcgcggcggggggtggttggggt

SEQ ID NO: 29556 - DNA, 598 bp, Homo sapiens
  source 1..598: mol_type = other DNA
ccccttcattgtggcgctgagcggcacctccgagatgctggccttggtcagtcagttccctgaggcctctgggtcaagccactcagaaaaatccaggcttattttttttactgaaataaaagagagaagcaagcttgggtcccttctactctttgggccagcttgggtgacacggtgacccctgcataggctttccctatcagccctccccgggggtgtccccactctgggagaggtgggaggatgagggcagaggcgtagcccccctgccccctctcgggagcgggggcgggccgtctgtgggtatgcagggccaggcgccgccagcagtcctggcgcgtgaggtgggccaggcagtccgcgggggcgagcgtaccttctgggggaggggtccgccggccagggcggtcgatgcgcgcatgctaggcgggaccccggggggactcctcccggggcgcaattgggccggggggcggggccggggcgcggacggggcaggagggcggggccgggaagcgcgggcggcgggcgcgcccctctcgctgcttccggcggcggcgggcggttccagcgcgcgcccggggcggcggcgcgcggc

SEQ ID NO: 29557 - DNA, 422 bp, Homo sapiens
  source 1..422: mol_type = other DNA
cagcctcagcactgctgggggtcacaccgtgccaccgactgggggcgacagtgagggcatcatcgtgatctcccaggccaggccaacaggacggcgcctggccccatgctcagggtcacctccctggacacagaggtgctgaccatgagcatccactcaggcctggctgggctggccccactccacatccagccgtgggcggagagacttctgcatcaaggtctcacctgctgaagaggttctgaaggggctcatgcagagcccccagcccatgctgctgggcctcctgggccagttggccaaggtcttcatgctgcccaaggccctggctctgggggcggcggggggagatctccaagatcctggggaccctgctgttcatccccatagccgtgggcgtgctgagctgctgctgcaggtcg

SEQ ID NO: 29558 - DNA, 344 bp, Homo sapiens
  source 1..344: mol_type = other DNA
agtcctccacagtatagaaactggcctacgtggctcacgaggtcaggagttcgagaccctgtaatcttagctacgcgggaggcttagccgagatcgcgccactctcaaccctggggccccagggctgggcaccttgagcggcaacgtggcctggggctccctcccagagcgggtcgccccgctgccaagcgattggtccaggcagcgccaagcgccgaccagctcacccgcaccgcgcccgcgccggcgcgtcactccccagcgagcagccggagttgagctgggggccctgacgcgcggggcggggggcttcggtggggcggggccctgacaggccgagctcg

SEQ ID NO: 29559 - DNA, 552 bp, Homo sapiens
  source 1..552: mol_type = other DNA
agggccgcgtctgcctgcggccggagaccaccccaggtccatacagccagctgggtgccgggcaccatttcacacttgttttcaagtgaaaggtttgctgtgaaagcctcgggttatagcgctaaacgtaaacaacacagaaatagtttgagacgccccgtcccattataacagccagaggctcacgctggatcctgcggtcacaaagcgcatggatcaactttggaacaggttctaattctgccccagatccatctgcagggtgcaagcgcagccccagccctctaagcctgggtaggcagggctctcccacccgagaaagggccgaggggagacttccggggcgggaccgacgtgggcccctcccactcggcggccggtgggttcagcctgaacgcactgcggaggtgaggggcgggacaggttcggggcgggacaggttcaggcccctcccatgcggcggccagcgcgagcggtagaggcgggtctggaggcggggcctgcgtggagccagacggcgcagctgctgccgggggcggggccggcgggctg

SEQ ID NO: 29560 - DNA, 538 bp, Homo sapiens
  source 1..538: mol_type = other DNA
gaaccggctcaccttgtttcagctcaggccctgcaaccgaccgaccgtctgctgggctccaagtcacctgagaggcgggcaggccgctctctcccatggtgacagggagctaagctgagctgagccggactgagctgctctcctcaggactcaggggtagccctgccctcccagctggctgcgatgcgaaaagcagttgggagcttctcatcttccccacgccctcctctttcctgaggaccacagcaggggaggcatctggctaggccagggcaaagggacctgggccatgacctgtctggatgcctgctggagggccagcgggggtgggccatcccatccccaagggtcactggggttaaggacctgcccagactccctgggtggagccctgggccttggcaggggcccagctggttcctggccactggggccagagaacctgggggctgctgagttagttcagctgaaaccctgctatacccgggggctcatgagtcaccgggaaaggggaggcgggggccgctgggtcatccct

SEQ ID NO: 29561 - DNA, 700 bp, Homo sapiens
  source 1..700: mol_type = other DNA
aagtttcggaggcggcgactgtgaacgctggtagggccccggcgctccgagaaagtcccagtttcgcggcttccggtgtcatagctgtgggatccggaaccggcgagaagtgtgaggccgcggtagggccgcatcccgctccggagagaagtctgagtccgccaggctctgcaggcccgcggaagctcggtagccgccccctcgtctctcggacggcggcgtctagcctcggggcgctcggccgccccgccctctccgggggagccggcttgacccgcgagggttcccgggggagtggcgcggcagaaggccccgcccaggagccgagggacagcccagaggaggcgtggccacgctgccggcggaagtggagccctccgcgagcgcgcgaggccgccggggcaggcgggggggcggggccgggccggcgatggggatgcgggcactacgcggagctgcacccgtgcccgccggaattggggatgcagagcagcggcagcgggtatggcaggcagccggcgggccggcctccagcgcaggtgcccgagaggcaggggctggcctgggatgcgcgcgcacctgccctcgccccgccccgcccgcacgaggggtggtggccgaggccccgccccgcacgcctcgcctgaggcgggtccgctcagcccaggcgcccgcccccgcccccgccgattaaatgggc

SEQ ID NO: 29562 - DNA, 473 bp, Homo sapiens
  source 1..473: mol_type = other DNA
cacagacatatgagatacctaaacgacctcgatagagcgcagtcaagtttggtgaacagaatatgtctctgaactccgcccaagtaacctgggtcctgaatcggcccgccttggccagtgctccagaagcgcggagaagtttcggaggcggcgactgtgaacgctggtagggccccggcgctccgagaaagtcccagtttcgcggcttccggtgtcatagctgtgggatccggaaccggcgagaagtgtgaggccgcggtagggccgcatcccgctccggagagaagtctgagtccgccaggctctgcaggcccgcggaagctcggtagccgccccctcgtctctcggacggcggcgtctagcctcggggcgctcggccgccccgccctctccgggggagccggcttgacccgcgagggttcccgggggagtggcgcggcagaaggccccgcccaggagccgagggacagccc

SEQ ID NO: 29563 - DNA, 296 bp, Homo sapiens
  source 1..296: mol_type = other DNA
tttctactttcgtacatttttgaaatttccaataataaaatgctcaaagcacgatcagtgtcacagacatatgagatacctaaacgacctcgatagagcgcagtcaagtttggtgaacagaatatgtctctgaactccgcccaagtaacctgggtcctgaatcggcccgccttggccagtgctccagaagcgcggagaagtttcggaggcggcgactgtgaacgctggtagggccccggcgctccgagaaagtcccagtttcgcggcttccggtgtcatagctgtgggatccggaa

SEQ ID NO: 29564 - DNA, 810 bp, Homo sapiens
  source 1..810: mol_type = other DNA
ggtgtacattacaaaattactcaaagcattggtgtattccgggggcatggaactgcgtgcccaggacctcacaatgacctggagcatgggagatggtgcagatgctggagttcagctccagccctccccttgccaagctgggtgaccccggtcggagtccccttcgctctcggggtctcaggggctcaagagattggttaagaccctctcgattctgctcggcaagcacaagcgtgtattttaccgccgcgcggcgcagcgcgggacagtacgctcctccgcctgcgcggcgcccgcccggccggttacctgcgccgtcgtcgtcgccctccgcgctcgcagccccgaagtgtacgaccgtttccgggggctgagccccgccggcccatttaatcggcgggggcgggggcgggcgcctgggctgagcggacccgcctcaggcgaggcgtgcggggcggggcctcggccaccacccctcgtgcgggcggggcggggcgagggcaggtgcgcgcgcatcccaggccagcccctgcctctcgggcacctgcgctggaggccggcccgccggctgcctgccatacccgctgccgctgctctgcatccccaattccggcgggcacgggtgcagctccgcgtagtgcccgcatccccatcgccggcccggccccgcccccccgcctgccccggcggcctcgcgcgctcgcggagggctccacttccgccggcagcgtggccacgcctcctctgggctgtccctcggctcctgggcggggccttctgccgcgccactcccccgggaaccctcgcggg

SEQ ID NO: 29565 - DNA, 814 bp, Homo sapiens
  source 1..814: mol_type = other DNA
ttaagaccctctcgattctgctcggcaagcacaagcgtgtattttaccgccgcgcggcgcagcgcgggacagtacgctcctccgcctgcgcggcgcccgcccggccggttacctgcgccgtcgtcgtcgccctccgcgctcgcagccccgaagtgtacgaccgtttccgggggctgagccccgccggcccatttaatcggcgggggcgggggcgggcgcctgggctgagcggacccgcctcaggcgaggcgtgcggggcggggcctcggccaccacccctcgtgcgggcggggcggggcgagggcaggtgcgcgcgcatcccaggccagcccctgcctctcgggcacctgcgctggaggccggcccgccggctgcctgccatacccgctgccgctgctctgcatccccaattccggcgggcacgggtgcagctccgcgtagtgcccgcatccccatcgccggcccggccccgcccccccgcctgccccggcggcctcgcgcgctcgcggagggctccacttccgccggcagcgtggccacgcctcctctgggctgtccctcggctcctgggcggggccttctgccgcgccactcccccgggaaccctcgcgggtcaagccggctcccccggagagggcggggcggccgagcgccccgaggctagacgccgccgtccgagagacgagggggcggctaccgagcttccgcgggcctgcagagcctggcggactcagacttctctccggagcgggatgcggccctaccgcggcctcacacttctcgccggttccggatcccacagctatgacaccgg

SEQ ID NO: 29566 - DNA, 764 bp, Homo sapiens
  source 1..764: mol_type = other DNA
tacaggtgtgcctggcacagacattcagctcccggggccgtgccgccctcacccctgcaagggcagggcaggagccaggcccgacccagcctcaggtccagcaggtcccgcctgtccacctgggccaggcctagagcccgggagcccctggctggtgggaggccacccgcaacccaccccacacgcagctccagctcccccaccaggcggggcgactagaacccaggagtgagatccggccccgggtcccgctgggccctcccgtccaccttggctggacctggcgcctgggagaccttggctggcgcgaggccacgcccaccagacctaccccaccagctgggcgaccaggacaggggctgagcccagttagaggcctgccccccggggtctgtcctgggcgctcccccaaggacggacagggcaggcagggtccgggacgatggccgcacagtcccggccccgtgttcccaggcccgtcttgctcctcggggggagacccgggggatgggacaggctgggccccgcagtgcctgactccctgcagggctcccgggacaggggtccggcggacagccggctgctcaggggtgaggggtccaagctggcattgcggccaccttccggcccgggctctcttggggaggggcggggttggtgagaaccggtcacgtgctccggggctcactcggggtctcccagggccggaagtagggcccctgtgcgcaggcgccctgaggatcccgggctgcccatccacgagg

SEQ ID NO: 29567 - DNA, 764 bp, Homo sapiens; identical to SEQ ID NO: 29566
  source 1..764: mol_type = other DNA

SEQ ID NO: 29568 - DNA, 753 bp, Homo sapiens
  source 1..753: mol_type = other DNA
ctcgccccacagacttgtgaacagggcgtggggacagacacccagctccagggcagggcaggagccaggcccgacccagcctcaggtccagcaggtcccgcctgtccacctgggccaggcctagagcccgggagcccctggctggtgggaggccacccgcaacccaccccacacgcagctccagctcccccaccaggcggggcgactagaacccaggagtgagatccggccccgggtcccgctgggccctcccgtccaccttggctggacctggcgcctgggagaccttggctggcgcgaggccacgcccaccagacctaccccaccagctgggcgaccaggacaggggctgagcccagttagaggcctgccccccggggtctgtcctgggcgctcccccaaggacggacagggcagacagggtccgggacgatggccgcacagtcccggccccgtgttcccaggcccgtcttgctcctcggggggagacccgggggatgggacaggctgggccccgcagtgcctgactccctgcagggctcccgggacaggggtccggcggacagccggctgctcaggggtgaggggtccaagctggcattgcggccaccttccggcccgggctctcttggggaggggcggggttggtgagaaccggtcacgtgctccggggctcactcggggtctcccagggccggaagtagggcccctgtgcgcaggcgccctgaggatcccgggctgcccatccacgag

SEQ ID NO: 29569 - DNA, 293 bp, Homo sapiens
  source 1..293: mol_type = other DNA
gactggcaacagttgatatggccacagccacgccagactgccatctggaacaggtactaattttgtacatggattcgcttttttaaaatccagtgtgcgcatgctgatggactccactggtgttagtgttttcattttagtaacctgcaaaattgagataataataagagtaataacgcctggaaagtgcttagcacaatcgctggcatggtgtattgttatttttacttagcgtggtcagcacactagtttagatccatcttttaaaaccttcgagtcaaagagattgcaaa

SEQ ID NO: 29570 - DNA, 441 bp, Homo sapiens
  source 1..441: mol_type = other DNA
agtgttttcattttagtaacctgcaaaattgagataataataagagtaataacgcctggaaagtgcttagcacaatcgctggcatggtgtattgttatttttacttagcgtggtcagcacactagtttagatccatcttttaaaaccttcgagtcaaagagattgcaaaaaggagtcttgccttgggtttcagctccagggtccctgagacccagggaccagcccgcagggctccgagcgggtgagagtggcaggcgccctgctgcgtaggctcccccccccacaccccccccccgggcacagccgctggcggagctgcagttgctcgaagggttgcgggcggcgtcggttccctccccgggggccgcggcggccggaggcgggggtcgcagcggccgctcggggcggcgctgggcgggcgggcgctgggcccgccccgcc

SEQ ID NO: 29571 - DNA, 454 bp, Homo sapiens
  source 1..454: mol_type = other DNA
cacacttgtagcgttacatgtgtctggcctgtggagcaccatgattttccattgtggtgattcaaggcagactacaggacactgtgatcaattagatgctgtgagcataaacgcacacaccggaaccaatgtaaaataccccattcatactgttgtgttttgcaatattctgggttaaaaaaattcattataaatcattttcacctttttctttttacctttcatgttgctgctggaaaatttaaaagtcaactagctggatgggaactgcaagcagcaagcctttcgttcactatgcatcaggactgatccgtgagcccaggcgcaggcgcggagctaaacccggaggtgaagcaactacagctggggccacgcccacagactccgggctgtcggggcgggcggcactcgcgcttccagcctgggccaaccaggctgcttgaggctcgaagcg

SEQ ID NO: 29572 - DNA, 550 bp, Homo sapiens
  source 1..550: mol_type = other DNA
accatgattttccattgtggtgattcaaggcagactacaggacactgtgatcaattagatgctgtgagcataaacgcacacaccggaaccaatgtaaaataccccattcatactgttgtgttttgcaatattctgggttaaaaaaattcattataaatcattttcacctttttctttttacctttcatgttgctgctggaaaatttaaaagtcaactagctggatgggaactgcaagcagcaagcctttcgttcactatgcatcaggactgatccgtgagcccaggcgcaggcgcggagctaaacccggaggtgaagcaactacagctggggccacgcccacagactccgggctgtcggggcgggcggcactcgcgcttccagcctgggccaaccaggctgcttgaggctcgaagcgcatgcgcggtctcgccctccgtactggccgagccagcaaatcgcattgcgcagacgaccagcgggcgcctcggattccgcccccgggatggccccgcctcctcccgccccgcggcaaggcacgcacagggcag

SEQ ID NO: 29573 - DNA, 343 bp, Homo sapiens
  source 1..343: mol_type = other DNA
tataaccttgtgtactatatatatataatatacatacatataatacatacatatataatatacatatatacacacacatatttatatatatatataattttttttttttgagagagtggcagaaactcggctcactgcaagcctcccgagtagctgggctggctgaccgcaggtgatccgccagcctgggctgggatcacaggcctgagccaccgcgcccggccctacatgtttaagtacacaaatgaagcctaggagccatacgctacaccatatacagcctaggtgtgtagtagcctatgccacctaggtctcgactgtccccgcgggcttgtggcctcta

SEQ ID NO: 29574 - DNA, 485 bp, Homo sapiens
  source 1..485: mol_type = other DNA
ctccttcccaggaagcaggaaggtcagaataagattacatgtagtgatgaactgcttctaaaggatgctaaggaatcctcctctagggttactaaggaatgggaaaaattttgtccctaagtaaaaacagtttggttttgaaggcaataagatgtttcatcatcaaacagcacacaacaattaaatgacagggtgcagcagcacagcagccttaaagcatcaatttatgtttggccagggcacccgggcggctcaggcccaacggggcgtgggccgtgtgctcaaccacccagaagctgggggccccctcccctttgccctttaagggccgcttctcggagcgcagggagccgcggagtccggggcgtgggagaggcaggagtgggcgggccgtaggcggagctccgtccgcgccctcccggcgcaccgcctgcggggcggtgactggcccagccgcaccgcgtctcccgccttctccgcagccc

SEQ ID NO: 29575 - DNA, 906 bp, Homo sapiens
  source 1..906: mol_type = other DNA
gctccggcagcagcttggcgggcggtggttgcaggaggagcagcacctcgcagcggaccagcacgtccgagaaggcgcccagggcggcgggagagggcgccgccgagccggagttcggaggaagcagcgcggccggtagggcgggcgtcgccccgggcccgggctggggtgccggcggcgggggcggcggcagtgactgcaccgggtggctgccgtgctcccgcgccaggcgctgcatgcgcgtgaagaccgccagggcgccggtgtagtcgcgcgccagcagctggcaggaggcggcctcgccaagcgcctgcagcgcggccaggggcagctggggcagctggagctgggcggcgcgctggaagtgaccggcggcggcggccggctggcccaggtcgcgcagggcggcggccagctcgaggcagagggcggcggcggcggccggctggcccagctcgaggtgcagacgcaccgcggcgcccagggcgctggcggcggcctgcagcggctccccgtaggcggcggggcagaccaggcgctggcgcgcgtcgcgctcctgccgcaggaagaggcgggcggcctcggtgagggccagcgcctccccgggcccgtggaagagcgcctgctggcagcgcgccaccgccagctggcaccaggccgcgtagggcagacactcctgggcgcgcagctcccggcccagctgtccgaactgctcgccggcctccgcagccggtagcgggccaggaagtccccggcctcgggtcccgggccggcgccgccgccgcccaggcctgcagccgctgccgccatgctcgccgccccaagcacttcccgacgcgccgccgcagctggcgggcgggccggggcggggcgacgtgccctgcgtccccctcggcgggctgccgc

SEQ ID NO: 29576 - DNA, 342 bp, Homo sapiens
  source 1..342: mol_type = other DNA
tacaacataaatgtggtgttccatatttaaacctcattcaacaaccatgtgggatgctctaggacctaggccatggtatcgctttatagttttaaattataactataaattatagtttttaaaacaatagttgcctaacctcatgttatatgtaaaactacagttttaaaaactataaattcctaggttgctggttactcttgctagtgcaagtgaattctagaatcttcgacaacatccagaacttctcttgctgctagcacaaattaaagctcctgccttaaaggttctgattaaagcagatctcagaagtgagggttatgcttcccactgataaaaagg

SEQ ID NO: 29577 - DNA, 519 bp, Homo sapiens
  source 1..519: mol_type = other DNA
gaaaaatttggaacaccaagttttttggaataaacactgttaaagggctcctcaggcactgccatagaagctccacaatgttttaaaaatgtgtcttccagacaaatacagtacaatccaacatgtttgaggttctacagttaacagattgtataattaataatctggaatgttaatcaggaatgaaatacaatttaaaaattaacaaagttccagttgattgaaaattttatctattattgctaaattttaaatcaaaatatgatcacgaggtcaggagatctagaccatcctagctgtcccagctacttggatcgcgccactaaataaataaataaataaataaataatcaaaataaaattttcatgttttcaaggattctctaaaacctacaatattatcaattacatattcacaaataattactgaatacaatatggtatgtggtaaagtacaaaggagtactgtggccatttgtgataaatagaaatcaaattggaaatcttcatagataacgt

SEQ ID NO: 29578 - DNA, 470 bp, Homo sapiens
  source 1..470: mol_type = other DNA
aaattttcatgttttcaaggattctctaaaacctacaatattatcaattacatattcacaaataattactgaatacaatatggtatgtggtaaagtacaaaggagtactgtggccatttgtgataaatagaaatcaaattggaaatcttcatagataacgtattttttctttttggctggagtgcagtgtcgcgatcccgagtagctgggggatggcctgagttaacttcatttgtgtcactcctaaagcagtggatcagatgtcaatgtttattatcattcactaattacatttatgaataatttttaaaagtaaaggaaaagactggctgttttaactaacataatagaaactgttgctggattttttgaagtgagttttattaagtataactcgcatgtaaaattcaaaagaaaaattaaatacataaataaaatgtgtcttcctatttgttcaatgtttacatggt

SEQ ID NO: 29579 - DNA, 467 bp, Homo sapiens
  source 1..467: mol_type = other DNA
cccgagtagctgggggatggcctgagttaacttcatttgtgtcactcctaaagcagtggatcagatgtcaatgtttattatcattcactaattacatttatgaataatttttaaaagtaaaggaaaagactggctgttttaactaacataatagaaactgttgctggattttttgaagtgagttttattaagtataactcgcatgtaaaattcaaaagaaaaattaaatacataaataaaatgtgtcttcctatttgttcaatgtttacatggtaaaatattcttcacggattgagtcgcagtcgcgtcaggaactcgcctccagcgagcgagccccgacggccgcggtgggtggacgagggagggagcctcacccccgggacgctttctgcgcggcgggaccgcggggcctgtgacaccgcacgctgagctctgtgatgtagccgcttgcggagactgcaagcagc

SEQ ID NO: 29580 - DNA, 417 bp, Homo sapiens
  source 1..417: mol_type = other DNA
tcagtcattggtcaaacactgctaagcactattttatgagcccacaaaatcaatgatcacagttattatgtgatcatcactgtgataacaattgaaactaacctcaaaatttctcacaacaagagcagtctgctcttataaaagtctataagagcagtctgctcttataaaagtctataagagcagtctgctctgcaggaaaatacataattatcaatttgacattactgaattgtgatagtataataaaacatggtaaataataaaagtgatgagtttttagtattttcactgcctttgtttttaacataatttacgtaattttacgtttatatgattgagttttctcagtactaaaacttaaagacgtgctccactgcgaattactcccatatgtgctagtttttcaaaaccaac

SEQ ID NO: 29581 - DNA, 579 bp, Homo sapiens
  source 1..579: mol_type = other DNA
tactatgacccccatttcataaaggggaaaacagacacacaagttatgtaatttgactagggtcacagtgggaatttgaacatgtactccattttagtactgggggactcattaactgcagctgacctagagtctttaggtcaaacaagtaatattttaggctttggaggccaaaggcctttgttgtatattatgtgttgtgtgtttacaaccctttaaaaattaaaatccatttttagctcccagctgtaaaaaccggctgaatttgaccctaaggctgcagtttgccaattatcagcttaaactgtatgcaaaataatgtgtggtgtatgtgcattttcctaattcatcaaattagtgaccagtaataaaaatgatgttaaaaactgcatacatgctattaaccttaaaggaaattatatattaaaatagctttcaaccactttgtaaatcataacctgtcgacaggtctctaaattagaaagaattcagtggactttggtatatcttctttcttccagttccataggtactgaaagtgaaaaggggtgggaagcactgatctaaacctccctgtac

SEQ ID NO: 29582 - DNA, 586 bp, Homo sapiens
  source 1..586: mol_type = other DNA
ggatgcctgtggcctccgcagccctgggagctgccggcacccaccccggggacccttctctgtgctcagagcgtggttgagagtccgcctcgggcccacttggtcctgaccaaccgggtgctgcggcgcagcctccccagcgcccagcgctgtgcgctccgcccaggcctggccttcggcgcgcgggttcctagggggcggggcttaagggggcagcgggcgcgcggctggcgcgcgggggcgggccttggggcacgggggcggggcccgcccagcagcacctgggaaacgcccgcgcggtttggggcaggcgtggccgtcggggcggagggcggtggccggccgcggtccgggcgtcaggccgggcggcgggggcggcagggaggcggcgctctggggccgcaggcggacgtactctgtgagcggcgcccgggcgcctgggcaggcgcctcccgagtaccggcgcccattttgcccgcccgctaaggagacccgtgcgcggcctattgggccgcgaacgccggcctcttgagccagggggacgctcttttgaaagtcagtcccaaaacagttaaggttttatttt

SEQ ID NO: 29583 - DNA, 443 bp, Homo sapiens
  source 1..443: mol_type = other DNA
gagggcaaggctcccggggcctgtacagaccgccgggggctcgcaggatgcctgtggcctccgcagccctgggagctgccggcacccaccccggggacccttctctgtgctcagagcgtggttgagagtccgcctcgggcccacttggtcctgaccaaccgggtgctgcggcgcagcctccccagcgcccagcgctgtgcgctccgcccaggcctggccttcggcgcgcgggttcctagggggcggggcttaagggggcagcgggcgcgcggctggcgcgcgggggcgggccttggggcacgggggcggggcccgcccagcagcacctgggaaacgcccgcgcggtttggggcaggcgtggccgtcggggcggagggcggtggccggccgcggtccgggcgtcaggccgggcggcgggggcggcagggaggcggcgctctggg

SEQ ID NO: 29584 - DNA, 346 bp, Homo sapiens
  source 1..346: mol_type = other DNA
aaaaaacattattgatcacattacgtttgtttgacatatatgggattatatgacatggagaattactttagactgtaaacagctaaactgtattgagggcaaggctcccggggcctgtacagaccgccgggggctcgcaggatgcctgtggcctccgcagccctgggagctgccggcacccaccccggggacccttctctgtgctcagagcgtggttgagagtccgcctcgggcccacttggtcctgaccaaccgggtgctgcggcgcagcctccccagcgcccagcgctgtgcgctccgcccaggcctggccttcggcgcgcgggttcctagggggcggggctta

SEQ ID NO: 29585 - DNA, 656 bp, Homo sapiens
  source 1..656: mol_type = other DNA
gaacttgaataaaaactgaagttctccaagagtgatactttttcagatacagtataacactgtttctgcaaaaggttactcacatgaatataatgtttcttgggctaattcaagccaggatcgcgacgtgagcccggggtgagccgaggggcatcccgggccgaggtcacaaaataaaaccttaactgttttgggactgactttcaaaagagcgtccccctggctcaagaggccggcgttcgcggcccaataggccgcgcacgggtctccttagcgggcgggcaaaatgggcgccggtactcgggaggcgcctgcccaggcgcccgggcgccgctcacagagtacgtccgcctgcggccccagagcgccgcctccctgccgcccccgccgcccggcctgacgcccggaccgcggccggccaccgccctccgccccgacggccacgcctgccccaaaccgcgcgggcgtttcccaggtgctgctgggcgggccccgcccccgtgccccaaggcccgcccccgcgcgccagccgcgcgcccgctgcccccttaagccccgccccctaggaacccgcgcgccgaaggccaggcctgggcggagcgcacagcgctgggcgctggggaggctgcgccgcagcacccggttggtcaggacca

SEQ ID NO: 29586 - DNA, 339 bp, Homo sapiens
  source 1..339: mol_type = other DNA
attgccagctataaatctgtggaaacgctgccacacaatctttttccttcatgacacggtggcaccttccagcaggtccccggggttgtgcccctggagcctgctctgtgcgtttatgggagccgcgcccaatctcaggaggaggctctgtggcctccagaaggaaaatttccccttaaggaaggttggtgagcagtttaaacctagcagttttgcattaattcacataaagtataatgaaagctgaaaagtctccttgaactgagttgggcaaaggtggggccgacttaattcttccattccagggtttctgggacacccgagaaagcacgcagggcc

SEQ ID NO: 29587 - DNA, 293 bp, Homo sapiens
  source 1..293: mol_type = other DNA
atatgacgataccaatttttcctcatattatatctaaagacatatctatgtctatatgcttgatcgtacatgaagagagacttactttccattgcgtaattcttgtagaatttgtgcaagtggatgaagcactgcctcactgggaaacactcattagaatgaggccagtgaccactctgccttcaaggggcaagctcccttgaaccctcgtggctagtcccaagacctagcagggttgggctactttcggcaccaatgaatgtgcatggagatggagaggcacggaatcccgg

SEQ ID NO: 29588 - DNA, 498 bp, Homo sapiens
  source 1..498: mol_type = other DNA
cgagatcgcgccactgcactccagcctgggcgacagagagagactctgtctcttgtattggagaaatgtaaaaataaagcaatgagacatatttttatttaactaaattctattgagaagaattaagaaagaataaaaaatttaaactgttaaatagttttggaaagtagaatgcccatgtccgttaaatttaaaatacttatactctttgaattcatggcaagactgtagctcacagaaataaaatacttgtggctacactttaaaataagttatgacaaaagaaagatatttatgttgctttattaattgcaaaaagcaattattaattgaaagtaaggccccagtttaatttttgtaaaaacaaacagcaataaatgcatataggaatacaaacacatataatatttgtgtgtttatgtgagcatggaaacacttgtagactaatatataattatgtgtttcaatgaaaagggcgtcgcgtctacgcgggggatt

SEQ ID NO: 29589 - DNA, 388 bp, Homo sapiens
  source 1..388: mol_type = other DNA
acaatgtgcatgtacacccatagtggtgcccaactgatagacagactggttttactgctgttcccagggttgacaagcagaaatacactggttgcatttaatgaagtacaattttttaaccctcttttagacagtatcactggataaacatccttttcaataataaaaatccaagtcatttctggcccttttcctggaagtgctttcaagttacaggaacaccaataagaggcccttttctgggcatggagcccaggtctcaaagggaggctctaaacatctggtctgcttgatatatagaaactagcactgcatgtgtgtgtttccctccttgatttaaatgttagatcacgaggaagagctgcacttaagcttgagagaagagact

SEQ ID NO: 29590 - DNA, 911 bp, Homo sapiens
  source 1..911: mol_type = other DNA
gctccggcagcagcttggcgggcggtggttgcaggaggagcagcacctcgcagcggaccagcacgtccgagaaggcgcccagggcggcgggagagggcgccgccgagccggagttcggaggaagcagcgcggccggtagggcgggcgtcgccccgggcccgggctggggtgccggcggcgggggcggcggcagtgactgcaccgggtggctgccgtgctcccgcgccaggcgctgcatgcgcgtgaagaccgccagggcgccggtgtagtcgcgcgccagcagctggcaggaggcggcctcgccaagcgcctgcagcgcggccaggggcagctggggcagctggagctgggcggcgcgctggaagtgaccggcggcggcggccggctggcccaggtcgcgcagggcggcggccagctcgaggcagagggcggcggcggcggccggctggcccagctcgaggtgcagacgcaccgcggcgcccagggcgctggcggcggcctgcagcggctccccgtaggcggcggggcagaccaggcgctggcgcgcgtcgcgctcctgccgcaggaagaggcgggcggcctcggtgagggccagcgcctccccgggcccgtggaagagcgcctgctggcagcgcgccaccgccagctggcaccaggccgcgtagggcagacactcctgggcgcgcagctcccggcccagctgtccgaactgctcgccggcctccgcagccggtagcgggccaggaagtccccggcctcgggtcccgggccggcgccgccgccgcccaggcctgcagccgctgccgccatgctcgccgccccaagcacttcccgacgcgccgccgcagctggcgggcgggccggggcggggcgacgtgccctgcgtccccctcggcgggctgccgccgtgc

SEQ ID NO: 29591 - DNA, 210 bp, Homo sapiens
  source 1..210: mol_type = other DNA
agcacatcatagatgatctctgccaaacagctatctggttcttttagagggagggcgccgtgctttcatgtcgtggctttttagaagacagccatagccaacgaaataattcctatggcggcagtaggaacatgaggtggtactccctgtcctgaggtcttgcttctgctgagcagcagaaagagctcctcgggaagctggccgctgctc

SEQ ID NO: 29592 - DNA, 500 bp, Homo sapiens
  source 1..500: mol_type = other DNA
ttcatcacactggttatgagataaagtataagttttttaagccttattataaataaccttacttaacgttgtgaaaattatagtattttgcaaaatatatgttcaccattatcccaaaatgttgatccataatgtttatagtccttctttgtctttatagttaatgtaaaataaactgtatgtaatttttactacagtgtgtcactactactgtaagatcaagtttttctttcataaagcacgcaactcatttatcatgagacttttgctaggcagtgtactatgtccactcaacacacatcattttaggcaatcatctggttaaaacgtttaatagtatggcattcacaaacccattcttcagagttgacattcaattaatggtttgaaaggcttttccattgttttcggaagagaaagaaaactgcaagatcttgcagacagctgagttccaccttccactctactgccgaacaaagtgaggcagattgaaacaatgt

SEQ ID NO: 29593 - DNA, 357 bp, Homo sapiens
  source 1..357: mol_type = other DNA
ttttctgctctcaagaagctacttattcattacaaaccaattttattgcttttttgacattagattaacacttttaatctcgaataaatataatactgcacaatttcccattttcagtatatatttggatttccattgcatatactatttatgggtacttctaggaccctgggttcaaggacttccataaaatggtggaaaggtagtagaattttacttctagtaaacctggataaactaccacctatagcttcaagtatgttcactaaaggcgattgaatagaccagtccttccgctgacgccctagcaccgggcgaagtcccgggcgccagaggcacccaccctgcacggccgga

SEQ ID NO: 29594 - DNA, 148 bp, Homo sapiens
  source 1..148: mol_type = other DNA
actcaataaatatttgttgttgaatgcatgccatccaaacaaaggagaagctctttctcttcatcttattgaagtgattggcaaagatatttaaatgagacctccttaaaaaatcacacactggcggtatctattgctccgttgagat

SEQ ID NO: 29595 - DNA, 283 bp, Homo sapiens
  source 1..283: mol_type = other DNA
tgagccgagatcgcggcactgcactccaaatacggtaatggcttaaaagtatctatttgttttagcaacactgttgagaattctagaaagaccactatagtcgtttattattattattattgcaaaaagaataggagaatgttcctgtcagatgaagactaagcaggaactcccagaatgcagtacggctcctgggaaggctgggaacgcagcaggcctagccgtgtcgcctgctgccattggaggagcgctcccactcccaagaggccacgcgtagacgggg

SEQ ID NO: 29596 - DNA, 317 bp, Homo sapiens
  source 1..317: mol_type = other DNA
atcttaacacagatgctaagattctaaacaaatccagtaaattaaatgattgtataccataatcaaatggaatttgtcttgaaataatttgatgatttattataagattcagatgcttagtacagcggtttgagagcctggccaacatactgtataagagtaagggctctcttaaaatttaggcgtttacagttaaatgacccacgaacttctgaaactggaagaccgtaggagaatactccagcctcagccgaagggccagctgcgtcgccttttggtgacgccagagagtgcgcgtcagcagtttattagagagc

SEQ ID NO: 29597 - DNA, 521 bp, Homo sapiens
  source 1..521: mol_type = other DNA
gtttacaaacctttatgttaatgactcacatacattaaaatagaaaataaatgaaaaaaaatagtatgtcttctagaaatgaaagaagacttatcagttttagatgactgactcttctgtttacagatttttaaaaaatattttaagttctgggggaacgtgcatgtttttgctgcatcatcaacccgcccacttatgagtgagtccctgcaaaggacatgaactcatcctttggccgcggagggggtccccttagggtgggccgtctcctcctcgcccgccgcaggcaggagcgcgggggaccgcgtcaggcagcgggtccgcgcccagcgagcggctccccagctcctgggaggatgcggacccgggacgcccccgtgagctcactgcgcctggctgacacgaggcgctcacgggcttcggggagggcgcggccgcggggccgagcgcgcagatcgctccggaccgggacaccgcctgcgaggagcgccgaccagccgggaagggttcgcgctaggcgg

SEQ ID NO: 29598 - DNA, 332 bp, Mus musculus
  source 1..332: mol_type = other DNA
gctttggaagctaaattaggttcaggtttggatgccacactgggcatcctgggaagcagtcctacccagtttgctctctggagagagtgcaagtgctctgctcacagtgacaggcaaggcgaggattgcctttctccaaggaagcccgtcttccctataaaaacccaagccatatttgaattgtctttaaatttcaaggaagaggacaaagaaatgtagtcagccttacttcgtcttggggtatgggttctaagaaacattcccgaccggttagctgggaagtggagcgggagcagtttacttcctgcttcgccgcggacgagtcggagccc

SEQ ID NO: 29599 - DNA, 550 bp, Mus musculus
  source 1..550: mol_type = other DNA
ggaaagtactttcaggtttaaaataaatttaagggtggtcagcttttcattccagtcttaagaaaaccgtctgtcaggcaatggactgatccttttcctccgaggaacagcacagtgctctttagaaataaaaccagatcttgcctcttttgccgaacacacaaaaggagcttttgttttatattttttgagcagtgatatattagtgatatagcattttatgttaaactttgttttattacaacttgctatttaccttggatatttttattataatataagcatgatggatgagttcttgggagaagaacaggattttttttctctgaaaaatcatgctaagttaattaccttcggtaatatttttttaaaagaatggaataaatacctatacctagtatgttgatgtgaacaaccttggacttgtgaggtcttggcgccagcgcccggctccagccagttttccccaaggcacggaccactggctgggcgggggcctaaggactagggtccggtccgcccccgcctcgccattggccgccataaaagg

SEQ ID NO: 29600 - DNA, 492 bp, Mus musculus
  source 1..492: mol_type = other DNA
aaaagggtatactgtaggacacactgtgacacacgacagcttcacgatgaggtttcctaaacttattcacaatgaatcaataaaataaaaataaaggtttatttgagttagaaacagctgcttattaaattgtctcacactatataactgtagagcttggtaggaaaaagaatataaaaatgaacacattgttttctatattacttgtattaagacaagttttaaaaatcatttaatttggagagttaaatatatgtttggcagtttaagttcattagctttgaatcctatctatataggttgaacctaattagacaattaattctagagccaggcactgtaacagttgaattaccagagtctcaaagcttgagccccacttttaccgtacagcgtgttcagtcattacagacatcaacggtcgctctgcagcacgacaggggcggggcagtacggccgctgcagcgcgacaggggccgggcggagccgtaa

SEQ ID NO: 29601 - DNA, 403 bp, Mus musculus
  source 1..403: mol_type = other DNA
tcccacctgcggaggccccaccctgcctcgcacccacctcagcatccctggggctgctctcgccttatcccgagggctcctgcaagtactgtgccacccaggatctcgctctgccacgcccgcttgtgtccgtggctgttgccctccgcgtccagcactggccagccactccttctcgcccctccccagccggggtgggagcggcggcagctggaagggaagggatgaggtcatcctctccctcggagtcagctggtggaggagaggaggtccgaggagctccgcggcggccgctgctgctcctgctgctggcggcggcggcggctcgtgctgcagccgcggggccgggccggcgcggagcgcgggcggctgtcaggggcgcgcgcgggccggcgcgagcagc

SEQ ID NO: 29602 - DNA, 334 bp, Mus musculus
  source 1..334: mol_type = other DNA
aaaaggatgattcagagtcagataattttgtatcagcagcatactttttttttacataaataaatgaggtatacctaataaaaaatttttgctgaaaggaccctgatataggaggggtttgcaaccctataggtcagcagttgagtactttctgcagaaaatgatgcccacaaaagagacaatctaataaggactcttaatagagagacttcagggctgtggcacccttgaggtgagctacttcgattaacatcaccttggattaaattaattggctgtacttaatctgtgagcacacatgctataataaatccaaagacatttgtttacgtga

SEQ ID NO: 29603 - DNA, 531 bp, Mus musculus
  source 1..531: mol_type = other DNA
tatccaaaatcaaaataatggagactttcaaaggtaggtatatttactctgctatactgcacaaaatctgctttgtatagctcaactatttgtttatacaattgaaaattgagagaccatttgtaaataacaaagcttgaggccatcctcagatgaggaattcagggaaatggtcctgacccccatctctttgtagtatttaatatgtaataaagcttgctttgttttgttttttttgtaaatcacaggattaacacatgaatattcatagttcttactacagctataaggcctctgaattcttgaaaggcagaagaagttcttaattaaagaaagcaggttcaaccaatttgcttatttatttttttgaaagtaattacttcaaaattgaataaaatgcttctttgattccatgccacactatatgacatgccacaaaatatcaaagtgggttatttaatctgctgttcctttcttagaaggagagggctgtacttataacaactgctgtagggaacactgttgacaatg

SEQ ID NO: 29604 - DNA, 644 bp, Mus musculus
  source 1..644: mol_type = other DNA
aaagacagttgtgttttcttttaaagtcacaaagaaaagacctaacagtttgactctgcctggtctgcaatgtgagttccaggacaaccacttgtgaatgttatcaatttaacatttttgagaatgtttaaacttttcaatatttaagggcaagactgatttaaaaccgttttgaataagactccaaaatctctcaggactagattttcctgtgtaatttaattaagtcttttagtctttaagtcttagcaaaaccagacttctgaaggtcatgacattttgaccttatatgcaaaaattcagcgctgtgcagaagggtggcgattttgccccgtgttcaaaacggctatatttcaatgaatacctgtcctttaccccgcctagccgcggtcccagcagcggtccctgctacctgccgctggtccaggcactgcgggcgtggatggacagcgagaggttagcagcggcccgcactgctccagcgcggtgcgggaaggctcactatgacgcgcacgcgcggccgaatcggggcgcgagctcggggccgaacgcgaggaacagtgcagggcggcgcgggggcgcgcacgcgcctgagcgcgcgcccggaggggcgggctgggactttcggctgccgggagcccgag

SEQ ID NO: 29605 - DNA, 517 bp, Mus musculus
  source 1..517: mol_type = other DNA
accagactggcctcaaaggcgtggggcaccactgcctggtgttgtctcctctttattacctcacaaggaaataaatggtactgaaccatttactttcaatagaaactgattagtcaaagtggaattcactgttaccatactttatttgatcttaagtttaaagtgtgaaaatgcacattacaaatgtttaatttgacacgacatgtgttttagttaacttttttcattggaaagaagatattttgagtcttaaaagtctgtaatgttcattggctcctgatttattaactttcaacacatggaacaaagtaaaaacaatcccagacactatacatgtcatttttttaccgtgtcagtgcccctcggcgcctgtcctgcgtcccagagaacgctctgccggaggggtttcgatggaactcagccggactccgtccaactccagctcgccagcaacgcgagtccggatagggccggaagttccagactgcgcgcgcggtgcttgactggcacggcctag

SEQ ID NO: 29606 - DNA, 367 bp, Mus musculus
  source 1..367: mol_type = other DNA
atgcccacctgtggacatgatgtacattatgggaaaggacccagctctggatccccaagagcatctttctcttagggcctcttccaacagattctgacagggacactgtcaatattttacacatagttgagactgtttctcacaaaggtttgaattggcaagaacttcatggctatctcctgctggtaatagcaggcaataatattagtacctgtaagtacagtgttcttgcaacctgcccattaatagatcttaacccactaattctatatgatctgtttgattctgacaagattatttggccattttatttgtatccttcaataaataaaattcagtgctagtacagggccctttcaggagcagg

SEQ ID NO: 29607 - DNA, 333 bp, Mus musculus
  source 1..333: mol_type = other DNA
ctataggtggatcaacattgacccatataaaggcaaactttatatgccccaggaaaatacctaataaaaatattaaaaattaaaagattgcaagctctaaattcatagactgtctctgttcatcatatgagaaagaagttaggtaaacaatgaataactttttctgagacatgtattactggtgggtctacatatacttataccatgggtctatgattcatttctcagtctgagtcttatgcttaaaatcggagtatgaaaaccaagcttcttcaaagatttttgggccacggcttccgccctcagctgcggtcacgtgcggctgctcacgtg

SEQ ID NO: 29608 - DNA, 390 bp, Mus musculus
  source 1..390: mol_type = other DNA
actacgatcaaaataaatttaattttaacattgatttaaataatgatacatataataaagaaataaaacatactgttcttcaaaaacaggatattattttttttaattttataattccagatgaactgaattaaaaactcctggagagtccagcagtagtctctgggcagacaacaggagacagactaggctggcaggcatctcattgctgctgcagcgtcctccagcagacagcctccccaggaaactcagatctttgctgggactcgccaggtaagataaagattgcatagcactttgatgtattcagtggactggaatctgatttccacgagagaagagcttgggacactgtagctactttctttcaattctgtctccagccttgga

SEQ ID NO: 29609 - DNA, 263 bp, Mus musculus
  source 1..263: mol_type = other DNA
gtggtatctgaagacagctacagtgtacttacatataataaataaataaatctttttttaaaaatgcagttttgagaggaaatggtgacattattagtctgatcacccttggtatgtctgagacagacattctaaattggctaactaatttggccaaattctttggacacaggcagaatacatgggagctgccccgagtgactcacaaagaagaaactatactcactcagtaagcagatctaactactgatccacagaaggga

SEQ ID NO: 29610 - DNA, 432 bp, Mus musculus
  source 1..432: mol_type = other DNA
gagacacacaggtctctttgaagagaaatttccccctcagttatgagagggtaattaataatcaacatgttgatatgtatacttaagtcaggcagacaaaaaaagtactgcttcatctaagactcttgattttaaacgaatgaatttatccataattatagatagatagatagatagatagatagatagatagatagatacatagatagtagatagttagatagatagatagatagatagatagatagatagatagatagatagataatcgacagaggtagttgtgcccggtcctggccagctctgtggcattgcggagctcatgatccaagagctctgcaccccgttgctttcgatcccatggaccccacatcctgaagccgaggaaaagatccccccggaagctgcgtgagctccggagggtcctgtgtc

SEQ ID NO: 29611 - DNA, 443 bp, Mus musculus
  source 1..443: mol_type = other DNA
tgtaatgtactaaaattccagtttaaaaaatactcaatatgtataacagtgcttaaaacacaactactgtttttccagtgtctatcacaataaagaactgcagatctcttttacctctatcagatatgggaatagtaatttaatgatgagccgcttgtaacaaacttgcaaagatgccaggcatactttccgagtagcctgccattctggcagtccccagtcggctgatttcggggcagcagatgagggccccagatctgtgctggtgctcactgttggggctgccccaggtttggcgaggtcggtctgccgcggccagaaggtcacgctcaccttggggccgtccaagccagggactacgctcgccgaccgagccgcgcccgtccggccagcccagcgacttccggatctgcgcagacacctgagtcggctgtttcccggcg

SEQ ID NO: 29612 - DNA, 242 bp, Mus musculus
  source 1..242: mol_type = other DNA
cagtttggtgatgatgataataataataataataaccccccccccttttgatgtggtcaatagaaacagactctgcagctaccgataccctttaggtagaaggaactttttgggaaagggttactaaagaagcccaactccaccttatcaacagaccccctgaaggctgtgccactcagtgccagctccatagccatcactggaccactggggatatgactgtggaaatgagttctaacaca

SEQ ID NO: 29613 - DNA, 281 bp, Mus musculus
  source 1..281: mol_type = other DNA
gaatggaaaaatctatggaatattcccttgtagtctgtaataaaactgacagccagtcatggaaacaggctctgtgcctgaacccagagactattctgtgtgccttcgtgagcttctgtgaagcaagcgaattacacctaattacttcactgaaaataatttccaggtccctggctttagcaccacttccattacatatattttaggttgttgttgccgatctgctgcagaggagtgatattccatctcatttgcatgattttgggcccagagccgaaaca

SEQ ID NO: 29614 - DNA, 159 bp, Mus musculus
  source 1..159: mol_type = other DNA
cagggaagacatcccatacctggcatgcagggaaggaacattattcctcatggaggttaatctattggtgtgactagacaccatgaccatgatcatggcaggaagcggcctggcttgggcatttaaaatcctaaagcccactcctacctataggtttga

SEQ ID NO: 29615 - DNA, 481 bp, Mus musculus
  source 1..481: mol_type = other DNA
ctgaaagtcagaccatcgcataagttaactttagttttcaagtgattggaactgtagtgtagtacaagtgctggggttacaagccaccacatctggaacgtgcatttggttacaaattacagcattgggaaagcagtgtctttttatgtgctggaaacaaacaaacaaacaaaaaggaatcgacatgtttactgacaccgacacaggcaggggcttcggcgtggaccaagaaggcgtcagctgcgcctgcacagggggcgacgcatgcaccgccgccagtcattgggtgcgcgccgggtctgcaggcatcctcccgaccggaggcggagctggggacggactgagtcaccagaccctgcgctcccgaggagccccagctctcgcggcatccgcgggagctgccagccgcttgggcaagcctcgcgacccagctgagggtgggggtgtctcggagggcgccccgcgcacgcgcagctcccag

SEQ ID NO: 29616 - DNA, 546 bp, Mus musculus
  source 1..546: mol_type = other DNA
acaaggaggtaaaaatggatcaatttgcattcttctatatgctaacttgcagcagctccatttgttaaaaaaatgctttctttttttccactggatgatcaaccatagtccagggaaaatgtacacattctgagaaactgaaaattccagtcatggctatgatacccagcaaaattatcaattacatttgatagaaaaagaaaaacatcccacaataaaatcaatgtaagtaaattttttctgctaatccggctttctgtacagaagacattaggcatcaataaacactttttactgataactatcaatatcaataatgtcaattacttaataaaaaggtacagacccaagtgtgggcctagcagaaaatcagagactgttagtctgatttactcatagtgacatgtcacaatactcataaatcagtgccttactcaggcatcatctgagaagcaccttcttgcagtatatgggatctaatacagaaatattttataaaaattaaaattgtaaacaagcaatttattagggaatatttaattaata

SEQ ID NO: 29617 - DNA, 628 bp, Mus musculus
  source 1..628: mol_type = other DNA
ctctgagtgctcttgagtatttttatttaaaatgtcgccaggcaggggtggcacacgcctttcatcccagcagctgagttcgaggccagcctgggctacactttttaattttatataaaaatcacggccgcccgcccgtgtctctgcagacgcgtctctgggggccccaggtggcccggcgagtggacgtcatccttccctgggggtcgcagtcccccacccacggcgggcaggcgggcgggcaggaaggcgggtgggcagctcaccgccatctgtgaggggagccgaggcgccctctgctggcctgtgggtgtcatggcggtggcagggcgcgcccttccgtttcccaggacccccacgagtgggcggggagggcgtcggcgggggcggggcctggggcggctgcaggcatcagcggcggcaccgccccctcggggtgattgacacgatggaaggggaagccgggccccgcccaccgcgcggcgtggacctgaagcctctgtattcctttatagagggaaaaaaagcctcagacactgcctcttgtcagacatgagccttccattggaaggcgcggctgtcagtcacagccgggcgggcgggacttctggcgctatccctgctcctg

SEQ ID NO: 29618 - DNA, 570 bp, Mus musculus
  source 1..570: mol_type = other DNA
gtgtggttggataatgaagcgcatatgttttcaattagcaacatctcggtgcttcacttaaaggcttttatgtatgattcatgtttctacatgtacaaagaaaatgattcaaacaattacgtgaatcaattgaaacaagaaaacccatttattttcaggggttggccacaacaggcaaacatctaaccaaaaatagggcaactactttaacttatttggagaaagacgtatttgtttgcatggataacagaaacacatgttaatttacaataatactggagaatttatttctccaggaaccggaaaacaaagcagctcttttaaaattagctcctagtgctaaattgcatcttggactccaaaattcagatgttttctgtgagctccacaaagcatccacacttactgggggcctcttctagcgcgagccagggggtgcagctaatggaaggatgctcagtgcacttccagtcgccaggcctttggcggtgctgtcgcctcccgcatccaccctacagcccagtgaactgcgtaaaatgcgggcgccgcagctccggccataggggcgcg

SEQ ID NO: 29619 - DNA, 609 bp, Mus musculus
  source 1..609: mol_type = other DNA
tgtagtacaagtgctggggttacaagccaccacatctggaacgtgcatttggttacaaattacagcattgggaaagcagtgtctttttatgtgctggaaacaaacaaacaaacaaaaaggaatcgacatgtttactgacaccgacacaggcaggggcttcggcgtggaccaagaaggcgtcagctgcgcctgcacagggggcgacgcatgcaccgccgccagtcattgggtgcgcgccgggtctgcaggcatcctcccgaccggaggcggagctggggacggactgagtcaccagaccctgcgctcccgaggagccccagctctcgcggcatccgcgggagctgccagccgcttgggcaagcctcgcgacccagctgagggtgggggtgtctcggagggcgccccgcgcacgcgcagctcccaggaggcggtggcgactagggcagtccagctgcccgggtcccgggttgcgggtcgggctccgccctcccgcgtcggcgctggcggacgctgtgccgggccagtcggctgtctctgcggcgctccgcccgccgccggtccgccgctgctttggcctggagggctcccgcctacgcaggctcgtgacgc

SEQ ID NO: 29620 - DNA, 411 bp, Mus musculus
  source 1..411: mol_type = other DNA
agtggttctaaaaaagaccccttgttttaggaaaactttggccctaactataatattaaaagtatagtgttttagatattgtcaaaatatctggcatttaataaacttatctttgcataattagtatttgcattatttttgtaagttattaatagcaattctagaattgagttacttgtagaaatgcaaggaaagctcaacttgtctcttatgttagtgactttgggtaaagctctaactaggctcatctttactgaactcttccactggagaagaactataaactcttccagtttatagttctaagtatccatgagaaccaacttaactttttttttttttttttaagtttacgaaaaacccagtggggttcttgcttgaggcagaagttttcctcctggagtccagcag

SEQ ID NO: 29621 - DNA, 342 bp, Mus musculus
  source 1..342: mol_type = other DNA
aagaagtcaagttctctttcgatgtacagggagttcaagaataaataaatcagtaaaagtctacttatacaaacaaaacacttttttggatgaatagtaaactgagatttttaactctactgaataaaaactatttggttttcaatggcatggccagaattggtgcccacaggtatccgtgggatctgtctccgctcacacctagggcacggaaataatttgtcagtttgagcagcccgcgtcctactgactacctctgccccacagcatgctgggaaacgtagtcccaaccaggtcctgagctggttagccaacccagacaacccggaagcctcttccgga

SEQ ID NO: 29622 - DNA, 634 bp, Mus musculus
  source 1..634: mol_type = other DNA
acattaaataaaattttagaaattaatagaacatggttgtaaatactcgtaatcccacacacacacacacacacagagagagagagagagagtttgaggagctagtttattaacttttcagtcaatctagagattaaatccaattttggtgcaaattagctattttaatcattaaagaagctaaagtcttcatacttcagtaaataataattagctagagccattggttagttatagatactcaatgatatcatatagctagctccatgacttgtaactaatatttaatagggcagctgtctaatttcattacactccatcagtcttatggtgtgaaactgtgtagcataatgataaaatgcatatgcttatatatgtttatgaaatgtatagctaccatgacatttatttgtgtatatattaggaaagattatatgaggaaaatatagcatacccatagactatatacattccaatatagaagataataaaatataactatcctatgcatacctgtagggttgtacaaagaaacacttaagccttgttgtcaaaatatgtggtgaaaaaacagtccttttatttaaaatagaaactttgcgatcctgttcccctggaggaggagaaaaactga

SEQ ID NO: 29623 - DNA, 565 bp, Mus musculus
  source 1..565: mol_type = other DNA
aaataataattagctagagccattggttagttatagatactcaatgatatcatatagctagctccatgacttgtaactaatatttaatagggcagctgtctaatttcattacactccatcagtcttatggtgtgaaactgtgtagcataatgataaaatgcatatgcttatatatgtttatgaaatgtatagctaccatgacatttatttgtgtatatattaggaaagattatatgaggaaaatatagcatacccatagactatatacattccaatatagaagataataaaatataactatcctatgcatacctgtagggttgtacaaagaaacacttaagccttgttgtcaaaatatgtggtgaaaaaacagtccttttatttaaaatagaaactttgcgatcctgttcccctggaggaggagaaaaactgagtgcgctaactgagtaggcgaattcacttcgtcacttcacaaaagacttccaaattcactgcggcagacactggaacaaaggtttgcaataataggtcatgagaggcacaggcagcctgccttttgtggacc

SEQ ID NO: 29624 - DNA, 395 bp, Mus musculus
  source 1..395: mol_type = other DNA
gcatttctgaaacctttgtcacaaatacaggtttcttggtggaggagccccttccttctggagaccacctccacactcaaagaataggaactgggccatcaggaagcctacaggcacaagcaacgttttctttctaaaaggaaatttcggctctcatcaggaacatgaaggcctttctgaccttttaatcatctatagggaagataaaagtccatcttggatggagatcacatgagctgaggtactttaagcacttagctcagagcccatgcctgttaactgtctatctgctgtagctttaacctgaggattcagaggctaggaatagagccttttacactcctccttagtaagtagccaacaggaagcatctttcctcttcctaaggaagagca

SEQ ID NO: 29625 - DNA, 324 bp, Mus musculus
  source 1..324: mol_type = other DNA
tctatttagtgaattctacacaaacaaagacaaatataataacaggatgttttctttaaaagtgttcttagtaattctcaaactgtgaataagatagaagctaagtggtaattttaaaaaaatgacatcgtatttgaaaaattaatatacttaaaaaaaaaagtattcatggcacactcctttctgcgcaaggggaaagtgctgactctttctcgtgggccatagaatggggcccagagggcagagcagaagctacgcctgcgcagtctcagtgagggcgtgtatgtctccggcgcttccgccttcgcctaggaggaggaggaa

SEQ ID NO: 29626 - DNA, 411 bp, Mus musculus
  source 1..411: mol_type = other DNA
taattgtgatctctaactgctaacagacaacgttaactttcttttaaacttattttttaaacatttgatgacaagcaatttccttaacacttaaaaaaggttggtggcaaacatctttagtcctctatttagtgaattctacacaaacaaagacaaatataataacaggatgttttctttaaaagtgttcttagtaattctcaaactgtgaataagatagaagctaagtggtaattttaaaaaaatgacatcgtatttgaaaaattaatatacttaaaaaaaaaagtattcatggcacactcctttctgcgcaaggggaaagtgctgactctttctcgtgggccatagaatggggcccagagggcagagcagaagctacgcctgcgcagtctcagtgagggcgtgtatgtc

SEQ ID NO: 29627 - DNA, 565 bp, Mus musculus
  source 1..565: mol_type = other DNA
ggcgcacctccgggactctgggttccccgcgaagagggaaaacaaaagacacaacaacagggtcttggccagtttccttgtcctttaaataacggccgcgcaagtttccagcgcgaactagcgcccgcgaggtcctcccctgcccaggacccgtccccgccccagaggcacgctccgcacccctccggaggtggcggcggctggatcggccccggcgcctcttccggcacacacccggggcgctccgcgccccactgggtggctcaccccgctcccccggctccacggcgctccgggactcccgcgagtccccgccggccccgccctctgccgcgcgcgccctcgccgccccgcccccgcccccctgcgcgcggccgccccagccaatgaggttcggggccgcgtgcgcagattcaaacggcgcctgcaggaggctgcgagtgctgcagtgctgctcgctgcggggagagggcgggggtcggcgcccgtgacggagcggcgcagggccggcagctctgaggcggaggcggcggcggcgggcggggcggcggcgggcgggagcacg

SEQ ID NO: 29628 - DNA, 526 bp, Mus musculus
  source 1..526: mol_type = other DNA
gaatggaattgagccttaaggacattttatgaagtagaataaaaggcacaagacaataaatgctgtatttgttccatttatgaagataattatgtactggaaacagtgttacagttctatgacaatggtacattctacattttattctgctttaccaagccctaggtaatcataaatttgtattcatgtttgcctatcctatttcatacatgaatggcaacatacaaatagtattgtgctatcccttaattctctttttaattcaagggaatatagtgtttggaagtcaagacattcacttcggggcaattttgagtaatagtatgaatttacatatacaagattttctgtggatgcatatttttccaccagcagaaattgaaatttttttcatacagatattgtcttggattagataacagcaaaagcaaaagaatctccatctctttgccttgcgggttgccctggtgacagaagggctgcggtcccggcagaccccgcgcgcgcccgacagttgggagagtgc

SEQ ID NO: 29629 - DNA, 385 bp, Mus musculus
  source 1..385: mol_type = other DNA
tagtccagactgctgttgcctggtacaggacctttgtccaagaaaggtctctgataggttttatttaactctgccaaacactgcctggattcttacctgttcaagtagcccagtgtgacaatattgaacatctgtctgtctattggcagagtcacagccaggcctgccttattggagagtaagggcaccatgtgcccttcttaccattttaaaaagggatggggagtatgttctttgcctctctgaatagtattcccagagactctttgcatttacataggacctccctggatgcggtctgcggaaacctttgtcaggcgccaggtgactatgtgggcgggacgccgatgcgggcggggcgccctcaggcaggcgccctaggggc

SEQ ID NO: 29630 - DNA, 717 bp, Mus musculus
  source 1..717: mol_type = other DNA
catttattcatgaggctaaatcttctgagtatcgttctaaaatataaagagttctttgaatttacggaactcacgttcatagatttgtggcaaattttctggaaccatatgattcaaagggtagattaatgtaaaatatgaagcatgccatgcagacagaaatcctttaaacagttgtgtgggtctactttcacgtggtatcagataaaacctaaactacagtggtggtgtggctctctagttcaaaattttaactctactccccattcacagaacgggtttttaaaaacgcagcttctgtagttaaatggacaagcagagtgtgttgggtagtttaaaaataacaaacaaaacgcatattatctgtacatagcatctatctgccaatttgtgagagccctcggcttctgcagcgtccagcttgcaggaagccgcagcccccagccctctgccaccgcccgggtccgctctgccgcccgggctcccgagtgggccaaggtcaccctcgccgcggacctcgcgcatcccgtcagctgagcgcaggagtccggcggcgtctcctcccccgcgtgacgggcgagcgcgggtagccgagcggtcccgccatccgcgcgggtcccggccgaccccgccgtcccctcgcgccgcccgcccgcccgcccgccgcccggcgcttcgcgggaggagccgccgtgacgcgtcagggaggaaacgccg

SEQ ID NO: 29631 - DNA, 342 bp, Mus musculus
  source 1..342: mol_type = other DNA
ctctggaaaagcagtcagtgctcttaactagctgagctgactaagaaaaattctattactattacaaatcaaactcagggtttctctgtgtagccctggctgacctggaactcactctgtagaccaggctggcctcgaactcagaaatccgcctgccaagaacactgactgttcatccagtgtaagttgggtcacatataacccaggaatacatcttagaaaaaaaaaattaaatagtttctaataccaacggtttttaaacactgaagtgtcctattttaaggcattattcattacttgaaaaatcaattaaaaagcgggcctacaggagcgccttagggt

SEQ ID NO: 29632 - DNA, 480 bp, Mus musculus
  source 1..480: mol_type = other DNA
ctaaagttggagcaaaattttcaaactatttgagaacactacatttcaggcctgcatgttatactttactgtctggatttctgtaaactcagcgtttcaaatatgaaaatgattaaggatttctcatcggtttgcaggtgataagtcatcaccagtaatcggttcaatcagcaccaagactgagaagccaaggcttggtactcagtccttagccggcctccagcccaggggaggtggctgcccccttaccccagtcactgattatgaaaatgccttacaggcgttaaggatgcatttttacaattgtagcttgtgtcaaggtgacaaaaacatggaagtaaaatgagagttcacaaatattttaatttttaggtgcaacaaaacctgctcatttgaaggtgcttgaacaaatattttctaaacacttgtcatggagagtgattgaaacaagctgccagaataacaaggtacaaattgtgt

SEQ ID NO: 29633 - DNA, 626 bp, Mus musculus
  source 1..626: mol_type = other DNA
tcgcgaatctatattcatatctgataactgattcctatcccggttcagagaatctggctgggctgcggcgagaaccgcgtccgccacgggctgcagcactgagtcccgccggcgccggggtcagcctgagcctgtgggcgagcgggtgccgaggccggaaggcggccaggaaaggcttctactgcaagaatcttcaccttgtagaatcggccagagggggcggggccaggcgtccgccccacccccgagcggtttgctatccgccgagggggcggctccgggacgccgctgcccctaacccaagggctcgggtgggagaccctctcggcccgacgtggctttgcgacgcccttggccgcctagccctgctcagccgaaccccgcacggccgctgcggtggggggaggatcctgcagccccgtttccccgggcgggcgggcgggcgggcgggcgggcggggtgtgggaccggagcctgagccctgggcgccttcaggagcagctcagcacctggggactcgagggcgagggcgaggccgcgaggccggggctcacggccgcccgctcctttgcagtgcacgccggggaaatcggagccggagtcgccatggagcgcggccgtcccgc

SEQ ID NO: 29634 - DNA, 261 bp, Mus musculus
  source 1..261: mol_type = other DNA
tttcttttacaaaggcagatccttgttatgctaaagaacttcatattagttgttgaggaaaacagaaactaacaaaatgcaacagtaaggctttctgaaagtttaccctgatctaagctgagataacctctgcacaaatatgacacacaaatttgtgaaacattccatatttgtcagagttcgaggtcagcccctatcaacccaagtttgggttttcttatactcaaggcgggccctgcgggcttccctgacgtcacgaga

SEQ ID NO: 29635 - DNA, 354 bp, Mus musculus
  source 1..354: mol_type = other DNA
gtcaagaagtgcatttcaagcaatgcctaacaactaatatattactaagtacgaaaaaaattaaatatattagaattaaataaaacacaaatttcatgcatgccttcaacttacagtctaccttttttaaaaagtagcgcaaagttaatcttagcaaccggtaacttttgcttgcctctgtttctctagagatatttagtattccaaacaatttatttcgtttgaagcgagtctgcgcagtacgagccgagccggccgactccttcctggcaggccaatagtcccgccttccggcgcgaaaggctttctatgtcgctgcgccgccgccgcgccccagcgcgcgaatggtctgga

SEQ ID NO: 29636 - DNA, 427 bp, Mus musculus
  source 1..427: mol_type = other DNA
tagtggtgcacgccttgaatcccagcactcaagcaggcagctctcgagtttgaggccagcctggactacatagttccagaaccaaacccgaattcctgtgaaggagcaaaggcatctccgagctgtgctttttaaaatctgtgtgctctaaagcagaaatgtcaagaagtgcatttcaagcaatgcctaacaactaatatattactaagtacgaaaaaaattaaatatattagaattaaataaaacacaaatttcatgcatgccttcaacttacagtctaccttttttaaaaagtagcgcaaagttaatcttagcaaccggtaacttttgcttgcctctgtttctctagagatatttagtattccaaacaatttatttcgtttgaagcgagtctgcgcagtacgagccgagccggccgactccttcc

SEQ ID NO: 29637 - DNA, 276 bp, Mus musculus
  source 1..276: mol_type = other DNA
aaaaccaaaccaatcaatccaagagctcatggattttttttttttttttaaatcaatgctctgctcattcgatttataaaaacagcctctactgaaggctgcaactaactgcatgtagccaccttctgggccataccactcccggaagctgccatggccgcagccatgacacttggtccagaccattcgcgcgctggggcgcggcggcggcgcagcgacatagaaagcctttcgcgccggaaggcgggactattggcctgccaggaaggagtcggc

SEQ ID NO: 29638 - DNA, 542 bp, Mus musculus
  source 1..542: mol_type = other DNA
ttagtaatatattagttgttaggcattgcttgaaatgcacttcttgacatttctgctttagagcacacagattttaaaaagcacagctcggagatgcctttgctccttcacaggaattcgggtttggttctggaactatgtagtccaggctggcctcaaactcgagagctgcctgcttgagtgctgggattcaaggcgtgcaccactagcctgggctgcaggaaggacattgcaacattcttctaattccagtacttgggaggtggagaatggagaatcaagaataaaaatagaatcttcttaaagtatatagggacattagagtacattagtatcttaagttctttctgagaagcttgtgtaagcttggaatccctgggcgcagcagcgggtgcaccgggtggcctccggggctgcagggggcgccctcggccgcgcggcctccgccagcagcccgaggggcggggccgcgcctggccgttggtggagggcgggcggggggctgaggcggagtcctgagcgggcgaccggtttttaggtcc

SEQ ID NO: 29639 - DNA, 419 bp, Mus musculus
  source 1..419: mol_type = other DNA
atgccagactgtcttagttagggttttagtcttataaaaaacaacacttaattcagagctgagagttctacatcttcggctgctagtagaagactgacttccaggcagctagggtgaggatcttacttcacagactattatttttcatgctaaattaagagattaattttttttaaaaatagacatgcttattttataggatttttttccaaatatagtcctaactagaaaaattagttactataagcattttcaagaagctataattctgttagagtaatcttcctgagaggcacagagtgtgctcgcccgctctctctcacgcgctctctcttgtggctacaatattttttcctagtactttgcttgttaattcacacttaggaagactgtaatcaaattacccaggaaactttttg

SEQ ID NO: 29640 - DNA, 437 bp, Mus musculus
  source 1..437: mol_type = other DNA
aatagcccaattcctctagtagatttcgtgtatgtgaattattaaaggcaattattataatacttcctggaacaatcctctcatcttaactattgcacaatgcttatgtcgcagttggttttaaagaaatccgtgcctaacagttttagtataaacgttctgatttggcaatacaaaatggtttagaaccaggttttttggttttttaaatgcaaagaactctacatctcatgagctcagagcccctgagcaaatgcctaagggttgcttccagcctttgggtcagcaacgccggttgtggctgacttgctcaaggccaagatagatatatctgttcctttcttttttcataagcaactttgttttcgcggcaaaacccagcagcctagtgaaggcagagcgctgggccagcactttgaaatcgctagggagcgagc

SEQ ID NO: 29641 - DNA, 376 bp, Mus musculus
  source 1..376: mol_type = other DNA
tgaggggcctccacatgagccctcagcttgggactcactgagtgagctggtccctatgtgcaccagtcattcactgaaccacctccccagtcactggggcagctttttcaatgacagatgccattgcattctgaaactgggaggcttccccatccttcagcagccacaaatatgggtcctgctagtgcaggaataccgagagctcctagcaggcctgtttgtctggatggcagaacaaatcattagcctgccagcttgtatgtctcctacatactgttggtatgctactgcaaagtctgcctgtgagtcagctcagggaggcccagccccttcaggagagcctgatttaggatcggcccctgcttccaggctgggc

SEQ ID NO: 29642 - DNA, 377 bp, Mus musculus
  source 1..377: mol_type = other DNA
ccatttatttaaatgtcattagctgtacactatgtaaagtagaaaaaataatatctagatggaaatgcaaatggaccaagggagaattcaataaacttaaacattaaaatcaaatgcgttggccattccatttcatttgtatctttttaaaattacaattcttggaaacagctgagaacaaatattcttgaatttaaactgatagtgaaatactacagtgagacttaaaaaatttagatacacccggtgttacattcatttcaagctttgacagaggttgtctgcctgtgaaataacatgtttttttctataaaccgaacctgtttcgtagtagacgaaattatgtaaccgcggtttctttgctttcagacttacac

SEQ ID NO: 29643 - DNA, 357 bp, Mus musculus
  source 1..357: mol_type = other DNA
atttctcaatatcttcttatatgtaaaaaaaatctaacacttttctgaatcaggttattaatgtaaatacttttataaatacaattcagaaaactgcattttgaaaaaagtacacaggatgtatttaaacaacccactgaaaatatttcaaagcaaaattattaattctagtaccaagccacctttatctaggaaagcatgagttgcttttgaccgtctctctggtcaggaatgtttgaggcggccgcccccaatcaaaggtttagatttcaaaatgtagatgtcacatttcagtgcaaaggggagttctccaattggattgggcagcctgtcttgacacagcactgtgctgagtgc

SEQ ID NO: 29644 - DNA, 116 bp, Mus musculus
  source 1..116: mol_type = other DNA
actcacatacataaaataaatatataaaatcttttagaagaagtacttggcctcaggaatgcctggttttccaaagccagctgcaactcataataatacgccgggcttatataact

SEQ ID NO: 29645 - DNA, 356 bp, Mus musculus
  source 1..356: mol_type = other DNA
taaggacttattatttaagtaggcttctgtaagagcactgaggacttactcactaggcactccctggcagagtacatgccattgattatgaaagagacgtgagctgtttaagcactgattttaaagggatttctacctctaacataaaatttttaaaaattatttcttagatggtgtttgattataatctaaatccagtgactaaagctttgaaaataactttacaaatgtttgacaaatgctctgtcatgagatttttgatacgatggaaaattccagtttttgccaaaaatgactttttgggtttctctgtgtagccctggctgtcctggaactcactctgtagaccaggctgg

SEQ ID NO: 29646 - DNA, 490 bp, Mus musculus
  source 1..490: mol_type = other DNA
cttcgccgccggggcattagcgctcgctgaattcaaaccaagcgctggctcgcacaaagtgaactccttcaggccttcgcacacctcacgctctcagggtgtgcttggcaaatagcacacctccgggccggcgtgcctgtgttgagccgtttcggtgggctccccgcgcacgctgtgccagcttttcactcaaccatttgcaaagcaaattgattttcggcatctcgtcgcgcacacgtgccagtgtacaagtgtgcacacatatttctacacgtagtttctttctaccgcttaaaaatgtattttaaaatttgagaccaggaatgtattgtgtgcttgtaaaaggaaaaaaaaaactttcctttgttcttctgggaatcttctatttccagaagttcactcgaataaaagacactgccttctgagtcagagctgccaggctgataattattaagggcggggcgggggcaggcccgccgcagacaatgag

SEQ ID NO: 29647 - DNA, 315 bp, Mus musculus
  source 1..315: mol_type = other DNA
cgcccctttctctctattcatcgcttgcaaggagaataaaaacagttacagtctggacctaggttctcagagcctcgggtgggagaggtgtcctgtgaggagattagttctcccctacggggcctggttctctgacaaatttgacagaacaagcttggtcctacacccatccttttagggtgtcacagaagaatttattgggtccccaggggtgtgcatgtgtgcacgtgtgcgtttacacacagaaggtgaacactggttagcatttgctatgacgttgctagagcgctcgccaatgagtgtggtgggcgggga

SEQ ID NO: 29648 - DNA, 675 bp, Mus musculus
  source 1..675: mol_type = other DNA
gtgacgcggccggcaggggcggcggcgggggctcgggcgtccttcggggcggtagcgctcgggccgcgcaggccgggccgcggtgggggcggggagccggggtcgggcggcggcggcggtggcggcgccgcgccgggctcgcccctgactgccggaggcgcgctggggccgcggccgggggcgggaggcgggctgcgggccaggaggttccgggttggctcgccagcgccccctccttctgcggcccctgcagggacaggccctcgggggccccccgcgggaagcgggaggggtcctggcggccctcgcgccccggtcacgccctgggccggggaccctcctctccgggcccctggaggctcccggggaggcgtccagggtcggcgccgcgggctggagtgcccgcaccccgcccctgggggagtcctggaggcgccgcggccgcgctcgggggtggctcggtccctgcctcccccaagtggcttccggggcctgcggactgaggggcgggaatcggggacccgagccccttactctccgggagtgacgttgggcctcaagcctagagggcctgtcactggcaggggaaactttccccgagcctgagctcgagcatctggctgtgcctgactgatggggcagtgcaggaactgacctgccgggtaccggtaagcc

SEQ ID NO: 29649 - DNA, 592 bp, Mus musculus
  source 1..592: mol_type = other DNA
catttctttcaactaattatatctaaatggaaaagaagttgcttttccagttaaaaaccaaacaacatttaaaccaatactccattgaggatttgataatggattccccaattaaaaaacaaaacaaaacttttgttgtctcactgcagcaatcccggggtggtaccccggtaagttcggtgcgccccggaacagcgtctgggtgcagaggtgcgcccgaggggtgcaggctgccggctaccgggccctgcctgagcgcgcgcgggaggcacctctgggacttccgcgaccttctcgccgcagcgtccctgccgtcggaggcgcggcagtcccttggcctccacccccaggcccgggcctcgccagccagggagatgctgaggaccccgcgggtggggtagccccggtgttcccgggcccacgctcgggggcgcgggacgcaagtttccgcccggtcccctgagcggtgacagcgttcgctcggaggcggcggggaggcggagggcgggccagccccgtgcccgagccccctcccctgctcgcgagctcgcgcggtctgtgtctctctccgcaagtgcagagccgcggagga

SEQ ID NO: 29650 - DNA, 414 bp, Mus musculus
  source 1..414: mol_type = other DNA
ttacactggaaatgtaatattccaggccaggccccctcctggctaaaaaacctaggattttagcttctggactgggcaagtagtgcactttttcagaaaaaaatagcaagggatcccttttcacgatttcttgggattcctaagtagtgttaataccatgtaaagagcttaactctgaggtaagcaagcgtttaacttttgacttagaaacaagatgcttaacaagcaggctacttctacacaagtggccaacaagtgtgcccagcagccgtgcatgctgcagcagcacgcgaaggtatgaaacctccgcgcgccactcgcgttccgcgacctccagcccacagggggcgctgtgggccaccaggtgcggccacggcgcgagcgcgcggtttcttcctggtgcgcatgctcgcc

SEQ ID NO: 29651 - DNA, 444 bp, Mus musculus
  source 1..444: mol_type = other DNA
gcaggcatatttctgagttcaaggccagcctggtctacaaagtgagttccaggacagccagggctacacagagaaacaaaatgtggggcatggtgtctcattttcaaccgctggccagtctggcctgggtggcaagtcaacactggacagttcctgagtcaccttgtcaaattcctctgcagattttttttttcctgttgttgaggattaaaaagtataagcattggttgccatcatttattgtaaaaggtaggttaacttcaatgaagtaactgcattcttctttatggatatgtaaagacggagccggctgaggccagtgcgggcgggtcaggccacctccccgtcacttggctgacgggcgtgccagcaagtcgtggccgccaatccgctccgggccactgagcgaagtcccacgtgatccgcgccgggcctgacgtcacg

SEQ ID NO: 29652 - DNA, 197 bp, Mus musculus
  source 1..197: mol_type = other DNA
ctgtcgacaatcttaatatttaaaatcatcagctattccgtattagaattcatctgtggtgaaggccagcaccggtactcaatcattggtctgagtgtgctcacaccacactgtgtataatttgatatagccattttcaaaattagatgtaagttatatttccttaactattaaatggtaactatgttaaaggggac

SEQ ID NO: 29653 - DNA, 342 bp, Mus musculus
  source 1..342: mol_type = other DNA
tgtcagttcaggttgaatgaaaacgtacatcaaacgtacatttggagtactgtgccatttcgcaagcggatcagcctgaggagcaatgactagtactactttgaattagtggagctgtgcagtaaaatttctcagttcaaacttatctggaaatgcatcctcgattcacgtgcgtgtgctcgcgcgcgcgcgcgcgcgcacacacacacacacacactttcattgactgttaaatgacaaataggactttaaacatactcatttgagctggtcataggattgaatcacgagcccgtcatttgactgccttcccctcctgacaaggggaggggaggaggatag

SEQ ID NO: 29654 - DNA, 301 bp, Mus musculus
  source 1..301: mol_type = other DNA
tgaaatgcagcacaattctacttgctctcaaagcgttgggtctgagtccaaattgcaagatggacatcataacatgtaagtttcagaaattgccttcagttcccactaagaccagctgcaggtgaaaatggaatgagtaggaacaaggtcttttctttttgttccccacagatactctgagggtcagtcgtgggcgtagaggcctaagtctttgctttgcgcgcattgcccccgccccgctaaccgcagggttcaggggggaaaaaacagccccctctactttgccgagggggaggggggt

SEQ ID NO: 29655 - DNA, 323 bp, Mus musculus
  source 1..323: mol_type = other DNA
agtcacaaggaatacctggtaattgttaactctcacattcccaagcctgggcctaaaggcctagaattctgtttttacgttgttatactttcattcaatgcaaacattgtacagtaatagtgatcatttcagctttaataaccccggatttcaataaaatgaacacatagggtagaaagacagtgtgattacagtgtaacaaaaaacctctcggttttaactaccctcgcagattgcattttttaaaatgtatcttagcctatcatccactacaccctagcgatgcgattggctgacttccacgcccaccgcgagcaaatcag

SEQ ID NO: 29656 - DNA, 438 bp, Mus musculus
  source 1..438: mol_type = other DNA
aaaacttaatatattaggcctatgcacatggcaagtagagtgaaagttattataaaaaaacaaaaacaaaaaccgaaaaaccattattggtgggggttctctttgggaactttaacaaaaaaacagagtacagtttctactttatcattttcttattaatttgtcctttaagtgaaggaaagtagcatttttttctgggtgagaaaaaagccactacaaaatacttctctgtgcccgacagggcccaggatgggaaaagactccgagggctttctagagcgagctggggcgcttgggggtcgcccgggtgcacaggggctccggtggccaggaggagaagcgcgtcccacctgggccccagtgccacccgcccagagcccgccgagcgggcgcacagccagggcagccgaggggcggccgagggcgggggcttcggct

SEQ ID NO: 29657 - DNA, 372 bp, Mus musculus
  source 1..372: mol_type = other DNA
ttttcatgaattcttttagttatacaaagtacacatacgtgtttttattggaggtagaatgaccttgaactaaggacagcagggtttctctgtatagccctggctgccctggatgtaaaccaggctggcctcgaactcagaaatctgcctgccttgcgtgcgcgcccggccttcaatactgaggtggagacacactttccacaaaatacttgaaacggtctagttacaatgaatctgaaaaatgagactgatatcagctgatgtgccagtgacctgtcacttctacccttggaagagtattaggacagctgtcagccagcgcctgaggctgctgtatccgcctagctcagtggggcggccccaggctacggg

SEQ ID NO: 29658 - DNA, 486 bp, Mus musculus
  source 1..486: mol_type = other DNA
gcagggtttctctgtatagccctggctgccctggatgtaaaccaggctggcctcgaactcagaaatctgcctgccttgcgtgcgcgcccggccttcaatactgaggtggagacacactttccacaaaatacttgaaacggtctagttacaatgaatctgaaaaatgagactgatatcagctgatgtgccagtgacctgtcacttctacccttggaagagtattaggacagctgtcagccagcgcctgaggctgctgtatccgcctagctcagtggggcggccccaggctacgggcgcctagcgggcaagcggggccgcagctgcgagcgctcgctggccccggctggccccggctggccccggccttgctgagcggcggccgagctcggaacatcgccgggctgccggccgccaagcatgctcgccctgagagtggtgccagtgcgagaaggctgccggctgccccgccccaccgcggtggacagc

SEQ ID NO: 29659 - DNA, 549 bp, Mus musculus
  source 1..549: mol_type = other DNA
acccaccgccgggaagcgccggccgctgcagtggcatcggccctccctcagctcgctcgccctcccgccggccgccccaccgcgcggggcagcccctcttccacgaccgcggccgaaggctcccgccctcgtcgtgccacgcggctcacgccccctgctgagggtcgccgtggcttgcgcctgccgggtcccgcagcagcgaacccaccgagggactgtggacctggcggccgatgatcaggcgctgcggaagacagcccggcagtcgggcgcctcggcagcgcagccgaggtgggggagcagggctgcgtggccacgggccgaatcaccgccgcgaaggctgcccagagtgtcggtcaacgtcgccctccagccccgcgggttatgcagcgacgcatgctgggacttgtagttcacatccctgaggtaaaaaaaaaaaaaaaaaaaaaaaatgtattcagtgcatttgttttccgttcattttgcgccagcaaagtgcaaaaatctcaattctaaggcgtggggcttcgcgccctgagacctttaagg

SEQ ID NO: 29660 - DNA, 734 bp, Mus musculus
  source 1..734: mol_type = other DNA
cggcccgtggccacgcagccctgctcccccacctcggctgcgctgccgaggcgcccgactgccgggctgtcttccgcagcgcctgatcatcggccgccaggtccacagtccctcggtgggttcgctgctgcgggacccggcaggcgcaagccacggcgaccctcagcagggggcgtgagccgcgtggcacgacgagggcgggagccttcggccgcggtcgtggaagaggggctgccccgcgcggtggggcggccggcgggagggcgagcgagctgagggagggccgatgccactgcagcggccggcgcttcccggcggtgggttgagctacctcagagccggctgggaacgctcagacgctgcggggccccgtgcccgagtgacagcggcgcgagtgcagggcaggggacccgagtcgcgctggcagctcgagcggttggcagccctcgcgtgcgccccgcaagtcggcccttcccggcgctgcccgcgcaacttgagtcaagttgacaaccgctcggcgcacccctgtcctaggaagacggggagccgctgcagcagcgccggggacgttcgggcggcggcggcttggccatgagggcagcgcgcgtcgcctaactcgcggctgtcaccgccgctgcagcgggactggacggacggcaaacaggcggccgccagcaggaggcgccgagccgggagcagcggcaggcacagcccgtggccactgcgccgagccc

SEQ ID NO: 29661 - DNA, 286 bp, Mus musculus
  source 1..286: mol_type = other DNA
tagatatgcttgaatatatgaaacctcttatttttaattagatattttctttatttacatttcaaatccctgtactagggcaagttcccaatgatggccaactaggccatcttccaaacatttggaactattatctaaagggtattgaatccagaccttattgtagagttgtatccgtcttgagggcctcaaatcaggcattaatttcagagatttgacccgggcattgaaatgccaaccccttagcccaaaagaggctggccaggtactatctgggcatataggg

SEQ ID NO: 29662 - DNA, 485 bp, Mus musculus
  source 1..485: mol_type = other DNA
caactttaatatatttattattcattttttcccaggtgatgggggctcgcttgcgctgcttgctaccctccagtctagaaaggtgcaggatccgccgaatcctacgtcgcaccgcagtggaacggacgcgggatggtcgcgcgtccccagctaggcagaggcgggcagtcaggggcagcgggtgcgggagaggctgagccgccggtgctggagcaccttcgcagttgcgggccgggcgccctcagcgtgctcctgcagcagctcccgggacgggccccggcgcggcccgagaccccaggcctaagccccgcagcgccccgggatgcgggggtcccagaagccgccagggggcgggaacggcgcggcgaccgcagcgcgagagagagctggcgcgggggcgcgcggcgtggcgcgggcgcggcggcgcaggcgggggcgcgcggcgcgggcccgggagggcgcggcgggagcgcagggcggcaggc

SEQ ID NO: 29663 - DNA, 416 bp, Mus musculus
  source 1..416: mol_type = other DNA
gaattcctagaataaattctggtctgatactggtttaagtattaagtattaagtattaaattacgtaaactatattcattatattgagatttcacggctagagtcaaattgttaatcaaaagtttacaatgggaaacctgtgaagaagcttcctgtctgcaaataccagaaagcatctccaggcgaagttgtatcggacagcattgtgacctcggcataacgcttcagtccgacctggagcagcgcctccgccagcactgagggtgggcccgcaaggtacctagggagcccggcctggccccgccccgccccgccccgggcacccgcgcgctagccaatcggacacgcgggccccttcccatcggcgactccacccccgtgcccgggatgttgggcccccgcggcgtgacgcgagc

SEQ ID NO: 29664 - DNA, 274 bp, Mus musculus
  source 1..274: mol_type = other DNA
ggctgaaacgctagtctgggactcgtagttccagggtaacactgaaataccctgtcaaaaccctttgagaagtttcagaaattccaaatagcacatacatactatacttccttttgtgggatactattacacagctgcgactgattaactgagtatcttgaatctaggttttaacagcagagaggaaacttaactgagctgcttttcagctttctaggaaaggtgcctaggtaacttcagctggattctgggaaccaagaagtcctagcatctc

SEQ ID NO: 29665 - DNA, 512 bp, Mus musculus
  source 1..512: mol_type = other DNA
caccttgggtttctctgtatagccctggctgtcctggaactcactctgtagaccaggctggcctcgaactcagaaatccgcctgccgtgctgggattaaaggcgtacgccatgtcaacaaaatcgaaaattatgtgaaaaaattccattttctcctatctcagtggtggaattaagttaaatcattaaatctttttttttttttttttcagccctggctgtcctggaactcactctgtagaccaggctggcctcgaactcagctaaatcattcattcattttgttaatatcatatcatagcatacaaagtatttaaacattataacattaagtaccttaaactacgaagctaaatcattttcccaaaccagttttaggacctataaagtgactacggtcaaaagccgaccaaatactaggaattcggtttgctgcctggaacccaccaggtggagaaggttgcaggccggccgcattttctgcgcacgcgcgcgcaccaatccggccgcgtg

SEQ ID NO: 29666 - DNA, 300 bp, Mus musculus
  source 1..300: mol_type = other DNA
aacagttttgtagtctttgaatgaaatacacgccagaacaaaacagctttttctttcttttttttttgatgctactctgtggaagagctctagcttttgagtgcattctcaaaattagatagctagatgcagctttctaccggtggactttctttcttgagaagtaagggtttcctgtaaggcagctaattgtctccctgaaaatttaaaggatactttagtttacactgagtattaagaaacagtatattctaagtcatttttttcttctcttgccttacaggaagtgctcagagggag

SEQ ID NO: 29667 - DNA, 386 bp, Mus musculus
  source 1..386: mol_type = other DNA
ggtgtgcattccaggcactcaagcaatacatacagactaagcctgtttgggtgcacagctccaggatgtagcatttctaaagcacaatgccctgtgttcccattgcctctcttggaatcttcatgaaaagattacacagatttatcacatgcagacatatatttggagcatattaattcatgagagctcaagttgacacaggtggcctcacttgtacgcgccaagcagccggaggagaagctcggctccgcgggctgggggcagggcccggcgggcgggcgtgcgggcgggcgtgtcatggggccgggcctccgcgcccagggaggggactaggggcgggcgcggggcggtgcccggctcacgtgggcgggagcagctgaaagtcc

SEQ ID NO: 29668 - DNA, 370 bp, Mus musculus
  source 1..370: mol_type = other DNA
ggaaacaaagattcaccagggactttggggtcccacactcagtagggcaatactttttgagtttacaattagtaaattcctactctaggatgcaaaacaggtatctgtcctgggactgaattttgagattctgacagtctatcaatgatatattgtttaaaggactgtgatcctttttcagaagacaccgcatgtttgaacctcattaagctttagtagccaaagaaagacttcttccttctagaaactagccattagaaaaaaataaaaaaacctgtttctctttttatcccgtgggagaagctagaggctctcttcccccagggttcgactcccacaggcctggcatcacgtgcctgtgcaggcacct

SEQ ID NO: 29669 - DNA, 357 bp, Mus musculus
  source 1..357: mol_type = other DNA
agattacaatagtattatttggctgcttccattgtactatataatgatatgatggggaagctcaatttttccttgcttgaaatttcagctaagcctggaacagtgtgagttttatttcacattttacacaaggcagatagaaagcaggtaattagctaactgtactgttagagcatgtattatcctaacatcataagctatagaataatatttgtggccacccagactaactgtgtgatgattttttagctcctatgtcatttgctggcatctaaacagaaaatggtgttttcaagaacccacacataaaaaggttgccacccaatctctgttgttggagaactgacatataaaagc

SEQ ID NO: 29670 - DNA, 424 bp, Mus musculus
  source 1..424: mol_type = other DNA
taaaaattcttaagaagagtgctctctagactttgttatagagcagctttgtcacactccagaacgggacgtcagacaatctgagctgccaccataaagacactatttttaaggccttgtgagtagtcacaaaaagcttacagattaaataaaataatctctatttcaaaaatgaaaacagcaggacatgatctcaggtatttctgatatgaacattcacacttaatcaataggcacttttacattaccattgttgatttatttgtaaaatacatactttgtattccattgtaatatattctaatgaaaattaattgatacttaattttatttctttgggcccaggaccttgccttaaagccagacagtcatattttagaaaatttctctacatgatctcttaaggccttgaatcctttacgca

SEQ ID NO: 29671 - DNA, 446 bp, Mus musculus
  source 1..446: mol_type = other DNA
tcactgagatctttggatcatcctaagctaactagaagactaaagaatctgtgtgtgtctgtttatgataatcagccaaacatgcagaaaagacttaatactacaattttaatacaagactggagaaatgatgcagtagttaaagtcttttccagacaatataaataggtaggaactcctacatataaacctgagtgtacacacatgtgaagacaagtatatagacacataaacataacacacttaaataaacattgatttttaagttagagaaaaaaataaaactgataaaatatttcctttcccactattgagactttcaggaatctttttacagtttgttctcagtgcaaaaatttaacgctgataaagttgtctaggtcattgtatattctagaatatgctcatgatcgtgacttgaaatctaattttgttgaatgaaatgt

SEQ ID NO: 29672 - DNA, 338 bp, Mus musculus
  source 1..338: mol_type = other DNA
tagcaaagaatgattcatctcaggtatcatagtctgattgttcattctgggagaatgtacctgttctaaaaaagcgactttgtaagtaaatgcttccagcagatcttcagtaataatcagatttcataaggactggatgaggcctcttgttcggatacaaaactttacagatctgtttggctttgtaaactttgcagatgatttatagtatacacaggtgaatgtcaccaatgacatttgcctttctaaaaaaaaaaaaaaaacaatgcttttatggcctcaagatgaaagttttgcctcaggaatgactgcattcctaccactgcagggagagacag

SEQ ID NO: 29673 - DNA, 639 bp, Mus musculus
  source 1..639: mol_type = other DNA
tgttaacatagagttcaccttaactttgccaatgatgacacaagtaattgggaccaataatgctactcaatttgaaacaagtttctattgattattaatactgttaaaattaatctgtttaatgagtacaaaatgaaaactgttgctcagttgaagtatagaaaaaaatggataaaattcatgatatgctctctgttctttattttccttgttttactattttagtgcacaaaataatgaatttcattgtgacattgttaaatgtgtcctgtactttattcatattcattaatatactcttccataaatgctcatgcatatgctctcatatgtatgtatgtaggtaggtaggtaggtaggtaggtaggtaggtaggtaggtaggtatgttataccttccacatatgaaggtaatataattttcccagcctggcttatttagcttagcatgtagtttaaactaattaccaagggaactttaaacttctttttttctttttcattgaaaatgaattcatgtctgggtcactgagaccataagagcactatgtcctctattatagttatttgctatttcataatactttcatgaatatttgttcagtccagaaaggcataattaatcaaaaataaaaacaac

SEQ ID NO: 29674 - DNA, 238 bp, Mus musculus
  source 1..238: mol_type = other DNA
tacttaaacagaaacttaggactgtccatcatgattatctatcttaaaaactgcttaaaaaaatgttagttgggcaagactgattgcaatgcctgttgtgtaaaagaaaggtttaattaatatatgtttctgtctgtaagctgcatgtattggggatagatttctatcttcgcaataaaaatgtgtacctctgcagagatgggcgaagatacaatatttattccttgtctcatgggat

SEQ ID NO: 29675 - DNA, 745 bp, Mus musculus
  source 1..745: mol_type = other DNA
taatctttatgaatctgtactattccatcatatttactatttgtatggaacaaataaatcatattttccagagcaatgtgtagtagtggtaatttttctgggtcacatttgaagtacaaatgcttaacctccatttaaaaccttctaaatccaaaatcaaatcttgattgaacaagccatcttggaaattataaaagttaagaaccacagtgcaagagtttttttcctttttacaaaagtatcagtttctgtaagctgagaaacttttttactctatgtaaaataagcatggactttcaggtcataaaaatggtgtaaattttgaaaatgtgtgttaaataattaactaattatcatttaaatgtgtggatatcttccctataatcatcagtgaatagggaattcctggttatgttacatgtaaatgattgtattttagaatagaaacaaatcactgggtctttgagcctcgaattcaattgatatctcagctctgacatcctgaacacatatataaatgaggtcatgtagctgtattttaatggtcattttaaacaactatttgttattcaaatattctgaaaaaagttgattattgtgacatttccttaacattaatctaattaggctttgctttcttaaggaaatttactagaaataattttatgaccatgttctttgaaaagtacaggcaaataattttggtttttgcaagcttcagtagttaaaggtgctttaaatagaa

SEQ ID NO: 29676 - DNA, 223 bp, Mus musculus
  source 1..223: mol_type = other DNA
gacttgctcctggctgcccaatggactacggttgaagtttaacagaaacaaaagatttttaaaggatacgtttagtgtgcttgaagaccaatcacatagatttttaaatctgggttttaaaattttcagtctgtaagcactaaagagaaaaaggcttcttctacattcagaaagataatcaggcagtgcctttctagtttgctttttaaatctacacaccaag

SEQ ID NO: 29677 - DNA, 274 bp, Mus musculus
  source 1..274: mol_type = other DNA
caaaagatttttaaaggatacgtttagtgtgcttgaagaccaatcacatagatttttaaatctgggttttaaaattttcagtctgtaagcactaaagagaaaaaggcttcttctacattcagaaagataatcaggcagtgcctttctagtttgctttttaaatctacacaccaagggaggagctctgagcagtactcgtgtaatattaatagtcatgaatatcaattattatgagacggatgagcaggtctgcctgtctgtgacaggcacctcc

SEQ ID NO: 29678 - DNA, 478 bp, Mus musculus
  source 1..478: mol_type = other DNA
tttgaaattaaataatgaaaatatccaaaaaaatcttattaattctgtctgaacaatatcatcatttaggtagcagttatatataaaatttagtggttttattatttctagaattctctagaacaaacatgctcaggagttttttatcagtagctcttgagctgcatttgttaaagagtctcaaaggctgcagctagactgtaattctagtaaatagcctcaggtcctttggtcataatttacatcttaacttatgtcactcttccactaattacgatgtatagttaacatcaaagttactcagcttagtgggcatctagcgttagtatatattttacagtaagaaaataaatactgcttaaaattgtttaattcatgatatatctgtgaataatctccaatcagttagcacatgtatctcttctaaatacactcaagccatctgcctccagattgttaacaatgcattgtgaggctg

SEQ ID NO: 29679 - DNA, 480 bp, Mus musculus
  source 1..480: mol_type = other DNA
aggtctatttcaaatatatccctaatataatccacgttatggatgagtctactctatagaaagcacagtgcaatctatttgggtttatagaagaataaacatagtatttttcccctacgtgatgtacacagagttctgggaatagcttatatacgtcagacactattgagcagctcaaccctgctgaatcatttagcaaggtacacttagttatctctcagagtatatataaccttagagtcctaataggaaatagaaggcatatttgagataaaaaatttaaaaacttgcaagctagcaatagtataagctgttagtagccttggtgaaggaaatgatatatttttgaaaccaataagacatcaagtgtagtggaccaccactgactcatggagcatgtaatgtctgagacacatgcagtaattattaaacttgccctgtggtcatttgtgaactttcactctggtgcacgtttagcca

SEQ ID NO: 29680 - DNA, 277 bp, Mus musculus
  source 1..277: mol_type = other DNA
cagattgtgacgcaggtgattgaacaattgtgttgcatctggcagctgcagcctaagctgagcttaatgttctattagttccataatattaaggctggtaattatagtgataacacaggttgcctggctatagggggaaatttgttcccaacaagctctgcctgttaggccaagatggcaccgggagtgtagaatggatgaaagattcttcacacttctcacttgtgcaaggaagaaagcagcttttccttctgcgtgacaagtgcctcggaggaca

SEQ ID NO: 29681 - DNA, 481 bp, Mus musculus
  source 1..481: mol_type = other DNA
aaaattttaaaaaccaacaaaagtttactgttatagaattgtatacacgaatatatagttttgatcaaattcttacttttgtagattgatacaaattcacaatgggacaatgtatagaagttttacctgatcaaaattgagatttttttaagaagtaaagtacgaatgaaattatttccctgatctaaactgagacaaatgattttgttttctttatttttttcaagtctacaaactgcacatgaacatttcaattttctatttactaattcactttggataccatgtgaatggcacgatagggtcctgtcatagcgttaaaatccccggggatgtaatttctgtgtttaaaaccaagtctaggactggatatgacaagagtgttgagatctggtccatttcgtgattccccttcaggaagtggaggtaactctcggttaaccacaacttacagtcagacagtgattgctataaaactgac

SEQ ID NO: 29682 - DNA, 298 bp, Mus musculus
  source 1..298: mol_type = other DNA
atggagaggagagaacatgagagagctgtttccatcttcccttctcaaaacagcaaatattaacaggtttcttgataacaaataactaactagcctttgtgattgtttcttgcagagaatagacattcaaggaaaaacagtactcagttaaatagaacgtgttccgttgttaaattatttattttgtatgtctgtttacatactaagacattgagtggtgcagcagcttcaatgtccataagcatctctgttcagctcccaagaagtcatgccctcatttgaggatggaatctttact

SEQ ID NO: 29683 - DNA, 415 bp, Mus musculus
  source 1..415: mol_type = other DNA
gaaaaaaaggaagtactttgtatactttgcaatgctggcccattagtgcctaaggcattatctatctcatgaccttgtgaaagtggggagaaatacgaattatatatctctgtgtcttcaaggttacagatcaagatacagattccgtgaataaaatttgtatggagaattttgaattcagattcctcattttgtataggaggaaatgaaggctgagacaccggatatcaacctttggccttcatttgtacctgtgcatatggggtgcaaacgaaggaccacaactcccagaatgcagtgcttcctagctattagggcggagaaagtgaccatttctctccaatccaggcacggaatgaaaggctattgtggttagccattcctccaccataaacttccgtggcgggaaaacttg

SEQ ID NO: 29684 - DNA, 385 bp, Mus musculus
  source 1..385: mol_type = other DNA
taccctcttgaggttggagaatccgggaggggggttcccctctcttgggcacccccctctgccctgtggagggcgccccaatttcctagcccttcagggctctgcagttccccaagtgcattctgaaagccgatattaaaactctaacttgggtcccagctcgggccgctaggttccgggcacctggcaatgagggtctacaaggtcgggaccagcgcggccgagctcctgcagcccagctccgccagccgcactcccgactccagctccgggagagctctttctgagcctccccgaccgccgagggctctgcacccgagagcggccgggaggaggggacaacccggatggcgacgcccagctccgccctttcccggcccagggg

SEQ ID NO: 29685 - DNA, 538 bp, Mus musculus
  source 1..538: mol_type = other DNA
cgggccctcatgagagaggctggcttatgatgaacattcctctttattaaaattcgagtttacaatgctttttttttaaatgacaaggaataacagtttgtcattcagtcctcagctgttttgtaaatgttgacattacatttctgttctactattccaggatatataaaacatcctattttatgagggccaggagacatggtctttgcctctgcagaaatatgtactagcaaaggtctctctcgtaattacttttgccaagagttaatatgacttcagctcagctacttttcttgttgccgaggcaaaaagaaaaagagagagccaagaattctgctgtcttggaagcagaggaatgcgtgtgccctcactcaacaatacccaacccatagggtgagtcttctcaagccctccaggacgtgctcatctgctcatcggcatttctcctaggtgacttcaaaagaagaaaggcacaattctcctgcctccagctccatttcttggagcaagcaagacaggtagatctctcctgtaatct

SEQ ID NO: 29686 - DNA, 470 bp, Mus musculus
  source 1..470: mol_type = other DNA
attttgctgaagatacaccaaataacagatttttaaatactgggaatggtaaaaacatggttagattcttccctggaacagggttgctggcagcttttcagcagcaaagccaattcaatttgttaactggcaactgcagtcactgcgggcatgcttggcacagcatacgtgtgtccagtgacatgcatgatgcactcacacatgcaaccgcagcagaagtatggatgcacagcgtgatttcctgggcattataccgacatccctggctgtctcaagcccccgaggggtttgcaattcggcgtcagtcaacttcctcggctgggctgcggtggctgtagcagcagagtgtgcaccgggctgggcagccctcccctgggccgggaaagggcggagctgggcgtcgccatccgggttgtcccctcctcccggccgctctcgggtgcagagccctcggcggtcggggaggctca

SEQ ID NO: 29687 - DNA, 384 bp, Mus musculus
  source 1..384: mol_type = other DNA
gggttaaaatatactacaggatataatatttgtggatgtgtaatttcgcaacattttgatatcattaatgttaatacttatccataatttcgtaatgtcttcaagagaaaacagtggtcatatacactcatgcatgtatttaaaatctgaggtaaatacaacacgcatttgacaaacccttgtttattgtctatacacttgaactatttaataattctaaaatgaggtgcaatcggagcccagtatgccatggtaggaaggcagccatacaacttgttaacaggctatcctaggagctgacttcagagagttggaaagttggaagttaccagaagctttggagtttttttttttttttagctgagttttagccaatcaaataag

SEQ ID NO: 29688 - DNA, 367 bp, Mus musculus
  source 1..367: mol_type = other DNA
aaataatggaaaaaaatctctgggcatcttagcttcgaatggggtcactttttttttaaaggaaaaaaaaaaagttgtccagaaaatactctgctcttatgtatcactgatgctatagctataaagcaagagttatgcagtcgattataatctaatccacagcccttgcctcataatttgatactaggacagcagctctttccccagagaaagggtgcctgagccgcccacccctaggttgcatcctctgggagccaggaagtggaaagaaagggggcggagccgcctctgccacacccattagccacgtcctgtggccactagagtcagtagtgctgtgcgcaggcgcagacctggcctccgcctc

SEQ ID NO: 29689 - DNA, 629 bp, Mus musculus
  source 1..629: mol_type = other DNA
gtgaaactaattttaaaaaaagaaaagaaattaaacagtcctctgttcattttgcatttctgtgaagcgattatttgttccttcattactggcaggattaaatccaatatttgctagtataatttattttaaaagaccttttgtccttccggaagtaattttgaaacttaatattaaatggaaacacttctgatcaattaatattgcaaagtaggctctactaaggcaaggccttggggtagctgctgaagtcgaggttcagcgcagggctggggccagtccacaggccggcacgaagcttcccgccccgggcccttcctgcagaggaagaagctgggcgctaggagtgggatcccggcccacttcctgtccagcagctcgggagccgcttcccggaggacagggcttcacccccggtggaagccgcaagcaccggtagcgagcgcggcacaagggttaggcgcgccgggctcgcccaggaggcgtggccggtggcgctggccaaagggggccagaggcgcgcgcctttgcggcctggtgtggctagaggcccgcgcctgtgcagccgctgcggggcgagggctgtggccgggggcggttccgggcggcaggccggggcggggcgggca

SEQ ID NO: 29690 - DNA, 434 bp, Mus musculus
  source 1..434: mol_type = other DNA
tgagtccaattgaaacatactgtacttgtttccgtttttagtggcaaggcaaaaaagatcgacagattctcttagaaggaaaattactttcccagagtctatgaagttcaggatactgcaacctttccagggtttgattaattcctgagatttaatgtacatattaggttccttcctctgttgaggggaggttcgtttattccacactccacagaatcttggataactggacttcccaataccagaactactgctgtataacctcttttcaggcaagactggagtggcgtgagattaccgcaaggcacactttcaaggaagactccaaatgctttccaacgctggtaagcttggggttttataaaagcagatcatgatctgcctagataatgagctgtaagggctctggagcttctgcaagtgggatccagcct

SEQ ID NO: 29691 - DNA, 388 bp, Mus musculus
  source 1..388: mol_type = other DNA
ttcgagggttttcatattattacacttccaggaaaagcagtcacattacttctccaataggatcaacaaacaaatgccacctgtttaatgtatataattaatgtatatgtctttgaggtaattctattaccgagaattctggagcacagtgttcatcctaattactattttgagaatttaccaagagacacaatttaatgtcagtgtaaggagattttctggaaactgattccctaccggcattcatgccttgaaatcaggttaactttcactgatcctgaagacctggaacctccactgaaagtggaaacaatttgtagactatgtatatgttgtttaccttcctattaaggagtccctctgcaagcatcatcccggccggcagggg

SEQ ID NO: 29692 - DNA, 363 bp, Mus musculus
  source 1..363: mol_type = other DNA
tgtgaagttcaaagataacatctctttttcactacctgcagttgacaaaaatttgattgtaatcaaccagatgctatccatcatatttatagtatgaaacccattgtctaatcatactttgatatcattaatcaatgaccttgccacgatgtctgcactcagacagctgtttccttacaacagaagctggtcagctactgggaagttcccagctccctagggcctgagaccttgaatttaatttttttcttaggattaaatggagtctgaaaccaaatactagaatgaggttctattgcttgttcccaacaagattatctgttcttaactgggaagggcgtattcaaatttaataagtagctt

SEQ ID NO: 29693 - DNA, 392 bp, Mus musculus
  source 1..392: mol_type = other DNA
agaggaggaagagaagaggttctcccctctgtttcctgtcttatcaggagatagaccagtgtaaccacatacaatctagttttatggggaaactccttgtataaaagtaagccaataaatatacatgaatatatacaaccattttttctgctatagaaaaattgagtataatcaattgaacttaactgagttcattaaaatgctttccattaagcatttagcccctggaaccaggctgaactcgaactcagaaatctgcctgcctctgcctcctgaatgctgggattacaggcgtgcgccatcacgcccaattaaatactaaaaccattttagacagtgatgaccatttaatttcattttatgtgcaagtatcttaaagcatttttagcctg

SEQ ID NO: 29694 - DNA, 348 bp, Mus musculus
  source 1..348: mol_type = other DNA
tcagaagcctgcgacagacatgaagaagaaatgaataacgaacaaccccaagtttctttctttcttttttcactctgtagaccagggtggcctcgaactcagttcccaagttctggggcaccaccaccacctggatgtgaagtgtcttaatgagtcaagatcacaacaactgttcaaaattagtcatcctgtttagctaaggagtctgggttcaagacttgtcatcttgctgccatggtgacaagttgacaggttttttttttttttttttagtgaaacccagattaaagaaaaaagaacaaaattcgggagcctgaggcttaatgaagcctgctttccttgagtaca

SEQ ID NO: 29695 - DNA, 388 bp, Mus musculus
  source 1..388: mol_type = other DNA
aaaattagctgggttccagactatgtcatcttgctgccatggtgacaaattgacagtgtttttttttttttttttttttagtgaaacccagattaaagaaaaaagaacattcagaagggagcctgaggcaactgcccagggcactgcaaggattcactgaagcctgctttccttgagtgccctctacctggagagatccagcagcctggtctacttaatgaggtctgggcagccaaggctacatgaggtcctgtctcaaggagggaaaaccatgttgtagatctgctccagaagttttgacattataaagaagaaaattttaggtgtttggacattcaaagattacttagaggcatttgagtctcctccctaaggtgggtcaaaatct

SEQ ID NO: 29696 - DNA, 348 bp, Mus musculus
  source 1..348: mol_type = other DNA
ctgtgacagagaacagtgaacaaccccaagtttctttcttttctggacactctgtagaccagggtggccttgcaccaccaccacctggatgtgaagtttcttacgagatcaaaacaactgttcaaaattagtcatcctgggttccagactatgtcatcttgctgccatggtgacaaattgacagtgtttttttttttttttttttttagtgaaacccagattaaagaaaaaagaacattcagaagggagcctgaggcaactgcccagggcactgcaaggattcactgaagcctgctttccttgagtgccctctacctggagagatccagcagcctggtctacttaatg

SEQ ID NO: 29697 - DNA, 334 bp, Mus musculus
  source 1..334: mol_type = other DNA
gcccaggacactgaaatgattcaatgaagcctgctctccttgagtacaggtttggtgtagcaagtaaccctttcaggcattggttggtttgtatattgactaagtaaccctttggtctagtgactcacttaaagtaagagtacaatggatcagctattaatggcacagctattatatagccctggctgtcctggaactcaatctgtagaccagactggcctcgaactcagaaatctgcctgcctctgcctcctgagtgctgagcagtcactttgactgcaaaaatgtgttttacatttgttgtttggaaagttcttttcgaatggggaaagtac

SEQ ID NO: 29698 - DNA, 559 bp, Mus musculus
  source 1..559: mol_type = other DNA
aacaaggagacccaaggggaccctcttatggtgaactgctcagtgctgcagttctccctcccagggtaacagcttttattcggggaaatttgttttgattaatggttgtaattttgacactttggagtactaactttcctaagctcccctggccgtacttgggaactacagcagaccatgagtattctgatgagttcacatgagaaattaagttcttgtctcctggcagaggatggtaataaggacgtcttaaaagtcatgattttgacaatttaagtcagtataagttaaatgtgttttacaagcaccaagtggatttgatgaaaaatattgataagaaaatatcttctgaccccatgaaaatctttccaacaggttcatacttgaaattaagctttagttctgagctgtgcttcagtgctgcttacgcataacagctttcagttcgtagctgtttagcagtttccacatttatttgttgatacatagaagaaaaggcattcttgatagaaatttaatcatgctgtgtttctgtgtgagaaagagagagatttcactg

SEQ ID NO: 29699 - DNA, 248 bp, Mus musculus
  source 1..248: mol_type = other DNA
gagtgctatatttaaaccatatgactttgggcaaataagtagcacttgttgtgttcaatataattttatcatgtccctataaaatgatgaattagttaaaatcatcagacagtactatatttgacgtataaaaaggcctcctttaaaggtcctataatattacatgttatttaagtaaacacagcatattctattaagttaatgaagcttatattatgaaactgataaaatgatgaattttgctctat

SEQ ID NO: 29700 - DNA, 443 bp, Mus musculus
  source 1..443: mol_type = other DNA
tggcccaaacatgtattgaaaaagctctaaggacatttctgggtaaggagcttctaaaagcacaatgtgacacagaaactatctgagaactactgtgagtgttggacctcctagagttccctgccgtggctgagggtgccacctactcgctctctgtttttgatcagaatccaagacttgcctactctctaacattcataactttttgagaaagttataggatgtccagggcctacctatctacctcctcaaactctttttcaaattgacctttagtttttgatgcttttaaattcttaaaagtctttgcatcagcttgtataacttactgttgatgatgatgataatgttgaacaagaacaactgcacgcagtatagcatttatacttcgttggcagctgctccccagggccagagcccacgagccaacctgagccagtgca

SEQ ID NO: 29701 - DNA, 478 bp, Mus musculus
  source 1..478: mol_type = other DNA
aaacatgagctctctgtggggatttttttttttaatcataaaatccctaaggcgttgaattacttcaggaaaagtgactgatagagcttaaccttccgttttcctcatttattttcattagagaatgggagtggatgctccagaaactctgatccgcagagatgcatgcaaaactgtacagagcctctgtggtcataaaacacataatagaagcattttccttgttaaattttctcaaaggatttcgataaacttactcatgttctagtcctagtaagtcacttgcatgattgtttcttatggccaacagtttcataaatgtgtttgacacttagtagatgaataataaatgtttctgaaacatataaactatatcttacataaactttagttatatttctagggtgcagtttacagaatgttgcctgtacatttcagaagttgacagtgagcgactgtaaacatcctctgtgacttt

SEQ ID NO: 29702 - DNA, 562 bp, Mus musculus
  source 1..562: mol_type = other DNA
tacatcactgctggtatgtggcaagtacatacaaatgtttatctaatgcatgaatgagtgatttgtaaactttctctttgctatccaatagatcaatttagtaaatcaactctattccaggaactgtttgaatcattcattatcagaaaagaacttaggaattgactggctccatttatgtgtatgcctccagttatatatttctttccacatacaacattttaaattttctaagattatgctatatttagtgtaccagcttaatgcattatattggattgatttatgacttcataacccaccaataagataaatggctgtcagtgattaaacttttgtatagtcttatgtctgcagatataattgaacagttgttctcagttctgttaggagtgaagcagaacaaaatgcctgggtattagggccaaaccaggaaatcccaggagaatcctggcaatcaagaaggtaagcatcctgcagccttcttaccggctcagagagcactgagtgacagatattgtaaacatcctacactctcagctgtgaaaagtaagaaagctgg

SEQ ID NO: 29703 - DNA, 383 bp, Mus musculus
  source 1..383: mol_type = other DNA
tagatcacacaactggatttgcaatctatttaattactagttctgagtacaattgatgcatctaactagctcctggatctggtccttagaaccatagtcttcagcacttttctgcccagagcacaaatgtggactactcactgatgaaataatgctttgtgagagctctgacggaccggtctgctgatggagacacctccttccactctctgacctgggatcaggctgggaggagccccaagggggcggatcccggtccacagggggcggggcagctgacccctggccactcccggggaccgtggaggggggcgcgtcccggtggagctggtgccgcgcgctcgggagggctggctgggacgcgtgcggcggcggctccgggg

SEQ ID NO: 29704 - DNA, 287 bp, Mus musculus
  source 1..287: mol_type = other DNA
ttactccctggaatgatggcatcgcaggccagttaccactgacctcaggaaattcccttaagtctccatcttctgctccttcatccagaaaatgaaggtgattcctccaaagcctccttgaaaggattacagggacagatccaactgtggccgagcagtgaatgggctggcacacatgccagacacctatgtgcggcacgttcagtgagctgaaccctggggcccctccccctgcctctgcccgcaggcagcgcctggtgccaccgggctcagaccccgcagagagc

SEQ ID NO: 29705 - DNA, 438 bp, Mus musculus
  source 1..438: mol_type = other DNA
tcctaaggttaagcctaataagctcattgacttcttaaagtgacatccctttaataattcacggccaagttgagggaggtagggtttattacgttacctctcccccccatgcatctacccattataactatatatatataactataatttggacatttccagtgctgtgtacacaaagcaaagctgtgaaaaatgcaaagactgtgcttccactttcaggtctctagaggcttcaagcgaatctcgccccggggagcgtcagacgcttctctggaatcaccttgggagtctcccggcacgcgggcagctgggcgcatgcgcagcgcccagcgctgcgtcctcccggaagcggcggctcttcccgccccgcccctcgccggctcgggcggagcgtgcggcgggcccggcgaggaggcgggacacgtcggcgctggctcg

SEQ ID NO: 29706 - DNA, 536 bp, Mus musculus
  source 1..536: mol_type = other DNA
gaggaaaggaggaagggagggacccccccccccaatcctttctgtgatgacagtgtatgcttaaaacagttttttgaaagcttcatacctatatacagcttttatgatgctatttttttcatgctcaaataacttctagaagcctagaaacacttttcagaagctttccagaaacttaatttttccaattaaaaattctacaagcaatatgtgaaacttaaaatttcaaatggaaagaagacattcaaagtataaagaataatagtcatgttcttttattcatttagaatttcttgactatgacagaaacaaataccatttgtagaacgtcagtttttgtgtgagtgttaagtgttagtgaaacaaacactgcctgctgcctgccctgtctctgctccaggacatgtgtaaaagcttccaggtcatatggattatgtccatatattttcaacatcataagtggtttgatactctatgttccttttaaaatgttttaaaatctgatactcttgagatttattgcatcagatgtgctg

SEQ ID NO: 29707 - DNA, 504 bp, Mus musculus
  source 1..504: mol_type = other DNA
caatgtacattggtgcctttgttcttatcactgtggctattgtattaatggagccactgagtgtcatatttcaagggttttaagctcaatatttttaaaagatctcttttgtaatgcaagtttgcatgccatgagtgtgtcagacattccggaacctgtgttttaaaataatttctaacagatccctgtcatggaacaatctcaataatcaattcacatgacaatatttgaacgtactaaaattttttcaaaatgtgggaatcttcaatctaattaaatgttttatgttatttttaactacagattttagcaattaaattagggtgattcaagtttccatctctgtattggactttgaacttaaagcatcatacactaaggtggtgtgaactctagaatttattatccatcggaatagctaagagcgctgcccaggtactgcgcaggacccgcccttctctgccctcgttgacgcctgcgcagagggcgcgggctcccctgtgg

SEQ ID NO: 29708 - DNA, 485 bp, Mus musculus
  source 1..485: mol_type = other DNA
cacttcctccagcagctactatccccaaagcagctctgcctcagtgggataggaagtgccagcctcacagactcaagtaaataaatctttaaaaaatgttctgttctatgggcttccgttaatggaatttaagacctgaaagcttctatttaagatgtcatcaatcaagacactggccacaccatggatggccccattagctgctggggcagcaccgacccactgccctggcagaggcgcgagggtcggctctagcctagatgacttcgagagaaatctcccccggctgggcctcccgttctcgcgggaactcgggaggggcaatctcggttggcgccgggggcccgcggcagctgagtctcctgggggggcgggacttggagcccaagggggcgggtcctcgcctcggagagccccaggggcggggccgcgggccgggacctgttgaacgcaggtagcgctcggcggcccggttcccttgggac

SEQ ID NO: 29709 - DNA, 308 bp, Mus musculus
  source 1..308: mol_type = other DNA
aggagtcctgttgctcctgaggagtgctcaggttcaggaggaggtctgtgcacaagaaacagtggcgtgtgcacacctcaatcgcatactattaatctcagagattgagagcaaacaattaaaagacttgaggtcatacttgcaatgaatagcatcaatggtgctctgggagagtcaccctctcatctagagatgagatctagtagttaactaactgctaaagcagaagtgggtttaaacttaggtcctctgcaaagctgttctaaaatgagccaggcacacccctggctgggcctgggttacagaag

SEQ ID NO: 29710 - DNA, 173 bp, Mus musculus
  source 1..173: mol_type = other DNA
cagagtagccctgcttcccaggccagtggccaagcttccagccatctccattgttctgtttaggattataaaccatatcaaacagcagaagcctggggtggggggggtctcctcccctgtagggcacagacccttggcagactctggggacagccagaggctcatttaggcct

SEQ ID NO: 29711 - DNA, 404 bp, Mus musculus
  source 1..404: mol_type = other DNA
cctatgctttgattcatatataatcccaacaacgactgctagaagtttagaacttccaatccgtatattaatttcatctgaagaaaatttgtggatctaaccatagctttatgcccattgtcctagaaatggttccactaaaatatttcgaaaactgatctgcttcaataatttaatttcactatgaagctaagagcgttaaccttttaagttaaagttagagaccttaaaatctccatagtgatatcaactagatacatcaacatgatttatcacaattatctcatcaataattaccctatttatcgaaaatctatttgcctcattcattacaataataggattcccaatcgttgtagccatcaataattgtttccctaatcatatttattggatcaacaaat

SEQ ID NO: 29712 - DNA, 619 bp, Mus musculus
  source 1..619: mol_type = other DNA
gtgaaaatgagctatttaaaaatttgttctgagcattttaaaatctagtgagacttatgtctttgaggtaacactctaaggtaatgatttccattcttatggattaataatacatattttctaaaagaagttaagcattgtttaacctgtgggttaatcttacaaattctagtgtttttaaaaaaatcacacactatatgtatataaatatatgtgtatgtttactatgaatgaatataaatctgaatatagacacataatactatatatatgtatgtatatacttactgtaggtgtatatgtactgctatactatttatagactattgaagataatatacctttatggatgtagacacaaacctacatgacttgattaactttagataaactcaagaaatagaagtgcaaaataaaacatacacgatacccttttttatttttagctcgactgttaaaaagccacaccgtactttgaggattcatgaaattgctattaaaacagcttagtacccagctctgtgtgatcaaggaaaacctgggcatgagttgctgaggactgtcttgctgagtcctccgtgctcaccgagtgggagggtcatgcgtcccgcttccactc

SEQ ID NO: 29713 - DNA, 439 bp, Mus musculus
  source 1..439: mol_type = other DNA
atgattaaaattggtttcaagccaatctcatatcctatatgtctttctcaataagatattagtaaaatcaattacataactttgtcaaagttaaattatagatcaataatctatatatcttatatggcctagaagagcaataattatcatctcgctaatattaacatgaaaccatttgaactattctaccagctgtaatcctttatatataacctatgctttgattcatatataatcccaacaacgactgctagaagtttagaacttccaatccgtatattaatttcatctgaagaaaatttgtggatctaaccatagctttatgcccattgtcctagaaatggttccactaaaatatttcgaaaactgatctgcttcaataatttaatttcactatgaagctaagagcgttaaccttttaagttaaagttagagacct

SEQ ID NO: 29714 - DNA, 424 bp, Mus musculus
  source 1..424: mol_type = other DNA
tatagcgacgatggagttcatccataaactgttttgactgcatcctaatggaaatgttaccacccacattcagggtggggcttctcattcgagacaatttgtcactgagaaactaaatatcacgccggggtttgtttattcaatttaaatacacactaatacaccaattagcacctacagttcatagactcggacattttaattgtatgaaaccatcatggggtagcacagtgccgtcaagcaatgacgtgacctggtcatcagcaaattataaagtcatctgggcagatgacattcttttattctgagtcattcctgcaccaggatgacttctgattgcataatgggatcaaaaccttgtttagaggcacagacactcaagtggcacgcaggccgcgcgtgggcgggcagcgtggtgacgtca

SEQ ID NO: 29715 - DNA, 451 bp, Mus musculus
  source 1..451: mol_type = other DNA
tggaaatgttaccacccacattcagggtggggcttctcattcgagacaatttgtcactgagaaactaaatatcacgccggggtttgtttattcaatttaaatacacactaatacaccaattagcacctacagttcatagactcggacattttaattgtatgaaaccatcatggggtagcacagtgccgtcaagcaatgacgtgacctggtcatcagcaaattataaagtcatctgggcagatgacattcttttattctgagtcattcctgcaccaggatgacttctgattgcataatgggatcaaaaccttgtttagaggcacagacactcaagtggcacgcaggccgcgcgtgggcgggcagcgtggtgacgtcacggtgcgtcgggtgcgccccgcctcggctcggctggtcgccaggggacgctcgcgggccgggtctccttggcaac

SEQ ID NO: 29716 - DNA, 344 bp, Mus musculus
  source 1..344: mol_type = other DNA
cttcaagttttagagtcactttttaacacatatagtaacttggctaaaatatttaactagcgggggcgggggggggtgacagggttctcccccatcaccaccagcatatgctttagcattttaaatggctaccccctcccccatcctgctggactttggggtgggttttgagtgggagcttaatctgaagcccacccctccctgggtcggaaccagctgatacctcttcccgtttccaggcttttcagagaaatccgcattttaaaagacagcattcgaaaagcctctttacactctgagtgtttgaaacgatcccgaagtctgccaacgctcggcggctgctg

SEQ ID NO: 29717 - DNA, 232 bp, Mus musculus
  source 1..232: mol_type = other DNA
ttagaggcttagccctacatatagagcagagcactgcatttatgtaaataaataaaacaattaataaaaataatttactggaatatctcagaatgaatagactgtatgtgcagacagagatctatctttgactgcttcagcagcaaggaggcagaggagggcctgtgcaaccctcccttctgcaggaggcctcagctgtgtgatgtggcctgaggcctcctgaaaagtcaga

SEQ ID NO: 29718 - DNA, 421 bp, Mus musculus
  source 1..421: mol_type = other DNA
gcctgggcgcgggctcggctagagccccgaggagcccgcgcccgcccgcccgcccgcccgcctcgctcccgcgccccccgcccgctcgcccgctcgcccgctcgcccgcccgccagctcgcccgccgcgggggaggccggactctggtccgggcgcagcgctccgccggggacgcgcgcacccacgagcacgcgcgcgggagggttgcccagcggcgggtgcgcgccgaggaacgcgcgggcccccttcgcgcgcagcccggggagagcgagcgccgcgcgccggcgcgcacgcccgccacacagctccgcgctccgtccatcagtacctggcagggaggagggcctcgccaccggccgggagcactcctgccaccagccagcgccgccggtgggaaaacctggccgctggataccaccgc

SEQ ID NO: 29719 - DNA, 517 bp, Mus musculus
  source 1..517: mol_type = other DNA
gtgaatgacttagctatttttgataatgtttacaaaagcatgtatcattgtctctaagcatcataaaaagaaattctaaattttttattaaactatctcagaatagaaattttggaattaccttttgtcaaactaagagcaagcagacattacacttttcattaaataaagttctttatcttggctatatcacaaatctatactagaaaaaatgtgagtgtataattgaaaatagccacatacacatatatccaaatacaccccatttggtaacatattagtgttagctcattcagtgaaaaagattgagtcacaaactttgataacagatcatcccttctgatacaatagaagtctttataaaaggaatgtttatgaatgactatgacatagcctcaataagtctattcatgaatctctacttctccagaaatatgagaaccatctgagtttagtcattaacttgaaatgactttggacttctgagtttagataagcccaggacatagagtaattt

SEQ ID NO: 29720 - DNA, 596 bp, Mus musculus
  source 1..596: mol_type = other DNA
acatttgaaatgtaaataatcagtattcatgttaaaaatgggtgcagtaacttaacagtacttgcttagttataaataactggatcgttttgctgacaacttagattgtatgaattatgcttaaaagctttaaatctgatatttcctgtgcctggcacaatatgttagaatgtgtccttccttgaagtctaactgatcttcattttaaataaaatgcagttttaagttttgataagttgctgaattttaaaaagttttttggggacaccaaatgttttggatcatgaagagaatatatattgttctttagtaattttgtctttatatttgcatggtatgacataatacatgtgaaagttaatcactgcttgaccatgttaataaagttgtttaactataaaagaataatagtttactgggaaaaatgcatatgtgtagtcagcctaatcatagagaagcctactttgtcaaaacagagatctatctttgacagttggaggctagggagaggctgtgggcccctccctcctacctgtggccctttgtgatgaggaggcctcagctgtgtgatgtggcctgaggcctcctgaaaggtc

SEQ ID NO: 29721 - DNA, 357 bp, Mus musculus
  source 1..357: mol_type = other DNA
aaaccgacaggcaacagttaaaccataacacttaactgagtaaacaaaactgttgtggactccgaacacactactgaaggactccaggggttttaccttatagttgtgtctattgatacattggaaacttaagaaaaataaccctaagtgctattgtctgtcacagatgctatgatagatcctactacaatgtatcagaaaacttgaagtgtatttaaccggttctctgatgcagggtgggggcagcggcacccggaatactcaggcctaacggccccgctcggccgcagaggcctggcagagcctcgcgggcggctgcgcgcaggctctagcgcgcaggcgcggcgcacgctgccc

SEQ ID NO: 29722 - DNA, 674 bp, Mus musculus
  source 1..674: mol_type = other DNA
cgccgccgccccgcgacgcccaccgccgcctgccctgccgccgccgcctgcgccgcctcgggaccggctgtcgcgggcccggcctttgtttggccgggcgaccgaaacgccggcggcggggcccggacccggagcgaccggcagggcagcccagcggctttgtgcgcgtgccaccctgcgcgagaagccgcgcgggcgtcgtggacgtggccggggcggggcggggctgcggggggaccgggaccgggcgcccggggcctcccaagatggcctcggtggccgcccgcgctcgccaccgtgaaccctcgcgactgtgcgcgccgctcaagcccgggcttgccgatcgccgccgggcttcggtagtggcgacccggtcggcggagggggactctgactcggccccgaggcgggctgcgcgtggggcggtccgctcttgggcggagcaacaggagctgctgggcagaactgcgcggctcctgttgagcgagcagccctgcaccattccaccgctggcgagctgaggtgaccagaggtctggattccggagcttaggggtcatgaatcctattattatttgttcccggaaggaaacagcgcttgcacacgcgctagattgggcgcgttctagagtctgacagactgacacacatacacacacacaaatgatccttttt

SEQ ID NO: 29723 - DNA, 512 bp, Mus musculus
  source 1..512: mol_type = other DNA
caggtaaaggtcctgtttacctgtcctagatttcagataaaagctgcccttgtatgatcaaaagcttagcttttgacgcaaaaattcttaatttaaaaagaaaaagcttccccttagcaaaagctaacctttcattatctgagactgcggagagccttcccacacgtggaatccctagtcccagactagggccgggctctggagcggtgagtcccagcggtcatgcgagtgatgacggagatccccgggcgcaagggccaaggtaaaccgttggccagcgcgacagagctatggcctcgggctacagggttccgcccgccggagcgcggctctagcgaccggagcgtttggtggcgaggaccagccagcacaccgcgccattcatcaaccggttcgcaccggtggcggctgccccgagtgacgtctgcgtcccgggccccgcctcgagccgcaggcgtcccgcgccgtgattggctgccgcctgtgcgcacgtcgcgccggctataaagggg

SEQ ID NO: 29724 - DNA, 251 bp, Mus musculus
  source 1..251: mol_type = other DNA
cattgccagcaggaacaagaacagtggtcattgttctgatgaattctggcctgactgaatcctaccatggaaagaaagtatgtgaattacaagcatggtacaaatctatgtctttcactttgataacacagctgtctaaaaaatgtttctaaaaaagtcacacagttttaagctttgtgtcccgggcatggctcatatcctgtgccttgggcatgacagagtctttgtaagaagtctacatataaatgcac

SEQ ID NO: 29725 - DNA, 265 bp, Mus musculus
  source 1..265: mol_type = other DNA
tattaaaatccaaatccctttggttcttggatatcaatttgaatttcagaaggggtttgttggaatacaatctcataatctggaatttcacgaacatccattccagatattcccagggcccatggctccaatagtaaatgagcattgcccctaagacaatgtcacaaattgcatattttttccattattcaaatatagataaagtgctgttcacagcctaggagccgaaaagctctgctagccaatcacaggagagtctaagtag

SEQ ID NO: 29726 - DNA, 320 bp, Mus musculus
  source 1..320: mol_type = other DNA
aggaccacctgcccaggggtagtactgcctactgagggctggccctcccacatcaatcattgagaaagtgtcctccagtcgaaacacaagattctttcttcccacctagactatgtgggtgctgagaaataaaccccagttctctggaagagcactgaacgttaagtgctgagccacactttagaaggttttaaaattacctctgggctgagccactcaggagctagcatgatggatcccacagcctaaaggtcgatctacttagactctcctgtgattggctagcagagcttttcggctcctaggctgtgaacagcact

SEQ ID NO: 29727 - DNA, 427 bp, Mus musculus
  source 1..427: mol_type = other DNA
ataagggattgtttgggaaaagataattttaaagaaagaatcatttcattttaagtacccatctggaagggaagggtacctcccttatccctcgtgggtaaaatactcatttaaataaaggtacacagtgagtactacagaaatttgtacattagccaagatataggtcatgggaaacacagcccacattttgtctcagattgacacctgtgccttggagacctaggtgaagtgctcagcctctgtgctcatgggggcagcactggccaggcctgagaacacggcgggctaaggcggccaggagagtgcgcttgcacttcgcacacccctcctgccactcaggcgacagtctccgcgtgcgccccgccctcggaccccgcttccaataggaagccggcggggttgggccgcacgggcatcctctcca

SEQ ID NO: 29728 - DNA, 364 bp, Mus musculus
  source 1..364: mol_type = other DNA
ttggtaaattggtaccaatatcgcaagtttcctccaatattctgaaaggatccctctcagatgaatatgctggagaaacaaattttgtcacacaacactacctactaggttttataattgtaaaattctatttattctttgtaattagcaagcatattatgtgtgagaagatattttggagagcacttaaatttctagttttctaaaagcctgtgttttgccaaagaactgtgatatatatcaatacattcaaaattgccactggggcaaaggtgctttaccaagttggagttggggagggcttccaccctccaaaaacgttgcttagcatcctttcaggtgacatcacaaccagctatggacc

SEQ ID NO: 29729 - DNA, 517 bp, Mus musculus
  source 1..517: mol_type = other DNA
tccttcaaagtactaggatatactatgtcccagccccatcccagagcttgtgggtggcttttgtagggtagaccgcagcggccgtccaggctcttaggacgccacctagctggcctcgctgtggtcccctcgctcgcgtgttccctggcgagcatcgcgcggggacgagctcttttctcgtccggaagatgaaggcagcgttgctggcggctccttcccacctcctggaatgacagaggggaggccacccccggtaagcgcccgcaagcttccggagcctcagttaccctgactctggctgcagcgcgggaagtttgccgtttgcactgcagccccaagcccaaaggcgtctccgcgcagagagggcacctgtcaagatatcttagggcgggtgttgcggctcagcctaagcccagcacttgtggcaccaattccaagttagcctgggcttcggtgcgagacacagtcgctaccgcgccacaccgcggtgggcggggcgccagggggtgggacctct

SEQ ID NO: 29730 - DNA, 387 bp, Mus musculus
  source 1..387: mol_type = other DNA
ctgcgggtaactagcatttctctggtcacccggaaagcagtgaaataaattatataaatatatatttatattatatattatataaattatatatatatgttatatagtatatattgcaatatatagtgcttaggtggcaacgcaatatatatgttagagtaaatatttatggaaacacaaaatattggatgcacagacttttttctgtgttgtctagattttctatacacatctgtaataagtttctaactctggaatccagcctttccagaattgtttaaccagccagcagccaggctgaaagaaacacccgcgctgacagccgctctctcccagtggcgggagagtagaggtcccaccccctggcgccccgcccaccgcggtgtg

SEQ ID NO: 29731 - DNA, 428 bp, Mus musculus
  source 1..428: mol_type = other DNA
aacaatgggttctaaccttaagcttcttgtgtagtggttccattacacaacttttattttgatgcatacagaaacaaccaacgtttatgtattttgagacatagtttattgtagttcaggctggccttgaaatcctgatcttcatgccagtactaggatcacacacgtgtgtttccacgccgcgttcaaacaaattatttgtacttcagtgctaccacgtgagtctcaggtggtgacagacttctgaggcccccggatacctgaccctgtgtagggaaacaaggcacaccttcagtaggttagcacatcctgctcaccttggtctccttgggtaccaaggcctgatgctgtgcaaacccagcccgcgccttccctgccagcgcagggcggggccggtgctgagcatgcgcagaccaggtggcgcatgc

SEQ ID NO: 29732 - DNA, 477 bp, Mus musculus
  source 1..477: mol_type = other DNA
gactttcaagatgtccacaaaatgttcagatttcacggttgtatcgtgagatgacagtgtttaaatccaccgtttattactgggtaaaggatgtaaatgtactttgtttcccattttctgtaccctgtacactgagaggacaaaacacaactttaagatgcggcttcgtatttcagatctgcagtgaatatcattcgaaaggggagacaacacggatccacttggcttctccttctcccgagcctgcctggtcaccggacaggtcgaacaagtagagactgccctagggtgcactggattgtctccccgtgggtgctgggaggaccggccgaggccctgggcgccggggcagggtcccccaccctggcgtgcccgcggctgcgaccgcgcctgcccttgtttggccgcacggcctcgggggtggagagccggggaggtgggggcggtgccgtccgcgtcagcggcgcccgtggtgac

SEQ ID NO: 29733 - DNA, 382 bp, Mus musculus
  source 1..382: mol_type = other DNA
gcggcctcgggcgagtgcggggcctccgggcctggtgcacgtctgcgtggagtcctcaacaatggcggtccggccgcccccagcccctggccgccctagccgaagcagccgcagccccgagggtgagaaggcaggctggccttcttgaagcctgcatccccgaccccgggggtttagagcctgcatccctgcccctgtaagaggcggggaggggaattgtggcagctcgcctgggagcacgcctaatagaatcatgattaagccccactcatgaatggggatacctcagtgcttggggctacctgaacaattggagtaggcatccgaaggcttaacttctgtcccaaagaacattgcatcttcatctgtgtcacctgaaaca

SEQ ID NO: 29734 - DNA, 354 bp, Mus musculus
  source 1..354: mol_type = other DNA
tttattttataagagtccaagtgtatcttgaaaaattacattatacccctgggatgagactgaattagaaaacatgagagagattgagtagctcaagtgcttcaggtcttggacttctatcgatccatctttctggcccgaaacaaagaccattgctttccatgctacttttagtttacaggaacggacttctgcgagaattaatgacctctcaggaatgccatataggaaaactctaaccatcttccggagatgcagatgagcgccgagctccggatcctcgccacccccgccacgcggtcgtcagcctcgagaccggcggtcccagaatccctcgcggggcgggaggaagag

SEQ ID NO: 29735 - DNA, 294 bp, Mus musculus
  source 1..294: mol_type = other DNA
acagttaattaagttgaatgaatctccatagggcttaaaactctcagcccagttgctcagtcttcgagaactctcagctctgcctgcgccatgcctgcctggatgctgccatgctccagttaaatgttgtttttataagacttgccttcagactattacggcaaggtgcggctgttcattttcttcataagaagaaagcggtgacaagaggtggagcttccacttgtctttcaacttcaaaggacagcagcgtatgcttgccaatcagagaatgccagggccagccaatggccg

SEQ ID NO: 29736 - DNA, 628 bp, Mus musculus
  source 1..628: mol_type = other DNA
cctcagcccaggaggacctccgaatctccgtggttatccaaacctggtgcttctgcccagaagaacccagcggcggcgccgaaaagaccgatttcatcggatgtctccctttctggagcttgcggtgccagcagcagaagaaggcgaggcggggggccgtgcggcgcggggctaaggctgcagagcgcgcggggcgcggggcgcgggacgcggggcgggcgcggcggacaggggcgagcgcggctcagcgcgtcaagcccggcgctcgcggccccgcgcgcggcccaatggctgcacaccccgcgccggccccggaacgactgatggagagcagcgggcagctctcgccatgactcagcacgcggcgcagcggcgagagccgcgcccctccctccgcaggcgccccagcccgcgcgcagctctcgggctcagccccgcccgggacgcagccggctgggagcatcatcgggtggccgcccggggcctcggcgtcctgaagccggcgcacgtggggcgggacggggcgcggcgagccggcggggggctcggtgggtgacgtcacgggctgcggcggcagcggcggcgcgggtgcgggcgcgcgcgcatggctggggccgggaccgagcgg

SEQ ID NO: 29737 - DNA, 753 bp, Mus musculus
  source 1..753: mol_type = other DNA
tgacagtgcctaaaaatttctcctgcagtagctcactctgggctgagaatcagcacaggggtggtagggtgcaagcctgcagaccgcggcgtgccgcctttcctaagattggaccagcttggagatggcccttccaggtgctcgcgcctccatgcgcagggactacgcatcctccgagccccagcctccgggcgggctcagggaggcgggagcccgggttccccccggctccttggcgccccctgacgtcggcctccagcagaaggtccgcggaggcttacacaggcgaaacccgggggtccccgcgcaccgccgcccggcgcgtggcctggcgggccgcgcgcgcaccgaaccgacctgctggagggcgcgcgccgctcggtcccggccccagccatgcgcgcgcgcccgcacccgcgccgccgctgccgccgcagcccgtgacgtcacccaccgagccccccgccggctcgccgcgccccgtcccgccccacgtgcgccggcttcaggacgccgaggccccgggcggccacccgatgatgctcccagccggctgcgtcccgggcggggctgagcccgagagctgcgcgcgggctggggcgcctgcggagggaggggcgcggctctcgccgctgcgccgcgtgctgagtcatggcgagagctgcccgctgctctccatcagtcgttccggggccggcgcggggtgtgcagccattgggccgcgcgcggggccgcgagcgccgggcttgacgc

SEQ ID NO: 29738 - DNA, 399 bp, Mus musculus
  source 1..399: mol_type = other DNA
gacagtctgtctgacaagccgcatgtgagtcctgtgggagttgcacacacagcctgttggtgctgcaggtaccagtgtgagtagctcactgttattacttcaaattggatcattgagctgatttctgcctgcagcttgctgcttggggaatccatggctgtagcttccatctcaaggaattcgaattcaagttatgttagtttggctgcaagtgaagacttccctttgatactcttcagaattcttaaaagcgcctgcaggatccaggaagagtatttaaattatctcaagaactctaaactgagttcagatgtttgttggtcttaagaaaaggctcttctcaccagcggacccattatgaaacttaaagttagttgcattaatgaattaaccagaagg

SEQ ID NO: 29739 - DNA, 456 bp, Mus musculus
  source 1..456: mol_type = other DNA
catctgtaacagatgaggttttgaaatgtttcctttcctggtacacagaaattgtataagtgcaaggcgcagctgttcctgattttaattgttctcttttacttggtaaatgctctttgaaaattaaaatgtttaactcagtttggtagggaagtatttagataaaaaccttcatttttcttgacacaagtcttttgtgggcacagaccagtctttggcttttagaatccaaacaagaaaagtaattgaacatttttccagttaatttaatgcggtggtcaaatggaaacagatttggtttctcattaaatttgtattgattattgacttattgattagtccagtgggatctgcttgctgaaatatttggcatatctttcccatctgcccgtacttgcagggcttgcatagtatttgcagtgcattgcatatgcacgccacagcatatttaaggat

SEQ ID NO: 29740 - DNA, 369 bp, Mus musculus
  source 1..369: mol_type = other DNA
tacttagctgatttgacaacttttccgttgtgaagccttctcttggcacagaggacttgagattctgcttgcctgtgttagtaatgacgcatgcgaaattacataatcgaggaattacataatctttttgttaactcaatttattaacaaaaaatatatgtatagtgcaatattaaagtttccttctttatcaaatttcaatttaatttccattttttttataccttttttccaagtagtaagaaagagaccatctcttctgacttaagtcataaacgctatggctgattgtgtcagattttctcagtgagactgtgtagctctaacacttccttgaaatgtcgggagttcaactcggcgcgaggtgga

SEQ ID NO: 29741 - DNA, 251 bp, Mus musculus
  source 1..251: mol_type = other DNA
caggtccctgtatatacctaggccggccttttaaatctacgcgtgcacggattaacccgaggtttaacgcgggcatggcaggagacactggaactccccgggttgttcttcttggggctcccaaaactagatttgaggcttcaaagtgtgagcatgaagggctccagcttgacaaggcagactcccgtcttgtatccaggcctccattttatacaataggccattgttagccaatctctagcctgccaagc

SEQ ID NO: 29742 - DNA, 176 bp, Mus musculus
  source 1..176: mol_type = other DNA
gtttacacctcactcgcggcgcaggcgagcctttaggacgggcaaccaattaattacccttcaccggtgcttgagctggtcaggcaaatccgcgtcctggctggtgacagggatcacccggaagttgaagcctttgacttccggccccctaagggcggatcttgagcgcttggctc

SEQ ID NO: 29743 - DNA, 93 bp, Mus musculus
  source 1..93: mol_type = other DNA
tttaaaactaaataaaaactagatattctgtaaggtttacacctcactcgcggcgcaggcgagcctttaggacgggcaaccaattaattaccc

SEQ ID NO: 29744 - DNA, 471 bp, Mus musculus
  source 1..471: mol_type = other DNA
taggtatcaaatctttcatcacaagctaactttgaattcacaatgtaagctagggtgaccttgagtctttagtctccaggaccccaggagcttcagcataagatcttcttcaaactcctgaagggggacggagtgagtgttgagaaggactgaatcctgcccgcttttccagcataccctcagaaataggccttttcccagagcaaagtgcagggaatatatttatgacctcagcgctcgcaggactccggagcaaccttgggaacccggcctgcgccatccccctggaaaggccaatgggacttcacggcagccgaagcacccgaggcgccagtggggaattgcgggacccgcagctacttggacggccagttcggctgcggtggcagccgccattggccgaggagcctgccaattaccggtcttcattggctgctggaatggaggccccacctcgcagtggctaaattc

SEQ ID NO: 29745 - DNA, 348 bp, Mus musculus
  source 1..348: mol_type = other DNA
gggaggtttgcttagcttcccaatggttcctgtaccacacagtggctcagctatttcacagtgacctgcagcagggctatggcctcaggaccaccctgccctgcagctggaaaatcaacctctacagtctgggttaaggtaattaattaggcaagtacatttttaaagaatttcaatcctctctctctctctctctctgtgtgtgtgtgtgtgtgtgagagagaaagaagaaacagtctcacaggagggttggggtctcacacactctaccccttccctcctttcctgctctgaagactggggcaggcaggaaggaagcccgtagcctgggctgagcttgctcccccc

SEQ ID NO: 29746 - DNA, 421 bp, Mus musculus
  source 1..421: mol_type = other DNA
tggccgcgccggcctaggtcctgcccatccactctccaagggggggggggggggggggcgctcacctggcacgcacgcaggggtcctaccgacttggctcccatggcatagcgagccttggcaagtgagagccctggggagacaggagagacttgagactgttttccctcttcctccaggtcactgagcagctgtaggcacttggagtccaactcctctcgcagagcctggaccgccatggcccagccagtcttgggacacgcgcggatgggcggagccaagcgctcaagatccgcccttagggggccggaagtcaaaggcttcaacttccgggtgatccctgtcaccagccaggacgcggatttgcctgaccagctcaagcaccggtgaagggtaattaattggttgcccgtcctaaagg

SEQ ID NO: 29747 - DNA, 184 bp, Mus musculus
  source 1..184: mol_type = other DNA
tgtaagtctcagagaatgctttcccaacctacttttgcacatgaaatcccagcgggcactctgggaagggacttcccccacctaggcgatagactgcatttaacccaggctccagtgtggcctgcctcccatggacctaggtgtttagcacacttgttcagctcgcgcgaggtcggagtgggcg

SEQ ID NO: 29748 - DNA, 585 bp, Mus musculus
  source 1..585: mol_type = other DNA
accagcaataaatagtacatttaaaattgcatttttgtgtctccactgtcggttcccagcccacagaacccttcactgggaggtcacagactggggagctgaagcttacatttaaagtagaaataagtcaagttagtgtcaaacattatttcaacttcagaggatacaagatttttttaaaacgagtttctacataaagtcatagaagattttactcctttatgataaagatggggctcaggtcctatctcagcagatagcaaacctgaggaggtggctcgtgattcaggctgcagcatctcagctcagacaaaacagactgtgcacagatgggtgggcttcgggctctgcagtctgcacaacgaagggctgaacctctcaaggttcagcttcccctcgcatcagggaagcacatgactccccagaggctgctgtgcacagcagaggggcgccccaggatgcagaggctgcggggtctcccctttgcctttctgttcggcatacaggacatatggacagctgctaagagataatggtttacttcaggcattggccaccctgctgtcaccaatactgtaaatagca

SEQ ID NO: 29749 - DNA, 347 bp, Mus musculus
  source 1..347: mol_type = other DNA
taaaacaaattgcttttggataagaagagatttcagattataaattactgtgtcacaaaaaagtaaaagacagtttctaagttgaaaagtatatcataagacttgtgaaagatataatacatatatgattaaatttcctataattaaaaatgatttgacacttaggtcaaagttaaaagacataatgttctgtttgtaaacagcttacctatggtatccctgcagataaacctacgtccatgtgcatatggaaatttagtagttcagtaagcttctggatgtagtgggtgttcccccccccacacacacaagaggaccatgggcctaggtttttgctcagctcccgc

SEQ ID NO: 29750 - DNA, 330 bp, Mus musculus
  source 1..330: mol_type = other DNA
ttggaaaggagccagctcagccctggacactggaccagcctggggggccctcgtcctcagttctgcggggaaaggaaatgtctcttttaatttacttagaatcctgaatcttcaccgggtcctggacctgcgggattcaggagggcgggggacccacacctgtagtctccgggtatacggggacccccggactggcggcggcgcagtggcggctaagtctcctcgcggtcaccgccctcccaagcgcggcggagccgaggctggtggtgcgcgcgggtgcccggaggcccgcccccaacggcggcgcggaacctggagctggccgtggtg

SEQ ID NO: 29751 - DNA, 227 bp, Mus musculus
  source 1..227: mol_type = other DNA
taccctggatctgagtgtgactccctggattcattcctgaagctctctacaggacttttggcagccaacaactaattgtctgatgtttcagaggcacacgcaatcctagctctgataagcctcagggacttcctgagtctaagtcccagaaagaagcctgggttgcagcacactcagcgagctgtgagggaggagctaggagggtgagcgcaggcagctccgcctcc

SEQ ID NO: 29752 - DNA, 299 bp, Mus musculus
  source 1..299: mol_type = other DNA
tcccagcccccacataaaaatcggggtgtggccacgtggagagctgggcttgacagccagccagtcagccattccactgtggtgtgcatatgcttgtgcacaaacacacaacgggactctagagcccctgtgtcctggtgtgagtacagactgcgcgcagcaacgagtgggcaggcgggaccagtgtttggacaagtccctgcggactcgcacgtgcccggcgtggcccggttgcggaggcggggctcctcggcggtccagggcagaccatggggcggggcgcggggtggcgtccggag

SEQ ID NO: 29753 - DNA, 365 bp, Mus musculus
  source 1..365: mol_type = other DNA
ggatggtttgttctgatgcaggcatcaaaccacccacccagtggcacaagaaaaccaggtgctgctccaggtgtctctttgctatactgaagtaaagtttacagtatttgccctttttaaggaagtactttaaagtgtaggtattcccactacatcctccaccaaggcatgttttataaatcttcatctgaatatatatacaaatggtcacacatataaacacagtactattaccataaataaacttttgttctatattactaaaatatgttttttacagatataaatcataatctaaacaaaatccacctactgcctttagagtaaatctaattgtggaatcctaatatctaagaatagacgtt

SEQ ID NO: 29754 - DNA, 259 bp, Mus musculus
  source 1..259: mol_type = other DNA
acagataaaatctttttcaaaaagaaatttttttctctagacagaatttttctggttggcctctaacttagcctgcctctgcgtcccaaatgttggggctttttaaagtgtaactccagctagagagctacaaggatgtgagcttgagcggaggctcgcagtctaggcgcgcgtcctagcatccgggcatctcgcgcaagcctctcggggcgcgcgcgcgcagctgcgtcacgtgcccggcgcgcccccggctggcgcg

SEQ ID NO: 29755 - DNA, 341 bp, Mus musculus
  source 1..341: mol_type = other DNA
tgtgtgtgtgtgtgtggcacatgcataaagctatagtttgtaaataaatgtacttctgtgttgtgcaagtcattgtttgagacaccaagaacacaaggcactataattaaaagagtatttttttttccttagactgaccttgagctcactacctagctaaagataatctacatctttcaaatgctgagattacagctgtgtactgttatccttatattttatattctaagctataacatttctatgtgatctgtgtttcaggttgagagcaacgccttggcttcggccctgcacccgggtggcacctgccttgcgcgcatgcgcatggctcgaggcggtga

SEQ ID NO: 29756 - DNA, 367 bp, Mus musculus
  source 1..367: mol_type = other DNA
gcctaagtatagctaggtgttataggctgctccaacttgcagcctaggtaaaaaaaaaaaaaatcacgaaggttggaattttaatttttttctaatgagtatgaccaggatcaaaacattgggtcattgtcccagtgcctccaggggcacctggtggtcccgactcccaacttggaacttcctatccttcaatgtgaaggtcaagtgagagacacgcgacccgtcgcccagctctggcctgtgcctgggcctcctccggccccgcccctcccccagggcgctccagaggcggagcggaggatcggaggcgccgcgagggcgggccaggggcgggccggggcggagccgcgacgaactgcggagacgc

SEQ ID NO: 29757 - DNA, 348 bp, Mus musculus
  source 1..348: mol_type = other DNA
gggattacaggtagctattactacaatttctacagggtcctggagatctgaactgtagtcttcacatctgggcagcaatttccagcttagcagcaagaacatttagtctcagtcagtttgacactctaaaacaaatttataactttttcttccttttgagatacgcccagcattatttaactaagctcacctgcttgaactgggtcttctaggatcttaaattcaggccgctgcgggctggcaaacccccgccgcactcgatagccggaagtcgtcctgccttcgcctctaggaaaggcgcgtgtcggcttctcactggcgcagcctccccggcgatcgccgctgctc

SEQ ID NO: 29758 - DNA, 378 bp, Mus musculus
  source 1..378: mol_type = other DNA
tttattgaggtagaattgagctcaagaattctggctagtgtggctagccactttgccagaggaattgtctctgcctcctgagaactgggattacaggtagctattactacaatttctacagggtcctggagatctgaactgtagtcttcacatctgggcagcaatttccagcttagcagcaagaacatttagtctcagtcagtttgacactctaaaacaaatttataactttttcttccttttgagatacgcccagcattatttaactaagctcacctgcttgaactgggtcttctaggatcttaaattcaggccgctgcgggctggcaaacccccgccgcactcgatagccggaagtcgtcctgccttcgcctctag

SEQ ID NO: 29759 - DNA, 178 bp, Mus musculus
  source 1..178: mol_type = other DNA
ttttttaaagatttatttattatatgtaagtacactgtagctgtcttcagggaagagcaacagaattgtggctttgatctgggggtgggggtggggttgtaagcccccaaaccaaccttgcctaggattagcaaagtcttgctgcagccactgctgcagcagcggatatcgtcatgcg

SEQ ID NO: 29760 - DNA, 383 bp, Mus musculus
  source 1..383: mol_type = other DNA
ggctgagcttgcagatctgccattccagagcttatggatcaaatgcagactgtccatttgttcagtgtgaatgggggtactatgaagccttcctgttttgctctatataatgaagataatgatggagtattatagttaatcaacagaatttgattccggggatactctttctgcttttaaatctcaagctacatgacatatgtagacatgggcattttgggcataacagtacttactgtgtataaccccacccagtctttggcaagctacaaagagcgggcagtttttctaagattgcctctagggaaaccaacagggtctaagggggcggagtctgctccgctctaatgggcgcccagagcgctgggggggggcgggtccat

SEQ ID NO: 29761 - DNA, 460 bp, Mus musculus
  source 1..460: mol_type = other DNA
gctctatataatgaagataatgatggagtattatagttaatcaacagaatttgattccggggatactctttctgcttttaaatctcaagctacatgacatatgtagacatgggcattttgggcataacagtacttactgtgtataaccccacccagtctttggcaagctacaaagagcgggcagtttttctaagattgcctctagggaaaccaacagggtctaagggggcggagtctgctccgctctaatgggcgcccagagcgctgggggggggcgggtccattcgagcggcgccggtagtcagtcgcgccgagggtctctgcatagcgacgcgcgctctcgctgggccatgggtaagcggctggcgggcggcgccggagagggctggggtcccagagcgatcgtggctctcagggtaacccgaatgtggaaagtcggggcggccaggggcttcccagg

SEQ ID NO: 29762 - DNA, 471 bp, Mus musculus
  source 1..471: mol_type = other DNA
gttttctgctcttacagaaacctgatagttttattacaaaaacaaaggctcttaatattttgtagcatttctttggattgtgacagaatgcctagtcttagaaattgcattttgaatggctgacttgggcttcctaaaacaatcgttaagtgaattttagcttggtattatatgaagtagctttcttagcattaattactataaaatcaaactacctatcccctcagaggcagaaggaaaggaaaaaagaggccaaatgttttacttttccattagggtggctcacagccatttgtaatgggatccgatgccctctgctggtgtgtctgaagacagccacagtgtactcatatacataaaataaataaattaaattgcatgattttgccagtaattcattccagacagaagagaattctgtgcctgactttgactcccagagattctctttggaaccaagaacctcttatc

SEQ ID NO: 29763 - DNA, 323 bp, Mus musculus
  source 1..323: mol_type = other DNA
atttccagagtggttgtacaagcttgcaatcccaccagcactgtcacctgaatttttaaggatgttgaacatatatatattggatattagtcccctatctgatttaggattggtaaagatccttttaaatacctaattaaaagaggattatgaaaacgcagagggagaacgtctctgccccgggagtcgcgcgcgctttccgcgttccccacaggttagccaggtcccgggcgcggatccgctccgggctttgccgctcgccgccgcgcggttccgggagagcgcgttttcctcagagcccaaggcgccgggaggtaaggcgc

SEQ ID NO: 29764 - DNA, 399 bp, Mus musculus
  source 1..399: mol_type = other DNA
ggtctatgcaggcagggacagcaacatggatgggtctatgcaggcagggacagcaacatggggtctatgcaggcagggatggcaacacggatcggtctatgcaggcagggacggcaacatggatgggtctatgcaggcagggatggcaacacggatgggtctatgcaggcagggatggcaacacggatgggtctatgcaggcagggatggcaacatggatgggtctatgcaggcagggactgggaaaggcaagaccttcagactcccagctctggctcatgctggtcccctaaagacacaaacatgttcaaatttgaagggatgccccccccccccagttatacccaggcagctggggttggggggctgtttacacccacacaggcacccccgtgggtc

SEQ ID NO: 29765 - DNA, 388 bp, Mus musculus
  source 1..388: mol_type = other DNA
cagtaattggctgtagtcaattctatttaaccaatcattttaaatcaaggaacaaggtttacttaatttctataaatatcatcatgtgatgttggttgattagccttggctattctagaatgctctgtagaccaggcttcattctaatgaattacttaggtcactccctaactcactgtgtgctgggatgacctaatgccttcccacatcgtaagtcgttagcttggcggccaggaatcgggaaaaaaaaatgttttatcgctttaaatttactatagaatgcagaaacaaaccccttgcctgggttggcaatactcacctgcgggggagggaactctccaggagccaatgggagatcgggccgatggttccgcaggccaatgggttg

SEQ ID NO: 29766 - DNA, 361 bp, Mus musculus
  source 1..361: mol_type = other DNA
taggattgtgcctaggttcaaaatttgcatctgtaagaagtaaaacacttagtgttcctgtgaacgaaacaagagtacatgttcaatgaaaactcattggtccctcagcaccttaggggtctagaggctgtaacgccagcctgaaccctcaggttcccttttctttaggaaatgaccgagcgcgtggggcttgggagccgggctccctaaggaggagcgcgggagaagcccggtgccgcgcggaagcttggctgggcgcacccccgctgcgggctcccgcgctcgccccgcgccgttctaccttaagggcgcagacctccttaagccgggcgcgcgagccgcgggcggggcgcggtctgac

SEQ ID NO: 29767 - DNA, 314 bp, Mus musculus
  source 1..314: mol_type = other DNA
ctacactcgcattagcaatccaatattgtagatatcctgtatgtcaaagacttggtcatgacaccaagctggatgctggtgtgaacgttatcaggcgcagcagaagcggttctcaagctgccagcactgtgctcattcatgcctgaaatgaggcagccaccaggcctcctgggtgggtggagtgacttgggcctgggtcacacccggtttggaactgtgtgtcctcaccagggtagaacccaacgtgcagttcccgctgcttagcagaagcgtggagagcaagctttggttattgttccatctttcccaagagc

SEQ ID NO: 29768 - DNA, 390 bp, Mus musculus
  source 1..390: mol_type = other DNA
atgctccatctgatcatgcagcaatcagagcatgtatggaaattcctgacagctgctatacatcgttttattgtaagcttaattacatgaaacaagtgtgaagattcaaggaaacacctatcaaggcatcttcctcaaaagcaggtgtctgtcttgatatgagttcagttcccacagcttcccattagcttggaactccagctccagggggaattcgacgccctcttgcccttagccttgctggccagagggttaatgacgggaactccgaggccgtcccagacagccgcctgcggagccccacgcccctccggctcgccccgccccgcgcccccgccagccgcttattggtcaaagtgacgcggaggcccgcgccgattggctgcaaca

SEQ ID NO: 29769 - DNA, 345 bp, Mus musculus
  source 1..345: mol_type = other DNA
gggccagcatacccaggccgctttaaaaagctggagttcagggtatttgatttttgttggctaaaaacaaagacctggagcaggtctccgtccccttgccctgttgaagggcatgcttcatgcccatgatggacctggaaggctccttcagccatatgagggctgatgacaggctgggcaggaggccatgctggctgtcagccggctgtagtttcatcacgtagcccatgagaattcacaaggctgggctgactgcactgggcactctgcagcatctcaggcagctgaagatgggccaacggtattttggtcagtgtgacagggccccgctctcccataaaagag

SEQ ID NO: 29770 - DNA, 299 bp, Mus musculus
  source 1..299: mol_type = other DNA
tgttcctgggaaaaacaacaggcccagcctggattcatttctagcgccttaatgagagctgcctgccaatcggatttcggaaaaaaaaaagacattttaagattttgtgttgtgctaaaaacagagaccacagtgagctctctgcccacgcccagtgggtgttggcaaccagcgcccactgagtgggagtccttgccctcaggccacctgcttcctcggttctggcgctgcctggtcccctcaccctacaaggcgaggctgcacgaactgtcctgcctcctcccggggagctcaacgga

SEQ ID NO: 29771 - DNA, 706 bp, Mus musculus
  source 1..706: mol_type = other DNA
caccaggtgagtgcagttcgtgcagttcccggtggcaacgcctggagtccctccccgcctccggccgctgtggcgcagacctggtaagcaaggcagcgggtcgcagccccctcctgggcgggccttcgcgtcccgcccccggccaccactcgacaccctctgcctgacgtcaaggggttgggggcggagagcggcggtggcggcggctgcagcggagaaagaaccggcgcccggcgcggtggagcgccgaatccgagctcaggggcgccgagagccgtgctgagaccgaggggcggtggcacgggacagccttagcgtgctggcgggcgggcgcagtctggagcggaggccggagcggtggggccccggggccgctgctttgtccccttgcttgggtaggggctagcgcgcgcgctagaggcagctgtccgatccgggtccctcttgagtccgccgcgggctgcccagtggcgatcggcatcaaggcaagcagtgcctgcagctccactggccggagcagcgggagcctgggggtacggagcgctaggggcagtgggggacccttgggctgtccagcgcgcggtccgaatctttgccaggctcgcgaactgctcgggccccccaccgcgcggccccccgccctcccgttctgctccggaggcgggctggcactgagaaccagccccctagccaaagccgccgcccg

SEQ ID NO: 29772 - DNA, 500 bp, Mus musculus
  source 1..500: mol_type = other DNA
ttgttactgaaaccaaactgggagcccagaacaaaagctgctgtcggcatttatactccagccctccgggactgccccctggggctcaaagctggggcagtttccccgaggtttctcagtccacctgcccactggaggaccagctggctggaaggatttgccagccagcaccgtccaggaggccacagctacaagttacttctaggagcgcctgccaagagtcatttcccgggggtaggctctgctggagcctagctgctccttccagtccaagggttagggccagaaaggaggtcaaaagactgaccactgtggttagcacctgagagaaccttcagttgtacaagtcccaaaatggtttgccagttttcgttcccgtaactggagcgtggggaagcaggacttgaaggcacacttcaccaggtgagtgcagttcgtgcagttcccggtggcaacgcctggagtccctccccgcctccggccgctgtggcgcagacctg

SEQ ID NO: 29773 - DNA, 359 bp, Mus musculus
  source 1..359: mol_type = other DNA
cactttgcacacacgtgtgcacatgtaccacagtaaacacgtggaggccagagggatcctcctcttatgtggcctgagcctagagccctctgtggccactgtggatccggtatttctgaaagataaggcatgtatgtatgtatgtatgtatgtgtatatgtatatacttttagtgtgaagacaagctttgtcttcaaagtctatagagttttaggctaagcttctttttaattctaggacttggaaggcagatgagttctaggctagcctggtctacagagtaagctccagagtagctagccagggcaggagggaaccctggggagagcagccctggctaggcttttgaaccaagtcct

SEQ ID NO: 29774 - DNA, 281 bp, Mus musculus
  source 1..281: mol_type = other DNA
agaggaccgggctgattccttgagtaactgtggtacacagtgactacctgtctcaaaaacaattaatgaaattaaaagtaaaaatgcttgttgcagaatttgctaaaattccagagtcgggctgccctcttcctcaaacagatcattaattagctacaagtaatgcctaattaagtactggttccaagtggcctctgggttgacatcccctgcggcgaacgttaaacgagttccgggcgcgcgcacgtggaggggttgccacgcgacccgagggcgcgtag

SEQ ID NO: 29775 - DNA, 239 bp, Mus musculus
  source 1..239: mol_type = other DNA
atcgtggtggagtggccatcaggaggtgtaaccagatctctgtgagctttagaccaccctgatctacatagggagtgagtgggccattgcagctagctgtcagggtgactgacgccacgccccggaggcggcgggagtctgcgcggcccacgaagaggcagaactgcgcatgtgcggcgtctactttgcgctgcggggcaggaagcggaagactgaccgggcgttgttagactcccacc

SEQ ID NO: 29776 - DNA, 427 bp, Mus musculus
  source 1..427: mol_type = other DNA
cttatacggccaaaaagcaagatggggcagggtcccactattcccttgtttggttactgttctagtgctgtgaagagacaccacaaccagatcaattcttattttaaagaaagcacttcactaaggcttgcttggcagcacacaggcagatgcctggcttgggcttttgaaacctcaaagcttcacccttctcaagcagtgccactccctgatgactaggcaatggtggccattcttattcagaccaccaaatgcctgaaacagcccatttctcctaaagagtctattgtcttcatgggctggtgaccagatctttaatctctggcccttccagcacctcagggcctcatatgtacacctggtggctctagctccagtggccacacagagagactgtttgagggtcacaagtgtccctctccgttca

SEQ ID NO: 29777 - DNA, 346 bp, Mus musculus
  source 1..346: mol_type = other DNA
aatataaattatatatatatatatatatatatatatatatatatatatatatatatatataattttttgaggcacctgtaggacttgatacatgtataaaaactaactcaaattaaacataggtctaaatgtaaatctatgatacttctaaaataaaatacaattattcacctagcgtttgaatcttattaaatccaaaactgttgatgcctgtaattccagcatttgttgaaggctagccttggtttcacagagatcctacctctaacccctaggtgaactcaaaagacttcctgagcagcctaggcaacgcctgtggccacggggccgcgttcgcgtaggcagc

SEQ ID NO: 29778 - DNA, 282 bp, Mus musculus
  source 1..282: mol_type = other DNA
ggcaatgcacattttctagacaccccagctttagagctttagagcctgcctctagggttccggcagaggcctgcccctggatgcttccaatttatatcaacttgacttgaaacctcaattgagaaaacgctcaacatacttcgataattagctgtggaagttcactgtgttaatcacagtaatagcaaccttatctaggacaggaacaacactccaggtgcccccctcaggtgggggctcactgtgggaagcagcctttgccccattgctttgacgtcaact

SEQ ID NO: 29779 - DNA, 334 bp, Mus musculus
  source 1..334: mol_type = other DNA
cagatacaataaatcttaatgcacactgaaatttgattaattcagacactggtgtaacccaagcttgggtagacaatttaaaatcacttgcctatcatctgtctagcatgtatgtatcaatataccatatatttatctcagatctatcatctatatgtttctatgtatctatatacctatctatcattcttagatctattatctatgggcctctcaaacgctggggtagcatactccattagagtaaaatcctgacttttaacaatctgtctatggatggatagtcagattagccagggaagactggggccaggttccctgctggatcaggctg

SEQ ID NO: 29780 - DNA, 336 bp, Mus musculus
  source 1..336: mol_type = other DNA
agaaaacccagtctgatttctggttccgcgggtcccccgttcttatagacccgggtttgtcccggcgtcggaggcgcggccgggccccgcccacgcaccaaagcggctgcgcagcgtggctgccggcccgggtccctctccctccttctcccgggccgtgcggcagtgacagggtgcggttggccgccccggcccgtccggtcggtgaagcccgtgcgaggagccggagctcacggagtccacggggagcacgcgaaccggcgggccgcccaggtattggcacggagggggcgggcccctgcgctctgccccgccccttagaggccagcgccgggg

SEQ ID NO: 29781 - DNA, 341 bp, Mus musculus
  source 1..341: mol_type = other DNA
gaattccaggcatctcagttgactctctcagtcaaaggaagcaacagagttactccgcctgctcgctctcgggctggatccgggctccaggtccaagctggtcctggtgagtggcggggcgctgtccgcagcccacggtgctgaaacatgtctctgcagacataggggacaccctccagtgtgcttggaacaagaacaagcttagtgtctcccagcgccaaaaccgcgctgggacactcggtcacccagtttatttaagaagaaagaatctttttttttttttttaatgaaaaatttataccgggggccagaaggcttagtggctagggttggtggcccct

SEQ ID NO: 29782 - DNA, 241 bp, Mus musculus
  source 1..241: mol_type = other DNA
taccccaaactccatgttccaacgtggaagcagtttcatgaacttttcaatcatgataaatttaaatctctgcagaactgaaatatgaagaaaggatctcttttcaattcaactttcccagggtcaggcgcagaggacgagccttaggctgctggaccaaattggttttgcaacaccaacattccctctgaggggctcattggtgggcggggccggatcccgagccacggatgtggttgtc

SEQ ID NO: 29783 - DNA, 387 bp, Mus musculus
  source 1..387: mol_type = other DNA
aagactctgaccataaaatttattatctcataggagaatgcttttgagattctattaattttaccgtaagaaaatcaggtatatcagtcacttgaattttagaagatgaaataaggacaatatttttaatttttctaagcatgttgggttaaggaatattttctccccttcatctgattaataaaagataagcatttggtaataagttactctttagaaggtgtaaaaaaacctgaaaaatgtttttgtttgtccatttaagtttcatcaggtagaaatgttaacgttacaataaagtttggtcttcttccctatagaaaaatagaattttgtgttggtggccacgcccactgagtggttctctggtgacgtcacataagagggtgt

SEQ ID NO: 29784 - DNA, 265 bp, Mus musculus
  source 1..265: mol_type = other DNA
gcactgcttgctgcctatttgcccgcagggaggatgcctgtttgcccccgcccaccctgtgcgaggtcccctcatgaggctcttctgacatggctgtcaccatactaccatgctcctggttttcttcatttattcccataaaagagagaaatataacctcatttcatatcccagtgtgatattttaatctaggaagctattctgactatgatgtaggcagaatcaggccctgttccctcctgtgcccaggcagcagctgttctag

SEQ ID NO: 29785 - DNA, 511 bp, Mus musculus
  source 1..511: mol_type = other DNA
gctggttcaaaattccgtgtttgtaatgaccaagatttaaaacaaacaaaaagtttaatctaaaagcaaggttactgaaaaagtaagtttatttgtatcaccgcccagcctacctgccctccgcggcgcggcgcggcgccccgccccgccagcaggtttgtgtgtctccttgcaaaatttcagacctgcttagaaaaaaaccacgtaagcggctgtgctccacggcgggcctaggactcgagctgccgggcgccggccggtccctcgcccagccgctgagacgccaggtcgcgagctaaccgtggaaacggccgaccccctgcggagcaggccgcacctgaaggccctcgaggcctcgtcctgggcccgggactaccgccaccttcccagggcagccgagcccagccgccgctggggccacttcccttcccggtagcccgtacgttacggacacgcacttccgccacgcgtgcgcataccctgaagagtcgcactcctggcggaatctccc

SEQ ID NO: 29786 - DNA, 472 bp, Mus musculus
  source 1..472: mol_type = other DNA
aaaaccatactgagttccctctggaagtttcaacttttctggttttccaagagtcataaaatcttaagaagtctatttttgagaaagttctgaactgcggcgcaggcacaggccttggcagctgcccgcgtgccagcactcagggatcgctaatccttaggtgggtagtaagttatctcccacttaacaccagtccaaagtcaggagcggacgcgcgacctctaccctcgacgtgggcttgactgagctctgccacccctggagcacacaggcagactgcagctgtataataccggggcatggcggggacccaccgccctcaccacactggatcacggccctcggtcaccccgcacggcccggaagggcgtgggacacgcccactggcaaacggcgagggtgggagattccgccaggagtgcgactcttcagggtatgcgcacgcgtggcggaagtgcgtgtccgtaacgta

SEQ ID NO: 29787 - DNA, 330 bp, Mus musculus
  source 1..330: mol_type = other DNA
gactttaaatgattaaaggtaccagtgatcagcagtaacattaaatgttcatgcaaatgaagggctgtgtagctggactgccgtacctccgtgtccagacacattaaaatattcctgtgtgagagggagagtggctgccggctccccagtcttgctggccgagggagcagcagcagcagcaggaactccacacccaactgctggtcgaggcccagtgtgagaacctcagcgtggcttttagccacgggggtcgggggaggtcaggcccagtcgctactgtccccagctggtgcagctggtggtgaccacagagcaggcagcagcacggga

SEQ ID NO: 29788 - DNA, 335 bp, Mus musculus
  source 1..335: mol_type = other DNA
atgttttgatggcaggcgatttccaaacacaccatacagcatccttcaaagggctgcttctcacgtggaattcaagtttaattttatctataaagagcagccggtatggcattgtggccacaagtccataatgctgacttgaatgaaaattgacagcactattgtctaattaacagaaatttttactctgtactctgttcagtggctcatccttgacacgtactaaatattttcagtgactattttagggaaatctatcttctatataaaagtttgatgaaatgctacacatgcctggcatggacacgtgggctgtatatatcaacaacctgtct

SEQ ID NO: 29789 - DNA, 468 bp, Mus musculus
  source 1..468: mol_type = other DNA
taaagaattttagttagctgaacagcgagcgcccaatggggtaggctgtggccgagagagagtgggctagatcactgcctaaactcaagatgaggatattgataattgtaagatgtgggataccagagtccgtcgctttcttatttcatagatgaaatttggaggcatcagtaatgccataagtcagcactttgctcttatgcagcggaataatagaatctgtgagttaaatgagcaaccataaatttttatgttttccataggaatacagtttgaagcttttttttttttttttttttttttttgaggaaaaagacccttataattctgctataagaaatgaatcattttaatactgaataataaatggagaaacctctggtttgtattattttttcctttcgtttctttccctgacaggaagaagaaaaagaaagtgaacctcaatcatcaattcatcaattgctt

SEQ ID NO: 29790 - DNA, 493 bp, Mus musculus
  source 1..493: mol_type = other DNA
tatggtaaactctttaaccttttaagctcatctgtgagaaatggggattaacatatatgataagaagatcttaatatactatagatgtccatccatttcgatctgaaaccagttttaaactttaagaaatggtcatcttgcctcctcctggaagctggaggataacgatgctcctcactgatgctggcagtgtaatgcttaggacctgtcaccgcgcctgggccatggtgaccaggttgtattccgtgggctcactgcatgcgctcaggccggagggtacaagccagatgtggcggctgcgctccagccccggccgcaacaccgatgctggggatgctctattgcgccgttgagtgacaggctggccggccactggcagcggcggcggggcgcttagggaagtggcggccaatggctggcgcgggggctgggcaggggctgtccctggcgagggcggggcgcgcggcccgcggcggcggaggcggctccagca

SEQ ID NO: 29791 - DNA, 298 bp, Mus musculus
  source 1..298: mol_type = other DNA
ttttattccaataggatagtggacatataatttgcatatcccagaacaaggttgtggatgatcaccagtatttaattccagaacattttcgtattagaggttacccgtgaagctgtaaggacatcaaatcaaaccttagatctacttaatcatatagctatagatttgttaattttttttcaaagaacttcctactagattgagttgaaagaacctcttcctaagaatggttttagctacagattaatctcaaagtgttttctaatttcatgctacttaaatatttttaaagttttgg

SEQ ID NO: 29792 - DNA, 374 bp, Mus musculus
  source 1..374: mol_type = other DNA
ctaacttgagaagaagagggctctctctgggggggggggggggggggggggggcagcccgctccttccccaaatgggccagctcctctgttagatgtaggggacccgggcgcccactctccgaggctcgggtgacagggaggtggcgcgcagccgcgatcgtgagcgtcctcgtcctggcggtggtcccccagccctcggacctcgcgcaggcaggagccagccaagctcccagctctgcagcgccgccacgtggggtggccagggtcccgcgtgcccggcgggagcggcgcgggggaggcgcgcgggcctgggcggcgcggagcagagctgagcagagcggaacagccgcgtccgcccccgccgggccgcgcg

SEQ ID NO: 29793 - DNA, 633 bp, Mus musculus
  source 1..633: mol_type = other DNA
ttcaagatgccattttaacttagttggccaaacttggggtaaaaactttagatacagtatttaacatctcacaaggttttatagcctttctcgtcatcgccaggcttgctagagaggactggcatggtggccaggtgccacgctcacccggaaagctcccgccggtaagctgcaacagggcaccccacctgaaggaccattgctgcgcactggagcagctctagggaggccaagaacgcctggggctcctgggaccgcagcagtggctcagccctgggcaatagccttcgcgcctgcgcgggctagacgcaggggtcggccatctcggcgctgcgtggccgtgcgcctgcgcggcaccgatgggcccggaaaaggcttccagtcggagccctgagaggcgggccggcggcggtccacgtcgctacgtgctcgctcgggtgcgcgcgcacgatccgtagtctccgcgagagggcgtgtcgagacaggtacgcgtgcgcacgggtgctagggcgcgccagagcgtgagggcggggcgtcggccagcccggagctaaccgctcccgccctcttcccgctgcgccacacggagcgcctgcctccgccggggcggggcccagggagcgggaagggtcc

SEQ ID NO: 29794 - DNA, 311 bp, Mus musculus
  source 1..311: mol_type = other DNA
taatttaggagccctactaagggcaacacaatgtggggctattttgataactagcaggaaaagtatcccttgtaacagacaggagtccgcagctaatttatataccctgaattaactctgctcatttaacaaattctttgggctggaatgcggttgaagcgcttccaagtgccttgaatcgactcgtctttaaggactttgtcctttcaatgaatctagttctaaatgcattggcctgaaggaaataaccttaaaaatatttgcttctatttcaggctcctcctgggggtgtgcctcttgagggcgggtct

SEQ ID NO: 29795 - DNA, 608 bp, Mus musculus
  source 1..608: mol_type = other DNA
cccgtgtactttgtatactaataaaataagtaaaacaaaatgtctttcatgctaaactgtaagaaacaatggtagcatagcgcggtgctcatttctttccatttaaaaagattcaagatgccattttaacttagttgggccaaacttggggtaaaaactttagatacagtatttaacatctcacaaggttttatagcctttctcgtcatcgccaggcttgctagagaggactggcatggtggccaggtgccacgctcacccggaaagctcccgccggtaagctgcaacagggcaccccacctgaaggaccattgctgcgcactggagcagctctagggaggccaagaacgcctggggctcctgggaccgcagcagtggctcagccctgggcaatagccttcgcgcctgcgcgggctagacgcaggggtcggccatctcggcgctgcgtggccgtgcgcctgcgcggcaccgatgggcccggaaaaggcttccagtcggagccctgagaggcgggccggcggcggtccacgtcgctacgtgctcgctcgggtgcgcgcgcacgatccgtagtctccgcgagagggcgtgtcgagacaggtacgcgtgcg

SEQ ID NO: 29796 - DNA, 401 bp, Mus musculus
  source 1..401: mol_type = other DNA
aactgaaaaataccatttatcacatgggatatataacctatttctattttctaatatgttaatatatgagtatacacagaaaaacaaaagttatgcacgtaaacatcaaggtatatatctataacgaggagtgaacattcctgaaaatacagaacactgaatttcccgtgcacttcttcgaattcccaggacgtaaaggtagtaggcagccgtcataacggttcgcaacatcttaaaattaagcaagttttgccttcttaaaaaaaaataataaatttcactgagatctacacgagtgagactctcagagacacgcgcgtcgcagcacgactctgcagagagagcctctccgcactcaccggcgaccgctgtgtccactccgaacgtccccgcagccggac

SEQ ID NO: 29797 - DNA, 304 bp, Mus musculus
  source 1..304: mol_type = other DNA
aaataaacttagatgcaaataaacttgtaacctagtagcagtgtttacctagcatgtaggatacctagattctgatccctgggctctggggaatgcagttcaatgagatccagggtgtctgggtttccctagaataaggaaacagtaataggatacgtcttcttttcccttcgaaaagtgcccagtcctgagtcaggtcatcgcatttctcggtgcccagaagcatgcattttaaaaaccttttttcataaaatagggtgctccatgaatgcatgaagattacagattgaactcatgctaattt

SEQ ID NO: 29798 - DNA, 272 bp, Mus musculus
  source 1..272: mol_type = other DNA
ttttattaaatcaacatgatgtatcaccagtaccgggtagtgactgcagagactcccatcttgagaatgaatatataatcattagacctatcaagccttatagattatatttggttatgcctcttatggtccttagcggagcggaaaccgagcagtgctatcggaatcctgtcccaggctggacttagccatcactgtgacaactcctgggcaccgccagccaagagctgcttccaggaagcgcacgcgtgacgccgctgcgcctgcgctgt

SEQ ID NO: 29799 - DNA, 575 bp, Mus musculus
  source 1..575: mol_type = other DNA
aaagatactgtctacttgaagatatatttatccccttagaaagttttggaaatgacagagctcagtgctgagcatgaagactcttgaattcatcaagatgctgggcacagcagcatgcatgcgtactactaatgtttgggaggcagagtctacaagagtacccctggccagctagtcttgcctaattagcatgtgcatgcacgggcatcaaacactcagattgctactccctgcctttgtgtttcttctcgacaacagacagctaccctgttagaggtggacctggactaatctatcagagacatgctggcataagataggatgacatctttacatggcaatcctatgattctggaatgtggaaatgagcatttcaggtgaattaggctaattatcagcatcttatactcaaattcggaagacgtgtgcctaagaccattttaggtatgtgggttcgttagattcattaattcattgtagtcaataaacactttgaagtccttttattaaaggagccacctaaatccaaagtaggtcaatgctttaaagagaggccctttaaatcatatataaag

SEQ ID NO: 29800 - DNA, 205 bp, Mus musculus
  source 1..205: mol_type = other DNA
aaaatggccttgaggtcagagaccttctccagcttgctgctgtctgcctgcccaacagcctggatgctgactcgtcccaagtatggactaggagtttatgaaaatccagattctccatatgagttcaaagtatttataattatgattattactataatttatgagatttagctgtaaatcttataataagatgaggtcagcactt

SEQ ID NO: 29801 - DNA, 461 bp, Mus musculus
  source 1..461: mol_type = other DNA
tctccacagacccgcgcactgggacagggcacatatggtgtgagccctcagtacgcaagcgcatcgccccgccgcctcggcgtggggacgcagggcgcggctcatcgagagcggcgcttcggctagagcgtctccagtagagccgccggccaggtgggaacccaggcgccccctcgccgcaagtgagcgccgcgcaccgacgtccggcggatcccgggttctagaaccggggctggttcgacgcagaagtgattctcccctgccatgaattgtcaactgtgtacatttattaagggtatgaatcttcgtatgagcaagttccctggcatggtgaaaatttgtgtataaattataatgtactgtaagctacactttcgaaactgacccggctcgtttcccggtagagccgggaccctcggaagctccgggtggcggaggatagggcttccaatgaagtggcg

SEQ ID NO: 29802 - DNA, 326 bp, Mus musculus
  source 1..326: mol_type = other DNA
gccacatcaccctcagccgtacctggactattttcaacctcgcagcaacagagaaggggctgttaactccgccacttcattggaagccctatcctccgccacccggagcttccgagggtcccggctctaccgggaaacgagccgggtcagtttcgaaagtgtagcttacagtacattataatttatacacaaattttcaccatgccagggaacttgctcatacgaagattcatacccttaataaatgtacacagttgacaattcatggcaggggagaatcacttctgcgtcgaaccagccccggttctagaacccgggatccgccg

SEQ ID NO: 29803 - DNA, 437 bp, Mus musculus
  source 1..437: mol_type = other DNA
ttcaacctcgcagcaacagagaaggggctgttaactccgccacttcattggaagccctatcctccgccacccggagcttccgagggtcccggctctaccgggaaacgagccgggtcagtttcgaaagtgtagcttacagtacattataatttatacacaaattttcaccatgccagggaacttgctcatacgaagattcatacccttaataaatgtacacagttgacaattcatggcaggggagaatcacttctgcgtcgaaccagccccggttctagaacccgggatccgccggacgtcggtgcgcggcgctcacttgcggcgagggggcgcctgggttcccacctggccggcggctctactggagacgctctagccgaagcgccgctctcgatgagccgcgccctgcgtccccacgccgaggcggcggggcgatg

SEQ ID NO: 29804 - DNA, 699 bp, Mus musculus
  source 1..699: mol_type = other DNA
agttttaaaaagagtactactgttttctctttcaaatggttggcttaatgtttgagcattccaacaataaagtttgctaggtgtatttaacatccacgaataaattggtttttgtttgtttgtttttaaccatcacaagggaaagcacgtgtctggacacagcctagctggctgccagcaagtgacctggcattcccgcagacccgtgtgggccgcggttctccgctcgccgaccgagcatgtgctagcctgtgagcgtcctggccgccgctaggtggcgccgcacatcaatcggagcgcggtgcggcgacgcgtttcgcgcctcggccgaccctgcgcggtcgtctacccggttagtcccggcacccgcgccctccgcggcggctggggagcccgggcggggcggggcggggcggggcacggcggggcgcggctgcgcgtcgctgcagcaccattagctagccggccccggcgggaggcagcgtggtgatgcggcgggtcccgcgccacctccgcccagccagccgcacggtcacgtgcagccgaggcgctgctctccaccccccctccccgcgggcgccggcgcgagaggagggcggggccggggtcgcctcgggccgggcgcgagcagcgcgcgtgcgccgcgcccggtgagtgcgtgcggggccgggccagcgggccgcggcgggcgcgcgccag

SEQ ID NO: 29805 - DNA, 750 bp, Mus musculus
  source 1..750: mol_type = other DNA
gttggaagttactggctccagatatttgaaacgattttaactctcaccgcgcctggggcgcccagggctgcacacctccagccgcagcgccctgcgggttccccttactgctttgctgcaggccggcctcggctcggcacggcatccccctgccctcggcgccgctgcgccgctccctttggctcagaggacgtcccccgcaaccctcggggccactgagggtctggagagagggcgagccggcagtccggcccgagaaagggcgcgggaccccgagcagccgcacggggagagcggggagcgcggggagcgcaggggcgcgcggggcgggcgcggcgcggggctcaggacgcgcgcgcgcgcctcggcctcgcccgcgcacacgcgcctcccggaggagaaagaggcgggcgggcgagcgggcgggcgcagagcaccgcgccggcggctgcagcgggccgggccgccgcgagggaggggcggaggggcgggcgcaggccgggagggggcggcggcgcggcgagagagcgagctcgcggctctcggcgagtgtggctgcgcgcgagccggcgagcgggtgagtgcgccgggcgggcccgggaagcaggggccgcgggggtgccgggcactgagagccggggggtgactggcgggcaggcgggcaggcgggcggcggcggctcgggcgcggccgggatgcaccttagcgggcgcctctcgttgcagcgcgcgggcggcccgaggctcggca

SEQ ID NO: 29806 - DNA, 245 bp, Mus musculus
  source 1..245: mol_type = other DNA
tgacatatgtcagggagtcctgtctggcagcactcagctctgttgtggcagatctctgagacagagctttggcatatggtgttgtggctaccagatctgatccccggcctacctgctcttgtaggcttgcaatcttgaaaagttggccagtgcagctggctcgcgctcacaacaagacagtcttttctgttttgaccacattggtttttctttaaaaaaaaaaaaaaatgatgaaaaagtgtata

SEQ ID NO: 29807 - DNA, 371 bp, Mus musculus
  source 1..371: mol_type = other DNA
accttgcttcagcttgaggaagacagctgacatcagcctctgacgtcagcctctgatctgggggtgggctttgagaccctcctctcctagctgccagaaagacagtctctgcaccctgcctgcctggatgctgccatgcttcctgccatgatgattgtaagccggccccaattaaatgttgtccttataagagttacctttctattgacagaaatgtatgtgcctgacctccacgtaaatgcacaggcacctatatatacacatgcatgtacacacctaaatagcctactaagatcagtataagagtatacgggattctagaatgttccaggatgttttttcagggtggtgaccacacaagctcttcctgt

SEQ ID NO: 29808 - DNA, 494 bp, Mus musculus
  source 1..494: mol_type = other DNA
ctctctctctctctctctgtgtgtgtgtgtgtgtgtgtgtgtgagagagagagagagagagacattctctgtgtagacctggtaagttgctctgtagaccaggctggactacagggttgttagaggtggtaccacctttgcagaggacctgagttcagttcctgggccctatataaacataaaaataataaaagtaattttaaaaaatctatggatagtggtacctagcatttaccatgccctgcatccctgaggctgagaaagattgcctcacgctggagtccaacctgagcttcggagtgagttacaggtaagtcttttaaaaaagagaataaagatttgtactataccaaagctcaagcgatctgacctttcctcaggtcaaaaaaaatttttttttttaaagaatgattgttgatctactccacaggccaatggggaccaggaggcctgggatggtgggtgcgcggtgcgtcctcctggcttcctgcaac

SEQ ID NO: 29809 - DNA, 436 bp, Mus musculus
  source 1..436: mol_type = other DNA
tatattagtgattattccccagaaattatcagttccgaataacaccttagtgtaactgtagtttatagacagaggttcactctcttggaattatagatgtgaactaccacacctagacacctgcagttttgaaagctccttggtaattccaaagtgtgtccagggctgtggaaggccttttaactcccgtggagcctgtgcttttgctcagggtcacacgagtctggtattaaccagagaaaatgattctcagaaggggcgtggagcccaggcgttccccactccacatctgatgctgtaaccgcagaggttagactatgctctaaccaggtgacccgggtcgattggcggcccgggaacgcccgggttcctgaggaccaggcgcagactccagtcctccgcccttttcgtgcctgggggcggggagaagcgcgcg

SEQ ID NO: 29810 - DNA, 250 bp, Mus musculus
  source 1..250: mol_type = other DNA
aacactgtgtggaatcacaagcaggcctgcctctgagtgtctgcctagctttggtctttaacataaaggctgaaataaaccctttcagttgcttcttgtcagaatattttattacagccacagaaatgagtcacttagagcctgagcttccccctacatctgaatggcccagtcggccatcattgggaagagaggccccttgggcctcagtgaaatgtaaatgaagtaaatatctaataaataattagaa

SEQ ID NO: 29811 - DNA, 687 bp, Mus musculus
  source 1..687: mol_type = other DNA
agtggcagtgggcactgagatgattcccatttacccgaccgcgcccagtccggaccagactggccggacccagcagccccgcaggactcgcagaggccctgggggcgcaccggtgtctgccccgccgagagtcgccggggggtcgcagggtccgcgtccctgcggcacgcgctgagtgcgcggctcacactgggtttggggcggggaggtggcggcggtccccagctctacgcgcccaagagtttgcggcgcgagcggcgggcttttccgcaggacccgagggacccgcgcagcggccgcggagccccgagaccccggcggcagcggcgagagcagcgcctcccgccgccgcccgggagaagctccccgagcccgcctgccgccccggctccccgcggcggcgggaggcgcgtctccccggcccagtcggtgcccggcctggcggggccgccccggcccgctcggaggtaagaggccaccgcgcttggggacgcacgatctcgggtgggaatacgtgcgcgtggctcgcggctctggtcacctgctcgctagcgctggggacgcgcggggcagggagggacgctcgggcgcgacaccgcgcgaggctgcgcagcgcaggcacccgggggttggggcgcggggaggtgagtcctgcgcactccgggtcctgccgccctgggcttcggg

SEQ ID NO: 29812 - DNA, 279 bp, Mus musculus
  source 1..279: mol_type = other DNA
ttaaattattttgcaactgagctctggtttggattctctaagaactagaactctgggatcacaggtgtgcaccatggtggcactcaagtctgacctttggggaatccaaaggccccagcatccctgtcattgctgaaactccaatagacaggctattcggaaaataaattctctcccggccgggcgttccgaatccgggttcgggttgggatttaaatcccatcccgcacgatcgaccccgccctgggcccgccctgggtccgccccatgccgctcgga

SEQ ID NO: 29813 - DNA, 445 bp, Mus musculus
  source 1..445: mol_type = other DNA
tctttaatgttttctcagaatagacacaagagcctgtatccttacaaaagcatgaaactgatgacctgagttggattcccagggcacataatggaagccaagacaaatgtttgaatttatatatgaatatgtagcattctgtgttaatttaaaaaaaaaatgaagagcaaaatccagatacaattgtctccaattttcagtgaacacactccagtttatgggcaacctgcagcttggataacaagatgtctttaggtccttcctccagcttttaaacaaggagcgtggagacaacttgcgcagttgctcgcttcctaccgggaaggagggaattcgagactgagggaggagacctggcagtggctccgatttcctcccgccactccggaaccctggccgggagccggcgccactggagcctcggcgcggctggtgggcagggtct

SEQ ID NO: 29814 - DNA, 408 bp, Mus musculus
  source 1..408: mol_type = other DNA
cctgaagatttccttgagaacttcagcggtaaatagaaaactttcagctgccgaagagtacaggggaccaggtcctgtaaacgaatatttctcgagacagttttctcatttgttcacataaccaaacgtttgaatacgagcaaggctcgaaatttaaactgtttctgagaatcctgttttcattggtagttagcatctaagacctagtttccaaattataacttaggcaatattgactgggcaggtttggcgccaccctgtcgcggccccgccctccacggcgccccgcccccttccggacacggcgccccgcccactcgcgtctccggaacctccgctcggccagcgtcgtcggtctgtcggccctgtgtacggccgcgggaggacgcagcgagtcggcgccttggg

SEQ ID NO: 29815 - DNA, 404 bp, Mus musculus
  source 1..404: mol_type = other DNA
atagtaaaatatgtggtgaattttactgagctgttgaagtagaaaattttattttgagcactttttagagagtttcaaagttggttttacaagttatcaccaaacttcattgtgttcagtgcaaataggaaagcatgtagattagtgctatgtttttaagacataccagagaaaatgctataatcattctaacagctagtcattacaaaagacctttttcttttttagacagggcttctctgtatagccctggctgtcctggaactcactttgtagaccaggctggcctcgaatttacatttcaaatgccgagtaggccatctagtgagatcacttcagactaagcagtgatgtgaagtgacacagaactgacacggaactggaactgtgagcacatggtctca

SEQ ID NO: 29816 - DNA, 336 bp, Mus musculus
  source 1..336: mol_type = other DNA
agggaatggatttcccaggatcaaacatattcaacacagtaaggaattttgcttttagggatcctttgtccagaaagaaactcaatttctttcctcaagatttaaaatgggttgtcatttttacatgtaagttttatttaaatgtttctataatttgtttctgagcctcagcatggaggatccatatgctagcaccatctctagggcagagtatacttgaaaacagtggactttataaaggagatattttattcctaaaagacttttaattagccttcatctatttatctactaaattatgatgtctatcataagttggtataaaacaagagtctg

SEQ ID NO: 29817 - DNA, 453 bp, Mus musculus
  source 1..453: mol_type = other DNA
ctaacaatgtatagctatgcattaagtccatcacttaagatattcagtagctcatatatgaagaggtattttaaatgtcttttggctggggttgatctaccagagcatctcaaatctcagctctactcaagattttaccggagcagagttacatttaactatgttatcttttaatggtacactgaaagtaatttaatatattacagagtttgtaacaaaaggccagcaaacttccccagacttggggactctggcagcagggttgcacaactctctgcagcatctgcaagcttcagctcggccgcccacagccctgcggcacagaccctggcgcctgcgcactcctcacgcccgcgggcagggccccaccccttccgtcgccacgccccggtcacgcccctccaggtgcgcgtgcgccgcgggtccgcccccgccgcgctcggcggtctctcg

SEQ ID NO: 29818 - DNA, 222 bp, Mus musculus
  source 1..222: mol_type = other DNA
gctgtgttcacagctgtcttgcattttaggaatattcgaacaggtaagaaattataattactttgaagttattttgatatctattaaacttcttactggaacaagatggtttttaaaatacgcgaggctagcctggtctactcagagaagttaatcagcttggtagagtcgcacagcgagcctgagctgtgaacgcccaccctctggctgcaaaacgcttgc

SEQ ID NO: 29819 - DNA, 364 bp, Mus musculus
  source 1..364: mol_type = other DNA
aatgagctaaatacctaataaaaaattaaaaaaaaataagtagatagatagatagatagataaatagataaatcttttttaaaaaacaaaaacaaaaaagttgagacagctgtccctgcaggcttggagggatcggtctgcagcagcagccaccggaagctgcacgttggctggaacacagcctcttgtccagagaagggcttttcccgggccaactcccccatcagtatttttcaaagtgcggaaataatcaaataatgcccaacgttggccgggaggtgcctctccgacctttggtggcggtgggcggggaagagaccccaacccgcacctctgggtgcaaggcgtgggcccagcatccccc

SEQ ID NO: 29820 - DNA, 370 bp, Mus musculus
  source 1..370: mol_type = other DNA
aaaagacacaggagaaggaagtttttgctttgcctgcatgctcttgatggcaagcttattcctttattgcttgggattccagtgttatactaaagaccagaggagcttccgttcataggcagccatacctgaaagccatacatacgtatctacatatgtgtgtgtatgtctctatgtgtgtatatatacatatattcattcattcattcattcattcattcattcattcattctatatgttctgtaactctagagaatcattcctggtgttgtgttggtggagatatcagaggtggtaaattaaacatgtcacctttcagaatgttccaggttggctgctatatatagacatgccagttagaccaggcaa

SEQ ID NO: 29821 - DNA, 416 bp, Mus musculus
  source 1..416: mol_type = other DNA
aagctatagagcctgaatttctgaggccctcaccagagctgagtgacaatcagggcttgaagatgtatgagttaaataaaacctctttctttacaaagaacccaacaccaggcagttttgtggtttttttttttttttttttgtagcagtggaaaatagactgatataccaacactgatgccatcttggacgtctagagagtgggcagaaagccaattgttttacaattgtcttcagcaccctgtgatagtgtgctataaactagcatgttggggagacccccccccccaaccataacattatttttgttgctacttcataactgtaaacctgctactgttaccaatcataatgtaaatatttgatatgcaggatatctgatatgctatcgctccagaggggccactcagccaaca

SEQ ID NO: 29822 - DNA, 480 bp, Mus musculus
  source 1..480: mol_type = other DNA
agcttgccttcatcccgagcagagggctcgcccgtccgccctccctcccaatcacagcgactgtttccggacggtcatgctcagcgacgggaccgaccggccgtaggcggcggaggggtccgaggcccgaccccggcgcgtcctggcacaccctctcccgggcgagcggcgcgggtggggtgtccacggggccgccggggcgctccgggctggggtgttccgccgcgccccgcacttcctccgggaaggccccgagggctcccggccccaccccgggccgggccaccatccgcggagggccggccgcccggccattgttcgagccccacccctgctgaatattcacgcgggcgggcggcgagcgagcgagggcgagggccgggttccgcccgctctcccggcggagggggcgggggagtcgctcgcccctcctcagcggcgccggtcggtgccccgcgtccccgcccccgcccccgcctc

SEQ ID NO: 29823 - DNA, 216 bp, Mus musculus
  source 1..216: mol_type = other DNA
tctttccattctcagtgggctagaatgaattgtagtccatacagggtccctggagccacaagaagaattgggggtgggagtttctctttaatgggaccatggaactgtttacaacttcttcatgtacagccagcatcactttaaaatgtgttcttggctggaagcatgccattctacaccatgagcagggtgctccccgtgagagtgagtatccct

SEQ ID NO: 29824 - DNA, 265 bp, Mus musculus
  source 1..265: mol_type = other DNA
cttactacttaaggtagtacactaagagtactatataatactatatagtactagtagtactatataaggtagcatcacactgtaaaacatcctctttcctgttgaaagcttggttgctcacaacatgatcatcccgggaggatctcacaagttccttgagcatgacaagcgaaaaagcacccgcttctgccgcttctgctgtccctagaggctggcgctaggagggacgtgatcacgtgatctccccggtctcactgaagtcgga

SEQ ID NO: 29825 - DNA, 395 bp, Mus musculus
  source 1..395: mol_type = other DNA
aatatgagagtctctttgacacaccgatttcatttccgttggatatataccaaatagcagggctgtgagttttgtaactattactttaagagaccttacaaatttcaatgacattctattttcctcattatagagtcagcagtcttgggtttaaacgcctgatttattttcatatatcttgtataaaatggtataatattcacctcctagcatttgtcacagtcactgtggctgtgacattagcaccaactagagaaccagttagtctggctagagccatgtccactgtcctgtcaccacagccaggtagcaaggctgtaggtctgaggccttggactcggaaattcccttcatatgggagaggattactggaatattcccggtgttttccctgc

SEQ ID NO: 29826 - DNA, 263 bp, Mus musculus
  source 1..263: mol_type = other DNA
gcagctgtctgaagatagtgaccgtgtgctcacatacattaaattaataatattttttttaaaaaaccaaaaatttacccactgtacaacactcttatgactctgagaacattctcaggagaagcaggaataagtgagaaagccctgcagcagccccgcccccctgcctccccaaggggctccatctgaactctttgaacatcccaggccaggcttaatgtaatatcataagggcctggcacgtttgctggctctgacacagg

SEQ ID NO: 29827 - DNA, 393 bp, Mus musculus
  source 1..393: mol_type = other DNA
aatggccatccaggaccacaatgtcaactctggaattctcctttgcagagcaaatcctacaattaagtttttcagcctggtggacagcaggctcaaagccagttcgaggcacacagtactgggctccagttgtgctgagcacagaactgtgttttcctcaggatctgataggtcagctcagaggattcttcctggaatctgggacatctggcaaggatgcagggagcagagaccctccattgcctccacccccggagggatacagagaccctggaatgtggggcagaaactccacaacccaacctatccggctcccagggcggggcattggcactgggccagctagctccgagcccgaggctgaggacgctggcctgcagtctccgcccgctg

SEQ ID NO: 29828 - DNA, 319 bp, Mus musculus
  source 1..319: mol_type = other DNA
cagaagatcagactttggtccccagatgcacatagccagtagagagagctcttgccccagacatctacctgttgggctccaggccacggtaatagttgaatatctcttttaaaaaaatgttatttaccagaaaatccttctctcagacgtgtaagagacattgccaggattgtcgcggcaacattatgtataataattgctcatgtcagcaagtataatgcttttattaaaaagtaagttatgtaagtgcacagtatagtaaattttatacagtgactaggaaatcttatgtaagaatatcttacattgcttaaggaat

SEQ ID NO: 29829 - DNA, 644 bp, Mus musculus
  source 1..644: mol_type = other DNA
atcctaaagatgtttgtttgtttcatttttttaaaatgtagttttgccaaaagtaatgttcatgtttggggcagagaaactttaatatagattatctttacagaggttatttatttacaagagattattttgagagactaaaacaaaaatttcccaaagagttcgttctccctccatatggagggctttagtaaattacacaacccattggttcaaaagctactaatgtgaagagaaacaattgtatagataactagagttggtatttagtattctagaacacttgacgtgaactcataaaatctttcttataaggacttgagtaagatgattatcttctgagcatcctttgttcacttaagtacatggcatgtgccagactcttcaaaaccttgacacagacgtttcaagagtaacctgcagaactgtgtggtgtcaccctcagagcacagctgtatatctacctgctctctgaggacagcaagagacctacagccagcaggaattacttgaaggtccatggagatatgtgtctaatggttaacagctatctctgagttaccagagacagtttctgtctatcagctactgggttcctgtaaagtaactgataaggaactgtatttgcataaaactattagaga

SEQ ID NO: 29830 - DNA, 190 bp, Mus musculus
  source 1..190: mol_type = other DNA
agccaaatactgcataaagatttcaattatatttttctcttcctatgcatgaaaaactgtttcatttgacctagatgagattatagatcaaaatctgaggtactagactatactttgatgaacagcatttgaacaagtcatggattttggctaaaactaaaattctaagacatctgtgtatttaaaaaga

SEQ ID NO: 29831 - DNA, 447 bp, Mus musculus
  source 1..447: mol_type = other DNA
ctgcaataatagatttttctgtaatgaacacacatatgctttgatgcttttgctaaactcaaaatattagttttattttactgttttgaaaggttcaaagcatgatccatgtaaaacttaccagttacaggtaaaaaatgcttgttttccatgtatcaaaatgttatgcctttcctatttattattgtatgacaaattatttttcactgggcaaaaataattgtgccattgtgtttgaagagttctagcttattaaaaaaaaaaatctagaaatactgtttggccttcgtttcttttgaatccacccatccaggaggctgggcatcctgcgctggctggttggctctgcgagcctggcagtctcaaggactctcctcccgcagtgcaggagtcctgggttctcagcgccctctgcctgaagggtgtggcgcgcacagggcacacccg

SEQ ID NO: 29832 - DNA, 569 bp, Mus musculus
  source 1..569: mol_type = other DNA
aaggttcaaagcatgatccatgtaacttaccagttacaggtaaaaaatgcttgttttccatgtatcaaaatgttatgcctttcctatttattattgtatgacaaattatttttcactgggcaaaaataattgtgccattgtgtttgaagagttctagcttattaaaaaaaaaaatctagaaatactgtttggccttcgtttcttttgaatccacccatccaggaggctgggcatcctgcgctggctggttggctctgcgagcctggcagtctcaaggactctcctcccgcagtgcaggagtcctgggttctcagcgccctctgcctgaagggtgtggcgcgcacagggcacacccgggaagccaaaggcggtggctgtgcctccctggaggtctggcgagtcagctgagatccaggcaggagaactccaggggctctatcgcctcagccctgccaggagtacaggtcttcccagaactgaaagcttgagcgctcctgggtggagcagcctgtagcgccctaggcttcagtcccccagctcttaggagctcctcccatcccaggcggtgc

SEQ ID NO: 29833 - DNA, 268 bp, Mus musculus
  source 1..268: mol_type = other DNA
gcagtaactttgggcttaactttaaggtctatattcagatctctgaggtttgataatctgaatgtacctcagctggggaaaacctcaaatccttttgggatttgagctagttccacaattagcatgaatacatgattttatttatttatttatctatttatttatttaattacagtgcagacaagcatagcctccgagcctttcaaagccattgataaattattgctctgtaaaaatttggtacaggaaattcctgtaaaggaagcag

SEQ ID NO: 29834 - DNA, 402 bp, Mus musculus
  source 1..402: mol_type = other DNA
taggctgtgtagacactttgagaacatttttccaactgagttttcagacacattcatgaagtttttccctttgagaaactcactgtggagcttagagaaagctactttgtttcttccataatttattggccaggaaatcaagtattcattatcttcatgaagacagtcatactttggtttgagcgctaaatcagccacaaaggctgatatgttgcaggttgaccggttcaaaatgggacaggtggctccttcctgggatccaacagggcagaaaggaatcctttccttataaaggacttcagtgtttagagggattgatttctctttatagatatctctttggtcatcgcaccggacctctttggaaatgacttctctcacctgtgccgcagaggcgtggca

SEQ ID NO: 29835 - DNA, 721 bp, Mus musculus
  source 1..721: mol_type = other DNA
cgcaggcagggcacctggcaatgcccctgcggaagggccagttggcgctgggagaatcccgcttttccaaaccgcaaacaagtccgcaaatcgactttttcgtccccaaagctgggggagggaagaaatctcaaccttcggtgcgcagagaacaggctgtgtgaggccccgagaggctcccctcggtgagtcggtctctgcagacccagcagtggcgaaggctccccagttcctccgcgcccggcgtcgcctccctgcctgagcccgcggcgcctcctcgcgtgccagcgccccggggtgtctccttgcaggagcctgcggggggagggggcagggcgcgacgcgtgggtcgcgtcggtcccagccctgatggacggccgacgctgcctccggggcggggacagctcaggccaccgtgcgcaccgagcacctagtgcacccacagctcccgggctcccaagaacagcggctcttggtccgcgggcgggctagagagcggcgcgaccttcgcccccgcgtcgactgtgggttgcggcaggtgcgcgtcgcaccgggtctccgcgtcctcccgccccgccaccggggcgccgcgcccgccccgccccgcccccgtccccgtccccgcccgccctcgggccgccccgggcagggcctgtagctgccaggcatgggagggcggccggcggcggagggcggctgagcaaggctgagcgcggccgag

SEQ ID NO: 29836 - DNA, 285 bp, Mus musculus
  source 1..285: mol_type = other DNA
tagctgaacagcttctgctgtaaggaaacagttgtctgagtccagatatctccttggctggcagggtcaaacaaatctttaaatatgtatacagtatctctttgagatcatagttttacagacttcttggatatctagaagtctctatgcatggtagagccaagtaggaagtagggccctgggttccttcgtgccttacaccaccagggagcgaggaaaccttccatctgcgcaggcgcacgcagatcgcttccgccatgggcgtggtcaatcctgggcgtggcc

SEQ ID NO: 29837 - DNA, 389 bp, Mus musculus
  source 1..389: mol_type = other DNA
acggaagcctcccactggcatatttagatatgtaaatagaacaaactggtttgtgagctaccagaaaacagacttttatgtccctatcggcggctaaataacattaatttttgttctttaaggaattgtattgccatggctataagtgatattagacctcatttgattttgaatatcaagtgatttttacatatcatttgaatgtatgagttatacacctaggccaagcctagatttcctcttccacaagtaattaagaggtgaattacaaattctattgttttgctctgggtagtggcaatttacattgtccagagcctcaaaaatttctcctgactgtcatgctcattttagctaagagggacctgctggcttggagcccctccagg

SEQ ID NO: 29838 - DNA, 383 bp, Mus musculus
  source 1..383: mol_type = other DNA
aacctgtgacagagtgagtcaaacaaatgcctgtcataggatgaatcataggatcttgttataagataataataccacagccatttttttttaatcaaacatgccagacacagataggagtagctgctgtgtgtacgttgtttgtactggatctatatctagcaagtacatactttttctgttcttgttcaagtagagactgtacaagctagacatggtagaggccttattgtgatttaacaatgttcctgaacactgttcaaccactgagagctcgtttatgcttatttttcaagttcagagaaaaagaaaaccatctcttttctcttcaaagagcctctgtgctttgcatgtcaaacccagctccagctctgttgggggtg

SEQ ID NO: 29839 - DNA, 458 bp, Mus musculus
  source 1..458: mol_type = other DNA
tagagggctcacttctgtgaactcagttacagagggagctctccagctcagcagcagcctcgcagcctctgcgtgatctcgagataaaggttcctttttatatttatatatgcgtatatgtatatataaaagatggaacacagatttcattgaataaatctgagatctccaggtgcagactttgaatatcaaaaaccgaaagagtctcgtggttttacagtgaggattttgtctaaattactgctatgagtttcacagtacacgctttcaaaagccgtctcaggtggcctgatgaaacgggatagcgcctcagcaaacagatccactttctttctttgcaaggagggtgtgcacgttcgggcccccaaccccctccctctgcggagtgtgattgttttgtctggaaaaaaaaatccatcatttgcatacattttcatatattttggtgaaaataatag

SEQ ID NO: 29840 - DNA, 331 bp, Mus musculus
  source 1..331: mol_type = other DNA
cgtccctccctctcagagcagggcagggcccctgctgattggctacccgctgggtgattggcaagcctggaatgactggcttaggacgcctggccccccattctacctagactgcgttgtaccccacgcgagagatgcgcgcgccggtatagacagatgtgtccccatctctgtcctgcaggaggtgggaaaggaaggcttgcctcgcgcagagctcctgtggccaagctactgcaactttgtgcagccgcggcgcgccggcggcgaccctcagccctgtaccagcgcggggcccgcgcgtgcgagtccgaccgcttgctgcggctgctcg

SEQ ID NO: 29841 - DNA, 511 bp, Mus musculus
  source 1..511: mol_type = other DNA
aaggtaacagaacaattcgacatttttttttcctgttcaagttttcctccgccccactccgcagaagttttactacagattgctggccacccacaatttggccaaggaagaaaggaaccgcttcgtcctttgttgtcggacagagccctgtgccgggccagagtccgcactcgtccgaggacaggaggagccgcggagcccttgctccccgagagagcgcccgaagtacgggtccccgccccagtgggcgagcctcgctggagccagccgatcgctcccggccaggggggagaccacgaccccccctgaaggggctggccacggagctcgcccggagaagcgatcccccctccccagggcgctgctcctgctgcagcggcggctgctgctgaccgaggctagccggcgacccccgcgccctgccaagcggccttgcagctgcagccccgggccgcggcggcggcggcgggggcggaggcggcggaggaggaggcggggccggcggggaccc

SEQ ID NO: 29842 - DNA, 356 bp, Mus musculus
  source 1..356: mol_type = other DNA
cctgctgagcagttggcagatgggtttcggcctccggaaggccgaggactgcacatctatgcaggccccaccgtccttttaaaactataaaatggatgtgaccacttatttttaaataattatgcgacgaagctttcgggagcagacaccagtccccctggctgggaactttcccgcgcggcgggttcccctggagcccgtcgggccgaggggagacccggcccgcgctctgcggccggggcgtagctctagctcatcccccaccagttcagccacggtaggatgaggagggaacccgcttgagtccagtaggccagcgcggaaagccgcaacccagctggaggctgcggttcttc

SEQ ID NO: 29843 - DNA, 158 bp, Mus musculus
  source 1..158: mol_type = other DNA
tagctgcccagcttccccgaaagttttcagaatatgaaaaactgagtcaagccatggagttacttttcccaaagagtcgcccatgggagactcaagatctcacctgcccaattgtcatccttagtggtccgctaagtactgagcctccgggcctagca

SEQ ID NO: 29844 - DNA, 567 bp, Mus musculus
  source 1..567: mol_type = other DNA
tgtttagagctgtaattatagatagataggtagatagatagatagatagatagatgtgatagatagatagatagatagatgtgatagattgatagatagatagatagatagatagatagatagatagatagatagatagatgtgattttccacaagagttctggggaccaaacccaggtcctctgaaagaacatattctgagtatgttttaaacttctaatgataatttcaacattatcaaattattcaatgataattttcaacattggaaaaccctttaagagtgatttattcaaccacttgtatctggtagagataaccctagacttagggttaggaagttcaagtttcagaaggcaaagacagttcctgtgtctgcagccactcttaatggctttaaggctcagaggcaacgaagaatgtcttgaaacagatctttgtgcaaggcaacctgctgccgcgcacccaatcagcggcgaggggctggactacagaactccgcccctagttgcaattgctaaggaagcgcttccgcctgggaggtctgcgcctgcgcagtctccaggc

SEQ ID NO: 29845 - DNA, 366 bp, Mus musculus
  source 1..366: mol_type = other DNA
tccaactgttttataggacatgaaccaggttgtgagaagcttggtagtccaaggcctgcctatcacacctgaatgttcctatatgacaaattggtgattcacttagccttaagactctgggtcttgtgcagaagtcttcgatcccatgcacagaatgtggtactatagtaaagcactgtgaagtctgatcatgcttagtactgatacaatttttaccttaatctgcagttgattgcatcaatgaattcagaagcttttgacggctttttgaaggccaactggtgcctcgcacagagtctccaactatgtaaaggtcttcacctagcatgtaagcaataaaaatttgcttcattaagaacattgcca

SEQ ID NO: 29846 - DNA, 592 bp, Mus musculus
  source 1..592: mol_type = other DNA
agatgatggggctcaataacatgttttagtaagcctttgattatcctggtgtgagtaaaagattgagaatcacaggttaaaagtcattattaaaatagtgactgagaactagcagttctgccattttaaataaaacatcacacttttcttttatgatctggcatgcaccacctggaaagctatttaagttctccaaacggtttcctgataatgatcttaagaatctctctgagacccgagtgtctgtctctaagagaggcgaacaggcagcggaggtcgtctgtcagctctagaggatttcccgggggttccagtcactctctggaggcttcctggaggcaagccccatccgatcagtgtgggcggggagcggccacgagcctcccgcaggcctgcctgtccccggctgcccgtccgtcctcggtcggcccgagcgccccacctgctccagggtgaggaggaggaactcctgggatagcagctcagggtgcagcagcagctccgcgtccgtacagctgcgaccgctggttgtcgccaggagaccccctggccggcctcccacaaggcactgcggcggaagcgtcgcggaagt

SEQ ID NO: 29847 - DNA, 578 bp, Mus musculus
  source 1..578: mol_type = other DNA
aacagaactgaacttgggttctataatcagaagaagtagtggtagggtaccctaaagaactgaagaatgactctggaagagcttcctaactcttcatcgggaaacttgagttttgattctataaggaaggaggattctaggattcttctttatggctttgccctgggactcccagcgcagaagggacctgcacatatgcgactagctttccttctgccaggactagcagtaggcctaggaaccggagggccgttcccccgaccctgcccgcaagtcggggcccggctgtgagtccgtctactggtcggtccgggaggcgtttctccgagcttccacctgaccaacgcagctgtgccaaggcggcgcttccttcgcgcttcccaggcgggcggcggagacgctcccctcccgagggctgcggtcccggtctgcgccgcctgcgcactcgccagcgcgcgctcgcccgccttcccgacccccgggccctgacgcggagcctcccagcggcgcgcggcggcctgggcaccggcgagcgcccgccctccgccggcgccgggcggcggcccacgtgacgggaa

SEQ ID NO: 29848 - DNA, 389 bp, Mus musculus
  source 1..389: mol_type = other DNA
tattttcataaacaatgcaacagtttccaataaaacgatacattatagagcatacaaactatgctctcataacaggtatgaagtacaacctttttgtctcctatgaatgatgaaagagatttctcacacaaatactagaatatagttgaagcctacaatattttgttaaagtaaaaaccacgacttcattgtaattattagtaagacattaaagatctttccagggaacaatacttgacaatgccatctggggtcacagctggggagaatccctgaggcctctgccatgggacgtcacagggggcgggaccaatggcggccagctcgcgttgcttagcctccggtgctttcggcgcagcccgggcaggactctgctccgcgctgaggac

SEQ ID NO: 29849 - DNA, 476 bp, Mus musculus
  source 1..476: mol_type = other DNA
aaggaaatgtggccagccacttcccatttaccgtatgcctcccaacactgtgttgaacagtgtcccgtgccccttttaaaggccaactctgcagaggatcttgtccttcagagtgtgaaggacacattaagaccagtgaatgttcaacagttctcccttagtggaactaattaatgattgtttggttcattccatgatggaaagtgtctgcaaggtaaggcgcagaaggctaccatgtcattgtgtgcaccacacacacataggcttgcaccaggctgcactcaggcaggaccccgcaacccggacgtgtcctggtgacagtctctctgcactgcatagcaactagccctggagccaaggccaggaacagacgacgaccggctggctgccgaggggcgctcgctaccgcgcctggctctcctggccagcgcgcccagcccgccgcccgggcgcgtgtgtcccgggggttctcgagg

SEQ ID NO: 29850 - DNA, 444 bp, Mus musculus
  source 1..444: mol_type = other DNA
gatctcactggcagcctgggccaggctccagtggttcaccacacagtgtgatagggcttaagccagtgttctgacttctgttctaacagctagattttaattttagcctacctcacctgaattacaatagtacctgttgtgaaagcgagggcatttacatttatttacatatttgcatattcaatagttattgaaagtcacctacagatggatatgggagaacatgaacatgcatagtttccatataaatgctgcgacatctgtagattttagaatctaaggtgtcctgaatctaattttctagtattgaggaatagctgaatacatgccacattcatgcatgtatgtataaatataatatttccaggtgtataagataatgcttatgtatgtgtgtgtgtgtatatatatatatatacacacacacacacacacattaaattt

SEQ ID NO: 29851 - DNA, 493 bp, Mus musculus
  source 1..493: mol_type = other DNA
aacttcctataagaaggcaggcaacttttctttcttgtttctgccttaataaggagatttgttataggttagctactaagtctgggagagcaaggtttccttctaaagctttctcagccctcctcccccactaggaagtggtcccgcctggaggttggaggaagtgacatttttatgtaagtcacttttctgacagacaccaggcctggctgtaaggctcccgacgcacagccgggtgcggagaccacccggtctcgtgggctgcaagtggcacctccttatccctagcagcgggtgcccccagctccaatctagagcgggttacggcttgaagcccccaggcggcgctttcccgaggcctggctgggactcccaggtgggtcccccgccccgcgtgcgccgggctgggccggcccctgggcggcgtcacggcagccagggaggagcgcgggcggggagcgcgcggaggcgggcgctgcgcgggagggtcgcc

SEQ ID NO: 29852 - DNA, 314 bp, Mus musculus
  source 1..314: mol_type = other DNA
ttcctttccactgtgctcagtcttcaagggagaaaatgcctgctggagaaacccttctacatgagaaggcctctccctgagtggccagacactaagcagctctccttgatttaaaactgagaatctttgtgaaggaactgagctcagctcagactggcaagtttccattcatcaattgaaaacagtttttgagagtgtgcacagtggacacagcatgttcactaaaaactttgcaaaaacacttttgcactgcagcggtttgagtcagaatctttcaaaatgcaaggcctgagcctgacgccaagggcctgggt

SEQ ID NO: 29853 - DNA, 295 bp, Mus musculus
  source 1..295: mol_type = other DNA
cctctgcctggggctggcgtgggggtggggcgccctccgcgggcggactccggggaccaaggacccaaagccctcgggaacactagcagccctggcctgtgggcgggcgtgggaccgaacagtggccaggtcgccgggcgcgcgtgcctgggcaggcaatgatttgcaaaacgctgttatttatacacaacagcgatcctcccgcacagctgggtgccaagtggagtgggcctgctccttggttgacccaaaaagaaacagcccgttggccagtgggcgtgcttttctgcagaga

SEQ ID NO: 29854 - DNA, 389 bp, Mus musculus
  source 1..389: mol_type = other DNA
tgcctgctggagaaacccttctacatgagaaggcctctccctgagtggccagacactaagcagctctccttgatttaaaactgagaatctttgtgaaggaactgagctcagctcagactggcaagtttccattcatcaattgaaaacagtttttgagagtgtgcacagtggacacagcatgttcactaaaaactttgcaaaaacacttttgcactgcagcggtttgagtcagaatctttcaaaatgcaaggcctgagcctgacgccaagggcctgggttttgcagcagacccgcagggcagtgtgcctcggtggcattagcttggctctcggcctggcctgctggctagttgcccaccctgtgggtcccgcccagagcaaggatcctgc

SEQ ID NO: 29855 - DNA, 409 bp, Mus musculus
  source 1..409: mol_type = other DNA
aatctgaagatggaatgtgaaactgtctgccaacactgagtctcattaatattcaaacatctgagaggaaaagtacctcagatctcattgtgctatgcttaaggagaagacataaccaacagatcaggcaaagtgtctgttgttctgaaattattcccatacactttgtaccagaaattaatatacccttcatctttaaaataaagaaaatgaagaggccggccgtgaacgcgcaagcgccctgcaagttgcaggcgaacttccgagatccgcggcacactgggctgcgcatgcgcgctccgaggggcacggctgtgggcggagccggaggccgggacccagccgcgcgagcgcagtggtttagccggcaggaagccgggcgcgcgggggtggggctggtgcacggggg

SEQ ID NO: 29856 - DNA, 427 bp, Mus musculus
  source 1..427: mol_type = other DNA
ttggagtagacacagcagtcgctgccactaaagagaggcctccaggcaggctacacactgcaaataatattcttaattatgaatgttggcaacctttgtttaatctgtgtagtttaaatttcaaatgccatttacgattgtgttacacttcactggagaagtatttttctgaaattacaggagggagctcatttctgtcacgtgttttgctttggggactctggcgacaaaacaggccgggccgctaaatctgccggtccgcagcgggttaagccaacctcggcggcgtcgcgaggatccgtcctctcgctgcttctcacggagagtgacagctcggaaggtagcggcgccgttagctgggtactggtggccaggctccgccccttccccacctccgtcccgcggtagccgggtgtcctcgcgccgc

SEQ ID NO: 29857 - DNA, 156 bp, Mus musculus
  source 1..156: mol_type = other DNA
caaacaccctgcagagaggtttaaagctttaactttcgtcggcagtgccctgggcaggcatgcctcttgaaccacaggagtttctagaactgaaacaaaaattgtttctatctagaactctggcttttgatcataaagagctcatcatttcaagtg

SEQ ID NO: 29858 - DNA, 244 bp, Mus musculus
  source 1..244: mol_type = other DNA
tgggcacaaggatgctagcaacccacccttctactccgtgtcttccgatgggctgatcagaccggaagaagccaagggcgctcggcccagcatacagactccggcttcaggagtccagcctccaggcgcccgcgaggggcgtggccgactctttcccggcgagcctcgcggcgcgccccacgagccccgggcgaagcctgcgtgcgccagcgcagtagcgggccgcgctgacgggggcggcgag

SEQ ID NO: 29859 - DNA, 381 bp, Mus musculus
  source 1..381: mol_type = other DNA
ccttaccccgtggagggaggacaaagcctgctactcctcttgacctcactggccgagaagcggggtgcctgggatccgctagcgcagcgtggagcgacccagatccttccaggggcgcggcggggtggggacggcgctacggagaggcggagcgcaccgcagtgcctgggctaggccctccgctggggaatgtcccggaactctggtgctggaagagtgactgggtatcattgataacttgaacacagacatgctagttgcgcaactgtagtatttaaggttgcactcctggcaggatttccgctaggggcccgggacaagactttactaagactggtcacagcgcaggcgacggattcgttcccaaagtgatgctctagt

SEQ ID NO: 29860 - DNA, 387 bp, Mus musculus
  source 1..387: mol_type = other DNA
gcaaccttaaatactacagttgcgcaactagcatgtctgtgttcaagttatcaatgatacccagtcactcttccagcaccagagttccgggacattccccagcggagggcctagcccaggcactgcggtgcgctccgcctctccgtagcgccgtccccaccccgccgcgcccctggaaggatctgggtcgctccacgctgcgctagcggatcccaggcaccccgcttctcggccagtgaggtcaagaggagtagcaggctttgtcctccctccacggggtaaggggcgtggaaaccaaggcaagggctgcactgtcagcgcgtaggaagcggcccccttcaggcctgcgcgctccccctcctggcgagccttttcttccggctggga

SEQ ID NO: 29861 - DNA, 345 bp, Mus musculus
  source 1..345: mol_type = other DNA
ctgggtttgaataattacaataccttgttcttttgtactgcttacatctccacagagctaactctatagtaaggcctgtggaactcaaagtttcagatgctggaggaaattcaaagttaagcactgcgttgtactgccatccagttactgcacgttgtgaaaatatttgccttcaccaaagtcaagacactttttgcgcctaacagtcgtcaagtgtcaacgcgggaatcccaaccctcgcgttcacttggaagccaagaggtttccgggagaaatcactcgcggaggaaggctcggcgctggcgtcaccggtgctgcttctcacgtgccagtactggggcaccc

SEQ ID NO: 29862 - DNA, 595 bp, Mus musculus
  source 1..595: mol_type = other DNA
accattggagataaataactccatgagatagtatataatttttgtttatcaagtcactattcatttgtgttttaaacagtcaaaagtgtaggttgtcaaaaattaactggctttacatagcagtatacattctgtatagttttgcgattccaaatgttttacctataatatgtattccatcttctgtgatttttataatcctgttttataatgaagaaaggtaagaatagctccaaatcataagcagttactgatatgactaatgaatacttagcttcgtgatgcttaatttcttgaagttgtactcacacgcctgagtgtgcagattcctcctgcagcattaaggctagcattatcagaaatggaatatgtgtatgccctgagatgtatacctattcagtgaaccatatcttactctgtttgttcagcaagatagatgacatgaaaaccatatggtgtctatttcataggacatcatagccacagagtcttaaaataacttttggcatcagaatagaaaactgagtttgcttcgtctaagtagcaatgtcactgttgtgcaaccagaggcagagaaactgcagctgtcagatgc

SEQ ID NO: 29863 - DNA, 282 bp, Mus musculus
  source 1..282: mol_type = other DNA
tgtaattgaggaaaatacgtaataaaaattttaaaaattaaaaaaaccattgctgcggctgctcctgcagtcacttggtttaataaaacttgatttgaaaatgaagtccgagaatgaattggaattccctgagctctgagatcaccgtggaattcatcttttttgcctaacactggggaaaaagatgctaagacctcgaagttccaagtaacccagagcaactttgcaattggctacaagttccagcttcgtactaatgtgaacgaggccctgctttttgac

SEQ ID NO: 29864 - DNA, 321 bp, Mus musculus
  source 1..321: mol_type = other DNA
tttaaggcatttattgtcatggcagaaagtggtgtaaaaccataccccccttctcagggtgggcctgagattaaataccttttacagggagagtacctcattaaaggatttgagcctatgtgaccacaggtcatatcctctaccagggctacctttcaccgccccacgggggggaggggtaacttaaacctcagaggtgttttaaattcttaccaaacagcatctgtgggaggaggtttggaaccgccaggtctgcctttaaaagcaggacagttctgcattactgcagaaaaccccaccagcagggggagcccggcccag

SEQ ID NO: 29865 - DNA, 604 bp, Mus musculus
  source 1..604: mol_type = other DNA
taagttggtcatcataataagggtaacaagtacattttttctgagatttaatcagagatatagtggtatttattcctcaactagatctagaaatacatagaaaaaaatactgatgtagacatatttgtagtaattattacattagaaattagaaattctattccacactttgaactttctcttttgtagtttcttacaaggacaagacttgaaaagtttgatttctttagtaacacataaactggaaattttacaagcttatagctcaaagacagttttgtgacaattgcctccagtctaaaattgagtcaggatgaaaactcaaagtatcagagtcttctagaaagataaaatttaaaacactttttcaaattcagacagtttttactgtttcagagggaaatttaaaaacacacaaacaattgttgtaggctatcacaaagcacattcctatgtgtttctgtcatgcaaatatgtatttaagactaatgcatgttataaacatatgcataggctgatgtacacatgctccagatgtgctgtttctgtgtctgtgggttgtgtcctctacacacagggaaaaatatattaatcattgctttta

SEQ ID NO: 29866 - DNA, 500 bp, Mus musculus
  source 1..500: mol_type = other DNA
gaaagctggtgtggggttcataacagcatcattcacttttatgtagctctttgtaatttagaatctagttaacagcatattgctcagtttagtgtcaccagatcctgcacactgaggactatgtataaattcacaaaattggtgagttggcagatctgatagtgaacatatttgttttttaacacaatagcataaataactcaatgtaaagtatctcaagttcattttgtctttcttccacaatcttctcagagcataggagagggaggaggatgaaaattgggacaagaatccttcctccattgattctgaattatttaagtaaaaatccactaaaaggctgtaatcctccctaaagtttttttagtgtctctctaataggctttctttaaaaaaagaagaaaaaagtttgtctctgtcttcctctgtgctactgaaaactcaaggcgcgcgctctgatttggttgtttaccatcaatcagacggttgcttggcagaca

SEQ ID NO: 29867 - DNA, 217 bp, Mus musculus
  source 1..217: mol_type = other DNA
tctggcctaatgtcgttggcaagtgtggcgtagatgctacaggaacttagcgatgcccgccccctcccaaaaaaaggcaacggaggggggtggtgactgcgtcatcttgctgtcgctcaatcacagtgaccacttccgcttctggcggaaccttctctcttcagagtctccaggctagagaggcccaggcgggccgcgggcggcctaaggaagttcg

SEQ ID NO: 29868 - DNA, 197 bp, Mus musculus
  source 1..197: mol_type = other DNA
tgaaactttacttttcaatcagtgaaatgtttcagccctggccaagtcctcagatattgtccttggtgacaatggggaacagaagctccccattgatgaccatcaactgagctcctgttttgtattctgaagatcaattcctaagtgcttcatgtaagcacactttaggtttactccaaaagacatttgttctgcag

SEQ ID NO: 29869 - DNA, 418 bp, Mus musculus
  source 1..418: mol_type = other DNA
ataaaaaaaatcttagaaataatttgcttgtcaataatataaaatgacccatggcatttggaccccatataatatcgttttgactgtaagcaagaaatgattatatgttcgtaatgattgtagttttatatagcacctttaagtagttcttaaaatcagaataaagaatcttgaaagaatctaatctggattctcagtcaagaatccagattctgcctaataatgcctcattaattaataatgccatgacatagaagagtaaagccatgacatagaagagattatgcatttcattctgtagggttggccaaagcttatgctctaggcatttcttcaagaataatcaagttaagcatctgtctctctgatccattgaagcagaagctcatatgctctgacctcacaaagagtaagactg

SEQ ID NO: 29870 - DNA, 414 bp, Mus musculus
  source 1..414: mol_type = other DNA
cctgtgctcatgagtggctctcttcagctggaagagtgcaagcactcttgaagtgttgacaactggtgtgtattcacgacccagggtcccaactgggacaaccggtattcctggttacgaagggcgctgcctccttgcagtgcctgtggcacagaaggcggcctgcgttcgatcactgggagcttttgagagagagccctctctatagttcggagaaggatctgcgccgcaggcacttagctacctgcattggactgtccggcaatctggtggccagagagaagagcaaagtttgtgcaaaatgtttcaccccttggcttctcctgcggtagcccagccaaagcgcaggggcgcggacctggacgtccagccgcgaagggcggtccctgctccgcccccggctccctataagcc

SEQ ID NO: 29871 - DNA, 331 bp, Mus musculus
  source 1..331: mol_type = other DNA
ctatgaaatgagaccatctcaaaaaaacttttcagtaggaggcagtttacgttgaagtctaaagtcctcactctattttaccagatctttaaaacagagcactgcaataatcttctaagagaaatgactcacagtagtatttctaatagttatgaacacttgcctgacggtcactcaagcctatgcctgaaggactgtcttggcacagcttcgttcatgtagtcaatcacatgtggatttaaatgaatttctgaatgctcatacattagcaatgaacaccctctgtaaagggtggtgctccagtttgttgcttcgaccaacgttaaagctc

SEQ ID NO: 29872 - DNA, 415 bp, Mus musculus
  source 1..415: mol_type = other DNA
agttatgcaaaacactttgcacatagcactaaagtttactatgtacagatcagcaatcccaaggcctcagcaaccgacgtgcgaggccaggcgaggcgaccaaggccgttccacgtagcgcggagctacagagctccgcaatttgcgtagatcgccgtagctcccgccggtgccgccgctctcctacgccaggcgcgtccgcgaagtgaatggctgaacgctgccggtgcgccgccggcgtagcgccgatcaggccgaggtgcggctgcgcagggcgcccgagcgggccgggtgcgccgccggcgtagcgctgaggcggccagggtgcggctgcgcagggagccggagcaggctgagtgcgccgtcggcgtagagcgccggctctcgcgctaggctccgcgacgcagatagcgca

SEQ ID NO: 29873 - DNA, 321 bp, Mus musculus
  source 1..321: mol_type = other DNA
cgacaggcaacaaaagatgcctattgctggcctcgaaccaactgcgcacttttgatgtgtcaatcctcactattgaggttgggtggagaagattttgacaaccaaatggtcaatcatttcattgctgagtttaagagctgtccgctgtgcgagtgagattgattctctctatgagggaattgacttctatacctcttcgtcaatttgaggaatttggacaagtcacagatccttttggtgggtggttctaccagaatccccaagattcagaaacttctgcaagacttcttcaatggaaatgagaacattcaggatttgctg

SEQ ID NO: 29874 - DNA, 304 bp, Mus musculus
  source 1..304: mol_type = other DNA
tctcagcttggattcagagcaacaacattttgttgaaccttttagacagccccacaaataggttccccagcgaaactggctgctccagcctggcgagcactgtcgggcttgctcggggagctagctgctgctgctgctttaagccaccagagtctagaagcacggaccggcggcgccaacgggacgcagctggaagacaaggccacccagccgcagcgggtgctgtcagcccggggtcacgcccaggagctagaccactcgggttagagcctagaccaatcagagtccgactctgcttcccaac

SEQ ID NO: 29875 - DNA, 406 bp, Mus musculus
  source 1..406: mol_type = other DNA
gttaaggcaatgtcccacgatcagttcctgacccagttgcctgatcccaagggcccggctaaggagggccacatgtgagaacaggtgtgccacttcaccttgcagtcacacttctggacctgtgtcaataaatgcctctgcatgaattcagaattactggaaacaaaccagcacttttttttctccaagagccatcttctaagaaagcattcatttaagagatttctttcaagttggattgcatgccatcttgcaagaggacaggacaccaagctgagttccttgtcagtttcagaataatctcctgtgctttgcaaatgagacccctaaagggcaattcctttctgttacaataacttgtaactagatttagccaatcagaggctggggtcatgattgaaatatg

SEQ ID NO: 29876 - DNA, 293 bp, Mus musculus
  source 1..293: mol_type = other DNA
ctttactagttagcaatggcatccaaacacagaaattttattttgactcatgtgtatgggtgtgtgtgaatgcagcatgcagattcttggagctggaatcacgggcagccggtgctgggaacagaggtgctctggaagggcatcccggagttgagtccagggttctggcagcctggaaggcaccaactgggtctgtgtaaaacacactgggatggagtgttggcaacactccccaggagctttacatcttaccacctggggaaaaagaacttgtaactagtgttgcggttcca

SEQ ID NO: 29877 - DNA, 397 bp, Mus musculus
  source 1..397: mol_type = other DNA
atcccaagggcccggctaaggagggccacatgtgagaacaggtgtgccacttcaccttgcagtcacacttctggacctgtgtcaataaatgcctctgcatgaattcagaattactggaaacaaaccagcacttttttttctccaagagccatcttctaagaaagcattcatttaagagatttctttcaagttggattgcatgccatcttgcaagaggacaggacaccaagctgagttccttgtcagtttcagaataatctcctgtgctttgcaaatgagacccctaaagggcaattcctttctgttacaataacttgtaactagatttagccaatcagaggctggggtcatgattgaaatatgtccactgggtggagcaggtcctttaagagcaact

SEQ ID NO: 29878 - DNA, 404 bp, Mus musculus
  source 1..404: mol_type = other DNA
taaaattatcactcaccatgagattaaataacaggtaattattttcaatagaaaattgatgaaaagaaatactgatcacagatctatttgttcctagttttattgttcagattgttaaattctggctaggaagcttaaccaactaatttcaatagcttgtttgcttcaccagtgtatggttaactcatcttagttatataaaagccaagtgcaatttactatgtatggctattatcagcatgaaaagaggtttatttacaagttacttttaaaaagaccacctccgaaaccacggggttcggaacatctgagttccacgcgagctcagtggcgctgtgttccgccccagaggcgtggtgacgtcgcgtgacgccacaaggggcggggcgcggcttaataaagcc

SEQ ID NO: 29879 - DNA, 482 bp, Mus musculus
  source 1..482: mol_type = other DNA
taacttacctcacaggtttttgtgaagattaaataaaattgtatccactactcaaatcctttcagtgacagtatccagatataggtcagtgcacttaaacctggccccatttatggcaatttatttcattataggataaagtcgtcagattcatgagtaataattactgtgtcggaacaagccagacccagggtcatgtggcttgtcccgagtagaagctgggagtcctgagtcttcagaccctctatggtatattcaatatgtatgtcagtgacagagacaataaaagcctcacatggcaggccattttccattattgtgatatttttgggcacccaaactcgctttcctgggtgtccccgcccgccgggtgctcaccggggggcgctgtgcggcctgcgcgcctgggtgaaccgcggccagggagcgaggggcgcgtccgggcggtgaggtcgccgcccccgccgggagaggggagtggc

SEQ ID NO: 29880 - DNA, 384 bp, Mus musculus
  source 1..384: mol_type = other DNA
cagaatatatattatttagttggataaagtccacctacataatggaaataatctgcttttttttttccagaatcattgaacgttacatgttttaaaaatgtccaacagaaacatttagaatgacatttgggtaaatattgtaaacagtgcgccagtgtgttctgagacattgaatgcatttgctgatgttctctgtgcagtccccagacagcacttggtaaagatgactgtaatcttcatgctaaaaatcaccttgcaaagttgtttaccctctctggttcattattttagagggagacttcaccaagaactaggttgtggcttctggcagaagccagagcctctctaagcctcctgtaggtcataggagcacctatgacaaag

SEQ ID NO: 29881 - DNA, 250 bp, Mus musculus
  source 1..250: mol_type = other DNA
cagacttgtctgagtcacagcctcagctcggtggcacacctgtgtgatgcctaggtatactaccctagacacatgtgtatagaatttttttcctgttcaaggcattaatatctaaaggaatccgctggaagtcagtgatccctgagagatgactgtcctcaatgtcttcagatgtgtaagcctgtcttctcacaagacagcagaccctgctgttctaggaaaacaggaatcctcccctaatggcgtcagc

SEQ ID NO: 29882 - DNA, 369 bp, Mus musculus
  source 1..369: mol_type = other DNA
aatgtggatctccatgattcatgtaaagccagctgtgatggtgccatggcaagacacgggaacccccagaagcttccaggcagtccaggctggctcaggagaccatgtctcaaacagggttggctctgaacatatgcctatatccacacaaacaaaaacctactgtgggtttgggggcattgttacatcacaaagtccagacttgtctgagtcacagcctcagctcggtggcacacctgtgtgatgcctaggtatactaccctagacacatgtgtatagaatttttttcctgttcaaggcattaatatctaaaggaatccgctggaagtcagtgatccctgagagatgactgtcctcaatgtcttcaga

SEQ ID NO: 29883 - DNA, 360 bp, Mus musculus
  source 1..360: mol_type = other DNA
cgtctatggcttggccctcatccgttccagactaagacggggtaaagctttatttttcttaaacatattagttagaattatttattttatttcatgacgcaagttctctgtagctgctgagttaaaggcaagtattgaatgttttcaaattggtaaattacccgcagtgatgcgcctacttaatgcaggatctccaagactgagcttgcgcaagcctatagtcccctgtctgcggtttgcaccgcacagcggcgccccaagtttcgcacgccgggtagggagcgcgcgtgcgctgatggaacagccggccaatctctgccgctgattggctgaggcggaaggaggcgggacgccctctag

SEQ ID NO: 29884 - DNA, 487 bp, Mus musculus
  source 1..487: mol_type = other DNA
tctatgcatttaagcctgttgaaatggtttaaaaaggtatatgtgtgcagactcaggaaacatatgatatgcttctattttaaaatggcttttaaaatagaaaaaggatctgcagtattttgctttcaagtcaactggtactaatgaattcaaaagatttggagaaatcttgtagaagatagaagagatccacccttacatttccaaaacatttcgcttagggggcgagcagtaggtttggaccagacgatctgcaatagctggaggacgtgcttccctggagcgcacctgcctggtgaatggccagactccggagctacgggtcctcgcccagcttggcctcaggtggcccgaggcaagggggggtcggcggggctgacacacgtcagtcgtccttctccccgccctccaggacccagcgggactgcgtacgggcgcgcatggaagagcttgcagggggcaggccgtcagcgtcctcccgcccccg

SEQ ID NO: 29885 - DNA, 640 bp, Mus musculus
  source 1..640: mol_type = other DNA
gatgtggtttaaagaatttctcttctcaaactatataaaactggatttttatatgtacattaaaacaggattctacctgtattgcagtaagagcacaccattaaaacttgaattcttttctaaggaaggcaaaaatagatttaatttttttccccttaaaattttggcaatagctttagcttttgaggtgctgtaacactttctttggctagaaaagtttatgcaaaccaagctcaaaatgtctacaccttgtgtcatttgcctttcctccctcctcaaaccaggcctgggcgagggtggggacagggtgggagggacaggtccgcaccgcacctgcggttctgtaccccccccaccccctccctcctgggcgggcccggtgcggggcttggcaggcagcgctgtccgcggatccacggaagcctcctccgacccgcgcgcgcgcccccacccgcgcgctcccagctgccgtgggaatgggccacccccgggaccgcgccgagcctcagccccgccggcccccacccccgccccgcggccgcccacgccgggatctgcgtcactcggccgcgcgtgggcgggagccggagcggcgactcccgatgtgacagcgcgcggggcggcgggagaggcctaggga

SEQ ID NO: 29886 - DNA, 511 bp, Mus musculus
  source 1..511: mol_type = other DNA
ctcagaaactgtgagtctcttataggctgactttagagagctatcatctctgccaggggttatgtttagaacactcactatatctttgaatttttaaaaatacaatctcatttttaaaagaaggcttattttttaatttaagtgtgaagagcgataagtgttcctaagcactggtctattaaagtaacactttattaatagtgaacttatataaccctaaagatactgtgttcatgagcttagacacaaattatttaagcaccaaatttctcaacttgttgcttaaaaaaaaaaaaaggaagaaaacaaacaagtcaggcttttgtctaagtggcctttctgagtggcccgcaccagtgctctgagaaccctgcgcggggctccggcgtgttttaaactgcccgccaactctgcaagctggcccagggatcgccccctggaggccactgggagagccgctcggcggaccgcggaagggcggggccgcagccggctccgcccctgcaatccc

SEQ ID NO: 29887 - DNA, 406 bp, Mus musculus
  source 1..406: mol_type = other DNA
agaaactgtccctggaaagctgagcatccagcaactgtatatttatactttttcataaagaagggcttcacaatttgatgtagctgtaacaatagattaacattgcttacatctataggattcaatggtatgtaaacaatgcttcccatgtaagctatctgaatttaacaaatgatacagcttaattcttagagtaacacctgtgctcagaagctcctggagcgcacccgtggcaccaccgctcagcccgagcgcaatggggtgtggcggaacggggatggggcatcgcccaacggcagccggggctggataccgggtcccccgggcggccccagagggcgggaggccgagaggaggcggcggacgcatccgccgccgcaggaggcggagcgctgcacctggcgcc

SEQ ID NO: 29888 - DNA, 211 bp, Mus musculus
  source 1..211: mol_type = other DNA
ccatcgtgcccagagcactcacagagactctgagccccttcatctttaagtcacactgagcattagtttttctacattctagcaggactcaaagactttttgggtgcttctgaagaagacgtcgcggaggccagactcaggctggctggcgtgggatgccctcgcccgccccagaagcaagaggccacccgccccgggggaaagaggcggg

SEQ ID NO: 29889 - DNA, 386 bp, Mus musculus
  source 1..386: mol_type = other DNA
cagtccaatagttgactgctctttgtcaggctctgacagagcctctctggagatagctgtatcaggcgcctgtcagcaagcacttgttggcacctacaatactgggtttggtgactatatatggaatggatccccaggtggggcattctctggatggctcctcttctaagaaggaccaaagcacccacactcatgaagtcattgtttttaatggcggagtagtactccattgtgtaaatgtactacatttttacccggcctggccctgtctagtgtgtttgccccgccccgccccgcccggccgggcccgtgagcgtagcgcagcggaggccgctctggcccaccggaggacttgtccccggctctcctctgctctcatcggctgt

SEQ ID NO: 29890 - DNA, 545 bp, Mus musculus
  source 1..545: mol_type = other DNA
caaaggggtgctagcctgtgacactctttgtgtgctcacgggacctgacatcattcacagagaagccctggaagtctgagtcaaactgaaaaaaaaaaaaagcaacactcagtctttagtctgtatctctgtaatagaaaatagcaatacttataagctgaaatcaagcacaggttttatgttagtcaggactggtttgtaatatgtcctgacaaataatctttctttaaattaagtacgcatattttttccctcaaatatttgttttagtaacaaaacagcactccaagtcttaaaggattaacattttctattttaaacacaaaatctaaattaaaaattactaacttaaatgatagcaagagttttacagagattaataagctttaagtacagtttatattagtacaattcaatttatcaaatgtcacatatatctttcatgatttggggatttatttcatttatgaagtagtcaaatgaatcagctgtaacaaaatactgcttggtgacttgtgacctcctctaagttggaatataaaaag

SEQ ID NO: 29891 - DNA, 445 bp, Mus musculus
  source 1..445: mol_type = other DNA
atcctaaggctgggctcagcctaagcatcacaatccatatgggaatcacacagacagatgcatctcttaaagggtaagaatataaacaagcgttttagaaaagtgcaatactggacgcatttttaaatttagaagtgcttggtgcacttccgagtgcactggggcaaagtactaaacaggtttgactgctaaactggcactggagcagcgcagccttcaggggagggccccggggcaggtgacaggagatcacctgcggggctggcgccacgctgcagcaccggacgagccgcgcctgctcccacgtggacagagatcaggtgcaagctcacttagctgtggcccagcactggggtagcccctggcggtgccaacactgagggttgtgctccgtagccgcgggtcccttggctccaggggaggagccgggaccactgccgaagga

SEQ ID NO: 29892 - DNA, 227 bp, Mus musculus
  source 1..227: mol_type = other DNA
ttgcctacattcagaagtaggtagaggaaagcactgttccgtggtattgccaggcttaatcctcttcaattggacaaattgaggggttaggtaaatcagatacctactacagtggtttctcgagtagagaaactaatttttgtatttctcatctgagcatcagtttaggcttgcagatactatcaacactcatcacaagacagagtgttcttattaactcagggccc

SEQ ID NO: 29893 - DNA, 629 bp, Mus musculus
  source 1..629: mol_type = other DNA
aaatttatagggttaggggttcaaatttgtaccacaactaggttaaagtcatgaatctttctcaatatttctttagccattcaggaagaaacactaagtattagtatttctagtattagtactcaatttttactttgttacaatcaaactgaaagaatacatttcagcttctattcaaagatacctaaaatcctttctattgcagtgtttgaagaaaactaagggagagtctcgcgtaaattttgcttctataataaccaagtacctataatgcacttttaaagcttaatagttcgaacctttctcagcaggttgtgccgcaaaggcttcgctaccccgccccagtcgcggctgcacttccgcggcgcgccgaccacctgcggacacctagggtgcacagcgcgagccccggaggcagcaggaacctgctctgccgcaggccttctgggccgtgccgcagctctaggaagccttcgagcttaccggccgccagctcctggctggtcacatcccgcggcagccacagtaggtcctctggctagagctactggtgcgccccaccgcttccggaaggctgccaagctgctctagcgagcagccgattggctgccagccgcgccaatcccact

SEQ ID NO: 29894 - DNA, 514 bp, Mus musculus
  source 1..514: mol_type = other DNA
acacaacacatggagtgtggatcctactgttggaacagtcctagtgttagaaaagaagtcatgtttactgaacaactttaaaatgtttttcagagttatttctgaaataaaactcacaaagttttataaatacaaatcaaagatgatttagaaagagaatggattaatcaaatctttttttcctccccttgtacactgtcttcattgggaataaccacaaattaatacctttttgtgttctgagctcccgagccagcccagaggcttgaaacgcgtgcgcgcgagccccgcaaatccgcacctagccccgggaggcgccttcagcctccccgagcatcaccgggcacgctcgttcgcggtgacactcggcctacttcgctggacgtccttcggaccgaagcacggctgcgctcagcaggacccgcgctcgcgctcctctaaggcccgcccacagcaggaagtgggattggcgcggctggcagccaatcggctgctcgctagagcagcttggcag

SEQ ID NO: 29895 - DNA, 352 bp, Mus musculus
  source 1..352: mol_type = other DNA
agacaggagggctgctgtagctcactgacctccaacctattcctgtacacacatgttcagctggtgcttactgagcatgcacaaggccctgggtcagttgtgtaactgagagtctgagtccagcctgggatagaaacaatctctttagactcaggaagaagaatgtccctattgctacttttgttcagtcaagaagacaacagaatcaactgtacaatatcttaaggccttacagagtagctgagagaaactttctcctgcttgccatgatctatagaagttagtagaaaagctaagttggatattttcctttctgcctctgtgaggtaatacccattgcctctaggggcca

SEQ ID NO: 29896 - DNA, 162 bp, Mus musculus
  source 1..162: mol_type = other DNA
actcatcatatacataaaataagtaaatctgaaaaccaaatttaagagtattaaattatagtgatttatttttacataggacaccccgcgcgcgcttgccactgcgcaggcgtgagtgtgcgcactccgggcggattcctgagtggaacccaggcttcctgc

SEQ ID NO: 29897 - DNA, 533 bp, Mus musculus
  source 1..533: mol_type = other DNA
gaggcacttaactctgtgactaaattcattcaaaattagcagcccaattatctgtaaatgaggccacagtgaccctgctggcacaaaattgttactttattgtcacaggttgaaaaaagtctcaatttttttaaaagtaagttcaatattgtaattatgaatttactagtaccttctcctagagtctcatcaaagcaaagatccaagcccttcccagccttgcattgtaaagcctttgcttgctacagttttaaagtttaggaatccatttgattaattagtacatgctgggatgataaatgcagcagttgtttaaactgtacaaccaaatacacttcattctgatgaaaatactttccccatgaaaatggaaggtttctcaggccaccttttaagtctggtgacagctttcctaaaatagaatgacagtaaatcctaccctttttctcttggtgtactgaatctggacaccttttcatgagtcgtaagcatttctttactaagaccgccggcccaagggcggtgacgtcact

SEQ ID NO: 29898 - DNA, 368 bp, Mus musculus
  source 1..368: mol_type = other DNA
tgtctaggctaagaaatgagacgattcagtaggaggcagtttacattgaagtctaaactcctcactctattttaccagatctttaaaatagagcacttatttttgttcttctaataaccatgaaatgtctcaggcttttgcatctgattgctctgcccgaaatattcctttctaagagaaatgactcacagcactgtttctattagttatgaacacatgccttacggtcacccaagcctatgcctgagggactgtcttggaatattagcaatgaaatgaggacccacttagacatcctgccaccctctgtaaagtggagtgagggcaggcctcagaccagtttgttgcttagcaacgaatcgaccacg

SEQ ID NO: 29899 - DNA, 408 bp, Mus musculus
  source 1..408: mol_type = other DNA
ttatatagaaataatttacaaatttgaaaactaaacaaaattttcctaagtagatttggttaatatcaaatagtaatttgatactaaaagtaccaaaagtttcagactatgaacttcagataggttggtaatttatttatgatcagtcattgacccagcaaaatagagttttcagtactgggttgtattcttgatttatgtgggacagaaatataatgcacaaaatgtgaatttgctaccaagtttgtggacatgttaagttaaaacaaatattcattacattactatattaaattccacaggtgagtggaagccatggatttaatatagcagtttctttttaaatgaagtcagttaagctcctgaaatcagcatatctatgttgagataatgtcaactaggtaaaag

SEQ ID NO: 29900 - DNA, 284 bp, Mus musculus
  source 1..284: mol_type = other DNA
ctagattctatgtgtagatgctacatataaacgtataagtaacctaggatcttatatgtatgtaaacctactgtatctagcacgaaactttcagtttttaaacagtcttcaatgcttgagctagttagtgtcttaagacatccagctgtagagactaggatcctggagtcctatttatggcttcaagaacccatagcggcgcggacccccccgtcggcgctcccccccctcctgaggcccggcctcacagcacgcgctgccggccgccgccccgccccgcctcc

SEQ ID NO: 29901 - DNA, 400 bp, Mus musculus
  source 1..400: mol_type = other DNA
ctccatctcaacctttcaaaagttggcttttggcaaactgctagtcatactagtttcaatagctttacatctcactgtggtctagactatgatggctggtttgtcttggggtctgccaggatccaggaaccacaaagattttattattgtacttcctgcataaatatagttaagctataaaactaagtaactcttcatgttttgctgtggggcacagtcataatttagtttttagtgacctaagtcacatgcgattttaataatacaattgaggcatgacaccctcgattcccctttccaatgggatttaggcccagctctggagcgccgtccccagggaggtcccgtgggcccgggtctggccgcgagtacccgacgtgcaggcggccccccgcccagc

SEQ ID NO: 29902 - DNA, 460 bp, Mus musculus
  source 1..460: mol_type = other DNA
atctgttctacagaaaaatcttgttgaatggaagtgaaatcatatatacactgaaaattaccagctttttttttttttttttttgtttaaagttgtttttgaacaaaggcatttcttttcatgggtcattcacagtcttatgaatctcccccctgctcagcaactctcagactcactctcagagctgaaactcaggtgaagttgaataccacggtttgaagtgtaaacacttttaaggcaaaactgaaaaacatgacaccttttttctgtcaacaaggagacagaagactagagagtagcgtctgcgtggcttactctctacctgatcgtttgaaagaggaccgagtggattcttttgacaagaacgagctgattttttttacattcttgtgttcattaacaaaatatttgttagtttctcatagttccttcctgcagggtgcgcctagtaattagggaa

SEQ ID NO: 29903 - DNA, 239 bp, Mus musculus
  source 1..239: mol_type = other DNA
tcctgcctaaggcacgcaggcggtttctgagttcgaggccagcctggtctacaaagtgagttccaggacagccagggctacacagagaaactctcctgtagagatggttcagtggttaagaacactgactgctcttcggctcacagtctgaagacagttgggaagaggcctggggcctagagcgcaggcggaaccagagtgcgcggccgcggcgcaggccgggaaggtttctagggcgg

SEQ ID NO: 29904 - DNA, 425 bp, Mus musculus
  source 1..425: mol_type = other DNA
acaagtttatcaatgggtttaatttgcttttttaaaaccccttcctttgtgtaaagacaaatggaaattcttcaaaagttatgagaaagaggaagcttgagcaaaattctcttcccccagagacatgggggacttggagagcacctcaagtcagtgccgacctggtcctgcaggtaccaactgggaacatcatgttggtaacttcgtctgattaaggctccaccaagaacactacctacaggaggtgtgcgtgacagccacctgacacgccttctgaatctctaacagtctctgcccacagccccctcctccgtgggcggcaccgcgggccggctgctcgcagttgcgcaggcgcgctgagcggcaggggggtgctggcgggctccgcgcaggcgcgcgctgctcagctgggcacggcttggcac

SEQ ID NO: 29905 - DNA, 434 bp, Mus musculus
  source 1..434: mol_type = other DNA
cagcgtttcgaagctgttacaagtattatcaatgggtttaatttgcttttttaaaaccccttcctttgtgtaaagacaaatggaaattcttcaaaagttatgagaaagaggaagcttgagcaaaattctcttcccccagagacatgggggacttggagagcacctcaagtcagtgccgacctggtcctgcaggtaccaactgggaacatcatgttggtaacttcgtctgattaaggctccaccaagaacactacctacaggaggtgtgcgtgacagccacctgacacgccttctgaatctctaacagtctctgcccacagccccctcctccgtgggcggcaccgcgggccggctgctcgcagttgcgcaggcgcgctgagcggcaggggggtgctggcgggctccgcgcaggcgcgcgctgctcagctgggcac

SEQ ID NO: 29906 - DNA, 398 bp, Mus musculus
  source 1..398: mol_type = other DNA
tgtttcctttatataaaaaatgaatagagcttaaggtgatcagatcatatattacatcttatgtggtaacaactttataaaggcttcatatttttatttgctcccattacttgttctttatgagaaaaacagaggaacctttccacagctgttcacttactgctaagtggagtggactcttgagagcactctttccaatggacaaaaaaaagcaagatatgtttccacttggcacgtactagctacttaaaaaaaaaaaaaatttgtacttgaaaagatgctcagctttgctggtccagaaaagtaatgtacattacatccactgcactgagagaattcattatagtggaaaataatagctagtgtttattccattatcaaacactcatatgtagagt

SEQ ID NO: 29907 - DNA, 392 bp, Mus musculus
  source 1..392: mol_type = other DNA
ctggtgggagcctttttaaaaaacttataagtgcttttccagatcgcagaaataccaacacttgcaacttactcttgtaggaataaatcagctaggacttatttaatgcagtaatttagtaggactcagtcccaagcctaggctaccaagttagggtagtgtgtggaggtgaccggagggtcacagctcccgtctggggagggtcagcgtcaggccccctcccctttcggctggctcctggcggagcggggtgcaggcgccggggccgagggctgcgaggagccgccgcgggcggcaggaggcagcgtcggcccgggcggcgcgaggcagcgcgcggtgatgtcagtggcggcccggctggcagcggccggcacttcctgtataaaggcggg

SEQ ID NO: 29908 - DNA, 468 bp, Mus musculus
  source 1..468: mol_type = other DNA
ttgaatctggtgaagaggtgacttcacaaatgtgccgtctgactttcataagccgtacattcatatagtaataaaatataattctattttttaaaaaactgtattagagtcagtgagatggctaatcatttaaaaaaaaacaatcgctatgcaagcctgttaagttcacatatgcggcaagcaaaattgttgctttgtatagagggcctgttcggtatgacccgaagttgctctctgaacaacaccacgctgggccagcgctgggtcctgggctttcctcccccggcagggcggccctcacgagccgagcctcgagactcgacaggagcagagcgtgtcccggagatccgcgccccgattggctgtcccgaggcggcactggacacgtgcgtcagcctcagctgctcagagggctcccggattggctgagaggcgcaggagccgtccctccaggccggcctgagggcg

SEQ ID NO: 29909 - DNA, 402 bp, Mus musculus
  source 1..402: mol_type = other DNA
ggtcactcctattttattttaagtgcaccagtgttgtactttttcaaatagttcagaattatgtttctctcaagaaaagaactgggctttattgtagattaatggctggtcaatactggtgaaccaacattaacaaaactttatttcacaggtagccttggctgttctggaactcactctgtagaccaggctggcctcgaactcagaatctgcctgccccctgggattaaaggggtgcgccaagacaggctttgtctgtacagcagaccaggctggccggacaggctctggctttttaaggaagccgccgggagcccgccctggccccgcccgtacgtgctacagtgcggcgcgcgctcccgggtgcgcacgctcagagagcggcctctgtttctggcggcg

SEQ ID NO: 29910 - DNA, 735 bp, Mus musculus
  source 1..735: mol_type = other DNA
gggggtcttcattactaatcagcaatcgccacctaggtcaaacatttctttaatttttttaaaaattcgaataacgcactgaagccctgccagggcaggtgggcttctgcgtgtgcatcgggttcgccccctgccccagacgctttgtcgcacacgtgcgtgcggcaaagccatggcagagccatgggcggacaccggacactgaccagaccccggacccctgtcctattagtcccaaagcgcacaagggttcgccgtgggccgcaggccgaactggacccgcaggcctgccaccgcagctccggactctgaactcgggccgctgctgcaaggagagtcctgctggccggctggaggccgcgcagcgcgcaggcgcactcagccccccgagcgtgagagggggcggccacgccgacgcgcgcgccgattggtggcgagggctccgcgcaagggggccgacgcgggcggccggaggcggaagatttctaggcttttccaggccggccgccgaggtgaatcacccacgggacgcgcggggccttccggaaggttctagaacggaccgtggcagagggctgaggccgcagagctgaggcggctctggtacggagggcggggccgcgcgcgccgcatgcagattgcagggccccggcgtgggagagagcggggggcgcgcgcgcgcacacgcggggccgcggggcggggcggggagggaggggactcgggctcattgcg

SEQ ID NO: 29911 - DNA, 433 bp, Mus musculus
  source 1..433: mol_type = other DNA
cgcccaagggattcagaaaaaggtgtgggatcacctgggttggattacacatgaacccctaagcctggccgggcatgccgtgtactctcttaaattcagaaacttggaattttgttaagatacagaatgtgagtttattttaactctaacacaacggaaaccaacttgtcattgaaagagtccttggattctagattgggttaatccatgaagattctataaaaatttaccagattatctgggtccagtctatagagcggagctccgccggctgttcattctgtgctcctccctccgccggagccgcgggctcggcactctggtgctccgcgcgggcggcggctgttccgcaggctgccgcccctccccgccgccgcagcgctgagccccgccgtgccccgccccccgcgcaagctgccggcccccacatccg

SEQ ID NO: 29912 - DNA, 734 bp, Mus musculus
  source 1..734: mol_type = other DNA
gctacgagtaggtcagtccagcctcgcggccccacgtgtcttcccggccgcggccaccggggacagagtcctgcagtgcgccaggcgcaggtggcaccagagggcccaagttgcttccaccctagcccgccctgcggcgctcggcctggatcgcgtggtccccgccacacgtgatgaaaccagcgtggccccgctgggcctggacaagtgagccgagcctgcggcgtcgctgctcggtccgcgctgcaagcagccccccgcgagcgccggggcgccctgcacgccgaggccgcgtacctgcggggcggcggcaggagagcacgaggcgaggcaggccgtctgcggcgagtgagggacccagctctgggcgcgcaccgcaatgagcccgagtcccctccctccccgccccgccccgcggccccgcgtgtgcgcgcgcgcgccccccgctctctcccacgccggggccctgcaatctgcatgcggcgcgcgcggccccgccctccgtaccagagccgcctcagctctgcggcctcagccctctgccacggtccgttctagaaccttccggaaggccccgcgcgtcccgtgggtgattcacctcggcggccggcctggaaaagcctagaaatcttccgcctccggccgcccgcgtcggcccccttgcgcggagccctcgccaccaatcggcgcgcgcgtcggcgtggccgccccctctcacgctcggggggctgagt

SEQ ID NO: 29913 - DNA, 437 bp, Mus musculus
  source 1..437: mol_type = other DNA
agtcatcctcagctgcatatctagactatctcaaaacaatttttaagagtagtaaatggattttaggcattgtataagctttacagtttttagttttagaaaaaatgaatatcctggaaattctaacaaaagtcaggaagttacatttatacattcaagatgtatgtattacatacattctgatatgttttcatctatgcatgtaaacagtagtgaaatgaaggacttaaattttgtatatttaggaccttgtgcatacacactaggttcactagtgctcttactatggatatgtgtacaaggaaccatgcgtgtgcattcatgtgtgcatgcctgcctgcatgtttatgttgttaagacatagtctaattgaacccttctctaccttttaagtgttagaatttcacaagggagctgggccgttaaaggctaggctc

SEQ ID NO: 29914 - DNA, 392 bp, Mus musculus
  source 1..392: mol_type = other DNA
attaaaggagtcaacttatctacatttgatttttttttagcactgtgcagtactaagtccttttaagtcaaaagcattgggcttgtgagctgcctaacccaagggcactggctgctttgctgccccaggtccaaagggtctgacgcccctcctctgggggagggtccctgcacttttttcttttttcattagtgcatgataattgaacaaaagaaaaattaaaatcatagtgacatttctatatatctattcaatgtactttgaccacattcactctttcttccccaagtatttatgaaatagctttttatacttggtggttttaatcagcacatctttccagaaaaaaaggactgagaactttctctttctggaattaatattgtttccaa

SEQ ID NO: 29915 - DNA, 466 bp, Mus musculus
  source 1..466: mol_type = other DNA
aatctcattttagtatgtgcatatatacactgtttaaattaaatgaaggattaataataaaaatttgggattttaaaattctctcctgctaaaaattaggatttcattctcaaagctcagtcttggaagaatttcaagactattagaggagaaaattgtgacttgttttgtacaataaagctgaaagttaatgtttctgaacagatttatttagattctgagacaaaccttaaatggtttttttaatgagtttggaaaatacctcaatataaaaatcttgccaacaagttcagtccagaaccgatcagttcagttcagatccagaacagatctcccggccacccgcccctgcgcgctgcaggaaaccggtggaggcggggggggccgcaggagtcaacgcttgccgttcattggcttccgcgccggaagcggcggtaccgtccagctgcgcacgcgccctttcccg

SEQ ID NO: 29916 - DNA, 602 bp, Mus musculus
  source 1..602: mol_type = other DNA
gttgcttataataatgacagtccttattacatgaatttatctaacagaaattacatactacttaagagagaaggtaggctctcaggcactttttaaaaagtccttgcaaaggagtctttgaacggagttcccaaagctatggggccaagtctaatgaagctggttcccttcccttaggagacaaggtctcactgtgtaagcgcagggcagctagcctaccaggggcctgaactgcgctgccccgccctccctggcagggatgagtgacagcgacagcgacaggtgctgagagcagaggcgtccgctgcttctgtgtgtggcggagcagtccccagaggccactctctgtagtagaccctagaggtcggccctccagggcagggaaggctcgccgctcttgccttccgcggcgcgtccagccgtccgtcctgccgccgctggcagtcgcggtgcgcgccgtccgtgccgccgccccggcggccccgggacttgcgcacagcgccaccgccaccgccgccgcgcagcccgcctcccccgcccccacagggcagctcgcccggctcggagactgcgccactgcagccgccgccgtcgccgccagg

SEQ ID NO: 29917 - DNA, 788 bp, Mus musculus
  source 1..788: mol_type = other DNA
gaggtcggccctccagggcagggaaggctcgccgctcttgccttccgcggcgcgtccagccgtccgtcctgccgccgctggcagtcgcggtgcgcgccgtccgtgccgccgccccggcggccccgggacttgcgcacagcgccaccgccaccgccgccgcgcagcccgcctcccccgcccccacagggcagctcgcccggctcggagactgcgccactgcagccgccgccgtcgccgccagggggagcgagtccccgacgggagacgcgccggctcgcttcctgcgaacgcgcctggcggtgagtgctgagggccggccggactctgcgcggcccggcttcggacgggctgggccgcgggagggcagcgggcagccccgctgaggagagcggcccctcgggctgtgggcgctggccctcggtggggcggacgggcagctcgggggaaacggccatcggccaaacatgcctagcgagcggccgccctcaagtgttcccgcccggacggcggcgccctcgacggctcgcccttttcaggacacgttctcgcgggcacgagttgcgcggccgtcgtcgacgccccgacccggggcaaggcctgagcccgggaaggcctgagctacgcgcgctgccctgtcaggcctgggcccggctggggcctaggggcccccaccgcccccgccctcccagtgcagcctggtaacgtgccgcgccccgccccgtgcccggccgccagccaatcagcatgcgcccacgcaaggccgcggccccgccttgcacgaggcggcc

SEQ ID NO: 29918 - DNA, 372 bp, Mus musculus
  source 1..372: mol_type = other DNA
agaagtaaaatcttgaattatgaaataattagtaatttaaatgcatttaatgatctaagtgagattaccttagagccattgtctacatggaccctcgtcgagaacggtttagggtagagactactgagtgaagtcctagtgcgtggactgacccttggctgtgccaagtctctgagtgcctgtgggtgcgcacactggcgcgcgcatcctcgcctagtaccggggccagctgggctgggcaggctccgagcagctcgggcacacccctccgcggtgaggattggtcggcccgaaccccctcggtgagcctcggctcctgagaggccggggagcctgccaatccccacgggctccctgtcacaggcgagcgga

SEQ ID NO: 29919 - DNA, 251 bp, Mus musculus
  source 1..251: mol_type = other DNA
gttgagtaactacttattaaacctgcaggaagattaacttgtcgctgtaaatctatatttgatttagtttaatcatttgaatgttctataaatattggagatctgagagcttgttaataatatgctaccaccatatggtaccacaatgtcaaatgtttgcttaagcagagcgattgatacgtagggatccctaaaggtccatcgaaactcctaggagtgaccaagagttcagtcccttatcatcaaggcaa

SEQ ID NO: 29920 - DNA, 217 bp, Mus musculus
  source 1..217: mol_type = other DNA
gttattttgcttaaagttctaaggctatatcaacataatcagtaatatactttagttcaaagacccttggactggtttgtcaaatgtgtgtgtgtgtgtgtgtgtacatgtgtgcatgcacacatgtgtatgagggcgctcctgagtcacttccctggctctccagcactggaattgcagagctgtgctgcccttcttagctctcccacagagcttg

SEQ ID NO: 29921 - DNA, 428 bp, Mus musculus
  source 1..428: mol_type = other DNA
tgtgtgtttccaaagaaaaactctgtagagtatgaattaaaaattaaaaagttcattaatcaggttcaccattttttcttatttttgcaaacataattaaatatatgtatatgtaagctaattatgctatacacatgcatatgtagagcatatctaagaatgcagtattagagagaatgttctatagaagccatggttaacaacggagctgtcatttacacctgctgggagagagaacattgattttctccagtggagtgacactgggttgacaacatagaatgaactccatgggatttttttttttttatggtcaaagtatatttaaaattaaaaattgttttaaataatataaattctaattaaaaagtttcctgggaacatttttttgccaaggacaggaatgcttttggcataatgtgattctg

SEQ ID NO: 29922 - DNA, 323 bp, Mus musculus
  source 1..323: mol_type = other DNA
ctcctccaaaattgaagagtatggagtccagatttgaaattaggattaatgataagaatcaagatttctttctcttatgttgtacgcttaatggcttaaaaaaccaaataataattgtgatctctcagagtgtttgtgtacacaagtgtacattccatggatccattgatccagcgcatttatcaagcaattaatttgcttaaggacaccctgacaccccaagtggggcttatggtggtgtctgtccacacaactgagggctaactcttgggacctgagacagagcaggtcttagtgtgcagtgctctgccactggcctgatc

SEQ ID NO: 29923 - DNA, 288 bp, Mus musculus
  source 1..288: mol_type = other DNA
ctgaggatcacaattattatttggttttttaagccattaagcgtacaacataagagaaagaaatcttgattcttatcattaatcctaatttcaaatctggactccatactcttcaattttggaggagacaccaggggctctgagaatcctctaagagcgcttcgccagtgaaggctccaccgcacttcccggcttcgcctaagcgcgcgtgccggggaacttagcgcgcccagggcttcccgaactacaggcgccgcgtgggagccctcgcccagcgtatgaaagagc

SEQ ID NO: 29924 - DNA, 260 bp, Mus musculus
  source 1..260: mol_type = other DNA
ccagaccctgggccctggcgttcgtcagcgcttagacgccgtcggccgtggccaccgccgcccggctccttgggtcgccgtgctcacagcctgccaggcggggcccccctcccccagtccggctctggcttctggcagaggcagccgcgaggcggccgcccggggtctccgcaaacgtccccgcgactcctctggagctagcggctgtaggagccagcagccgccgcagcctcccagtgaaggtgtgaaaggctctttca

SEQ ID NO: 29925 - DNA, 640 bp, Mus musculus
  source 1..640: mol_type = other DNA
gcgatgcagttttacattaaatgagttgaattcaaatgggcctccgttttctaaacgtgcccagcacacacacagtcctctgagagcaggctggagctgtgcccagtggcacctggactgacagccgctctctggagaccgtggccctccaaggccccttccccggatggggctctggcaggaacgggggcgcgccccgcacccccatcgtatgagaacccgtgtgggcgtgtcggggaggcctggccccgcgttacctgcacgtccccagggaagtagaggacgtggtgccgctgctccggggaatctccttcccgggatgtcagcaggagcagttcgttgctgcgctgcgggtcggagcccggcaccgtggagcgctgcagacggtggctgtcctccggggagccccgctcaccgccgcccgggttcatggctcgggtctgcaggcgggacgcggagtctccggaagcgagcagcggccgcagcagcagcagcaccagcgcgggggaccgcagacgccgcgaccccagcatgggctcgagccgccagggccgctcacccggcagcgagggcggggcctcggctgcccaacggcttcggtcgccgtgacgtcagcacgccgcgtgcgtccggagggagg

SEQ ID NO: 29926 - DNA, 462 bp, Mus musculus
  source 1..462: mol_type = other DNA
ttagaagcttattaaagtcctgaagtcactaccatcgttggataccacgggtcgcaatgaagattaggggagcaaacaaacctgcttcgcgttgatgggattggaaaatcccagaatgatcattctgggctgctcctcggtgctgtagctgcggctgggactagccgagaagggatcttcgggagctccaggaacgcaggcccgagtgtagcgagggatcggagccgcgcttgagcccaggcgaccacctcggtgctaccgagagtccggagtcgggtgaccgggccgggcagcggccgggccggggttggagaagtggagccaaggccgcctcgctgccgccgcctcgggtgagctgtgttagccctcagcccaggccgaagccctcgggctccccgccgtgcgcacttcgcatttcttccggagtagtgtttccaggggaaatcacgcgtggaagaactc

SEQ ID NO: 29927 - DNA, 412 bp, Mus musculus
  source 1..412: mol_type = other DNA
cagaaaatttctgctataggcctctaatataagtcttagcttctggtggaagctaagctaatacatttcaaaggtttcatctgagataatttttaatcagggtttgaacttacaacataatttctcctgcagaaacttcaagtttcaacttctttccaggaaatgcatgtgcgtgtccgatgtgcacacacaatgtctcccacctttagcataaatttggcccagtctttaagtaagaagttgctatttccacttttggtttaggaagctagaaattccctaactaggtaacttcgggattcttctttacgaaactctgaccctgagcagctgctgctgtgcatgggcccaacttcgaacttcccggccggggcctccctccggacgcacgcggcgtgctgacgtcacggcg

SEQ ID NO: 29928 - DNA, 395 bp, Mus musculus
  source 1..395: mol_type = other DNA
tagaataataagtcctgagagcaaacttattttctcttctttctttaaaaactaaagggagctctcagcacttcggtacaaaaactaaagggcttaatccttaattatgattctggcttaaatcaaggaccagaggaaacctacgagacgatttccattggtttccctgttgcaatccttcattagactgaaatatcgagtttcaaaaatctaatatctcgaaaccaaaaatgtgggtcttcccccgaacaatctctgggttgcaggagagcgaaggtaccggggtgtctcccctgcaactgctcccgggagacgccccgcagccggggtaccggattcacaggcctgggaatttggacgagttcttccacgcgtgatttcccctggaaacacta

SEQ ID NO: 29929 - DNA, 422 bp, Mus musculus
  source 1..422: mol_type = other DNA
gaaatgatatgttattactttggcagtgttaccattcgatttacttaacaaatacttatgaagtgcctactatgtctaattctggaaaaatcatacccaaaggattaactaattttagattagaagcttattaaagtcctgaagtcactaccatcgttggataccacgggtcgcaatgaagattaggggagcaaacaaacctgcttcgcgttgatgggattggaaaatcccagaatgatcattctgggctgctcctcggtgctgtagctgcggctgggactagccgagaagggatcttcgggagctccaggaacgcaggcccgagtgtagcgagggatcggagccgcgcttgagcccaggcgaccacctcggtgctaccgagagtccggagtcgggtgaccgggccgggcagcggccgggcc

SEQ ID NO: 29930 - DNA, 445 bp, Mus musculus
  source 1..445: mol_type = other DNA
tacaaaaactaaagggcttaatccttaattatgattctggcttaaatcaaggaccagaggaaacctacgagacgatttccattggtttccctgttgcaatccttcattagactgaaatatcgagtttcaaaaatctaatatctcgaaaccaaaaatgtgggtcttcccccgaacaatctctgggttgcaggagagcgaaggtaccggggtgtctcccctgcaactgctcccgggagacgccccgcagccggggtaccggattcacaggcctgggaatttggacgagttcttccacgcgtgatttcccctggaaacactactccggaagaaatgcgaagtgcgcacggcggggagcccgagggcttcggcctgggctgagggctaacacagctcacccgaggcggcggcagcgaggcggccttggctccacttctccaaccccggc

SEQ ID NO: 29931 - DNA, 294 bp, Mus musculus
  source 1..294: mol_type = other DNA
gaacagttactgctcagatttccctctgctgcctctggaagaggtccatcatgaataatcaccagccgctgccactgggtagctcagggcagctcagtgggtgatcacgcacgattagtttcaaaggtcgggctgagcccccagagctcgtccggagaagcatctcgcctttgcagacggtgctggggcagcaaagttcgttttcctgggtagggaagagcgattctcttgctcctcacgcggaggggcgggcggccgccgggagggggcggctgcgcgggcgggagtccctgc

SEQ ID NO: 29932 - DNA, 559 bp, Mus musculus
  source 1..559: mol_type = other DNA
gcaggccttttcaaataagtattgactgttaatgacctgtttaaataaaacattcaattttctttcttccccccacaaagaatttagtaggcagagacatttctaaaggaaaggctaaccctgcttttcaaaagaggctgagccaaagcttttaaatgtgaacattttttcctgacatttgcccttaaaatttgaataaaaatgcaaccttgagggtttttttcctccaaattaaacaaaaatgtccaaggaagtactgccctacaaaattcatatttgcctcgttcttaacaaagagaatttcctctaaggaacagggagattgtaaatctgagacctcaataattaataagtgcagtttcctctcggttggcatgcaagcaccccactgtgcatggatacatagagaagtagcctgctacatcaagcccgtgccctttctgcaggtgaatggtcagctaagaggcagtgcccaggagctacaaaggactgtaaaggtcattggagcacatgccaggcctacatgaggccctgtcaggatgaaaggcatcctttacag

SEQ ID NO: 29933 - DNA, 571 bp, Mus musculus
  source 1..571: mol_type = other DNA
cctacatgtgtctacgtgggcatttgaccctcactcgtgtgtgcaggtcttttggttacagtgattaaaaatactaaaatgtaaactattgacgtgagaaatcacggacaaaccttccctgtctcccaagactttttagctgaagggcaggctgccatacttctggctggcttctttcctaagaccgttaaatacatagccctatacagttggaagatttaagtgttagttttattaagaagaaattaaatagttctacaagcgacttactgtaacaagaataaaactaccatcttaattctgatgtatgaaatttccaaagatttaataaatatttttagaaaccaaccaccatcttttacaggtataaagtgtgccttgtggaaaagctttgcacgtcccctggggctggaaaacatcctgttccaccagagggaggaacgttcttggggcgtggccaccgccgtcccgtgggcggggcgggtccggggcgaggcctcccttttggcgcactgcacgttgggaccgcacgggggcgccgcgggttgctccgctctaccaatcgtggagc

SEQ ID NO: 29934 - DNA, 333 bp, Mus musculus
  source 1..333: mol_type = other DNA
tgtatgtacaccatatgcatatctggtgcctgcagaggccgcaacaaatgctcatgacctctaaatgccatatttgtagtattgtgtagccttaatatgatggaacagagcagttttttaaaatatcgtttctcgaaattctacatatatatattattattaaccttttgtaaaaagaaccaattgaaaaataagactaacacattttaaaatatagttgaaatagtttaaaatgccactctgtgtactctgctaatatcattgcagcacttcctcagagtgtgtgaatggccctctctgtcagggctggtggaaatggctaccagaagcgcg

SEQ ID NO: 29935 - DNA, 277 bp, Mus musculus
  source 1..277: mol_type = other DNA
aaagtatttttcaaaaaagaaaatgtttgacaggggaagcaaggaggtgttagccacttactgttaaccactcctggagttttcacaataaaaatgttgtgtagtggtgatctgtgatttcgaggccagcctggtctacaaagaagagttccaagacagccaggctgttacccagagaaaccctgtgtgaaacttgccaggttttataaagtggattctaaaatataatacagccaggctgtgacaggcctgaggctggccacgctggcacactctg

SEQ ID NO: 29936 - DNA, 367 bp, Mus musculus
  source 1..367: mol_type = other DNA
gtgtctgtgtgctcacctgggcactcaatgcccagagagagcagaaaatatttataactggaaatctgagaacaattcacaatgtaaatgactgtcaggcatgtttggtagtaacataatcttcccctgaggaagaaaaacaattttgaaatcatgtgaatggtttaatttcaccttttagaaattaacaaaaatattgttgagaaagtaacaaaaatccatgtgggcatttatgtgtgttcataaatggcgaatctttgctaaatgttggcacagagaaattctatctttgtatagtttaacggcaaaaatagcaagcagtgaagagcagcccatcggcatcccttccagagcagatttaaatcct

SEQ ID NO: 29937 - DNA, 383 bp, Mus musculus
  source 1..383: mol_type = other DNA
attgtcatgatggtagtggtggtgatgataatgatgctgatgatgatggtagtggtgatgatggtgactatgatgctctcctgaggtgcgtggtttcaagtacatttgttgctgagcatgagaatcttaaaatcctcaaatgtgagttaagagctctggctgcccttccagagtttgctcacaaccattgagttatatgaattaataaaaaaaaaataaacatgcatttgctgtctttcatcacattcacgaaagactcttcccttgtaattaaatacaagagattttcataatttttagacttcaaaacgtcacgtgaaaagagaagctggagctgctgccaagcctttgtgggctaggcaggcagggctgactataaatca

SEQ ID NO: 29938 - DNA, 235 bp, Mus musculus
  source 1..235: mol_type = other DNA
atctgtggatctacacagactggggatcaagaaccagagagctgacagccctgttgaattggcttgaagcctcatcacacagtgaatgctcattctagcatcgagggagaccccggcttagttcccagggcctcagggtgcttccaacacaatggtcttgagcagcacagactgagctcgtctgtcattttctcataaagaatgctgcagctagcttactcgtgcatcctgacca

SEQ ID NO: 29939 - DNA, 583 bp, Mus musculus
  source 1..583: mol_type = other DNA
agtatatgttaaatgccagtgagccttccatgtacgaattcactctgtagaccaggctggcctcgatctgcgggcagttttatctgttgtcccggagaatacaccttgaaggtcctaaaggcacattcttgtcctgcaccagaagcaattataaaccctgcgggtgggggcctcgcaatctggttaggggacgagcttgcaaggcgtggtgacaggccgaggtcagacttgccctcagcacaccgcatcgcagagcagggaggccgggctgcagtcctcacccaggcgacgccccggcctctgccccctacccccgggctccagcttccggaggaggggtctgggctggaccgggacggactggtccaactcgcggccgttgaggggccgcttcccactcccatccccgcccggagagggggaggccggccgctgcggcggaggaaggaccctggcctaccaccgcggtgttagccggtgcccccgagctgcaaccccgcggccttcggcaggggggagtgcgaactggcgcagggtagaaatctcgcgatagcaggcctccggggcgggggtggcgcctctt

SEQ ID NO: 29940 - DNA, 812 bp, Mus musculus
  source 1..812: mol_type = other DNA
cctctgccccctacccccgggctccagcttccggaggaggggtctgggctggaccgggacggactggtccaactcgcggccgttgaggggccgcttcccactcccatccccgcccggagagggggaggccggccgctgcggcggaggaaggaccctggcctaccaccgcggtgttagccggtgcccccgagctgcaaccccgcggccttcggcaggggggagtgcgaactggcgcagggtagaaatctcgcgatagcaggcctccggggcgggggtggcgcctcttcctcccctcctgctcgcttccggtcgcagaggagacagcgccgcagttgccgccagctcggggagccttaaattcggtgaggcgagcgcggcgcagcgccggggaagagcggcgcgccgtggcccggagggcgcggttcggaggggccggcgggacccggggcctggatccgtggcccgggccgccgctctggagggcgggcgaggccgcggggcgccggggtggcggcgcgcccccgtgtgcgccccggccggcctgggtaacaaagccgccgcggcctctgcgtggggagttcggcgggcggggcgcagccgccgccaccaccgccgcggccgccgcctccgccgctgctttcgcgggagggcgggcggatgtacggggcggcgggggccccggcgcgcagcgcctcggcgcctgtggtccgctcggcgcggcggccaccaccgcaggcgacagggtcggtggagaagggcctgcggcgctccggggcccgccgcccgagccccgagaggcgggaggcacggga

SEQ ID NO: 29941 - DNA, 485 bp, Mus musculus
  source 1..485: mol_type = other DNA
acgcgaaggggctctgtgccccggctgcggagctctggccgctggcttctgcgtaggcggggacgatgcccgcaggctccgcgtcccgaggagggccggccgactgcaagagcccgagctgccgcggcgggacctaatggcggtagggggaaggccgcgctcgtccttcgccatggcggcgccagggcgcggccttcgcttggcggggacagcgtcacagcaggctgtcacctcagttctgtgtagtttccgccttcgacgaagaaaatacttaggttttgtaacattaaaactcaagacggccgggctgtactgccgtctcaaaaaaaaaaaagttatagaaaatttcctttgtaaacaaagttgggaacaccctaagattgtacgtcgcctgtcctgtacagttaagtaaattttgttgactcggcataaaaggcgcgcctgttactctccctctgctagcagtaagagtgtcagcggttttt

SEQ ID NO: 29942 - DNA, 313 bp, Mus musculus
  source 1..313: mol_type = other DNA
gcctggcgtggggcgcacgcctttaatcccagcaccaagcagaggcaggcggatttctgagtttgaggccagcctggtctacaaagtccatctaagttggaaggttccacccccagggtttctctgtatatatagccctggctgtcctggactttgtagaccaggctggcctcgaactcagtcatacccaaccactaaaaactataactgtagtcactgagttactaaccagagatacactattactgtaacctgtagtgtctaagtatgggcagcgggcccgcgcctgcgcactcaggaccggtataggccc

SEQ ID NO: 29943 - DNA, 253 bp, Mus musculus
  source 1..253: mol_type = other DNA
atttcaaacatggatgcttccttctacaaactaattttaccttcattgtttgagattaaagatgtgtgctaagggcaaccaacgagactgatgtaacttgtggctttcttgttatacaataaacttctattgtgagatgacacaatacagacacatttaaagcattatttgaatgggctgagatgggaatatccattgtcaatgccagcccgatgtgcacctccagcgagaagaacccgactcgtgaagttgg

SEQ ID NO: 29944 - DNA, 366 bp, Mus musculus
  source 1..366: mol_type = other DNA
caggtaccaggacttgttgcttttgcagcagggcctggtctccagataattctatttaatttttcaaatctcctacaagagagaggaattagttcactttaccctatttgttcatctttatggtagatttacaacgaaaagcttagactagcatcctctaaatgaaaatcctatcattgcaagggaggcatagccccacctccaggtctagtgctctagataggcacttggagcttaagacgtctgtacaatacatttctatacttcacagaaaaggataaaagcctttcccccacaccagcaccactgctgggcatgcctgcgggttccaaaggcgtgtctgtgcgccacagaagtgaagcccgg

SEQ ID NO: 29945 - DNA, 378 bp, Mus musculus
  source 1..378: mol_type = other DNA
ataattctatttaatttttcaaatctcctacaagagagaggaattagttcactttaccctatttgttcatctttatggtagatttacaacgaaaagcttagactagcatcctctaaatgaaaatcctatcattgcaagggaggcatagccccacctccaggtctagtgctctagataggcacttggagcttaagacgtctgtacaatacatttctatacttcacagaaaaggataaaagcctttcccccacaccagcaccactgctgggcatgcctgcgggttccaaaggcgtgtctgtgcgccacagaagtgaagcccggagccctccgcaggggacgccttcatcctggagtgggaaaacttcacggagtcggaag

SEQ ID NO: 29946 - DNA, 370 bp, Mus musculus
  source 1..370: mol_type = other DNA
cagttaccagcctagccccggacggtcctacaaaaacctaaccacaaggtggtgttaagatagtgaaccaaacccaagttgtgagcttgattttcagagctcaatgaaatgatacaaaggttggaactttgggattcacatttatagccagtgtgtttatatccattggcaagaatgagtaagtattcagtttttttttttttcctcagagcagctagactaacaatattaagctccgcgcacggtcccttcccccggaaccactattggttcgagggcctatggcccgagtcaacgggcttgcggcgccgtcgctctgggcggctcggctcagggcaccgcccaccggcggccggggattcagtgtgct

SEQ ID NO: 29947 - DNA, 439 bp, Mus musculus
  source 1..439: mol_type = other DNA
tagcatctataacggatagtgattatctgtatgttggagacctttagggacacccggccggcaggcacggtccgtgcaagcccaggggggctgctccccagcatctcccgccatggtgggcgagcggcaaggccacgcgcgcagtgagccgcggctgcagcagggcgcactgggactcacctctcgagtccgagccggcgggagggagaacggccgcgaggctcacttgagccgccagccaggactcccgccgccgcggaacaccccagaacggcccggggaggtccaagccgaacctgcgcgcccagcagggcaagggagctgcgcgcagcacactgaatccccggccgccggtgggcggtgccctgagccgagccgcccagagcgacggcgccgcaagcccgttgactcgggccataggccctcgaaccaatagtgg

SEQ ID NO: 29948 - DNA, 381 bp, Mus musculus
  source 1..381: mol_type = other DNA
gaatgttacatccattacatataattttacagtttatcgattttgtatctcaaatttccctcatttaaaaactgagatgaccattaaaatatgggaaaatacaaatgaactgctattactttagtatccaatccttaatcctaggattatgcagtagacttatatttgggaaaccgtacttaaaatacaagcttgtgaagcaaccgttgcaattatttctgtttaaaacatctctgggatttaacaaccatcaagaaccttgcagcggcgctccctagctagatcccgtaaagtttagattatgcgtaatcgttgtttcctctagtttcttacgacaggaacacgtgtttgtctttattaagcgcgtgggcccactcaatg

SEQ ID NO: 29949 - DNA, 252 bp, Mus musculus
  source 1..252: mol_type = other DNA
cgtctatagatttataacatcgtgttgtctcgcaaccaaagtccatatttgggataaagagctcttctagtcgagttacttggaaaaataacaagtttcacgcaggtgttagggccgcctcggcagacgcccccaggtctgcagggcttcggatccaacagtcctcaccttcgtcagctcccgactacggcgtccgaagccggaggagaaattcctcttcacccggcattgagtgggcccacgcgcttaata

SEQ ID NO: 29950 - DNA, 219 bp, Mus musculus
  source 1..219: mol_type = other DNA
agagctcttctagtcgagttacttggaaaaataacaagtttcacgcaggtgttagggccgcctcggcagacgcccccaggtctgcagggcttcggatccaacagtcctcaccttcgtcagctcccgactacggcgtccgaagccggaggagaaattcctcttcacccggcattgagtgggcccacgcgcttaataaagacaaacacgtgttcctgtcgt

SEQ ID NO: 29951 - DNA, 464 bp, Mus musculus
  source 1..464: mol_type = other DNA
ggacagagccctgcccctaaccgaaaagctaggtgcaactgatagctgctttaaccactctccaggacaggcatgcaagagagtaacacagaaaatgtattgacactttgtctcctcccactggggcgacttgagcacgttctgactcaggagaaaactgcaagaggacttttaattcaagagcgctctcaggcccacggtcatacaccacacaggggtagaggaccataagagtcacaaggaatacctggtaattgttccggttatctctcctacattctttgaatgaacactcattcccaagccttggcctaaaggcctagaattttgcttttatattttttcagtagaaataaagatatttgctattttacttgtgtttttctgtatttaaaagtgggatacatatctagccaaagacttttctgagcctggcccaggatgccagccagggctcagagatg

SEQ ID NO: 29952 - DNA, 383 bp, Mus musculus
  source 1..383: mol_type = other DNA
atggtctatcttacatgtaaatctagtcagataacttctctgccctggctgccctggacactctgtagaccaggctggccttgaactcagaaatctgcctgcaagcacaggttccagcttttgtaaactatgaagtgtgaaccaatctaatggattacaatcagtcttgatttataaaagaaaaacagaatagtaaacaatagagtattgtttgtgaaccttcagtattcttttagtgagttgtattaaaattaaatgaataagccagcacttgaagagccactgtagttagttctaggtttctgaaaaactgtggccatgtgtccataaagcctcacatgtgatactggaactcttattccccaacattctgttgggaagaa

SEQ ID NO: 29953 - DNA, 517 bp, Mus musculus
  source 1..517: mol_type = other DNA
tattatttataagaactctgtaagagtaatgtcatatactagtgaatgaatgaattcctagaatcctagaatcctattgagaggctgaggttaaacgacatttttaccatgggatatatattccatcgcacacacggaggctacctgtgtgggtgggagcagggaaaaatatttactagttgtaccacctgcagttttaaagtgtaatttagatcgaggcttaaaggctaaaggcttagttttaattttatgtgtgtgggcacacatgccctggcacacgcgtagagagtaacacagaaaatgtgttgatactttgtctccttccactggagcggtccaccggataaaaaagtcagactggtagaaataaagatatttgttattttatttgtgtttttctgtatttaaaagtgtatctagccaaagacttttttttgtctttataaagtcaagtaagggtctggagagaatgcttttcggcctcccggcccaggatgcgagccagggctcagagacg

SEQ ID NO: 29954 - DNA, 295 bp, Mus musculus
  source 1..295: mol_type = other DNA
tgtcaggccttgaagggatgatctaaaatttaaaacctaagaagagattttagataaaaggtcgacctcctagtttacaaaaggttctgaacaagaaagctcagctctctggtatcacaaacaagcttggtttgtaagcaaattatttttttatttgtgtagcccaggctgccctagactgtgcagagcagctgggattgtattcagtgaatttgaccgctaaaacatttaagtcaccacttgctaacctagtttcccaagctgcgagaaactcagtttcgcccctagaggcgga

SEQ ID NO: 29955 - DNA, 547 bp, Mus musculus
  source 1..547: mol_type = other DNA
atcttagataaatataaatatttaaatgttatacaaaagacatgaaaccattagaactaacagttggattatatttctattttttccagagacaaggtcttatgctgatgacctgagttcatgtaaaaggagagaactgactcctgaaagctgtcctaatataataaataaaataagtaaatgagcaaatgtattttaaagttaaaacacaaagaatagacagtgataatcctttatagcctaaattttaaaactgctcagttctaatgccttgggccaggcatcttctagaatgttcactgatgccagtgagagtgacttggcatgtttctcaagttcaaggtcctaggaccataaagccctgctggaaggtcctgtgagcattcatgacatgacagatatgaggaaaacctgcatttattcagcttagggctaagaagagtgggctgggcagtgacctctctcaactcagctgcttagtgtaacttattcatattaggtcccagcaaaaccatgtgggatttttttttagacacaatttcatctt

SEQ ID NO: 29956 - DNA, 126 bp, Mus musculus
  source 1..126: mol_type = other DNA
atcctgcctgcaggatgtgctggagaaattactagtctctcttgagacttgtgccacaagagggaggccacaaaaaaaaaaaaaaaaagcatgaaatgttttctaatcatattctgcgatggatcg

SEQ ID NO: 29957 - DNA, 325 bp, Mus musculus
  source 1..325: mol_type = other DNA
tccatggacccagctgtatttatgcaaaggactctaagtcagcatatcatggagtcacttgcacatccatacttattcataatagttaagttatgggaaattgtggcattttatatatatatacacacacacacacacacttaatctcagaaggacagatctcatttgttttttcatttgtggttcgattttattaagacccgtaaattcaaatgtagtgtatacatgtatagaactttgcacagccttagccaccagcctgcttgaggctgcctcctcctatgtcctgtctcaggaaagcaggaagtgtgagaggctctaccct

SEQ ID NO: 29958 - DNA, 433 bp, Mus musculus
  source 1..433: mol_type = other DNA
tacttaggtagtgttattactatacagccatagctcattgcatttctttagaatttcttttgagttgttactagactgaaattgtaatcaactttatttgttaaattgagacagggtctctctgtgtagctggctgtcctagaactcactgtgtagactagcctgacctcagattcacagagagctgcctgcctctgcctccagagtgctgggagctctgtgccacctaatcagtgatcctgtcaaagagctctgagctcagggaacagatgagatcattgtcttctgggataatctagtctacagaagagggttctatagacactagcaaaatcacaatgagaaaatgcaagatttccctgtttataatccattccaggtctctctatggattaacgtaaaaacactctaaatcccttgtgctcagaggatt

SEQ ID NO: 29959 - DNA, 510 bp, Mus musculus
  source 1..510: mol_type = other DNA
acttagtatcatgacgtctctgagcagacaggtctggggccagagggagcggggcggcggtagctgggttcctgcacctggcaccgctgctgggcacccgggagccccggcccccccgtgcgctggcacagagacagagagcgggagccggcgtcccgcagactccagcggctgctcggccggccgtgtcaactccggtaaggagcggaggcgaggactggccttgcctaggcggtgaccaaggccagcgactctccagacagcgggcgctgaggggaggcgacacgcgcgagccccgggacctgcctcgcgaaggggcgaggcagggtgagcctcaaggcacagaagtgcagcacggcctggagaaggccggtcggcctggacttctgccctagcccggggcaaccggccgggacgggattcgccccaccccagcggggtcggggcccgccgctccgccccaccgcgcctccagcttctagctctggagtgaggaggcggggccctcga

SEQ ID NO: 29960 - DNA, 494 bp, Mus musculus
  source 1..494: mol_type = other DNA
tctttcctgatgcagaaaaagatgcataagcaggtaattgacttcactgccataattgtgatttaaaaaaaaaaaaaagtggccaatattcattctttttgcttcaaccaaaagtctttatttcttttaaaaagacatgtggcgtttggttccaaatcaattacaaataaaagcccaataaagaaagagctctttctagtgtccttaaggtttaacgtccatctgtctggcatgggaagctgccaatcttcagaggtgcagatagggtgaatcccggaggctaccgcccagttccgggaaacattctctgaagttgaatcgcacgcgggagcttactcacgggaatggcccggtgcgcggcagcctgagagcagcatctgaagcagccgccgccgccaccgagctaacccccccgggcgtggcaggaactggcaggcgctctcacatcatcaccgggcgaccttggagctgcagtgacgccggttcaatggcag

SEQ ID NO: 29961 - DNA, 345 bp, Mus musculus
  source 1..345: mol_type = other DNA
gaattttggttcaagccttaaaataaacaaatctctacaacattatcttcaggatttatcagaaaatgaattattaagtctaaaaactgatttgagcaaatacctccaggtcctctttatagaaaaactttatacacataaaaacaaatttaccttttagaaatgaaagttactttatgaagaaagggaaagttctttctcacaaattttaaaagaaaactgtctacaaaacagagattcaagatccatatagttgggatagtacttgcttagaaaagacattgaattaacttttataaattgactaaaaacttgatacatttcttccctacatggaagactaac

SEQ ID NO: 29962 - DNA, 344 bp, Mus musculus
  source 1..344: mol_type = other DNA
agagcacttggtgaactgtctgctttccagccaactaaattgactttggatctcctaaaagaagacaacatttcaaatattatagcagtgaataatagctctgaggtaagaaaatatatttaaaatgtctcatatttttaaaagtctaatgttagagtcacctttgaaagatgtttttaaatgttaaatggtcaattaagaatgggttcttcatatcaaggtactttttttttaagtgtcataattttgccaatgtgacattactacatcaaatgaatttggaacatagtaagataaatatataaatgtgtcttttgtttgtgggagggtgcccaccagcacgt

SEQ ID NO: 29963 - DNA, 605 bp, Mus musculus
  source 1..605: mol_type = other DNA
ggaaatcagaactgaacattcagattatactcctaggcctacagggaatctaggaaactgggcaggccagtgaaagagatcctcgctgtttcaagatctccctccaggcagcaccctggcagacgggaaccaggtgggggacgccggcctctccaggctccgcaaagccgcctcctcccacaagtccccggaggccgggcgtcgcgggaagccggcctcgggctccggcggttgcgcctagggaggcccgcgggaaagcatcatcgacgaggggcgcctggcgcagtgaccaccgccgagccgggaatctggggacagcactgcccgaggggtgcggcgggggcggaccggggctgtacatcagggcgggccccggggcgccctagtcagcgttgccatggcgacgcctccgggcggctctcggtgggaaactgtgggtgaaccccctccgctcctggggacgccggccgacgctgagtagccccaatacctcccgtgggacgggtggggacgctccgggcccagcagccatgaggcgcagcccgatgacgctctgcgcctgcgcgcctgggcaggaggggcggggcgggccggaccggggcggg

SEQ ID NO: 29964 - DNA, 597 bp, Mus musculus
  source 1..597: mol_type = other DNA
catatgagctaatggcaggtatgtgacaatgttgtcactgaatgtgagcattttatagatttcatatggtgttttgtaagatgtaactcttctaaataaaccagtctacttaatgacaaactgtattttactttgtaaaatattttcttatttctgtttatattttacaaaagtgcctagttgactaactaagctaagggaaatcagaactgaacattcagattatactcctaggcctacagggaatctaggaaactgggcaggccagtgaaagagatcctcgctgtttcaagatctccctccaggcagcaccctggcagacgggaaccaggtgggggacgccggcctctccaggctccgcaaagccgcctcctcccacaagtccccggaggccgggcgtcgcgggaagccggcctcgggctccggcggttgcgcctagggaggcccgcgggaaagcatcatcgacgaggggcgcctggcgcagtgaccaccgccgagccgggaatctggggacagcactgcccgaggggtgcggcgggggcggaccggggctgtacatcagggcgggccccggggcgccctagtcagcgttgccat

SEQ ID NO: 29965 - DNA, 320 bp, Mus musculus
  source 1..320: mol_type = other DNA
aggttctctccagaagagccagagagcccttgctgatattgggaaaacttagtcactgagtatgcattctaataaaagctatctctttttttttaacatttgtttatttattttatgtatatgagtacattatagctgcacaggaagagcagtcagtgttcttaactgctgagccatctctccagcccttaataagagctcttaattgaacttaatgtaaagaaacttgtcactgaccttaggtaaacacggtgactggatttacatagcgggcagctgtgagccacataagtggatgaaaattttaagtattttatttc

SEQ ID NO: 29966 - DNA, 233 bp, Mus musculus
  source 1..233: mol_type = other DNA
gagcatatttttagtttgtgagccaagacacaaatgccagatttggctatcaaatggcagcatgccatctcacatctctgattgcaattcaatcttctaatttcagttttaagagattcttgagttgcagcttaaaacaataaattttctgcgctgggactccaacccttctgcattgttatctggaaacagtcaacagcccttgcagggacagctagggctgctgcggaggc

SEQ ID NO: 29967 - DNA, 363 bp, Mus musculus
  source 1..363: mol_type = other DNA
gtctttttaaaagacagtcttgctatatagctccatgatgtctgttgggatcatagatatatacactacacctagcttgtgtgtgtgtgccatccatccatccatctatccatccatccatccatctaacatgaagagccagcggctgatctgcgctgagattaatgacctaacaatttattttttaaaagtaataaaaagtggcagcttttatgtcagtgacaaactgccaggaccccgagtctcctggacttagcatgactgcctggcttaaaaaaataattaaatcagtaagttattgatatacttttgaggtttgaagaagatgcacattgtttttcttccaattgtcacaagtaaatg

SEQ ID NO: 29968 - DNA, 195 bp, Mus musculus
  source 1..195: mol_type = other DNA
tctgttctagcactgaaggaatatatctatctttaatgagtaaataaatgtaactccttgtgttctgagagcatctgttacacaaaaaggaaatagtttctacaaatgttgggattgcagtttgaggaggtaacacgggcccgcctctccagcccgccgccggaggccccgcccctacctggaggccccgccccc

SEQ ID NO: 29969 - DNA, 332 bp, Mus musculus
  source 1..332: mol_type = other DNA
agctcagcgagtttgattgttcagagtatttcacataactggaattataccaacaggtggctgctggcttttagaaagcaaaatgtcatgttattggcatctgtcatggcatgctgaattagctttaacagtaaaaaatgaaatatgaattcatttcgccccacagagtttttatatgatctcggaaaagctaaaacctcctgagaggaatccgaggaatcttctggaagaatttaagattgtagctgtttgttctaactcgacaccacatccaacttgcccttctagaaggatgcactgttcactgtgagtgaggcctccgccacaggggc

SEQ ID NO: 29970 - DNA, 235 bp, Mus musculus
  source 1..235: mol_type = other DNA
catggggctgccctggctatcaggagagtcaaggcaaaagcttagcttctcagacactgtttccctctggattcaccctgtctgcagcctgcaggaaggatctgctgctgacagaatctctgggagttcctgttggcctggggcagtgggggtgcagctctccccacccccttcgttcagaagtctccctgggttttatcttgcagcactaaagagctttgtgggaattctagaa

SEQ ID NO: 29971 - DNA, 406 bp, Mus musculus
  source 1..406: mol_type = other DNA
tccaaatggaaattgcttctgcaactctgtaaatcgtacagagttccgaggccctcggtctcaggttcttgggctccccaggctcccagcagtatgtccgggaggggtggcagggtgcagcggatccccagctctgggccttctcctccgccccccttttttgtaactgggggaggggaagaaaaaacgattcttagtcgcacccctcctcgcctgccaggcaaggctaacgtgccggaagaggaaccaatcttacaggcaagttccctttctggtcaaattctgggtaaaagtttttcctaacttttctagcgcgctattggatgtccagagggctcggggcccgcccccggaggggggaggggagggggcggggcggcccgcagccctgcaagcccgacgcttc

SEQ ID NO: 29972 - DNA, 360 bp, Mus musculus
  source 1..360: mol_type = other DNA
ggaagagtagccagtgctctttgactactgggtcatttatagttggctcattactatttacagaaaagattattttactaatgtcttgtctttctatgacacctagtttatgcgttggaaggcgctcctgcctacaacttcaaaactttacattgcaatgttctataatagccaaggctataagaacaaaagatgtgtcctgaagggtcgtctttttcttgaccccagacattcggcctgcaggcaaagcgctggtctccctgagggctgcggcagcgggcctgattctccctccctccgcaagtagtttacaacctggaggattcgctaactcgcctctgcgcgcagcggaagtgacgc

SEQ ID NO: 29973 - DNA, 574 bp, Mus musculus
  source 1..574: mol_type = other DNA
ttgcctaccatgtatggaacccaacctttggttccatccccagcaccaataaagttggtgtggtggcatatgcctgtaacctcactctacctagttacaagagatagttacaaggctacatggagaccttgtctcaaacaaacaaattgtttttgagcaaggtcattctctatctactgagtttgaggctagtctaagatacataagactttgttttaaagtaaatccagccactgaggctgaaagtttccataaaagaaattacattgagacatacataaattcataccttggaatcattttaatccgaaaatatctatatttatagctataaaagaaatctttgctaaaaacctgttccaggaaatgttgctggttataaaagtgttctgtgttgttttaaaataaaatgttcgttttgtgtgctgtaaattatacacatgtaatttatatattatatataatacaaaatataatgtacacagaactttttcttctttacataaaagtctcgcgatattttctctttccgactgtgggcgggaaaaacccggaagtgacgttacttcccaga

SEQ ID NO: 29974 - DNA, 608 bp, Mus musculus
  source 1..608: mol_type = other DNA
ggcagtctctgaattcaccagcctggtctgtagagtttctggacaaccagggctattttcaaaatactacatcttcaaatgagattatttttaatcccattctcaattggcaccctgaagtgaatttataagatgctttatcttatttttacctggatgttttttgaagaaagtttatttctaaattaagcctttacataaggaaagataacgctgggaaatgattctgcttcatctgcaaaaattccataggggacaggaagaactatgcatctgcctctctctctgaattcctgtctgaggaagtgcagagatatctatgggaacagaggtttctgaagaagatatttgcaacattctacatctgtgtacgcaggtacatttatttgttcacctgacaatatatgaaggtgttcatcttgtgcatatttaggtagacatggtgagatagataagtgaatcctttatgttacacagtttcagctcaatttccatttgtgaatgttgaaatctaaaagtttcaaagtgaattaagtgtatactttgacttccttattttattcttactttaggtaattgaaatttctgaatataggactcaacctaac

SEQ ID NO: 29975 - DNA, 624 bp, Mus musculus
  source 1..624: mol_type = other DNA
ctacatgcatgcacatgcttattcacaaaccagatacataaatgtaataaataaataaataaataaataaataaataaataaatatgggtggtgcacccagttctgtctcaaatagagaactttataaacttgcatctttctaaggtataagggaactgtaaagtaactgattaaataaattctttattacttgagatatgaacttcacagataccatctaaagttgcattctaacctgcaaatataatcgttctgatatttgaatctttgtagcgccaaaaagaaaagaagatataaaataccctagaattaaagttcttttattttagagccctgcttacgtgttaacttacagacaccactgctgtaaggtccccggggacaccgtggtcccgtacagtcgtttggccaaattcccggagtcccaggggctccctccagcgggaaacagggacgcgcgtggccgggcgcgcgcctacacgtacacgcacgtgtacacacacacacacgcacgcgccgcccgacccctcgggggcgggcctctttctctttaaagagcagaagcagcctcggcgcgcagccaatcagcgaggccgagtggctcgagcgcgctgacgctacac

SEQ ID NO: 29976 - DNA, 628 bp, Mus musculus
  source 1..628: mol_type = other DNA
gcgcccaggcgagagacgccgcgcgagggcctcactctccagcaagcctgggagtgaggggcggggccgggcggggccgcgggcgcgcaggcgcagtgcggctcagtggcgccgccgccgccgccgccgccgccgcccgcgctgcaccacaggcccgagacagacaggggtcggcgcggcgggggcggggcgactccggtgaccgggagcgcctcagactggcagctgcggcgactctggaggtgcttcccggaggggctcggggtgtttcgcaagctcagctgcccacccccgccccccgccctcggcccgcgacgcccgagctccgcccggagcccagagctgcggagaacgaggcggcggcggcggcggcggctttctccagaatttacttcagagcgaggccgcgggcggagcgccctcgaagggccagccccgcacctccccgcgtgtcgctcgcccgggctcgccgcgtcgccgcgaccctcccctcccccgcgccccgaggcccggcctgagcgaccctcgcgcgattgttgcacctttttcgaccctgtcctcggagtacggagcgatgctactccggcggccgggcgccgctgcctgccccgcttcgcccttcccggcg

SEQ ID NO: 29977 - DNA, 663 bp, Mus musculus
  source 1..663: mol_type = other DNA
actatagttgaccaatcattcatattcctccaaggatttggactttgaggattgacactttcctagaggggaaaatgtcccaatattgcatacaatttcaagtatttgcccattatttgaaatccaaaatagctgttgtaagaatttaaatttatcttaaaagttatagttcaaatcagccctttatagaagaagtagctctttttctagtctaaaacttaaaaactttacatactactttgtaattaatattctgtcagcctatatatgtcatatatacaattaattcgtatgttgtaaacctttaggaaagttgaacttggacgttaaaacttgaaaaggaaagcactttgagtttattattccttaccagtaataatttttaacagttgtccctctttaaacctttaaagatgaggtgtgacgcctaacacttgcctcgcgccgagcccgagtgtggcaactctgcctcggctcagtgagggtccgggactcagggcctggcgcccgtcacttctcacgagcaagcgacacccagggcgcgcggcctccgcgggcggagagaggcgccggggcgcgcagagcggagccgagcggagccgccgcgcgcagggccgcgggtttaaatctcccgccgccgagccccccacctcggcgcaccgg

SEQ ID NO: 29978 - DNA, 417 bp, Mus musculus
  source 1..417: mol_type = other DNA
cctcccgggcccacggcgaaggagccgccgtggaggcggacgagggcgcagggacagcgcacagcggcgtccggcgacggccgggggcgggggccggcggttgctcccagcccgggagggtcaggaggtgagcgtccggtcgctgggcacagacagctctgccaggcctccggctcccaccctgccgccgcagcactactcaacctcgtcttggctccgaggccgcgccgtggagaccagcacaatgcgcaggcgcacccctcctggaggcgcagcgcaggtccatcagagcgctgagtctaaagggtctgggtctaaagacacgcttaaaatttggctcaagctagttattttctttattttcctaatagattacgaatctagatagataagaaacaaaagtcttaagaacctaca

SEQ ID NO: 29979 - DNA, 472 bp, Mus musculus
  source 1..472: mol_type = other DNA
atcaagattaaaaaaataattaataattaataataataataataataaaagaggaggggagaggcccctctcgggcgggcgctccggcccaggactcggatgctccgtggcggtggtgcgttctcgggctccgcaccctctcctccccctgcggcagcctgccttctcccggccgcggggcccctcccgggcccacggcgaaggagccgccgtggaggcggacgagggcgcagggacagcgcacagcggcgtccggcgacggccgggggcgggggccggcggttgctcccagcccgggagggtcaggaggtgagcgtccggtcgctgggcacagacagctctgccaggcctccggctcccaccctgccgccgcagcactactcaacctcgtcttggctccgaggccgcgccgtggagaccagcacaatgcgcaggcgcacccctcctggaggcgcagcgcaggtccatcaga

SEQ ID NO: 29980 - DNA, 536 bp, Mus musculus
  source 1..536: mol_type = other DNA
cggatttaaatttaattaggcgacatatagaaaattcactcaggaaaataactagagtaataatatcaagattaaaaaaataattaataattaataataataataataataaaagaggaggggagaggcccctctcgggcgggcgctccggcccaggactcggatgctccgtggcggtggtgcgttctcgggctccgcaccctctcctccccctgcggcagcctgccttctcccggccgcggggcccctcccgggcccacggcgaaggagccgccgtggaggcggacgagggcgcagggacagcgcacagcggcgtccggcgacggccgggggcgggggccggcggttgctcccagcccgggagggtcaggaggtgagcgtccggtcgctgggcacagacagctctgccaggcctccggctcccaccctgccgccgcagcactactcaacctcgtcttggctccgaggccgcgccgtggagaccagcacaatgcgcaggcgcacccctcctggaggcgcagcgcaggtccatcaga

SEQ ID NO: 29981 - DNA, 256 bp, Mus musculus
  source 1..256: mol_type = other DNA
tatcttatttgcaataaattcttttaattgtagccattataattattaaagttctttcaactttgatttactaaaacctccgcaagcgcagcaggagtgtaggttcttaagacttttgtttcttatctatctagattcgtaatctattaggaaaataaagaaaataactagcttgagccaaattttaagcgtgtctttagacccagaccctttagactcagcgctctgatggacctgcgctgcgcctccaggaggg

SEQ ID NO: 29982 - DNA, 520 bp, Mus musculus
  source 1..520: mol_type = other DNA
atatagaagtttattactttgtttccttgtgtgtgcttgttaggaatcaaacacagggcatctcagatgctaagctgctctaaaactgatttttttatatgtttgtaaaatttcacaatagtttcttaaatgtttagatttaaaaggttaatcttacgcttttctcctccttaagaaagtgtgctgaaagacgacgccagaacaggtaaagatttcttttcttcttttttagggtcgccggtcctcagctgattcgcagaggcgccgccaggcgagttccgtccgccccacctagcaggggcggggagcgacgtcagcacgtcggccctcacgtccagctgggtgactactgaccggaatgcccaggctggctccgaccgctttcagagcctgagcgagggcactgcggctgcgcaggcatgccgggggaggggcttcggggctgagcggccctcgaggagcggctgccggaatgattagcccaggggctgctccgcccctggctcctcccaccccgcgt

SEQ ID NO: 29983 - DNA, 397 bp, Mus musculus
  source 1..397: mol_type = other DNA
ttttgttttgttttgttttacaaaagcacaaatctacttttagccaccaggtaaactttcaagtttttcaaatgtgtaatctatcattctaatttattctgaatttgttccctggcaaattttaatattctagacttaaacatatggcagtttgtccaatatttcattattttacttatatttgctacataaatttaatgtttcatatgaccaaatattagagaccagatcttttgggttcagactccatcttagagaatctgacctaaggttgaacacgagttaacaacagaagttaagtttatggtttggttcccagaaccgcttgcctgaaactgggattggggcagcaccctcccgttctgagatgaatacaattgcatctgaccatatacca

SEQ ID NO: 29984 - DNA, 440 bp, Mus musculus
  source 1..440: mol_type = other DNA
cccggcttcggggtgacacggggcttcgccgcgggcagggcggagggcagcaagttagcccgcggcggggtggcgccggcgggccttcgggcggaggctgccgcggggcgggaaggcccgggggaatgcggcgcagggctgcagcctgaggggcggcggcggcgggcgagggggcgcggccggcccgggcgggtctggctgcggccggttggcgtgggtcccgggtctgggtcccagagcgctccgggccgcgcttcggggtcgtcccactgtggatggttaaaacaaacaaaccttcccagcaacttttaagaagctggcgagaaatctcggggagcatctaatcacattaaaaatttatccctttgaatggggtgatctggatttttttttttcaaatgtggcttaaaaaaacttaggatatttttgtatttcacaga

SEQ ID NO: 29985 - DNA, 409 bp, Mus musculus
  source 1..409: mol_type = other DNA
atgtagtgccaataagtatcaggctttaccttatactaacccatgttaaaatttctgagttggatccaagcaatgtttgactccactggctactctatatggtattattttgaatgaattgattttgatttgttatgtagttggaaatgactaaacacttgattcactaaattcaaggaatttattgcaaattatcagtaactctgccaccgtggccagaaatgccagcctggtctctcttcagccatgcatgcaatgtacttaagtcctggtgtcgcacgcagcttgattctagccaggccagggtgggacccgggcctggaggtttccttgtggcctgtgagtcgccagcagaccaagggtgacgcccagcacgggcgtggcggggcgaccgcggctcctattcgcc

SEQ ID NO: 29986 - DNA, 530 bp, Mus musculus
  source 1..530: mol_type = other DNA
aatcatatttatgaaaaaagattagatatctgataaaacgtccttgaatttgtagtacttaatctgaaaaaaacgcacgtttgtcattgttcgtttaatcttattcatgctacaaccatgtgaataaataaaatatttcccaggctgggcaaccacagcatgtggctgtaatcacagagcttgtgaagacactgtgtcctctccctaggcgagcttcctcaggcagatgacctccgcagggttccggccccgggtgaagtgcagggagcagaggtgcattcccgcccggctaactcccagacccaggaaggccgcgcggggccgaagggttaacccagagccccgctcccgcgcgcatcccggcccccgccctcccgtcgctaggagacgccggaagtgggggaggggcgggcgggtggaggggagcgcgcgtgcgcgcgcccgtcgccgcggtgaccgtcctcgcggcccgtcggctcgcgccccgcctccctccgccccctccctcgtcgcgcgccgtagggtgtgtg

SEQ ID NO: 29987 - DNA, 195 bp, Mus musculus
  source 1..195: mol_type = other DNA
atacaaattattgttacaacaacatgtaggtttaaacggccagtccctgatttacctgggcaacagaggcaggtccattaggaaaataaatagtcgttggacttggcccccaggtgggtcaagtaatgtccatagcttgatagtggtcaacagccctctttatctgtatattgctctgtacagtggtagcgagcc

SEQ ID NO: 29988 - DNA, 561 bp, Mus musculus
  source 1..561: mol_type = other DNA
gcaaaggtaatttaatactacttttcctttcctttgatcaactttacatgaaggtcataataaggacgtaaatcgtctgcctaagtcaaaactgcattaagataagcagcatttgaacgtactctctgatccctgaaagctttccttacactgcaggcaaaggctcccagcccggacaggtctgctcgtccgccctcagtctcccaagaccctgggacccgagtgattggggccacggcgggcgggaccgcggcgggattaaggcagggcgcggaggacggccgcggctgggtgcggcccggcgcctgaggggcggccgggctgtccaggccgggaggggcgcgcgcgtgcgcgcgtgccggggagcaggagaggcgcgcggccgcctgcgccggaagtgagcggtggccgcggcggggagcgcgcggtcaggcgcaagtcggtccgcccttgggccgcgcggccctcagccccgcccagtgtgccggggcaggacgcgcgggctctgtgatccgcgccgcggggctctgcggccgccccgcccagtccccgccgacgccc

SEQ ID NO: 29989 - DNA, 319 bp, Mus musculus
  source 1..319: mol_type = other DNA
attcactcccagttattgaatggcagttcaattgattatttagggatggaaataattttctattaattgaatggaagataaatatactgtaaaggagtctttcatgaaatatttcctgagcactttctgatcaggctcacaaccatctgttgggctctgatgctgtctgaagatagctacagtgtactcatgtacataaaataatgtctgcgagtcaggattctcgatccagagacaaatcagcccagtctgggactggatatcaattctgcagcagattgaattagatctaaaggccactcagctttttgggtgcctc

SEQ ID NO: 29990 - DNA, 179 bp, Mus musculus
  source 1..179: mol_type = other DNA
gttacatattatagcttctataagagtcagactatgtggagctggccatgctggtgggctagccctgtctacagaaggcccctcctgtttccctaagaaaatatggtattctgcagctgctcagatgttcaaaagattatttcacgtttatgcagaatttaaacacgtgcatagaaaga

SEQ ID NO: 29991 - DNA, 264 bp, Mus musculus
  source 1..264: mol_type = other DNA
ctgtagaacttagacattgtgtactactgcagtctgtcactgtagacaaacaactgagattagctgtaggcctgtgcagtgtcagacagctttaagctttgagcttgtctttgaacgccagacaccatctagatccaagtaactttatttaaaaaaaaaaaaaaactccaaggaaacaaaataaatttttattcacagtgggaccacactcagctccagtgtggagtgggtggacaaatctaaatttagctactatttataggt

SEQ ID NO: 29992 - DNA, 447 bp, Mus musculus
  source 1..447: mol_type = other DNA
gttaagaattctggtaatatatatccttagtacatctatacctctgagctgtgtcttcattgctgaggtatatgaaaagtttctacctttgaaaatttttactattttttttaaaagcccatcctcctgtggaggttttaaattgccgttgttacagttttaaaagcatctggtttatcccaacggacaaaaccagaggccccttgtttgtgtgtgcatatgtgtgcatgcatgtgcatgtacaaatgttttttctctcagtaaaatactaagtggagttaataaacccttttgtgtactgaggggctcatagaaggacacaatttttcttggtgccttccaattagggattccttgtactacagaaagtcgtctttacgacgtaatgttcaggtgtcctgtgtgtgcactacacatatgtagcacgtacctttgtctatataaagt

SEQ ID NO: 29993 - DNA, 677 bp, Mus musculus
  source 1..677: mol_type = other DNA
ttctctttctgcagagacagagaatgcagacagactctcgagtttctacagatgactgtaacttagagaaaaggggttaagtcactttaaacctgaccctatcatttataaaatcataatctacaatgaacaccatataaatattatttctcatattccaggaatattcctctttcagatgttttaaaatgtcattttcttaaaaactttcatttcaaaggccttacatctctggagtaaatagccctgacaaatgtgtcaaaatatgccttattcataatttgtgttggatcctgcagtccccagtagctattgatatagagatctgaatgaattgcttctgaaaattgtttctaaccagaaagagggtcacattttcttcctgccttcatgatcaacaaaaatctgtgaattatgctttgaaaatgaaatccatccatccatccatccatccatccatacatacatacatacatacatacatgcatccattcatccttccatcatccatccattcactcattcatacatgcatgcatccatctatccattcatccattcatccatccatccatccatccatccatttattcacacatccatgtattcattcacacattcatccatctagtcattcatttacgcatctatccattcatacatcaccgggtacttgc

SEQ ID NO: 29994 - DNA, 453 bp, Mus musculus
  source 1..453: mol_type = other DNA
taccccgggggatcttatggatgcacacctgctcagtctttcagtgctgaagaaagtatttattttccagctcaaaggagctgtttacttaagaattaaggatgcagacgttacttgttgatcagaacttctccaccttgggttcaattgttcgaggacaggaacctgcgaaatcatgactcaagggtgttcttttcgtcaacaaagggagtcccccttcaaaaggaaaagtgtaaacttttacaccctatcatatttgctcagcttagctagctctcttgtgaaggtgtggcaaaagcacctgctccggagcttcccttgaacctccctccaactctcattttaagggagttgctagcggagctccgggcaaccccgggctcggtgcaacgcctcggtgcgctctgtggtccgcgagcgccgcggcccctttaagagccgggcccaggctgg

SEQ ID NO: 29995 - DNA, 469 bp, Mus musculus
  source 1..469: mol_type = other DNA
gaaatctagcattcagcaacctctgttgcagaacaagtgttaagaaaccatcagtttctatcacgttaatggaaagttataggtacaatctgattatgcttgtagaagcacaatctcccttggtgtacacagcaggtaagcctgctcaggcgtattcaaaagtcctggtatttgttttgtggaggaccatcatcaactcttaggcttttatggttgtagtaactgaagatacattatgactacatattttaaaacaattgctaagtttagtatgaaacgttctaatagcctcactactttttaaaagcaaaatagctagttactaggtgagcttccatcctaggtttgtaatctgtaacacagactgaaggtgattatcacgcacagcatcatgtgcctgatacagcaactgtgttgttctgagagcccagtgatgacatcataatggtgggacccgattactatgggg

SEQ ID NO: 29996 - DNA, 581 bp, Mus musculus
  source 1..581: mol_type = other DNA
tgaggccagcctggtctatagactaagttccaggccagtcagggctacacagagaatctctgtatctatagagcatgcagagtcctaaactatctaaactataggatgtgacaacatattttggagactatgcacataaatacatactagaaattaacaacatataatgctactttttaacattcatcattgtatagatcaatcacatcaaatggctttcctatatgtggatcattcagcacataaacatgccacagatacttttaagtgaatgttctttgaggccccacaaatgaatgacataaaatataagccttctgttttttcatgtattccatccttgaagattcactggagctgaagaaaaatgcagaaattgctcctgcatctaatttctaggctatttgcctattaagactaaatattaaaggcatatgaaaataattataccagaagtttcaaatcatctttaaataattaagctgtaaataattttattaatactaattttaaagaacataattttactaattaacgtataaatactatataagtatcatagcttatttattgctcagcaa

SEQ ID NO: 29997 - DNA, 377 bp, Mus musculus
  source 1..377: mol_type = other DNA
atagtattagttttgtcaagatataaaaagattttatgtagttcagtgacacaaattataagggtgtactttgtcattaaatatttgctcaatgtatgcatgagtgcattcaaggaaaaatagcattttcatctgttttttatgaaaaatactaaacatgtgccagaaaatgtagattcttgatttggttcactatgttcttccagatgatcccctctcagaggacaaggagcagggtctgtcatctctcagaggaggaagctagagatagctgtagacagtaattggtacatgccactctctgctatcttagagctaaattgacatttgggggttaaatccacaatgctttgtttcctcaagaattgaatttatgc

SEQ ID NO: 29998 - DNA, 530 bp, Mus musculus
  source 1..530: mol_type = other DNA
tgaaacagttttcatgtctccacttaaaaataggtaacacaatgctattttctttctgtcaacattgtgaccacaataggaatttaattgcccggagaaattctttattcaataaaatcgtccccgcagaggatcctgtttgggacacaacaatctgtcgccgccacgctttgctgcctctgggaacacagagctgagccgcggtgtaacgccattgcaggtgggagtctcggaatttaggggaaacaagaatttcccgggctccgcggagtttccctccggcagaggcagcgcgccctgaagggagggcgctccttgctccgggtgtgacacacccgcagccccgcacgaaggtgcgtggggcgggaggggatcgcgcggccgcggggctgcgagccaccgccgccccgcccgagctgggtgccgcggtcctcggctctgcgccgcgcgtctccgcggctgcctctttaatcaggaacacagaaggggcgggccctgagcgggcgcgtaatcggatcgctctgccgcgg

SEQ ID NO: 29999 - DNA, 251 bp, Mus musculus
  source 1..251: mol_type = other DNA
ttcccaaggaatgctaggcttcccttgctggggaatatgtcagaccttggccagaaggtttaggccaaactactttcacctagccaagctgttttgattccaaataaatcctgtctggccacgtaacagaaaccagcttcgtggtgcagattgtgtgccctgaagcttctgccagagctctagacctcctcacaaggccacgtctagagaagcacattgtcccctgctgggtggcagtgcagcctgctgca

SEQ ID NO: 30000 - DNA, 667 bp, Mus musculus
  source 1..667: mol_type = other DNA
ggaaacaagaatttcccgggctccgcggagtttccctccggcagaggcagcgcgccctgaagggagggcgctccttgctccgggtgtgacacacccgcagccccgcacgaaggtgcgtggggcgggaggggatcgcgcggccgcggggctgcgagccaccgccgccccgcccgagctgggtgccgcggtcctcggctctgcgccgcgcgtctccgcggctgcctctttaatcaggaacacagaaggggcgggccctgagcgggcgcgtaatcggatcgctctgccgcggggaggcgagcaaggcaccagcctgcagcccgcccccggcaccagacactcggccgggcgctgggcgagggagggcgggcgccagcgaactcggagagccgctcgcacactcgcgggcgagccgccgcacccgcagcaacaccagcagcaccggccgcagcagcttcctgcctcgcactcccctccagagactggccaagcgggtgtaaccgccgggggaggctccagcgacgtctgactgcttaccactccgcctgtccagcggtcccgcgtgtgtgtcccgggtgccgggggacctgtgtcagttagcgcttctgagatcacacagctgcctaggggccgtgtgatgcccagggcatattattactatttgaagagg

SEQ ID NO: 30001 - DNA, 276 bp, Mus musculus
  source 1..276: mol_type = other DNA
ctgagagaagacaaaagccatctctttacaattgacttctcaagtgccaatttacagagttaacataaacaattcgtaaaacctgtgtcttgtaaagatttctttccatcagaaggtgcaggaggtagaaatttggacgaggctgctgcctcttctagtgcaggcgggcagccctgccttcttggctggagtttttagtttccaaaataaagcagagctctccactgccagcgcctctctgatctgtcagcctaggcagaggcggccccaggcccg

SEQ ID NO: 30002 - DNA, 707 bp, Mus musculus
  source 1..707: mol_type = other DNA
cagccccgtcggggatcggccagccgagtgctcgccccccgaagccctcgggggtcccgggcgctaggaccggggctccccggagagaaggcggcctccaattcgggcctaaaaggaaactttccgggccgcggctcgcccgccaggccgcccgccccgccccggccaggccgcccagagcgccgtggagcgggggggtaccggaatccggggggccccgtctgcgcgatgcccggggacggggtgctgccgcacggtccccactccgaggccccgtcgccccggtccccgccgcccagccctccgtcccgcgggagagcttggggccggcgcaggatgcagcccgcccgcccgccccgaggccccgggggaccccaggggcgcgggaggcctgtggcgcgggggcagggcgcggccgccgcggggcccgaggcctagggcgcccccccttccgcagcactcctggggcccggcccgcgcaggccgcgccgctcgccgcgctcaggccgccgccggaacccccgccgacgctgcccgcgggcgtccccgaggcccccggtgccccatccccctccgcccgcggcctggcgtgggccggcgaatccccggcctcacgtaagcgcgctcgccgcccgccctgcctacgcggcccagcccgccgccctacgggagcccggggatgtgggccgggcctggggccgcctctg

SEQ ID NO: 30003 - DNA, 404 bp, Mus musculus
  source 1..404: mol_type = other DNA
ttcagagcaagcatcatctcaattataatgctggcagcccctcccgggaggtcccgctccattggcatcccggccccgggagcactgactcggcgtcccccagccgagcccgcgccacgtggccccggccccccagcctctctcgttgagcacctggaggccggcaggggttttcaggtctccgaatccgccgcggccatagagacggaggcgtttccctccgctctcggtcctccgcgtaccaccaaattaataaaggaggcattttaaaatgccttcgctccacaaggcctcggctacttccggcggaactgcaggctctcggaaattgccgaacaggggaaaacagtcgaatctgtgtttctagtccctcctggctttccgtcctccaggtcgggctgaca

SEQ ID NO: 30004 - DNA, 324 bp, Mus musculus
  source 1..324: mol_type = other DNA
ttagtttttgtcagttctccccgtcggtggaatgaatacctgaggtttaagtctctcgtgaccctgggagatgaaccggtctcctgatgacagggccatctcctgtctctcacctgccggctctcccgggttccagaggtggcggggcaggagcggagcccaccgagtagttccgcggacctgtccgggtctccctgacctggcggccacgacctctgtcagcccgacctggaggacggaaagccaggagggactagaaacacagattcgactgttttcccctgttcggcaatttccgagagcctgcagttccgccggaagtag

SEQ ID NO: 30005 - DNA, 406 bp, Mus musculus
  source 1..406: mol_type = other DNA
ctccccgtcggtggaatgaatacctgaggtttaagtctctcgtgaccctgggagatgaaccggtctcctgatgacagggccatctcctgtctctcacctgccggctctcccgggttccagaggtggcggggcaggagcggagcccaccgagtagttccgcggacctgtccgggtctccctgacctggcggccacgacctctgtcagcccgacctggaggacggaaagccaggagggactagaaacacagattcgactgttttcccctgttcggcaatttccgagagcctgcagttccgccggaagtagccgaggccttgtggagcgaaggcattttaaaatgcctcctttattaatttggtggtacgcggaggaccgagagcggagggaaacgcctccgtctctat

SEQ ID NO: 30006 - DNA, 302 bp, Mus musculus
  source 1..302: mol_type = other DNA
tccaggatgggttattaagcttggtggtaagtgccctcaaacaggcctcagtacagaagtagtatggagacttacatcattgggcctttaaaaggtcagcttttgctggccagtggtaggtctgagttcgaggccagcctataccaagttctggccagccatggctacatatactttgtatttgttgtttagaaccaaacctagaaaaatcacaagatgtcatttttatgatggtcctagattctagagtcttctagggcctagaaggacgtgcactctctgcttggcacagagatctcctg

SEQ ID NO: 30007 - DNA, 398 bp, Mus musculus
  source 1..398: mol_type = other DNA
tagctaagctaccctttacagtgtgttcaggtttcctgtttttataaaccaaggtgggtctccctctgttgttttcgtactctgaagaattcagaatgtcttgtcgaaaaatgagagctgtcacaatcgtttcatgaggaatcaataatctaagtggccattaaagctgtcttgatttttttaatgttgggagtaaattcaaattgtaaaaactacagtgtaactatttgagaaatgaaacgttatgttttggaaaactccagatacgctgacatcatatttataattatgagcgtttaatgagaaacagatttttttagctacaggcaaaacacattttctttcccagtagaagattagcctcccttgcttactaagagaggaaatacttcttcctc

SEQ ID NO: 30008 - DNA, 352 bp, Mus musculus
  source 1..352: mol_type = other DNA
tttttggtgttttacaagaaatctaaaagcatggcccttgtacttgtactttaagcacttgaaatatagctttattttcttcatcacagactcttagtacatattcagtagtaactgatccttgtctctttaaaggaacccgggtctccccttttgttaaagggggctcattggactcatgtaaacgggtctttgaaaagcagcttttggttgagaaccaagctcttgaagcttggctctgggtcccggtcccaagccccaaaccccaagctctgattcgggcggggggcgcgtggggcggcgccgctcgcagcggcgggggctggcgcgggggccgggggcggcgccgggc

SEQ ID NO: 30009 - DNA, 310 bp, Mus musculus
  source 1..310: mol_type = other DNA
aattttaattaggtagcgttctcagtgcggatgcaccacagtgcttcccactgctggctgcagccctttatttgaaggaaggaaaaagttgttgccagatcaggcttgccccaggcctggaaacccgctgcctgggatgctgcacgagcatgcgcagcgcggcccatgcaggctacagcgcacccgaaaccccgttcgggcgcgctcccggagggtggggtgcagtaccgcgctgcgcgtccccgagtctcgcgcccgcgccgcgcgtgcccgtgccgctcgctcctgcgcgcgcctcctcagcaaggcc

SEQ ID NO: 30010 - DNA, 431 bp, Mus musculus
  source 1..431: mol_type = other DNA
tttatattaaaatggaacatggataaagtagtttcaatcagtcaatcaataagaatgtcttgtgtaggtgttcaatatcggctaaggagaactttggccttcactgaaaactgtatcattgatggacacttggccaaaagcgaactgttaagaaaacgtactcggacaggtcggaggttcatcaagatcccggaaccggagtcaaaaagacaagtacgagttcctcctcaagcggcgcgtctggtgacgtattacggattcttttataagtcaaaaagcatcggttctcagcgaccgcggacagaaagaatagtttctattctctgatgaaaagatagagttcatctattgttgtttatggaaactcaaaacattcaaatagtgactttgcgcgcctgcgccagttttagtacccgccgcggttgccagga

SEQ ID NO: 30011 - DNA, 441 bp, Mus musculus
  source 1..441: mol_type = other DNA
ctacattaaaaatgtagacgaattgacactttgacattatttttacctaaattcgttaaattttgttcaagatttagtacaaacttttgttgttgttgttgtttaaactaaatatctagtttatattttgtaattctaacccaggtaccccttatacgttttgtgggaagggcagaggtgggaattttccccaacgtgtcccctttgacacattgccactgtgtctgaccacccatgggaagaatctaaactgggaccgtggcgtcacggtttcctggcaaccgcggcgggtactaaaactggcgcaggcgcgcaaagtcactatttgaatgttttgagtttccataaacaacaatagatgaactctatcttttcatcagagaatagaaactattctttctgtccgcggtcgctgagaaccgatgctttttgacttataaa

SEQ ID NO: 30012 - DNA, 501 bp, Mus musculus
  source 1..501: mol_type = other DNA
gcgatcggcggcgcgcacggaggcgcgcgggccggggcggggacagcgtgcagcgtcgggggcgggcgcaagctagtctccgtgcgcggaaggccgagtgcaaagagctccttgcccccgaccgctgcgccgccgctctaccggctgctcccgcaggaggccgggaccgcctcccgatcggccaccgcggcaacccgtcccctcggatctgcactgggtacgggcgccggcggctcgggcgagccctgcagcgagggtcggaggccagcgcgcagcccgaacccggccgcctaggcgtcccaggagccagcgcaagtgtcgcagcaacactccctggcgctcaagctccccggccgcctggcggactaaggcagcagggagatccgcagcgcgccaatcggcggctgccgtcggggccaggccccgccccatggtcctctccgagtgccgcatggccccccgccctcctccgagatcccacggctgcgcgcaaaacggggc

SEQ ID NO: 30013 - DNA, 416 bp, Mus musculus
  source 1..416: mol_type = other DNA
aaacaaaagaaaattaagctactcttcagtatataagccacgccgcagcagcgtgccaccgctgcagctccggcccggcagactcccctggccggtagccggcgtctccaaccttccagcgccgtccgcgcggctctgggccctcgcggcgcgtcaaagttcccgggcggtctgcttccgccgcaggatcagaccgcgcgggggtttccagcaagtccccgccaccccgggaacgaagcctccacccgccacagtgaggctcggatcgtgcctccagaaccccttcgcagcgccgggaagtagccgaaggccttcggcaggttccgccagtagcgcgggggcggggcctgtcgagcggctccgggtcgagctcgtgagtggccgctgcgcactcggcactgggcggcgctggctgg

SEQ ID NO: 30014 - DNA, 415 bp, Mus musculus
  source 1..415: mol_type = other DNA
gctcgctcgccccggctgtgccgggctggccgcccgggccgccgcctgggtgcccgtggggggtggagggtgaaggtgctgccgccttcgcggcggtgcccgctcggcgagccgcaacgtccagcgctctttgtgcaataaagttcgaaaacgcggtcggagaaaatgctgttttccaaaacatacatgtaataactttttgcagaaactgttggtttgaaaacagtttcattgaaattatcgaaggggaaattagtattagcgaaggtacttttaatggaggattgatataattctcactctaaaaatagttattgaaactatccattatttgtatatactgtcaaaagtcattgacaccttaaagatccaaagacatttttaaagggcattgcagtatgacctatttaaacct

SEQ ID NO: 30015 - DNA, 460 bp, Mus musculus
  source 1..460: mol_type = other DNA
actttcctgtgcctagtttaggtccccaaaagaaaagaaaggtatttcttcttctagtttcactgatgaaatcggattagctctctctagcgcaaactcttactggtccccagtttactgcaggccacttgtccccagtctcccgcagctggtgctggaatgtggaggtcaggcgcgccccctgccggccgggagaggcgagggcggtcgcggctcggcagggtccggcacgcggagacccttgggtggccaggtccgggtgcagccgaggctgccggcgtggagcgacgcgagcgcccgagcgcatgtggtcgggctcaaaacccggcctgggcgtcgcacgcccactccccagccgcgccgtggttagggatgcttgggcgccaacgtcgccgactaactaggtcggtaccggggaaggggaccggaaacccgcgtctctcttcccggaaaaggagga

SEQ ID NO: 30016 - DNA, 768 bp, Mus musculus
  source 1..768: mol_type = other DNA
agccctcattcccggtgtccaggcctgcgccaggaataatcccggcaggaaggaacccgaggcggcggccgcctcccagcgggacccagggagtcggtggaggccagaggtgcgccacggcccggacgcgcccgctgcctcctcacctgcaggtggtggccctcgccggctccgaaatccaactcggcgggctccacggccgcagcgggcgccggcgctaccgccaccgcgtccccggccgccgcctcgtagacctcggactcgtagtcgggctctgccggccccgcgcgccggcccagcttggggctggcattgggggaaggtcagcgtgttccccatggggagcgtccgctccgctcggccgacgcctgcgcctccgctcgccccggactccgcgcccgccccctcccccaacaatggcgcggtcggcgccggcagccccgggcagagcggggctgcgcccgcccgcactcgccgccgcgcccgctgcgcgcccgcccgccccgccgcccagcccggggcagggctccggcctcggccgcacccccgccggctcgccgccgccgcctccccacagcggactagtctgcgagggcggcgaccagcccggcttatttaaaaggggtggggacccgggagacgcagccactgcgggccgagagcgcggccggagctcctcctccttccgtcgccgcctccgaactgaaggccgctagccggctcctgccaaccggaacgcgctccgcggtcacctggtgacgggtagcc

SEQ ID NO: 30017 - DNA, 561 bp, Mus musculus
  source 1..561: mol_type = other DNA
ctgggggaccaagcaccctgagctgtacactgctccagttcaagagttttttctgccagggattataaaactaacgtctctagagacttccaaaactggaaagaaattcattctcttgtcacaaggacaagattttgttatatataaaagggcaaagcctgggaaatatctattgtgtgccaggagctcgcacagggaggggcacaagtttgtcaacgtctctgctagctcagctgtgtgaggtgttctggcctcagaatcctacggtatcctaaacattaactaacacgaggttgctcattaagaggacagaggccctggaagccggcgttcagagaacagagccctcaggaatgagcaccataggtttcccgcccgggttctctgggaggactcgacgctcttccgctgcccgctccgggcggggccgcggggcgctcgcggagaggccaggacagcggggcggtgggcggggacccgggacggcccagctcggggcagggcgggagggggcgggaggggcggtcccggggcggggcctcccggcgggcattagaggca

SEQ ID NO: 30018 - DNA, 437 bp, Mus musculus
  source 1..437: mol_type = other DNA
ggtgtgcaccaccactcctgatgtgaaattcataaataatcaataaaaagtgcctgtgttatgctggcaaaagtgtactggcaccatggagcatgcgtagtgtggcccaggatgagggtaatctcagtttcacttctcccctgtgctgatataaagagaactgggctttaaattagttcagagtgacttctctgccataaaacgaattcgagagttgtcagttgtgttagaagtcctcagtggagtatttcacctcaggtctgaggtggccagggaactgacctgcacaggagagcggtgtttagaccaggcacactgacttaatgtggtatgttgcaaatctctttcaagacactcaaaaatatcctgcatgccatttgtgcccacataaaggccaccaattagaagagcactctcggagaggaactaggtaagag

SEQ ID NO: 30019 - DNA, 426 bp, Mus musculus
  source 1..426: mol_type = other DNA
cacaaaaataacatattcggctcatatttttcttagagcctatcatgacctgccttttttagtgtaactgtaaagaatagtatttgatattcataattatgaaatagtcattatttgaaattcataattttatatgcataatgatttgatgctggcaccaagtaatcttttctgacagaataagtttattaagaaaagtctgtgactcaagtgtggggcacaccgcagcttccaccctggctgtcctgtctgtagaccaggctggccggtgtgcaccaccactcctgatgtgaaattcataaataatcaataaaaagtgcctgtgttatgctggcaaaagtgtactggcaccatggagcatgcgtagtgtggcccaggatgagggtaatctcagtttcacttctcccctgtgctgatataaagaga

SEQ ID NO: 30020 - DNA, 243 bp, Mus musculus
  source 1..243: mol_type = other DNA
tccatttttaaacagaatatggatactggttggctggttaccagcagacctcaggagaggtgacttctgcagttcattcctatgtttggaaagcattatttctgagaaattctcttagctgctaggccctggtaggttccaagtgacagttttaactgcaaacaaggccccgcccgaccgcctgctcctcccgtaggagggaccggtcctcgctgccgcggggaagcttttgggcgtgggacc

SEQ ID NO: 30021 - DNA, 412 bp, Mus musculus
  source 1..412: mol_type = other DNA
ctgatatgagagatgtcttggatactggagatggaacatatcatgtctgtcaattgacagtcagttctgaaatacaatgacttgtttatcctaaagattcttgtgttttgaaagattcatacgtcgtgaattacgtacaactaccatgtgggggtttctgtaagagcaacaagggcctttctttagagttagaaacattttcaacatttagggaaataacaggttattcaatattcttcaaatccttttgttgggaacaagcaaaagaaacttattctaagtactattattttagactctacttgatcatagggagacactaaattcaaggctccaagccctagtggagctggggacttcagcttctattaaacagaaacagttgtttcgcccagaaacctaatatgattgg

SEQ ID NO: 30022 - DNA, 254 bp, Mus musculus
  source 1..254: mol_type = other DNA
ctgtgagtcaccctgtgaccccaggacttaagatcagcacaaagcttataagaaagctcttttgctctgtctccagagtacaggacagaggagaacccttttggactctcagtctatggcattgtttcgaaactgtaaaagatagctaaaacatttcgctacaaatgttaacgagttaagcaactttgctctacaaagtgaccctcttagccgggtcagtgattcgtcatccattcgaaagctctggagagtct

SEQ ID NO: 30023 - DNA, 255 bp, Mus musculus
  source 1..255: mol_type = other DNA
ctttctagatggcggcgattaaacatcttgaaactattttccctttcaaatgccaaacccaaagtcacaaacaatactgaagactgtgttggcccaaatcacgtttttgttttgtccaactatacaaagaagaatgtggtaatggctgaagccctgcttctattattaaataaacaatgtgccaaattacttttttttttttcaaacaatctcattagcatcagctagtgatcacagcccccacgcgggcctctt

SEQ ID NO: 30024 - DNA, 159 bp, Mus musculus
  source 1..159: mol_type = other DNA
gacagtcactctgaataactcaagataattcttgctctgagaggagatgcagagagagccttcccttaggtcctagatcaaaatccagatttgtgactgcaggtcaaaagttcaagctgatgtgctgataaatttaatgaatttaatagagatccatga

SEQ ID NO: 30025 - DNA, 326 bp, Mus musculus
  source 1..326: mol_type = other DNA
ctcacttgctttctcttccagacatcacaaaaatagttgacaattctacttaatgatcacagaatcttgaatttgaactaaactttatgctcttactgtttaagttttcacttttaaaaaatttaaactagctgcatatgtatggcctagccaaaatgtaaatgaggaaaatacctataaatttttttttaatttaaatatgcaatcaaaatccgaattcagaatcagagcttcgctcattcttttgcaaaacaagagcaaagacttttctcattgatagagagctctccgagcttggcagcagtcatgacagctatatataccag

SEQ ID NO: 30026 - DNA, 381 bp, Mus musculus
  source 1..381: mol_type = other DNA
gaccaagaagaagtgtttcacatcatcccaagcatatatattatatttattgattttactattttcattgtgtgtgtaaaattaaaaaatttttaaatcaaaagaaaacagctacagtgtacttataaataaataaataaacattttttaaaaaatgaagaaaaataccaggtctaatctttttatcttaaacacgtgaaagttttaaaaacatcaacagataaagacacacaagtgtttttcaattagagaaatgtattggttttgagagtgcctctggaactcgtctcatgagcactgcaaaatgctgggtgcataatgcatttcgagcgcgctgcatagggtgagaagcgcgccctttgtctccaaggtcatttcact

SEQ ID NO: 30027 - DNA, 433 bp, Mus musculus
  source 1..433: mol_type = other DNA
tccaaaaaacaattttataaaaacatcagaatatcatttgcccaaatattaataatagtaattcagctacgatgattcatcaaatctttctaaattaatataaatgatgctgacagatttagtttatagtcatattaacaatttgtgtgtgcctttgatttccagttcaaaataaaggacatttgcccctattgtgtgaactgtctgggagtcaccaagttgaccccatgttagggtggttctgcccaaagagccttgccaattgtcaggaaccatctcctgtgaggctgcacacacactgagtgtacctcaggacctagccacacatgtgccatggttcaggcaaaaataagttagttactaagcttattttttaattaaaactcgaatcactttctgcctagaacttggagggtcttggatcccttccaca

SEQ ID NO: 30028 - DNA, 499 bp, Mus musculus
  source 1..499: mol_type = other DNA
actgccgtgaattcataacttttcaacacaatgctggttgttttaaaagtccatgaagcgttgaatcttgaccaatcaaggatgacctattgtcctacaagtcataatgttctcaaatctctggaaagattggaatacgtttaacccattcttagaattctaagatttatatgtcttccatgacaaatggtgagtgaagcttatttataaacatgtaaaagcctcagcatgagaatatgaatggttttactcatatatgtatttgttgaaatggaaaactttaagaaacctcaaatgcacattcttcaaaggccaggaagggatccagtctagggagggctccctcttctgggattcctagattgttgcggagcccagaacactcggtctcggcgcttccgatagccctcaactgcagggtgttcccgaggaatctccgcggcgtggcagtcccatcccccaccgcctcggcccaccccacaaagtcggaggcggcgaa

SEQ ID NO: 30029 - DNA, 364 bp, Mus musculus
  source 1..364: mol_type = other DNA
gctcgcccgctcaggggagatggcccaggaggcccgcggccggtctcgccacacagggccgccgggcgctcagaagccagccggttcccggcgggtcttccccgctcgccggccgagtctcggccgcagagccccgggccctcgccatccctccggcggtgctccgcgacccacgcgccccggccccgcgggcctcccgcctccccggcctccgcctcaccactctcggccgggaagccgaggccaagcacagcgccggctttctcaggcagccggcggtcgcgccgagaagcccagaggcttacgcggtaacgatcagatgttcaggtaacgctgcctcagccatcctgaaggaagcggggag

SEQ ID NO: 30030 - DNA, 341 bp, Mus musculus
  source 1..341: mol_type = other DNA
gttttgatggtaatttccaacgttgaaacaaatcattctcctgttagcaggacaaaaataacgggtcatgttaatactaagctgagcaagtcagttgatttaaaaaaagctatattcaacctcacttgagtcagattctacgcagctataattaaccctcctttaactacctcttcactctggactacacaggtagagagagctctgagagcggtcctaaattatatgtgctcacgttgttgaacacatacggtaacagcgactggctggcgtctaatgcctggcgcgcgctccccgcttccttcaggatggctgaggcagcgttacctgaacatctgatc

SEQ ID NO: 30031 - DNA, 413 bp, Mus musculus
  source 1..413: mol_type = other DNA
cgggaacagctgctgggatggggaacacttaaatttcatgtttccacaagaattagtttaatcaatatatgtagaaggtctagaattcgaagcaagatcagtgattcttttcctattaagtgatccattgaaaggcccaaggtcgtccttaaggaggccagagcaggccacccccactgccctcgccgcccttggccttggctgggcggggctctctggggctccaaggctggctgtccccgcggggcgggctgctggctgcggcaggaggcggggcccggcgctccccctcccctacactgcgacggtggcagcttagcgcggaccgtggcggagccaggctggggcgcgcacggggcgggaacagccggggcggggcagccgcggagcctggctggggcgcgcacggggcg

SEQ ID NO: 30032 - DNA, 465 bp, Mus musculus
  source 1..465: mol_type = other DNA
cagtaagcctttaattcatagctaaataatggctacggagaactatttagaaacccttagcagagatctccaaactgaattcagcatccagaacagtccatgaatctgacagacttatccctgggcttctctagagctgtggctagggttctctccccatccacagggatgatagcagaaaagacattctgcaaatctgaaatttcaaatgtatctagggtatctgattctcatgccacttggaaaacaattaggagaagtgttattcaaattctcttagtgtgagaattataaaccatttaactacaatggttgactaattaagcaactttatttaatttcaatttcccaatcaagtgacccttttaatcaggtcagtgatttgtcatccattcgaaagctctggagtgtctaagataaaagaaaaaagtgccctgtcccactgcgggccccttttgtgagcag

SEQ ID NO: 30033 - DNA, 407 bp, Mus musculus
  source 1..407: mol_type = other DNA
tttagaagagagctcctctctttgcagctgccatctatggcaggcaaagtgcacatttctgttgtagaacttatattcacactcctagagcatgtatgagtcaaagatatttatagttgtaataggagaaaacaagtccccagatgaagtggctcttttttgcatatcacttggggtaaataaaaaaatagaaggtgttgttgcatagaccgtatattgcaaacagccaagagctctaacctttctgttcttctcaattgagatcccctttaaaatacaacctactgtatacgctacattaatgtacgcacagcaaaatacaatacaagaggttgcagattttcttcttgttgttgccatgccaaccactcattgctctggctgccatttccctgagctccgcagag

SEQ ID NO: 30034 - DNA, 604 bp, Mus musculus
  source 1..604: mol_type = other DNA
tgctttaccaattcatctattaaccattttctccaggataatacaggtgaagaattattctacagttaagtcccctacataaagcacactgtatgacagggatattcaattgttaatttcaaacactgagttccctgtaataaccttcacctcagggacagcaaagtttgtatggaaccagaataaaatgattgcagagggatatcacatggctagccttgaagtgacacattgccaagcttgtagttatcatatttacaaagcctttgaattttctgtagaaaaatatatactagtatatacacttctttaatacatacctttttgggacataaataataatatgggatagtttttaaatattgtattcatctgtcaatgacaaaacctcaaactatctctagtatacttcatatagataataaaattccaattaatgatcatttacttatgtccagtttgccgcccccacgtgtgtgtgtgtgtgtgtgtgtgtgtgacacaaaggaacttgactcctggggacacatttggatggaggcaattaaaatgcctgtcaggcatttggtacccagaggcagcatccttttgtcagtgaatgatg

SEQ ID NO: 30035 - DNA, 506 bp, Mus musculus
  source 1..506: mol_type = other DNA
ttgaagtcgggctgcgtcatccaacctcgacctataaaaataatgcttcgtgtgattcaaacgttgcctcccagtttgcaactgtcccaccctgctttagtaaatcaagcccgggagccagagctctgctcctcctccccaaggtcgacagtccttccttcggacgcagaggttggcactcaccctgggtgccgaagaggccgcgtgggggaccggcgtgcccgtgccatgcggagcgtggactcccgcggccaccccgcagctgcagccccggcccccggctctgctccgcggctgggctgccccgcgcgggccgctgtccacagtgggaggtgctgaaagcagggcgcgggggcggcgggccggccgtctgctccgagcgcccccctccgcgccgcgccgctctcctccatcagccatgttccgcgcgcggggagggctgggggaaggccgggggccggcggcgaggagagccgcctctgcctcggggaaggaaggaggcggcg

SEQ ID NO: 30036 - DNA, 375 bp, Mus musculus
  source 1..375: mol_type = other DNA
gagtcacaaggaatacctggtaattgttccagttatctgttttatgattagcatcattaagtcattcccatgcctgggcctaaaggcctagaattttgctgcaattaatgattgcataagcaactgaatatgatcacaatatatgctatacgtgtcattgtaggtggtagtctagctgatcaacccgtagaacttcttacattgtactcaataaactattttccctttcaaaaggaaaagagcacctggctccgccccagccagccagctgacgccccccccccaggaggaggcgggacttcctcgccgcagggcagctgcttccggcagggcggagccagtgcggcgcgcccaatcgggacggagtcttggctg

SEQ ID NO: 30037 - DNA, 507 bp, Mus musculus
  source 1..507: mol_type = other DNA
ttctggactccacatgagatgaaatgtaatctaaaattatttttttaaataaaaaaagactatgttttccagaaaccctaaagcttttctttgaaacatttcctactcagtgggctgtcagtagttgattgctaacacaaactatttcagattaaatgtaatgtacacattctttagagttcaaaacctgtcaggcatttctgtcttgaatctattggagaattgaaccaattgttattccgttatcaaatatacttacttatttattttcaaagagtagctacaaacgtttgcaaggcagagagctttccgaagttagaaaggtgggacgactctccagggaaccctcgctcagccctgcagccgggaggggagggcgcacggggcgtcgcgcagagcctggcgcagaccccgcccgagctggcggcaccgccctgcggcccgcagttggctgtccccgaggcccgccccaccgtcccgccgtccggccgcccctctgtccgcctg

SEQ ID NO: 30038 - DNA, 562 bp, Mus musculus
  source 1..562: mol_type = other DNA
cataaaaattatttcagctatttattcatgtactagaaaaagaaagaacagttaattttccaactcttaaggtagaagtgatatatcgatctaaaaattctagtgccttttaatctgcttagcaaagcgtctaatctattatctaaggaagttcaagcctggggaaatgccagctgcgagctgggccaggtgcaagagaggtccgacgatcgagcctctgggacccatagggctgcttaaccctcggcctggccaggacggccctgcccgcccggagtttccaggtcttatttcctgtaacagtaaagaaaccgcagcgccccgcagcacggccggcggggtgacttttgcgggctggcggcgcggaacgcactgggagccggcagagttcggccaccgcgctcaggctgctttcagaacgctcccagcggcttccgcgggccccgcccccgccggggtttccccgccgcgcgcgcccctcccccgctgccattggccggcgccgggccccgccctcccccccctccgccgtagggttccgtcccccgagcgcccggagctg

SEQ ID NO: 30039 - DNA, 328 bp, Mus musculus
  source 1..328: mol_type = other DNA
ttcagataagctgctataaaagccttttagtaagaacttagcaacaacaacaagatgtgtcagtttccttgcttgctaagaatttcagaaataaaaatctcactttttttaagcttagattataccctgctaatactgattataaagactattctttaatggcgatttgggaacctgatcaggttgccatgtggttgaaatacccaagacctcagaactaagaattggagagtgttctttctataacagttactatttcaaatgtctctctttccctttgccctaaagaactcctcggagtgcgaaatctgtgctagatatgaggtca

SEQ ID NO: 30040 - DNA, 454 bp, Mus musculus
  source 1..454: mol_type = other DNA
aactcacagagagctatctgtctctgtcccataaagctatacattaatacacccagttttggttttcatatattacttaatctgaatctaaccttaaacatacacagtattgataattaagtcttttttcaaatttatttccctaaaaaatgtatttgttcctctcgcatggatataagattaaggagacaaataattctatttcatgtcatttagaaggcaatgggctaattgcagcttattaaattgtacagaaaatcaagttataggaaataattttaaattaagttttctttagtgtaaggaaaaagttgggtgatggcctcagccaaaattccaagttgaaattgaaaaccaaccatgactggctttgtcatgcttctttcttctttacagataggggtggagggaaaaaaactggacaggcattaggcactaagggaaatatatatgc

SEQ ID NO: 30041 - DNA, 341 bp, Mus musculus
  source 1..341: mol_type = other DNA
ggatttaatttccaacataaaattttctaaacactgaaatggctctccaatagtctaatttaggctactgcaccaccaccaaacccacgtggccagccaggtggtggtggttgggttccctccttttagaaacgtaattagaagatgtatttcattttgtcagttaagacttcagtgtgtaatttcagtttgtagttaagacttcggttagacttgaaaacggtcctttccctttgcagggaaaggggacttcgaactcctactttctttaacaaggtgtttataaacgagaacttgaaggtgggaggcgggcctctgccttcaacgcgccgcatctgtta

SEQ ID NO: 30042 - DNA, 478 bp, Mus musculus
  source 1..478: mol_type = other DNA
cattgacactatgtcagtgaaattaacatacctttatgtcaatcctaaggagtaagtcttcacagcttacatttcctggccttcaaggctgaaattgagtaattgtatttaggtcaaaacacaaaaatcttgcattatcttaggtgatacttaaatcactaaataattgagattaatgtttatattaaattgtttcccataagaagagtgttgtaatagaaatataatatattacttcattagtagtttctcttcatttgggttttcttgaaatccaaatggattctgaagtgaatgaggcaccatttccaacttagcaaagtgtttgatcttttgcattataccatgcctgggtcatgttattcagctacataagcaactcctttgatggctagcttgcttgctaccagtatcatgatttccacaggagaaggtgccacttgttatgttgcaatttgtatgacatgtccattggaac

SEQ ID NO: 30043 - DNA, 225 bp, Mus musculus
  source 1..225: mol_type = other DNA
ttaaccagggataataatagggaatttcgttgaagctaatcagttctcattgctttgttttaacttgaattccaagaagaaagtatactgttgagattgaaaacaaaacaaaacaaaatctggtgtgacacatgtataacagcaacagttaaataaggagatggaatgaagatttaatttctttttctttttcttttccagaggccacaaaacagtcctgtgaag

SEQ ID NO: 30044 - DNA, 243 bp, Mus musculus
  source 1..243: mol_type = other DNA
ttctaaagtactaagtatgctaagtatggaataacaaagatattttattcccaaagcaacgttgaaaaaaattcgttcagcaagcattccttctggtggactgactactcagcgggccagctgtccagggcctctgccggggcagccccaaggggatgtggagggttgtttgattcccaccccccactcccctccttttccctccagatttggacaggaggtgcgagaggccggaaccccgcc

SEQ ID NO: 30045 - DNA, 422 bp, Mus musculus
  source 1..422: mol_type = other DNA
aaagatggtcttaatgatgcctatgtatatacactatataaaccagaagtttctacacagcaatgagacacatgattggacaaattagtcagttctctaaatatcacctattagactttatgttagttttttatggatgtgagtttacctcagcaaaaatcaatggtataatttgatacgactgggactattccaagtccgtgttaaaggtgagcaccccttcttctagaaatacagatatttgaggtttctacacatctaaaagcaggcaagcaagcaagcaagcaagcaagcaagcaagcaagcaagcaagcaagcaagcaacaaacaagtagcttgtgtaaaggggtaactaggcaacgcgttgccgtagtaactgcggacgccgcccccgggttctcgcgagagtcgcgacgccagtc

SEQ ID NO: 30046 - DNA, 125 bp, Mus musculus
  source 1..125: mol_type = other DNA
tagagtgagtcacttggaactgagaaaccaaacttgaattccaatctggatcaaactgcattcctggtcaatgaaaggctcgagctgagacttaaaatgtctcgagctgagatttaaaatcagct

SEQ ID NO: 30047 - DNA, 445 bp, Mus musculus
  source 1..445: mol_type = other DNA
tgtccttcacaaactctacatctggcagagaactaatatttaaattttataaacaagatgttaaacaccccaatttaacaatggggtaccaacacttaaaaaataatcataaggttcatcttatacccataagaatgcaaatttgtacaagcagcttggaaatcaatttggcagtttcccacagctacaccactcctgggtggagtggtatatcccgctcaacaatgttcatagcagctttatttatagtaaccagaaactgaaaacaatttagatgtttctcaactgaagaatggataaagaaaatttggtacatctatacaatgcaatgctattcagctattaagaacatcatgaattttgcagaagtagatggatcttgataatatcatcttgagtgagagtattttctcacttataagtggatattagccataaaatacag

SEQ ID NO: 30048 - DNA, 534 bp, Mus musculus
  source 1..534: mol_type = other DNA
cacgagagtgaagtgcacagtgtggtgttttcccacctgggggaaaatctgggttgtggatctgatcagcaataaactggttaaaatgaccaataaataaaatatttgttttaaaacaagctttgggtgaataatatatggaccatactatctcaaataaaaattataactttttgttcatttttctgtggacattgatttttagaacaaactgcaggaaaacgcggctactttttttttttttttaaatcaaacccaagctgaaaatctttctatatccgaaagcatacagtttcacagattctttgacaatgagtgtgctttatatattagtaataaccaacgactgcagatggcttaaatctaaaggcaagtccctggaactttcatctctgcatgcaagaatgcattagataaaattaacatctttctaatttttattgtgatttaaatgcaaataagtatcttgcatgtacagcctggtccgcggaagcagctgggggtttcgaccaagctgggctcccggctgccggc

SEQ ID NO: 30049 - DNA, 398 bp, Mus musculus
  source 1..398: mol_type = other DNA
gatttggctggtagaatacttctagcataaaggaggctctaaactcagttcagcaccatgaggatcgcaaactgagaagttcaaggtcacccttagcttcacagtttaagctaggttgaacgttttatattattttaaaagcacaccagaacttctaagatagttaaaaagtgaaattgaaacttagtatttagcggattcttgagaaaaagagaactttcttatataaagggtagtacttttattgtcatgggaaaagcttgtccagtaagctccggggagccccgcctctttgaaggcgtggcctgaggccccgccgctcagtttcccgctcaggaagtttgagcgcgctatacccgagggcgtggaaagccccgccctcaggccttgagggcgtg

SEQ ID NO: 30050 - DNA, 382 bp, Mus musculus
  source 1..382: mol_type = other DNA
acttctgacttgtaggaagaactcaaacaatgctgtaactgatttgtcaagtagagtctcgatcaatcatcaaagatgaatttgattatacacacagcagtgtgatatacaatcattcgtgttcgcatagaatttttaaactaattgagacattcacaataacaataagacaaaattataaattattagaagatacatctgatgaggtcatttaaaagacctttgtagaagatgtcactgtggagacaactctgagcagaaacattctgggtcaatttgtgtccatcagaacattacatttctaagctaaagtttggagctttcgtagtctatcccattaaaatgtttaacggacaagtcctactggcccttcaggtgacac

SEQ ID NO: 30051 - DNA, 728 bp, Mus musculus
  source 1..728: mol_type = other DNA
taaaaagctaagctttctatagaattgtacaattttaggctcctttatagaatttttaagttcttttttggaattgtattaaagaacattacaaaagaaaacataatcaaaaaattaattctaaacattaatgttaaaaatagggggcaggctgatttctgagttcgaagccagcctggttacagagtgagttcaaaaatagggctgtgtatacagcaagatatgtttattttgtgccaaaggtgtcacttttattaaaaagaagcagatgagctcaattttgctattcctatttttaataacttaagtcttgaaacctttactcttttacacatggtgatcttgatgtaaattccaggccattttataatgtggtatgaaaaacttcaaatgacggtcattttataggtaagggagaccatagcagaaggcttctctaatcctttctgacatcgtcagacagggtctccagccgccgcggccccacctcccgggacctcagcagcagcaccccagatgcgcgcgaaccgcgagtccccacgcccagatctgggttcggaaagaggaagcccgcggctacagatcccaggctccggagttagcagccgccccgcccagcggcgccttccaccctaggctgcagctcactggaggaggggcgggacctcggggtcacgtggggtcgacacgccctgcccactgcttcctgaaccgcggggtccggcctg

SEQ ID NO: 30052 - DNA, 299 bp, Mus musculus
  source 1..299: mol_type = other DNA
atcttttaacttgggtaaaagttatacaatgacgtcatgtccttataaatagaaattacttttaaatcctgagggcttcaatacagaaaacttaagttgggtgtcttgatatgccaggctagcttaggcaggagggagaacttttaaattttcctctagcccaagataaagtccttgctcttggggaaagaaaagttggtaagaaactacctatttagatagaaatatttaaccagctatttgctgatacttgaggggaagaacagacggtccctacctccactcgcgccttgagcggc

SEQ ID NO: 30053 - DNA, 426 bp, Mus musculus
  source 1..426: mol_type = other DNA
tggacgggaagggtccccccgcccccctttttaaaaaggtacgacttagaaaagaaactttctgttgcttcctcttagagagaaacttggtcctgtgagtttctctggaatctgtagagcgccgcgcggaacagggggtcacctctctcccagcttgaaacctggcaggtactgcctaggaggagccgccccgccccggggctgcaaaagggggtggtggccacttacactctggtgtgcacagacttttctgggggtaagccttaccaccccaggctctagtcccagacctggcccgtgacgtcacccggactctgggccaataggcgcgcggtcggcggcggctgcggcggcaggaggggcgggaggagtcggaccggaccctcctccccggcgcgcagggcctcgtggggggcgggaaggtac

SEQ ID NO: 30054 - DNA, 354 bp, Mus musculus
  source 1..354: mol_type = other DNA
tacagcagctttataaattccctcacatggtggctcataatcatctataatgagatctgatgttctcttctggcctgcaggcatacatgcaggcagtgaaggtttaatgagtttctccttatagctattatattatttggctaagaaagagctctctaccacaggtaaaccccctctggtttctatctgcttttcagttcatctgatgaatttcaattcttattgattgagtcttttaaatagtaactcaacctctggagggccactggtcctgccaagctgtcagctgcagaagaaccctgcaaagttccaagccaggctcatgactcagtgggggaagcagtgtttctccct

SEQ ID NO: 30055 - DNA, 489 bp, Mus musculus
  source 1..489: mol_type = other DNA
catggtggctcacaaccatctgttatgggatcgtgtctgaacacagctacagtgttctcacatatgtataaaataaatcttttttaaaaaaaaaattaaaggggcagcagttcaaggatgtgcactgcagccctcagtacaaaaggctgggattggttaacatgttcaccattatgttcacggtctggttaaatctgcgttaggaagacagaaagcaatgttttaatttcaaaagataaaaacaacacaaacatttggtgcggtacattgtaatttacaaaaataaatctcttgtaatataacagttgtagaactcacaaagtttgaaaaaataaaaaaacttttacaaagcgtgtaccgttgggttcggccacgcgcagcagacccctgctgctcagcggtcacctccggggttctgcggggcgcctggagcgcgctcgctccctagagggcagccgtgggcgtcgcaggacgcatgcgctcgggcgg

SEQ ID NO: 30056 - DNA, 448 bp, Mus musculus
  source 1..448: mol_type = other DNA
ttgtctcaaaaaaaaattaataataataattaattcaaaacaaacagaatgtgaacaataaattgttccttggaaccaactgggagctgataagttccttgctgaaggtaggtgaatcttacaagaaccatgcaacgattcatctttatctgctgctatataatgaaacgcctaaaatcattttgtttaatcattcattactccctccctgaagaagaagggatctgggacctggatggcttcccttcagctaacagacagccagatgtctgttgcagatcggtactgcgagggcccagacctgcagcctttctctacacagatgctctggagcatttaaaggatgcagacggctgcgggcggccgccaggagcggtccagctctgggaggaggcctagcgcgccgcgaaggcggggcctgggcggggcctgaggcgggaccacgcag

SEQ ID NO: 30057 - DNA, 398 bp, Mus musculus
  source 1..398: mol_type = other DNA
ctgtagaccaggctagcctgaaactcacagagagtcatatgtcaccaccacagtttgctttgggttaagagtaaacccaaactgagttcgaggccagctggtctacaaagtgaattccaggacagcctattctcacatatttaaatattaaatgtaactattttcggacgtgagaagaaaatctgatcagggcctctcaacattcagctctgcagaccggagctttggacactagcccagccccagaggcctgctcacgtacccaggtgcaggagctcccgggagacggcttttccaatgcctgtgcccccgccggtgaccacggcgccgctagccttgctaaagctagaccacgctgcgtggtcccgcctcaggccccgcccaggccccgccttcgc

SEQ ID NO: 30058 - DNA, 365 bp, Mus musculus
  source 1..365: mol_type = other DNA
cagggcaatttccttgcaaatgagtggtgaacactcacgggtaggaaattcttcccagaggctaaggtgttttaaccactttcctttttaaagatttatttatttatttaatatatgtgagtacactgtagctgtcttcagacacaccagaagagggcatcagaagttaagtgatttaccaggggacttttaactccagagtgccaatacaaattagcgaaagggattattatcaattgagtaatagcaattattattttttttttagttttaaaaatcatgtatgcacgcggctgcatgtgggtatgtgctttacttttttactattaaacttgttattttaaatttatttatttacttattgt

SEQ ID NO: 30059 - DNA, 373 bp, Mus musculus
  source 1..373: mol_type = other DNA
taggaaattcttcccagaggctaaggtgttttaaccactttcctttttaaagatttatttatttatttaatatatgtgagtacactgtagctgtcttcagacacaccagaagagggcatcagaagttaagtgatttaccaggggacttttaactccagagtgccaatacaaattagcgaaagggattattatcaattgagtaatagcaattattattttttttttagttttaaaaatcatgtatgcacgcggctgcatgtgggtatgtgctttacttttttactattaaacttgttattttaaatttatttatttacttattgtagagaattctgcgcatgctcagagcccatggcttccccgccttgcacgc

SEQ ID NO: 30060 - DNA, 245 bp, Mus musculus
  source 1..245: mol_type = other DNA
ctgtccacccgaattcctgcgtcaggcccccactggcatgacgcgcggggtctgggtgggagccaacgcagcagcggcttcacggccgctcgggtggactgagccaggggggcagcagtcgcggcggcgggtgctgagcaaccgcggaagccgatatatttatatacggttctggggagtctccaggaccaagctccgaggccgcccaagggggagcgggggcagagctgtcgacaggacctgac

SEQ ID NO: 30061 - DNA, 310 bp, Mus musculus
  source 1..310: mol_type = other DNA
tctgtattcagagatctatctctttgcaatgagctctgtttgaaaacagaatcgtttcaacctttccgtgtacgctgatgatagaagaatattatattcaaccattggaggacaatgctgttcctagttccgttttctcatttataaaatgaggataataaaaaaaaaagatataataataatcttatgatgcatcctctgggttcggattaacttaagttcctattaataaaaatttcaaatactcagcagcggctggggcttataagctttattgtctgacatgtctggagacacccctgacactgaa

SEQ ID NO: 30062 - DNA, 413 bp, Mus musculus
  source 1..413: mol_type = other DNA
ttgtttttactaacttgtcagaagaatctttattttcatgccatgtgaaatgtttatgataaaaatctttagtcatcttaaaaacgaaaaattaagaagtgtcagcaccttcctgccagaatgggacctctggatccagaggacatttagtagttagaagttaaatgtctcctggcttgtttttatcaaactttaaacaacaaaacccagaaggcatctggatggatgttcttgatgttcagtacatgtatgttgcataataggattccagacaggccgcagtctagcacttcctttataagcaaataacctctggactgtggccatcgggcactgggaggccctaggacagctttagccggctcaggggtttcccagcctcagctaaactcctgcgcttcagttctggtgag

SEQ ID NO: 30063 - DNA, 356 bp, Mus musculus
  source 1..356: mol_type = other DNA
ttcccactggaaatcttaaagtttaagaaaatcttaggagagagaagtgtttaaaaattctgagttcgaggccagcctggtctacagagtgagttccaggacagccagggctacacagagaaaccctgtttttagatttatttatttattatatgtaagtacactgcagctgtcttcagacactccagaagagaccatgtagaagagcagtctgcgctcttaatcgcatcgtgacggcctgggagcggatcctaggcgtttactatggccagcatctagcaccgagcagaacgcaaaaatcgcatctgctctgcagaggaggtcgcgtcacttccgctcgccggtctaaaaccgcg

SEQ ID NO: 30064 - DNA, 233 bp, Mus musculus
  source 1..233: mol_type = other DNA
caaatgagtcaataactaaggtcctgccaggctggagtgaaggctgggtgattcaattggaacaaaggaggcagccactcttttctatttgaaagcctagcgctagggcagaccagaaacacaccaggtttcattgcagggcagtcagttcacagccggccacgtgggaagtggggtgggcgagtgggcgtgtgcacaagcacgtgccctcacgcaagagtgcgggggggggc

SEQ ID NO: 30065 - DNA, 395 bp, Mus musculus
  source 1..395: mol_type = other DNA
ttccatttaaaaggacatttaaggtgtccatgagcactactcccaacaaagctggggagggggcttgaaagtgcacatagcacgctcacactcagagagagagagagagagagagagagattccctggtcatctatataggtgaaggaaaatgaccactggctttaacttaatccctctgccccttttaatgggggaggggtctacacgccagtgtccgggctagttgtcggaaaacagactcgcttccggtgaggaggagcgaaggggagcccccgtgtctagaaggcctctcttccccacccccccgtgtgagtttgcgctgcaaagctccttggcatccctcaaattgcagctacaactggctggcagccaggggccgtctatttaaaagcg

SEQ ID NO: 30066 - DNA, 383 bp, Mus musculus
  source 1..383: mol_type = other DNA
tcatgaagaccaagctgcacatctgctgctgcacacacaggatttctgtctttagactatataacatgatagacatatcctatgtaagcagtaaatttttgtgacctaaactttaaacagattttgcattccaggctcccaaaatgacaggtggcaacctttggagatatctgtcacatccttaaccctgtctctggtatcagaagtgtcaagactgggaaggaaacttcctattttttgcttatggaaatacatttgcttcctgagggtactgtatgaatatccacactcagtgactttcaagttccctacaggcaagaaacattgaagaggctgcttccttaatacttaggtacaatggctaaggccttaaatacatggac

SEQ ID NO: 30067 - DNA, 522 bp, Mus musculus
  source 1..522: mol_type = other DNA
tgattcttaacacttattaaatagctattatatattccaaagttgaaatctcataaggcttctttttttttaaaaaaaagttttttaaagatttattttatgcatatgagtacactgtcgctatcttcagggaagagcggttagttctaaccatactgattatttgtttatatgacttcttagatattaaacttgaggttgaagtacatggactacatttattaccttgctatattacagtgtggccattggttatatcagtgtcaaaagttctcaaattgtaccttggaaatattgaagcgagacattttaagaattcaatattttttcaagttcctgatcaagaactttctagaatcatgcttatctaaaatgccagaaaggcccaccgggggttttactaatcattcatataaagttcctatgtgaacactgatgagaggactcaaaagtatttgctttggctctcagcctttgtgacaaccctctctaggagagtccgtgtcacagactcttataaag

SEQ ID NO: 30068 - DNA, 355 bp, Mus musculus
  source 1..355: mol_type = other DNA
tctgacctttgggccttctctgtcagagggaggctctgcctgctctcccctcaagctgacctccagttcagcgtgcccaggtggcggctcctgcatcaccagggcttggggtggatggtgagtgtgttctcgacaccttccttcatccacctgtcctgaggaacctgggaaggggccctcaagggctgcagggcctggctctcccagtctctgaggcaacaaggtggtggcaatgacatccacctcagaacactgatccttgttctaattagcatagggctcgcctctgaggccatgggagcctgggtccaacatgctgcacagtggacacagtatgtctggctccacccgggca

SEQ ID NO: 30069 - DNA, 340 bp, Mus musculus
  source 1..340: mol_type = other DNA
ggcacagagctgactccaggcctccatttaccctgctgtctcgtggagtcaacaggagggtcacatgtgtccccaaaccttgcagaaaacaggccctggattcatcagggggtgacagtccagctcctgcccaggggccagactctgtttgggcatcttggcggcaccataagctttggctaagttgtggcttccagttgttcgaagcagcttggatacatagcagatgaaaccccaggggctatttatagcagggtggccctggggcttggagccaggcccagggcctgaggagagtcagggcctacagcttggtttagggttttgaaaaccaaacact

SEQ ID NO: 30070 - DNA, 442 bp, Mus musculus
  source 1..442: mol_type = other DNA
ggtggcttcctcaaagtcatctggcatgaggccagtgaaaacacaacaccggcaggggcttcctttcccggagacagaagcgctagtgggctcctttctgtcactggactgaaagtgacacgaaggggcaaacggccaccaagtgtctttctccgggatccagccctggtacccacttcccggggatggaaacgccgccaggctggcatgttctagaactacttttacgagctcgaggaactacttgtaagtagggctcagagcgatccccccggtgcagagccagatctccggggatcccgcccctcgccaggccccgcactcccactgcctggcagagcggtggcggaggcggaggcggactccgacggggcgggccgggggcgtcgcccttcttccccacgtcgcagacgcctggggccgagaggtcgctggggctggg

SEQ ID NO: 30071 - DNA, 452 bp, Mus musculus
  source 1..452: mol_type = other DNA
aagaagggcgacgcccccggcccgccccgtcggagtccgcctccgcctccgccaccgctctgccaggcagtgggagtgcggggcctggcgaggggcgggatccccggagatctggctctgcaccggggggatcgctctgagccctacttacaagtagttcctcgagctcgtaaaagtagttctagaacatgccagcctggcggcgtttccatccccgggaagtgggtaccagggctggatcccggagaaagacacttggtggccgtttgccccttcgtgtcactttcagtccagtgacagaaaggagcccactagcgcttctgtctccgggaaaggaagcccctgccggtgttgtgttttcactggcctcatgccagatgactttgaggaagccacctggccagggttggtccagcccccttcaggctgggctgagtcactccccaggcagg

SEQ ID NO: 30072 - DNA, 367 bp, Mus musculus
  source 1..367: mol_type = other DNA
ctctgatcaatatcaaacaaaatttttttttttattgcatggagaataattaaaattgttcctggacccggattcccccaataacaacgtggaatttattgcgtttttgtggtttctctgtatagccctggctgtcctggaactcacttaggcaaaggcgtgcgccaccacgccgggctctttagccccaaacaagcttcttaagggggcttctgtctggaatattcaggagcggggcggcgtgtggcgcatgcgcacgcatgccctctgcctgcctcctcaccgggacgcgcttgcgggcgagtgcacgcgcgaggtcgaagcggaaatggcgccgcggggccgcgcgtgcgggcggcgagcgccg

SEQ ID NO: 30073 - DNA, 325 bp, Mus musculus
  source 1..325: mol_type = other DNA
gaagctgggaccttaagctatccttaaggctctttcctctgcactgcggtgagtgtgaaacccctggggcgcgggagtctaaaggtttctttgactctctaagatcttgcagagagggcaggaaacggaatcttttaaaaccctgccccgtaggcgctccccgtcgggaattgtagttgtccgcgtagcgggccccggagaactactcctcccaggagaccctggaggcgcgcacgctcgcttgggctctcccgccacgccccggcctgtcgcccggccgggagtcacctacgcctacttcctcccgggaggaggggctcgagtt

SEQ ID NO: 30074 - DNA, 316 bp, Mus musculus
  source 1..316: mol_type = other DNA
tttgtaggataacaccgtttttattcccaggaatgtcatgtacttagatattattttgctaataacaattcaactgaagaagggatacctgcactgcccagcccaggcatctctagtcacctttgcagagtaggaaaggactccccagcaaagctctcttgctgaccctgagaggaaatccacatcttccttgttaaaaaggaggcatacttagaagccattcagaatcaccaggtgaacctgagcctggagccagagtcctataggacacctcccttgggggtgggacatttggtccagagggcctccaggactt

SEQ ID NO: 30075 - DNA, 364 bp, Mus musculus
  source 1..364: mol_type = other DNA
ctaggggaggcgtcagggaacccccacccagccaggccagaggccaggggtgagcgcctcttgtcccgtggcctcaggagcgtcagttctcacccgggtccggcgggcctggatccagctgctcagagtctccagaggcggggtgtcagcggccgctccgctctccgattcgcccagagtcagctctgcgcgacgacgcggaactcgagcccctcctcccgggaggaagtaggcgtaggtgactcccggccgggcgacaggccggggcgtggcgggagagcccaagcgagcgtgcgcgcctccagggtctcctgggaggagtagttctccggggcccgctacgcggacaactacaattcccgac

SEQ ID NO: 30076 - DNA, 372 bp, Mus musculus
  source 1..372: mol_type = other DNA
acctatattggtaggtaagttattttattattaacattcccaaaatatctggagtgctgttacttcccagtcacacatagtgagctgttagtgtaaacacaccatgaggtttgcaaaacagaaatttcaagcgcttagaattcttagtcaccacagacttttttgtgacttaaatttttttgtgacttaaatttttttttcacgaaataagaagttttaagaatgaattgatataaacatagcatagccatgtgatacaatattgtgcatcattgaaagggatgaaacccagctgggtctctcacatggaaagccagagcttgggctgaggccgggtgacaagtgctggagaccagcctgaggtacatagca

SEQ ID NO: 30077 - DNA, 470 bp, Mus musculus
  source 1..470: mol_type = other DNA
atgtgtttgtgagcacataacatatgcacatgtgtatacatgcaattttatttgtttgcctatagtgtaggttccaagcctgaatacagtgtatttgtgtggtctcaggcaccatagccctccacaacttgtgggagtgattttctctgaaacaatgccttcaatttagtgaatgaataaatgaatctagctggtaaataggagggcttgtctgtcctctcacaagacagagctccgcctccagacccaccagtagggggaggagcccctagggattcgcagcgcgtgccaggccgtagctggcgaggagccgggtctgaacgcgatgtagtgggcggagccaagtgccatcgcaccctagcgcgcaggtgctgggagccccgcctctccgcaccaggggccggggcggggccgtcgcctagcaacgccaagccccgcccccggtcccggcccccagcatggcttggcag

SEQ ID NO: 30078 - DNA, 467 bp, Mus musculus
  source 1..467: mol_type = other DNA
atgtgtttgtgagcacataacatatgcacatgtgtatacatgcaattttatttgtttgcctatagtgtaggttccaagcctgaatacagtgtatttgtgtggtctcaggcaccatagccctccacaacttgtgggagtgattttctctgaaacaatgccttcaatttagtgaatgaataaatgaatctagctggtaaataggagggcttgtctgtcctctcacaagacagagctccgcctccagacccaccagtagggggaggagcccctagggattcgcagcgcgtgccaggccgtagctggcgaggagccgggtctgaacgcgatgtagtgggcggagccaagtgccatcgcaccctagcgcgcaggtgctgggagccccgcctctccgcaccaggggccggggcggggccgtcgcctagcaacgccaagccccgcccccggtcccggcccccagcatggcttgg

SEQ ID NO: 30079 - DNA, 250 bp, Mus musculus
  source 1..250: mol_type = other DNA
ctacaggtcagagcacttgcctggtatgtgcaaggcttgaaataatacataagcttttaaaagtgacttaaagacttaaactcagcctgaagatttctctgtccgtcatatgtatccacttacctgttgatggacagctcagataattccagcttctgattattgcaaaaaacattgctgtaaacatcatgtggatggggtaaatacccaggagttcgttctgagtgagaccctcacagaccaccccctt

SEQ ID NO: 30080 - DNA, 444 bp, Mus musculus
  source 1..444: mol_type = other DNA
agtcacacatagtgagctgttagtgtaaacacaccatgaggtttgcaaaacagaaatttcaagcgcttagaattcttagtcaccacagacttttttgtgacttaaatttttttgtgacttaaatttttttttcacgaaataagaagttttaagaatgaattgatataaacatagcatagccatgtgatacaatattgtgcatcattgaaagggatgaaacccagctgggtctctcacatggaaagccagagcttgggctgaggccgggtgacaagtgctggagaccagcctgaggtacatagcattcatggaaagaagttatttttttccaaccactcacggttgaggtctggaggggaccccagcgctccctggaggtctcggggtgccgggcggctcctccccactggcggcggagagagacggggcggggcacggagcccc

SEQ ID NO: 30081 - DNA, 350 bp, Mus musculus
  source 1..350: mol_type = other DNA
gaggccagcctggtctacagagtgagttccaggacagccagggctacactatgcctacatcataggtgagtcacagaggcccctctgaaagttgcagcttattagaaacagtttctactgagtgcgaaggctttcccaccatccggcccaggagtcatgagtgactacttctttgtattattattattattattattattattattattattattattattattattattattatattttatatatttggtatccatggagtccaggagtgctgggattcaaacccaggccctctgaaggaagttgcttaagcttgggctgagccccaaagcttgacaattgccctttaa

SEQ ID NO: 30082 - DNA, 515 bp, Mus musculus
  source 1..515: mol_type = other DNA
ccaggcgatggcgccctcttacaattccacaatttgatgatactggccagcctgactctcccaaagagaggaagaagagaacttctgatctctcctccacacataaatataactttaaattttttaggggctggaagatctgacgcagagtgcactacaaatatgtggagtacatacataaacatatatatttttacaggccatacacataaaatatttcaattaaaaaagtggaggtggagccccgacgtcctcgggcactccccgactgggcgcctggggcgggcctcaagtcccggggctcggtggcccgcagcggcgggttacggctgtccgctctgccacgcagccgcagaaggcgacgccccctggatctccgcagcaacccggcccgcctcccagcccgccgggccccagaagtgatgaaagctgcggcggagtcccaggcgcgccgaagccgttgcccttttaaggggaagccttgaaacggcgcccgggttccatgtttgcatccg

SEQ ID NO: 30083 - DNA, 409 bp, Mus musculus
  source 1..409: mol_type = other DNA
tgctggggcagcgcggggcgcgggaccaggccttggcgctggcaaacaacgcgagaggccgcgcgccaggccaggagcgggggtccggctccgccacggtcggcgtgtggagacccccagaccttgcgactaggggcaggagcagctggactcagggcccggatctgcgagcgggagcaaccactcaccgctgccgttgccaggctgtgcatgtttggagcggccgccgcactcctcctcccgccggacgcaccggacccgcgtcccagcttcagcggctctgatgcccaaagtatgttctttgaaccttcagattttgcgcatgctcaagcggttgcgcgcgtcacggcgggggcggggccgcccggggacttgcgcgcttacgcgcacgcgcctggactggtttggc

SEQ ID NO: 30084 - DNA, 391 bp, Mus musculus
  source 1..391: mol_type = other DNA
ccttttcattcacaagaacgggtgctacattatttctgaacaaaacagcacctgcagtatcttgctgactatgagcacgcgcacgcgcgcgcgcacacacacacacacaccaggtccagggcagggaggcccttgtgcccactgtgcaggggtgccaggagccccacctgtctgtcccaagggaaccccaagtgtgaactctggccttgggtgctgagttccagctacaagaccccatctagggctggagggtggccagccctggtgggggttgcctacctgcaggtagagcccaggtcctagccggaagtgcaccccctgaagctgcagagccaagggcggttgctgggctctaggttcccagggacctgggcacctacttccccaagga

SEQ ID NO: 30085 - DNA, 432 bp, Mus musculus
  source 1..432: mol_type = other DNA
ggcgcgggaccaggccttggcgctggcaaacaacgcgagaggccgcgcgccaggccaggagcgggggtccggctccgccacggtcggcgtgtggagacccccagaccttgcgactaggggcaggagcagctggactcagggcccggatctgcgagcgggagcaaccactcaccgctgccgttgccaggctgtgcatgtttggagcggccgccgcactcctcctcccgccggacgcaccggacccgcgtcccagcttcagcggctctgatgcccaaagtatgttctttgaaccttcagattttgcgcatgctcaagcggttgcgcgcgtcacggcgggggcggggccgcccggggacttgcgcgcttacgcgcacgcgcctggactggtttggcggagagagaccggcctcgctctctggggctagtagagcc

SEQ ID NO: 30086 - DNA, 266 bp, Mus musculus
  source 1..266: mol_type = other DNA
ttctccagattttgatttaaaattggttcaagtcctggctagatatgggtagcaaccaaaggcacgttacactccctttcagcgagtaatgtccacctgtaaagacagcaggccttgcagggaccagctccggacaagcttgccggaagcacaaccggctctactagccccagagagcgaggccggtctctctccgccaaaccagtccaggcgcgtgcgcgtaagcgcgcaagtccccgggcggccccgcccccgccgtgacgcgc

SEQ ID NO: 30087 - DNA, 207 bp, Mus musculus
  source 1..207: mol_type = other DNA
cagcaggccttgcagccagctccggacaagcttgccggaagcacaaccggctctactagccccagagagcgaggccggtctctctccgccaaaccagtccaggcgcgtgcgcgtaagcgcgcaagtccccgggcggccccgcccccgccgtgacgcgcgcaaccgcttgagcatgcgcaaaatctgaaggttcaaagaacatacttt

SEQ ID NO: 30088 - DNA, 289 bp, Mus musculus
  source 1..289: mol_type = other DNA
atagagtaagcttgcttcatctctacccatacctttattatgtgtggccagaatgccagctaggctacatagcaagaatagattagctggcaaagtacttgcccactatacacaggccacagtggtgcacacctgagtctcagcactcaagcggtggaggcaggaggatctataaggtcatccatggttagtctgggccatttcacacgtgtgcacagatactgtccctctgcagccaggctcctcctccctagagactggacctaggagagcgctcacacctctcccc

SEQ ID NO: 30089 - DNA, 305 bp, Mus musculus
  source 1..305: mol_type = other DNA
atgattttaagataacctcctgcttaacaagccgaggcaagctgcctttttgccagaactgcttattagggtgcccactaaatatgtttgatctaggcttaagtctctggacttgagagagccttaaagttctaacattctaagggctatgacctctgagccctatttatatgaaggttaggaagtgagaaagctctcttccttctgtcattggcacttggtgttgacacttccaaactccgaggatcatataaagctatttggaagtacaagatcctaaatatatatatgtgtgtgtgtgtgtg

SEQ ID NO: 30090 - DNA, 398 bp, Mus musculus
  source 1..398: mol_type = other DNA
caaccctgcgtaggcacctcagttcccacgcgcctctgggcttggccttgagtcgatctgtaaagtggaggcggcggcgacgacagcttttatgcatcgtcacggttcgcggatacccgggcggggcccggagctgtgacgcgactgagacgcccgagtccagcagagatgcgcccgcgcccctctcaccggcgcgctccccgcagcacctcctcccgcgggctccacctccagggcccactcaagctggagctagagaaactcacctcctacccgtgggctggcgggagcgggactggagtggctcctcgggggcctttgatgtggccgcccccggcccaggcgcctctaggcagtccggggcgggactagcggcgctgcctcttcgtaggcccggc

SEQ ID NO: 30091 - DNA, 305 bp, Mus musculus
  source 1..305: mol_type = other DNA
aactatttcttgcaagtggtgaatggaccttcaggtggtgccttgctcccattgggtttagaattttttcaaattcaacccaattaagatgtgactaagcctaacttaagataaggggacaaaatggcaattatttccagatgacagccgtgacctccgctaaggctcggagctgtgatccagaattccaaagcacctttgcatggagagccgctgacgaagttccaggaacgtgggagagagaaatctgtcactccgccgccgggcctacgaagaggcagcgccgctagtcccgccccggactg

SEQ ID NO: 30092 - DNA, 324 bp, Mus musculus
  source 1..324: mol_type = other DNA
gtggtgccttgctcccattgggtttagaattttttcaaattcaacccaattaagatgtgactaagcctaacttaagataaggggacaaaatggcaattatttccagatgacagccgtgacctccgctaaggctcggagctgtgatccagaattccaaagcacctttgcatggagagccgctgacgaagttccaggaacgtgggagagagaaatctgtcactccgccgccgggcctacgaagaggcagcgccgctagtcccgccccggactgcctagaggcgcctgggccgggggcggccacatcaaaggcccccgaggagccac

SEQ ID NO: 30093 - DNA, 299 bp, Mus musculus
  source 1..299: mol_type = other DNA
gctgggatctgattccaagaagtcaaatttctgggcccgtttttactggacacgtgggtccaaatcccatttaaaagatcacacatctggctcataacatgggagaaagatacacgttatcaaccttgctttgttctattttagggtggaaagatgatcaggtcttgccactctggccccgagcagaaggctagactccctggaactgattagaagtttaaaggacaaagctctcagaggtgtgtgacagatgcgaacactttcacttctgtcggctagcaggccccacaaaggatcta

SEQ ID NO: 30094 - DNA, 314 bp, Mus musculus
  source 1..314: mol_type = other DNA
cctaatactaacagtataaggccttaggttttatacttcagcaattaatgaaaagcagtagctggtttggtcagcatcacatcaagctaattaaatatggagtgagcacatttttatcttatgtccaaaacccaaagtctttaaaggcttttggtttcttattaagaagcttttctgacaatagttattagtgctatcaggaagcccagctggcaaggccgcggtccgaagctgttgctagttcccggcaccagatccaggcagccagcagctgtcgacgcagacgccgccatgtcttctccggctcttggccg

SEQ ID NO: 30095 - DNA, 326 bp, Mus musculus
  source 1..326: mol_type = other DNA
ttcagcttttaaattgttaaaatttaacattttgtaaaataagccatactttataaatattgctgtgtcctgatctaaaattgataagctttcaaacatgttaagtattttgctactaagttcaaattgttgatctgaactcactctgcagaccaggctgtcctctccagctgactttatagttctctaaatttaatagatccagcgacatcagagagttaaagtgccttgagccacttcctcttacttgccgtgtcgacaagtttgcgcgtgcgcaaggctgcacaagggctgggattcggcgcgcttgcctcgggccctccccc

SEQ ID NO: 30096 - DNA, 263 bp, Mus musculus
  source 1..263: mol_type = other DNA
ttttaaaaatacaaatttaaaaacttatggtatgtgtatgcacacagtgaacttcccctctggaagactttttaaaaaattgttttatctacctctagctggaccacctgggcttgcgcaacaatccttaatgcctgcacctgttctcaaaagcagaaatgatactcttaaaaaaaaaaaatccctaataccgcaatttgttttgtttttgactgctgtcccaggtccacaatcgaggaggctgctaactccagagagctccc

SEQ ID NO: 30097 - DNA, 320 bp, Mus musculus
  source 1..320: mol_type = other DNA
ggcgacagatctcctcctcggaggccattgcaggtgctttgaattcctgagtgtccactcagagaaagccagagcagctggctcagcattccccatgactcaggccctagagccaggctgggttcccctctggcacagaggaccagcagagtgcccaccggtctaactcatcccacctaggctagggaagtttgcatggaggagaaagtgaaggaagccaacttttctccttaaaactttcagttcgaagatgagagttccgcagcgcccccaagctgcagtgcgggaacagctgcgggtagggcctgccgccagggacc

SEQ ID NO: 30098 - DNA, 458 bp, Mus musculus
  source 1..458: mol_type = other DNA
ctcctccccacgaggcctttgatctccccccgtggggagggggtcagggctctcccaccccttctgccctggccaagttgggggaggaacttgaggctccaacaagtgagacctgaccacagccagcgctgaccccaacatcggctggctgcggctgcaaggctagggagctagaacccaggcctcgggctcgttcccttgctgggaaagacgcgggagttggtaacgcctcctaagttcgtggctggcgatccagttggacagccgttttctctctttacagtcaacaaacccccctccatgccccaggtccagggatggcaggggacaggggcaggcgggcgggacccgcacccgtgagcgcgcggccccgccccagcacccgccctccgctgcgctctgcgcccgccgccccggggcgcacggctccctcccaagagtcccgccgcctgactgtc

SEQ ID NO: 30099 - DNA, 600 bp, Mus musculus
  source 1..600: mol_type = other DNA
cctaggtcacaaaagtcatttactagctaccggtgggctccattacttatttcatgaagggacagaagctgcctctcaaagcacctgtggaaggtcaccttgcaaagcagggaggaagccggaggctgccaaatcccctcggaggggctggcctctcccctccagacccgcaggtgtgtgctggggtgggttgggacactcccctgcagctgtgtctcagcttcagtgaagcacacggactcagtggcctcggggacgggagcatgccacctcctgtggtgacgtcacttggggtagaacctcccgagccaggacagtcactcactcttcaggcggtggggctgggccagacagtaccgcccccaccgcgcccgcctcgcacaccctcggaagcgcaggctcgcagcgcggcgctggggtggggggttgcgccccagaacttcggcctccagtccccagcccccttaccctctagaggcaccaggagttgtcgcaaggggcccttgggaaattccctggacccctgtgccaggaggtgcccggcgcccgctccccatccacccccccgagggcggtgcccgggggcgctgccccatggag

SEQ ID NO: 30100 - DNA, 355 bp, Mus musculus
  source 1..355: mol_type = other DNA
gctgtctactggttatctcaactaggaatcttgactggaagttgagccaaccatccatcacgcatgcaagggtgagatgaatgtgttgttgggacaaccaatcgactcattaggttgtctttaagacacacatccttccctctgccaaggagaaagggtgcatttgctcggtctgctcctccaccccaccctacccccgtccccaagggggggggggcgatgaagaatactgcggcttggacccagtgtatcacagtgtatcaaaacattcagacccatggtcttggaggaagagatgtcacctcacccccttttccccctttgggaaaaggtaagggggtggggctgacgctgc

SEQ ID NO: 30101 - DNA, 498 bp, Mus musculus
  source 1..498: mol_type = other DNA
gtgtgcaaactgaacccaccaggctgctgagtctatagagtgccttctaaatgacagctaaaagggcgaggagacctcctttggtgcctcggtggtccccgagagacttgtattcttaaaatccaggaaaaaaacaaaaaaacccatgctagcgctcccgggtgcttttcagtgtgcctggcggcgaggcctggtcttgacctcagtgccagagaaaacaggtcctgagggccttggcgcagcgtccttagagaaaagatcttcacctagagagttttgactttggaaagaactgtgctggccaggcttggctaaaccgtacgcttacggtcacgcctgagtgtcttgcccctaggctaggagtctctaccaggcttagaccagcgcagagtcagcctgggctccggcagacacgatgtgcgtgcgggctgggaccagatcggttgcagaccagagctggccaaagcctgccagctgactcagcttgcacaccccacc

SEQ ID NO: 30102 - DNA, 384 bp, Mus musculus
  source 1..384: mol_type = other DNA
ctgaggaggaatgggttcactgttcaggcagtaaaactctttaattgccgaagaatgaaccacagacaaaaaagaatttcttcatacattaacttttgtctctcttcaaacaagttaattttctttggtctcagaccaaaagatatctggtgccaaaggtgttctctttcggcagcagaaggagcacatttataaacatcatgatcatagggaatgaggctctgagtctagatcagtctacttcaagagattaggaatgactcccatttttgagcccaacagtaatctatgaaccatgtttaccttgtctgtggattgatgatcaaagctttaattcttagcacaaaaagaaaaacaaaaagaaacggactcattcgctttctc

SEQ ID NO: 30103 - DNA, 368 bp, Mus musculus
  source 1..368: mol_type = other DNA
atggtagatcctcccagacctggagaagagcagtaccagctcctggctgccaacttctttcactgcccaagaaattcaaatgcttcagctatggcctttctgtccaatgcctgtggggaaggtggatgtggcccacttgcaaaatgggctgcctttcctcctcttaagacttgagcagagagatttctgcctgtaaacaaggcttcttgaatgaactctagcattcaaatatttactctttccctgcatttaagatttaaataagtaactaaaatgtaaagatttcgtttcgaggttcgggccccgcccaccagggccctggctccgcccacacccaagaccccgccttcctgagtgtgttgtgtgtg

SEQ ID NO: 30104 - DNA, 334 bp, Mus musculus
  source 1..334: mol_type = other DNA
taattgcagtctctgcagagtccgtggcttctaacacttctgaagttctgtactgggcagtatagggtccccagctgtgcacgtaggcggttgtgcggtccggccactacccccctcttgcgtcctgggttgctcctgtccaggagatttgcgcctggtggggctcccaggagccgccgcgcggctgaggagcgcgcgggacagggctggctagccttggggccgcccgccggagggggaggaggctgtgctgcccttgctgcaggttcgctgtcgagcgcgcaggaggcagggacatggatagggtgcggtctgcgcgggtcccgagcccgga

SEQ ID NO: 30105 - DNA, 367 bp, Mus musculus
  source 1..367: mol_type = other DNA
cttcgagtgggaagatagcatcctgattgatcatccgatatcagatggtcagcttaactatacaagctgacaggttacatttagaaacatgtacatgtatatgttcatgtaataatgaaaaaatgtaatgataatctcaaaaataatagcctcggaaatataaagtaaataaatatactttgttcaatgtttttccataaagtgtcattatcggctggcaatgtagctgtcacatccacagcatcctatttatggggtgggaagtacctaactcaatctcctcagactgtaccctcatctccagagcctggtctagaagcagtggatataggatggaatttgcacaagagctgggcaaaggtgaaag

SEQ ID NO: 30106 - DNA, 469 bp, Mus musculus
  source 1..469: mol_type = other DNA
cacgtgacgtgccctaacagcccggatgggacgcccgcgcgtgcgcgttggccgctgtcgtgatcctgcacccacgaaggtcacctccgtgaggcactgcccagaggcagtgagtgggctttcaggcccccaggatcttgactacaatctgcttgggatcgggaagggcggtgccatccccattactaaagcagcttcaccaacttcgaaaagttgtttctcccaaaatctctcagccgcaaattgtgtggaaggagtgtttggaaataaaacatccaggcgctgttaattgctggagtaaccatacagaatacagtatgtattcgagtgttacagtttcaaacttcccaggaaacaactcgccgcgttgcccggtcccctgggaaccgtattacaattgcccccggtgctcatagctccggagacccggagctctcaggtcaggaggcacttcctgccgggcgcgcag

SEQ ID NO: 30107 - DNA, 491 bp, Mus musculus
  source 1..491: mol_type = other DNA
gcgcgcccggcaggaagtgcctcctgacctgagagctccgggtctccggagctatgagcaccgggggcaattgtaatacggttcccaggggaccgggcaacgcggcgagttgtttcctgggaagtttgaaactgtaacactcgaatacatactgtattctgtatggttactccagcaattaacagcgcctggatgttttatttccaaacactccttccacacaatttgcggctgagagattttgggagaaacaacttttcgaagttggtgaagctgctttagtaatggggatggcaccgcccttcccgatcccaagcagattgtagtcaagatcctgggggcctgaaagcccactcactgcctctgggcagtgcctcacggaggtgaccttcgtgggtgcaggatcacgacagcggccaacgcgcacgcgcgggcgtcccatccgggctgttagggcacgtcacgtggcatcgcgcttcatcacgtgacgc

SEQ ID NO: 30108 - DNA, 638 bp, Mus musculus
  source 1..638: mol_type = other DNA
aattttggaaaagaaacaattctcatttcaggcaattttcttaaaaaaaaaaaaaaaaaaaaatgccttaggaccttcctgtgcctcccctggatggggagccctctaagcctcacccagtcactgagcctggtgcaggatcaccgccccagacgctgacagccctccaagggagggagcacccggtcctcccgcccccgctctcccgcgcagcccggccccgcccgtggccgtcagaagaggccgttgagtgtggccgccgtgaccaggctgtgcagcggcttctcccaaaccagcagtcgctgtgcggccgccagcaccgcctcccagccgcggagccgcagccacagggacgtagcttcccactgcctcggctgcggccgcctcctcctccgcgtcgccagtggcctcacccatgccgaggctcagccccaggcccaggcccagccccgaggtgccacccgcgccggtgttaccgccaccgctgctcgccatcaccgcgccgcagccgctgcccgagcccgcgaggagccagggctgcgcggccgccgccgggggcgcgtcagacggaagggggcgcacgcagcgtcacgtgatgaagcgcgatgccacgtgacgtgccctaacagcccggatgg

SEQ ID NO: 30109 - DNA, 255 bp, Mus musculus
  source 1..255: mol_type = other DNA
gtttataggctagtgtttttcaagttgagacatactagaaatgtgttaccattccttctggagctcccctctgagtcagaagtcctaggacccaggcatctgtttaaaatagctatgccaggcagggcccagtatgaaacaggtagtccttgactctttgatatattttaattttatcatctagaattcgatatgtagaccatgctgatgtcgaactcacaaagattcgctgatttcaacgctcccgggcgtgac

SEQ ID NO: 30110 - DNA, 264 bp, Mus musculus
  source 1..264: mol_type = other DNA
cctctgagtcagaagtcctaggacccaggcatctgtttaaaatagctatgccaggcagggcccagtatgaaacaggtagtccttgactctttgatatattttaattttatcatctagaattcgatatgtagaccatgctgatgtcgaactcacaaagattcgctgatttcaacgctcccgggcgtgacccgcccaacgtgatgacgtcagagcgcgcgagccctcgggaggggctgcgggccggcggacgctcaggcttcgggg

SEQ ID NO: 30111 - DNA, 273 bp, Mus musculus
  source 1..273: mol_type = other DNA
ggaacaggatgaaaattctttattaccctctcttctatgtagtcctaccacctgcacagaggggctggcagggcagaagtgtgacctcagttatatatacatcccagctctgcccagtatccctcacttagcctagggctattgcatgctgggatcccccagttctgctcagctcagctgtgggaggtaaacttaccttaataaagaagggtcccccacgcagcagtttggggggggggttcgttctttagcactataatagaggtgtgacgg

SEQ ID NO: 30112 - DNA, 429 bp, Mus musculus
  source 1..429: mol_type = other DNA
gcgcccaggccagagcctccccaggagcttggctcaccaggctcaggccccgaatgagtggagcttccccagatcctactgccgcatcgccagccggtttggccattggtgaggacttcaggaggagaggcgaaggggacacactgccgcgcccgccagactggctgcgggtgacagtgaatgacagacggagggcctagagctccgggtctggcagagcccagcagaacagacccggcttctggaatcccctggatcccggttcctgcggtgacacgcgaggctggtaactggaatctccagacccaggcccaagctggccagggatgcccactgagccccaagtgagctcaggggagcggcgggcgggccgggggcgcgcagctatagagggcgcgcgcggccaggggagcgcgcgtgcgccggggc

SEQ ID NO: 30113 - DNA, 560 bp, Mus musculus
  source 1..560: mol_type = other DNA
gatttaatcctatgtagactccggatcccgcttgaataaccgacctggtcccagagggaggaggtgtgtgcctctggaaacacactcacctggtcagtgtagacccagggcccatggatctccccaggaagggcctgtgcccaggggcagcctggtgggctgggatgcctccccaatcccctgagcacagggcgccccagggtcgcccggccccaggccgggggctaggctcccaacagcggacaacccggcgcgcggccccggcgcacgcgcgctcccctggccgcgcgcgccctctatagctgcgcgcccccggcccgcccgccgctcccctgagctcacttggggctcagtgggcatccctggccagcttgggcctgggtctggagattccagttaccagcctcgcgtgtcaccgcaggaaccgggatccaggggattccagaagccgggtctgttctgctgggctctgccagacccggagctctaggccctccgtctgtcattcactgtcacccgcagccagtctggcgggcgcggcagtgtgtccccttcgcctc

SEQ ID NO: 30114 - DNA, 349 bp, Mus musculus
  source 1..349: mol_type = other DNA
ttaaaagcagtggtattaatgtaacgagatataaacaatagctagaaacctttatggtgacaatttatgggcctatgtggattcctaaattgggaaatcacgatgtaagtcttccagacttcacggaaccctgtgacgttcctggcgcccaggccagagcctccccaggagcttggctcaccaggctcaggccccgaatgagtggagcttccccagatcctactgccgcatcgccagccggtttggccattggtgaggacttcaggaggagaggcgaaggggacacactgccgcgcccgccagactggctgcgggtgacagtgaatgacagacggagggcctagagctc

SEQ ID NO: 30115 - DNA, 350 bp, Mus musculus
  source 1..350: mol_type = other DNA
attcaaaattaaatgagttgtctttcgtacaactttggaaacagccgtatatcaatgtgtgtcaataaacagaaataatagtattttctacggctggaagtggaaaattagacttctaagcctatgaactatgcagtttgtttcacatctcttgcctagacaggcagaatatattggaaagagcaggtttgttaaagcacagactctaattctagaggtctggggtaggacccgagattctgctggaactgattcgggttcagcacttcgagaagtaatattttcctgaaaagttgaggtggtctccgcccctttgcggattccctcccaggaatccaacacgtgacggg

SEQ ID NO: 30116 - DNA, 443 bp, Mus musculus
  source 1..443: mol_type = other DNA
tgagcataatgtgttcaattaatttcaagtcctcatgaggggtgacatgctttaaagaatatactatctcactgagtttctcagcgagacattataatcatctccttttaagcagaggaggccagagtctagaatccacttcttgacccgttcagctaaccggtcaggtggggtagactctaaggctaatctggacgaagaggtaacgctttgattccccgggagcagacacacagtgcgtggggatggtcttccttccagggagaggactccagcgctaagaaggctgagttctggcaccccaaagcctcaggccacgctgcgtcttaggcatggggtggcggcgcaggaggtgcggggctcgagcccacctctggccgagtccaccctccgtcgctcgggaacgagcaacaccgaccggtctccggcctgtgcgaagggcc

SEQ ID NO: 30117 - DNA, 370 bp, Mus musculus
  source 1..370: mol_type = other DNA
tccaatatattctgcctgtctaggcaagagatgtgaaacaaactgcatagttcataggcttagaagtctaattttccacttccagccgtagaaaatactattatttctgtttattgacacacattgatatacggctgtttccaaagttgtacgaaagacaactcatttaattttgaatcaggctagacccctgagagtgttaaggggtcagacctcttggcatctaaggcaagctagattgtagaaagccactttctaactccagcgcgcgggagctataagacctcctacctctgacattgggagacagaggtcctaggggcctcgggcagagcccactagtccctgcgtcttgacccttactgagggc

SEQ ID NO: 30118 - DNA, 309 bp, Mus musculus
  source 1..309: mol_type = other DNA
tttggatcccagtatccacaccaggagatctgatgccctcttctgacctccgtgggcaccggtatgcatagatacaacatacaaacacacattgcttttaaagtaaatcttgttttattttgcacttttaaaaagctcagtggttaagagcactgactgctcttccaaggcctacagtgtgtctgaagacagctacagtgtacttataataaataaataaatcttttttaaaaagtctttattaaaacaaacaaacaaaaactttgaatcctggagcctgcaaacataaatattcaaatatacagaaga

SEQ ID NO: 30119 - DNA, 352 bp, Mus musculus
  source 1..352: mol_type = other DNA
ttctggcagcatctactaagaaaacagtacactaatgtctaggaataaggttcccttttcctgagatctgaatccagaaatcattctgaggctaaatacgttgagtctactaatttcctcatcgcttaccttgtataatttacattctactgggggagatagatgatcatcaaataaatgttaatttgtggacctactcaggggagccagggcagcctcttttgaagacttagcactggagctaagctaggacaggggacccgcacctagcttgcggaccgcccctctgcgaatagccgacttcagcctcctaagtcccacctgggaacccgccccctcgtgtgaccggccg

SEQ ID NO: 30120 - DNA, 471 bp, Mus musculus
  source 1..471: mol_type = other DNA
ccatgaaaaccagcacctgggctcctcctgagggattttttttaggcctgtcctagcttcggtgggttctgtgctccaccgcagcaggtctctgaccagcgagtggcctggccggtgcagattggctgcgccgctcggctttgagggatagtctaccggatcggcaccctggggctcaggctctgtagttctaggtcctcggcctcctacaggtgtgggcgaaagcctaccaactcggccggggaccagcaggcggcggtctgctgtaagggggtctcgggcgaccagtcccagctgcccaacccgcccgagcccgggaggcgacgctgggaggtacatgacgcgggtgcattcgagacacgcaggggatacgcctaggtttcactcccctgggggatgtagtctttaaaccaccccgccccatggtgggcgggctgagcgcgcaggtcccgcctcctgcctataagagcg

SEQ ID NO: 30121 - DNA, 298 bp, Mus musculus
  source 1..298: mol_type = other DNA
cagctgaagcagcaaggctgatgttcggaccaggtatgtggatctggtcattacacattgcatacatccgtgtacatgtactgactgtcactgtgtacatttgtgtatgattgctttgtaccaactaagcgaaaagcaaatacttggcttcttcagacaagagtaagcaactagctcatcccttgctataatggaaccatggtaagagttcctgttctgggggctcttacgcgttggccgggtcgcctcaagaggggcaactagaccccgccttggaggtgggtggggagtggcagac

SEQ ID NO: 30122 - DNA, 441 bp, Mus musculus
  source 1..441: mol_type = other DNA
cgcttaccttgtataatttacattctactgggggagatagatgatcatcaaataaatgttaatttgtggacctactcaggggagccagggcagcctcttttgaagacttagcactggagctaagctaggacaggggacccgcacctagcttgcggaccgcccctctgcgaatagccgacttcagcctcctaagtcccacctgggaacccgccccctcgtgtgaccggccgagccggcccacgcatgcttgcgcacacaacccagcctggcgtgtcgtacgcagtggccgcgagccgggcagcgggtgctaggcggttcccctgcggggggcaggggcgggactcccggcagaggaggtgcggtcccagctgggttccccactcctgccgtgagatagccctgggcaccggcctggcctagtcactggccgcaggcgtggct

SEQ ID NO: 30123 - DNA, 241 bp, Mus musculus
  source 1..241: mol_type = other DNA
aggtgccaaggcctgaaatctgaatgcaaatctcccgccagatatctgagcaaagattttggcagctgcaacatggcacgggacaagtggcagtgtgccaggtacttagttatcgaaatagatctatttcccataaccagtcatcaggctgagtgctcactcttccaagcagctgcaggggcagagcctgcttgcagaggagggctctgcagatctcttgtcgcgtctctagcgctagagg

SEQ ID NO: 30124 - DNA, 396 bp, Mus musculus
  source 1..396: mol_type = other DNA
ggcagctgttgctgctagggagacggctggcttgacatgcatctcctgacaaaacacaaacccgtggtgtgagtggggtcagaagattctggaaactatcttgctggctattgaggctcagagttaaaacccaggtatcagtgatatgcatgtgccccggccagggtcagagactcttttgaaaggatggtagagacctgtccgggctttgcccacaggctttccccaggaaaaaaaggggccggccgggggtctcctgtcagctccttgaaacccagcaggcctgcctgtcttctgtcaggggcgcaggcctcttgcgggggagctggcctccccgccccctcgcctgtggccgcccttttcctggcaggacagagggatcctgcagctgtcagg

SEQ ID NO: 30125 - DNA, 396 bp, Mus musculus
  source 1..396: mol_type = other DNA
cgcagcggcttcgaggccaggggcggggcctgccaaggaagcccggacggcgggacgcggcctgactggcacagagcagtcagcgtgttccgaccgaggcctgacaggggcggagctcgcggagcagcgggggcggggcgaggccgagtcccggtgcggcctgacgagaggcggagcccacagctcggcgaaggcgaggcctgagggcgggccggagtccggctcctggagcgcgcctccacttcggctcggtggcaggccgcgcgccctttcggagctaagcttaaggcggcgctgacacgggcgtactccggtttcaaagtaaaactgaaaccctccgaggtgctgaccttcccggagccggaaggcgcgccggctagtggcctttccagcttt

SEQ ID NO: 30126 - DNA, 335 bp, Mus musculus
  source 1..335: mol_type = other DNA
gtctctgcccacacagacccctttcagcgatgtgccggggacccagcgcctggagcttcgggatgacagggccttcagcacccccacgggtgagctttctgagtgctccaagagcaagcaccctggtgggtacctccctggacacaccccgacaggcacctcagaggagcgcaggaagcgggcagcgggggtggcacccgccccctcccaggcagcccacagacaaccggggccgggccacggcacctgggggtggagccgctggtgcggccagtgacgcagcgcgttcagtctgtacagaggacgggcgctctcgatccacgtgtaaagcagct

SEQ ID NO: 30127 - DNA, 196 bp, Mus musculus
  source 1..196: mol_type = other DNA
ccttcagagtgagcacagctgagacatgtgtgtgtatccaagcaacttccctttctataggtgaaggcaaattgagaaatccaccagaactccaggctttgggtcttggtgcttaggagaggccattggtccctaagcccaggggtaattcgactcccccagagaggagccacatggagtccaaatccgggggcgg

SEQ ID NO: 30128 - DNA, 525 bp, Mus musculus
  source 1..525: mol_type = other DNA
tgatctgcccttcagaaggggcccatcaggtgcaacctgcatcgcatggcctgggcagctgtctcttgagcactgcctcacaggaggcctggccccgctcattctgggcgctgcagctgtacacgccggcgtcctgagccccgcagctccgcagccacaggcagctgggctctggggccggtggaggcaggagctgcccatcccggaaccagctgaggctaggctggggtgtcccgccgcgttcttcaggggccgcaggaagaccggcgccccggccccatccccggtgacgaggacccctctgccggcccccaccttggctctcttcgggggcaccccggggctaggaggtgccctcgtgccggcgtcctcgcctcgcgtgccccgggcctatggggccggcggccggccttcctgctgcccgcccgctttcggcctgtgcagaaggtcaccagggcggccgcccccggatttggactccatgtggctcctctctgggggagtcgaattacccctgggcttagg

SEQ ID NO: 30129 - DNA, 452 bp, Mus musculus
  source 1..452: mol_type = other DNA
gactgccagcctgaaagtgggctgtccactggcagtgctggggaacttccctacccactgggtgcaaacggaagctggggaggagcgaccattggggaggagcggcccacacttccctagctttgagccctggtgggctgacaggcctgtgtcctgaagtacctgctctcctgaacttgtctagggcaggacctgggagtctgcatcaagccctgacagttcgggcaaagcatggcgcttgctgtgctgtatgggtcaacacttctggcccaggcaaggccgcagtgcagtgccaccccttagacccctctgaggaccggggtccccacacctgtagtctaggcgctactgatgggttcagctcttgtcagtgtcccaagctgtaagagctagctgtctcagcaggcaccaccttcccagccagcgcctgcctgctgcccagcctcttgctg

SEQ ID NO: 30130 - DNA, 293 bp, Mus musculus
  source 1..293: mol_type = other DNA
gggtgtagagacaggacatggcccaaggcttcctcaggtggacatggcttgacatcagaccttttacccaggtgtggtgggctctttacagtgtacttagatataatctaaaaaacaaaaataaaacaaaattgctttccttatttcttcagtgtcaaatttctcagctggacaaattttggaactaggctcagcccccaggctgttccaaagctaagcttaggttgttggagagagaacgttttcaaaactacaattcccagcagcccccgcgaaagagctctcgcgggttg

SEQ ID NO: 30131 - DNA, 391 bp, Mus musculus
  source 1..391: mol_type = other DNA
ccctccaagatagcagcctgcaaggcaaccctcaggacattctgggcactgatttccttaccccaagccttgtcatagcaagggatttggccaggcagggtggcctctgcttcagtcacaagaatgactggggtccctcctcacaaggagttgctggaagctgctttgacccgagactaggctatccgtggcccccacgcttgactaaagcgagagagtttcagaagcacccctgatcctggaatctccatcctgggctggggtagggtggggcttttccctccctggcctggctcctgcctcccgtgccagtgtcctgaattattaagcacggggtgggctccagagcacatgctgagcggagcggctggggctgcgcggcgtggcggag

SEQ ID NO: 30132 - DNA, 327 bp, Mus musculus
  source 1..327: mol_type = other DNA
cccatccattgctgggggccccaaggcatctagtcaccttggccaggacgagctcccggacaagttcgggtccctggcagctgtccacatcccgtagggatgacagggaacccacaccagatgtctgtgcttatctcccactcccgccaagaatgtgggggaaggggctgtgcatcaggtaccacaggtgcctgttgaccagtcatgtcagaaggggtggtcccgcctgctctatacttagcctggaggagccagtctgagctcccagctgttttgggattggcagctgcaggcgacaaagtcacccaagccaggcccgcagttggg

SEQ ID NO: 30133 - DNA, 660 bp, Mus musculus
  source 1..660: mol_type = other DNA
gctcaatttggaattgtccaagatctaccaggagccggggttgtaggacaccagaggctctgactgactggggtccgggcaaagtctggctgggccggagagacgggtctctgtgcgacggcgtcgtcgccccacctccgacaccctgcagctccacagactcgcgcccggctcggggaagggaaaggagcaggagctcgggctgtcccggagccgcggccccatgccctgagcccgctggcggcctttggtgctgatggacagctccggccgtcactcagggtgcaccatcctggcaggggcgggctgcttctgacgtcatccgggaccaaccacgcaggggggagacaggggactccgcccccggcgtctgcctctccggcgctgaggagggggcacttccgggggtccttcccctttaccgctagctgacggctagaccccacctcgggggcggggccctgtcggtgacacgtcggacagcggccgccttggaggcccgggcgcgcagtgctgctctaagggcggccgacccgcccggggattccgggcttgagctcctacctctgctcggcggggagggagcgggcccgcctgctgggcctgggccctccggatccgccccctcggtcccgccccctcggagccgcctcgggctac

SEQ ID NO: 30134 - DNA, 830 bp, Mus musculus
  source 1..830: mol_type = other DNA
ggatccaccctctgtctccctgcaagcagggtcataggaagtaatcgaggcccaaggacttcctggccggccggccccttccttccggagcctgacccggcctctggcggcctccctagcgcgcgcatcctggctggtgcctgcgggggggggggcctggcctggctgcgcgggatggtggagctctcaccggtgcctgcgccggccccgggcctctcgcgctcggatccgggctgcaccgagttgggccggcgcgccgcgttggtgttgccgcgcggcggcagctcagagtctccgggttggggcggcccgggtccgcaaggctcctccacccaggtgacgctgagcaggctcagggtgaagcgagagatgcccacggccacgggccccgcgggccgcagcacggacagcagcagcgacgcccgcatggcgtcccgacagcgggtccccggcccccgcgtagcccgaggcggctccgagggggcgggaccgagggggcggatccggagggcccaggcccagcaggcgggcccgctccctccccgccgagcagaggtaggagctcaagcccggaatccccgggcgggtcggccgcccttagagcagcactgcgcgcccgggcctccaaggcggccgctgtccgacgtgtcaccgacagggccccgcccccgaggtggggtctagccgtcagctagcggtaaaggggaaggacccccggaagtgccccctcctcagcgccggagaggcagacgccgggggcggagtcccctgtctcccccctgcgtggttggtcccggatgacgtcagaagcagcccgcccctgccaggat

SEQ ID NO: 30135 - DNA, 408 bp, Mus musculus
  source 1..408: mol_type = other DNA
ctcgcctgggcgcgcgggaaggccgggagccgagaccagggcgtggcggagcgggcgccgggaccggtgggactcctgtgaccgccctggccgcagccctgctacgcggcaattcccgggccgggagcccagagctcagggggctgtccttccagcgaggggccctacagcctagactgcccgcggccgggcttcctgcccaactgcgggcctggcttgggtgactttgtcgcctgcagctgccaatcccaaaacagctgggagctcagactggctcctccaggctaagtatagagcaggcgggaccaccccttctgacatgactggtcaacaggcacctgtggtacctgatgcacagccccttcccccacattcttggcgggagtgggagataagcacagacatctg

SEQ ID NO: 30136 - DNA, 386 bp, Mus musculus
  source 1..386: mol_type = other DNA
tttctgttttcataatgtagaccagatccagggctagaaaactcaacagtcttgcttttgttaattattgatatattttattttcaaatttaggaaaaccacttttagttaggtgtactgagctgtaaatacagttaaaaaaaaacaaatacaggttcaggtcattaccagtgactaatttttggcagccctggctagcctggaactgcttccagagctctgaaatcagagaccagggaatccctgccagccttagcctccttctaatagcaggtttctctctctgccgaaggggccacccagagccgagctagacctggggccccgttaggggcccagggcgtggcttccggtagcgaaggcatgctttccggtaggtgccttcc

SEQ ID NO: 30137 - DNA, 266 bp, Mus musculus
  source 1..266: mol_type = other DNA
ctgtagaccaggctggcctcgaacggctctcagccttttaagcgatggaattaaagccgggtagctgcttcaagcaatccccagggctctgtgtgtacactcttcccttgggtagggctgagatagagcagcttctactttgtacacttttatgagcctctctgaccttggaaagtgagataggtcctccaaatggtgggtggcgcccagcgccagaagccagcctttctggagaggcttggtctcctccagggccgtgcacccgc

SEQ ID NO: 30138 - DNA, 420 bp, Mus musculus
  source 1..420: mol_type = other DNA
gcccagggctctgtgtgtacactcttcccttgggtagggctgagatagagcagcttctactttgtacacttttatgagcctctctgaccttggaaagtgagataggtcctccaaatggtgggtggcgcccagcgccagaagccagcctttctggagaggcttggtctcctccagggccgtgcacccgcccctcctcccccccccccgcaatgcgtggggcgcctggagaggggtcttgcgggcaggtgggatcctgcggggacccgagcgcggggcccacgctggcctggtcggggtaagtcagggctcccattgtgcggccgggcggcggcgggctggcacagccgagcgctaggaggtggagccgtggactgcaggctccggcgcctgcgtccgcctggccgggctctgcgcggcgag

SEQ ID NO: 30139 - DNA, 308 bp, Mus musculus
  source 1..308: mol_type = other DNA
gctggtgctcccacaacctggggggaagccctcagagctggcctgcaggtccgggtgcccttggaggagccccctctgggtccagccccggcctgggacccctagccgcagtgtgggtagcctggggacccctagcaccccagcctcagtgtcatcctgtgctggacgctgtgctgggccaccatgccatgttaagtcacctgtcaggggagatgtaggggagatgcgcctgaggtctctctcagtgaccttcatgcactggttttagatctcacgctagaataaggtgtgaactccttgtgggggaa

SEQ ID NO: 30140 - DNA, 426 bp, Mus musculus
  source 1..426: mol_type = other DNA
gggagactgtccccatcagtaccggggacggcagtccaggaatggctagaagtggttccagggacactccctggaaagcacagtgagttcccggtagccgatgtgaacacccggacctggccagggatcacttccagggtggctgcgtgcagcagagagcgcccgaccttagctggggtggacagcctacacctccggacttggggccgggcggggaatgccaacgttttctggccttccccaccgccaagggatcgatccccaaggatcgagacaaggtctggggcctctcgtgggggcacagacccatcactgctgggaagccagcctcgggagaccttgagccctgcggaggctggagggggcgggacctcgggggtcagtcacgagctctggactggcgggtgtacgtcacgggccggtccc

SEQ ID NO: 30141 - DNA, 274 bp, Mus musculus
  source 1..274: mol_type = other DNA
agtttagtctgaatgccataataaagatgcaagtgcatcggggatgaatgtgtacgtggagatttaaagtccccgcttctcatggcttccccattgcttgcaacttggagcccaggggaggccaagaaagacaaaaggacggactcttcctgagagatgcctttctgggaggctcacatagggagccgcgagccttttctcttgagaaagggacacagagctagtccccctctgggtcggcggaggcctggggtgggaagagaaagtagcttct

SEQ ID NO: 30142 - DNA, 247 bp, Mus musculus
  source 1..247: mol_type = other DNA
atcaattgcataggctaagtagcttattcgacgtactgtccctcagagttattctaaggagcaaatctgctcgtgcactttttaggctgttaacagaccttgccattagtatttgcatatggaagtccctagggttctcactcttgcctgtcaaaatagagattttccaaactttttggttatcgcaacagaactatgttaacccaagagcggagcgtcgggtccttcactctagggtcgctgaggc

SEQ ID NO: 30143 - DNA, 381 bp, Mus musculus
  source 1..381: mol_type = other DNA
gcgcaactccctgcaatgaggtacagaggtcatcttaggatctcagagacccgaaagctcaggaaaaaccatctgcaggacgtttcctttccctttgggtctaaagtcttcccaagcacacacacacacacaaggagagagaaagagatttctatttttccataaaatttcaggaagtttagaaatcactgagaattctccctaggaaccagactccctgggaataccttgaactccagatttgaaaggcttccgtcatgcacgtggacccgtccacggacacctgggcttgcccgcgtgtagggcgggcgctaggacccgggtggcgcacctgttggctggcaccgcgccccgcccgtcctgcgctgggagcatcgggct

SEQ ID NO: 30144 - DNA, 246 bp, Mus musculus
  source 1..246: mol_type = other DNA
ctcaactgttaaaatgcttgagcgtgaaaaatctgaatctgatgtccagaattcaggtaaaaaggtaataccagagcccagagcttttgggagcttttgagaaacatatctgaggttcacataatagggtttgtaattgtatactattcagttcattttctcacaagataatttgtcgtgcactcgcatacgcacacacaggccctagcgattgggcaggcaggctgacctctcccacgtccggcc

SEQ ID NO: 30145 - DNA, 451 bp, Mus musculus
  source 1..451: mol_type = other DNA
aggtttttaaaaaataaccagcgaatgacttcagaaggagtagtttgcttcaagggcgcatagcaacaccaggccagcagggggtgagtgtatacaggcaaagacttgtatttctgaatttccaaattctgagattgttatgtaaacgtcttttaaaatatgtacagaagccgccagatttatttacaaccaataggtatttttgtaattatacagataaatgttgatcttgccaggtttttcttgtacactgaaaatattggtgcacctagaaatttatttttttatttgttatttctttttttaaaaaagatagctgcctaagattaataactggatctcgcacagagacttcgctgtaagtaagtgacattttcaattgttctgaaagatattttttaaaaagtcataatagaggatgtcacgtgacctgaacatttcaggggagagt

SEQ ID NO: 30146 - DNA, 580 bp, Mus musculus
  source 1..580: mol_type = other DNA
aatgcctatatcctgatgtagtgtcaacacacacagtcataaagattcataaagctttttttttttttttttttccagggtttctctgtatatccctggctgtcctggaactcactttgtagaccaggctggcctcgaactcagaaatccgcctgcctctggctggctgataaaagattatttttgagtaaagtttcatcctttgcaaacatgaaatgtgggtatgcgagaaataatacagggcatgctttgagctttaagatttgctagaaatccgtgttcaaactaggataacgggggaaaaaaaaaaacaagcaggttatttcttcgtttatattgcgggggcaccctggacgcctcaggtcttcccgccctgagctcccctctgcagctgctgtagctgcgggtccgtcccgccgcaggcaatccccgccctgcgagggccccagtcgggtccagccgtcggcggctccgcagaaaggccggcatttgataggccgagccccgcacgcgccaccgcccgcgggccaatgggcggcggtctctttgcatatgcaacgagcgccagcccggggtgcgc

SEQ ID NO: 30147 - DNA, 735 bp, Mus musculus
  source 1..735: mol_type = other DNA
aagatttgctagaaatccgtgttcaaactaggataacgggggaaaaaaaaaaacaagcaggttatttcttcgtttatattgcgggggcaccctggacgcctcaggtcttcccgccctgagctcccctctgcagctgctgtagctgcgggtccgtcccgccgcaggcaatccccgccctgcgagggccccagtcgggtccagccgtcggcggctccgcagaaaggccggcatttgataggccgagccccgcacgcgccaccgcccgcgggccaatgggcggcggtctctttgcatatgcaacgagcgccagcccggggtgcgcgtccaggactgcggctcaacagacgctgctcagccggcgcccgggaaacgtcgctgcggttgtggccgcggtcgcgggctcggacgaggaggcggcggcagagcgggaggctgagccggcagcaggcggtcgtccccgtctcgcagggcggccccagcagctgcgtcagggtcctgaggaggtggcgctgggcaggagccgctctgaggagcagccaggcctgcgtgggtcggagcccgcggtgagtgcgcgcagcgcccgttgtgaggcgatgagggtcgcgggatggcggccaggcctccctcctcccactcggcgagcgtgcatgccgctcgccggtgcctgaggggactcctgggccgcggggtgcgggcgtcctcgcggattcggggaaaccgccggcgtggagctgc

SEQ ID NO: 30148 - DNA, 256 bp, Mus musculus
  source 1..256: mol_type = other DNA
cataaagttcttagaactctgtttgctgagcagagttttactgcagcaatacaaattcactcaattagtggaagaacgtaacacggaagcaattgtttctttttttttctttttaaaatattttttattaggtattttggggcataacctataactcagtcagtgagagtgagctgggttggtcggtccgggacagggagctcctactctcttcacagctgcagagttcagagagttgaactgcagcgctttgagt

SEQ ID NO: 30149 - DNA, 213 bp, Mus musculus
  source 1..213: mol_type = other DNA
attccggcttaaaactcccctaattgtttagccaataccaagtggtctaaaatgatgtaattatattttaatttaaataacaaaacagtctagtaccttaatgtaatagaaaactttaaatgttcttgaattgcaattttggtaaaaagcaaaacaaaactaaacatttttcaggcgcggtcagcgcagaaggtgcgcgcgcaggcactgccc

SEQ ID NO: 30150 - DNA, 485 bp, Mus musculus
  source 1..485: mol_type = other DNA
ttatgttccttggatggttctcattcattgaagttagtcacctcaacttactcaaccaaaacctagaagtatttctgtggatgccaagagggctctaggcatatgaacttcctggtagtctcattttgaacactgtgctgaaagaattggagttgattctcattaaaaaaaaaattaagcatctcaccttttttgctcaaactaaacagttttaaaacagtggagtcatgatatgaaatacgatctatcatatttgcaatgttctgttcaattgtggctgcaccaggaaatgagaacgtatttctttataggcacaaataaaaagatagtcattatctgtaaaattcttacaattagtcatgtctatctgacagattgcatgcaacgctttaaaaaaatatctaaagtgattgttttctctcggctgagccggtgacgtcagcgtggaatgcggagtcaggcgcccaggctctctataagccgag

SEQ ID NO: 30151 - DNA, 480 bp, Mus musculus
  source 1..480: mol_type = other DNA
cttgtaaatgtaattgaagaaggcacaaagaccctggagtcttgcaggggaattgtttcccttgtataagaaccatacaggtgcctctcaagcttcaggtcttttactcatattttgttaggaaagcttcaaacgttgatacagatttttaaaaaaaaaacttgtaatttcactgttaatatttttatgttcccctgtgggaggagtagttgttttaaaatacaaactttaattttggttaagttaaacacacttctgaatgaagccttaaactttgaaaacatttcaatgtaaacaagaaatgtttttcttgtgaaaatttaagtgttttatttagaactttaaaaactagtttttgttctgctttaatgagaaataaacacaagcgtcaagcaactgtttctcaacaatttctgcacccatacttacagaatgggcagaaagagcgcacgcgcaggcaccagtttccggggaaccgcg

SEQ ID NO: 30152 - DNA, 301 bp, Mus musculus
  source 1..301: mol_type = other DNA
gaattcacctgcagttggacaagtgagagccatttggcatccttttacaatctcctgaacagaaaagtgtcccattgtggtagtttgcacaatgttaacaatcatagagtagaattatgcacaggctatgatggatgatggtaccagtcgcagctcccagggggagctgcttataactgtgcggcttcaccaagtactacgggtctgcggcagtgctcgcgagcttacggcggcgtggagcacacgcggctgggttgccctaagcaaccggcgcgtccccgcccggcggtcagctgatggg

SEQ ID NO: 30153 - DNA, 429 bp, Mus musculus
  source 1..429: mol_type = other DNA
acacacacacacactcacacacacgggtgggggagtgtctgtcatggacacagctgtgtcagtgagatctggttcaaaacacctggatcttcggagctctgatgcttgtcatgtgcctaggaatgggcacctggaggacctgttctagacctccacgccagacgacgcgtcttgcgtctcaggggcacagctcatccggacgatccacgtgcagctcgaccgggggttggcgccgcacctcgagcccggcgcgtctggccggagctttctggggacccgaaccccccaacccccgcgagagggcggcatctggcgaccgcgggtcgggcaggggggcgtcctaaagtcccctgcggtgcagagacgttgcggccggctgccacacaaaggcggcggcgggagggcgggggcggcggcggcgataaagcc

SEQ ID NO: 30154 - DNA, 378 bp, Mus musculus
  source 1..378: mol_type = other DNA
ctgtctcagcctcctgaatcctgggaggtgattacatcaacggtggggtatccttctatttaaggttctacagcctggtcaacaggaagttgacatggcagcttttcctcatcataagagaaaagaattcaaagacctcagccacttcactgtgtgagtttggcaaagttacttaaactggggaataattactctaaatttatttagacaaaatatctcttctttgtgacttagtataaaattatgttgttttaaagaacacattctattcatggcaggccactgtaaacatgtggtccaccaaatgaatgtaagaaccacccactgggcgtgggtctcataggtttttaggtcaaaccaaaaccctgtctgctcaga

SEQ ID NO: 30155 - DNA, 334 bp, Mus musculus
  source 1..334: mol_type = other DNA
cctacagcaaacttaatttcacagtgcttttggttttaatgaaatggtcgtatgtttaacacaatattgtagtatattaggcatttgttttatttcggcacaaacaaaaaccgggttttaacctggatcctccagaaggtatcaactaatgaacaaacccaggagcttgtacagtgtaattgaaagcacaaaccctgctttcaagtttctggctgggctagttctaggacgtagaacggggttgaaaacgcagcctacgtgccgaccgcgcgcccgccccgatctcgcgagatctgacgtgcccgccgcgccggatctcgtctcgctgaggcgg

SEQ ID NO: 30156 - DNA, 569 bp, Mus musculus
  source 1..569: mol_type = other DNA
cagaaaatttactctttccctgaattcaaggtgaatgatgttgtacgttaaaaatttccaggttttttttttttgtaattccaaataattaagcagaaatatgaaacctaagaaatacagtctttcttctctcttcttttagaaaaggccatgggaatcattgaccatgagtgtctggggttaatgatacacagacaccacaggaaaaacctcactggtttgtctttattcctacatgatggaagaagagtgttctctgactatatttgttttcaatcacagactgaatgaatggaaaatgtttagttattctacaggcatcaagagtcagtctagagatctgaatttataatacaggctaacgtctcgatatctggaagtgttcctgtcagtcatctttcctccttgaacaatgaccttaaactgagcaagctgagtagagtaatagggccatttttcctagagaacatctaaaacctagaaaagttttaaaccaatctgctcatgtgctgtttctcttttatgagatacagttggctcttgaattagattatgacatcacagagctc

SEQ ID NO: 30157 - DNA, 271 bp, Mus musculus
  source 1..271: mol_type = other DNA
aatgtttttaagaattttagaatactttaatcaacactagattttaattcaaattagtatgcaaagttaagaaccatcctatatggtcttatttacaagagcagtaaccctctatgagcatcggattgagaatcagcccggcatcagtaccgagtcgcgggtgggcggcgcgggtggagccacccccacgcgcgtcccgctgcagatgcgccctagccaggcagagttggccgcgccgcccgagaggcgcagagtttgcaaagtcgccgcg

SEQ ID NO: 30158 - DNA, 594 bp, Mus musculus
  source 1..594: mol_type = other DNA
gccctcccgccgcggggattcctacgggccgggggcgctctgggtggcacgggcgtgggagacacagcgccccgggctctgccggccacgcaggggcgctgcccgagcgctgcagcaaagggccagcgcgggcgcctctgcggcacggccagggggtggagaggggcgagagacccgggctggagcctcccggcggcggccaggctgctgagcgcagaggctcgtgagacggcggcgcggtctgaagagggccagcgcgcggtgccagccgccgcagccgccgcttgttttctgcagcggctgcgcctcgggaggaccgggcgtcttccccgcccctcccctcctcccttgcggactggagctaggggcagggatgagcctgtccctctggaccgtcccctgcgcgttgcgcgtggaaaagccactttccccgcccgccgagatgggctcgagtgcgggctgcagaggacgcgtcctcgggcggcagcagcagcagcagcagcagcaacagccgcagcgccgcggtctctgcgattgagctgcaacgttgggacttggcagcccgcctccccctgcccaaggatatttaatttg

SEQ ID NO: 30159 - DNA, 526 bp, Mus musculus
  source 1..526: mol_type = other DNA
cactgtacatttgattttggttaaaatgttactgtgtacgtgccctgtgcacgttccaagtcatgccatgggagcaggtggcatgaagctgttttgatgaggttaaaaggctcctccccccattccgcaagcagcagcctgaagtacgaactgagatctgagagttccatacaagaacaataattctgatagatttcaatttttttttctccaaaaagactgattggatgtaaatgaagaggtttctttatcctcattttcttttattattgataaatcagactttagttcaattagataaaagagagaggttctcttgtttggacctggggagccgaaatcgggaactatccaaggtgctaggattctggcagctctgctgctcaatgcaggcagattgcagaagctgagattaccgcttatttgagaaggtacgttctcctgattaatcagcagcagcagcagcatcaacagactaaggcagctgccagccagcgcaagctggttgtcatgggggagggacgat

SEQ ID NO: 30160 - DNA, 477 bp, Mus musculus
  source 1..477: mol_type = other DNA
tgtgaatccctcttcacctgcatgaaggaagagaaatggtgacttttacattttatttcaccacggtacgtccggagattccaggtggaagaccgacatccagctgcctcccgggggtcgcctttacctgttgggtgagagctagcaggtcacccgcgtccccctcggggctctgcagccgcagtggccctcccgccgcggggattcctacgggccgggggcgctctgggtggcacgggcgtgggagacacagcgccccgggctctgccggccacgcaggggcgctgcccgagcgctgcagcaaagggccagcgcgggcgcctctgcggcacggccagggggtggagaggggcgagagacccgggctggagcctcccggcggcggccaggctgctgagcgcagaggctcgtgagacggcggcgcggtctgaagagggccagcgcgcggtgccagccgccgcagccgccgcttgtttt

SEQ ID NO: 30161 - DNA, 353 bp, Mus musculus
  source 1..353: mol_type = other DNA
cttttttttatacctgaaaggggttaaattataagaattcattcttgaatttgctaagaattttgtcacttgaaattctcatctatatctcctaatagtgtgggaaattttcattcaaattccaactacaagggaaaattttttaggagaatttcttctgttatacaatagaagattaacttttgtggagctctcctctaattactagaaaaataattacaccagcattcccatgaaactggttccacgttagggcccattgggaacagctactgtctccattattagttagttacctttccctaggccgccggaagtggagcctgcggaatcggcgtccgtgccggaagttg

SEQ ID NO: 30162 - DNA, 455 bp, Mus musculus
  source 1..455: mol_type = other DNA
cagaggcagagctcggagcatgagctgtacgtctgggttctcatacagagtcctgggtgatgattaaaaaccaaactcatattttatagaaacgggattctgtgcaatccctgacactgtggcagctgtaccactgttaaagctatttacttttgttcagtctcttaagtgactgagaaagaaggatacttatgtatacaacccacagtgatttttgttggattaaagttaatttaataatgatcctcagaaaaataatttcaaatctaaccatttgttagcttgttattattagtggtggtagtagtaatactgtcattttcacacactttcaatcacgcagctgctgcttgcagcatcatggtgatgatattctgggatgcaatagatagtgtgcaagcgccctttgggatccagatgatagccaactgacagtgtgcattcaggcttgcatg

SEQ ID NO: 30163 - DNA, 326 bp, Mus musculus
  source 1..326: mol_type = other DNA
ctaaaatccattatttaatatataaaagaataaaaaacagtttgatttcaacatagctgatagtgaaatgagaatactagcactttaccatcatttcagcctgggatatcactagttattccaatttagtatgaggatcctgacatagcactcctaagaagacactttgtaaaattaatgttctttaaatttttaagttttgtaattaaaatataattccatcattttctataaagctatgttagtaaatgagcactttctggaacatttgtgaacaggaaactttggttcaaatgggtgtcaccttagacttcgttgagtctgag

SEQ ID NO: 30164 - DNA, 365 bp, Mus musculus
  source 1..365: mol_type = other DNA
catcatcatataccttatatcacttacattatatttattatcatcagttatcttaggtatccatatcattgctgctagcccatcctgggactcaggaggagcccgcagctgagcatggcactggcttgtctcacaggagacaggcatacttggagcagtcttggagtgcatgaggacccacgggttctcaggcgtccatgtccccggcgggacacagattggagaggccccgcagtgacgctcgccttgctggcccactggggcgagtgggaggggagaagtggctgaggttccgccctcgtcccctctcccatgtccctgagatcctgggaggtggggggagtggccagcagccctgcccagat

SEQ ID NO: 30165 - DNA, 450 bp, Mus musculus
  source 1..450: mol_type = other DNA
gatggttatcataagaccttgttcgcagttaccactgtgatgatattatggttgttttatgggtgccttaaagagctagcaaagccatgtaattacactgcgatgatagtatctaagcaaaactgtgattttactgtagctttgaaatgatacactccattcagtgtggtctgccgcacgagatagtgccaaggccctcccaggcagggacaccctggaccagagttgaagttgaaagcagttcaactcagagaataggatgagctttttggcattttggaatgcccagactgccaggacgcaggtgccctgacgctggggcggtgcctgtctgggtctgcgtgctggctgcgagttgaaggccggcagccgatgggcagtccctgccagcagcctccggagttgcagactcccgcgatctgggcagggctgctggccactccccccacc

SEQ ID NO: 30166 - DNA, 326 bp, Mus musculus
  source 1..326: mol_type = other DNA
ccaaggccctcccaggcagggacaccctggaccagagttgaagttgaaagcagttcaactcagagaataggatgagctttttggcattttggaatgcccagactgccaggacgcaggtgccctgacgctggggcggtgcctgtctgggtctgcgtgctggctgcgagttgaaggccggcagccgatgggcagtccctgccagcagcctccggagttgcagactcccgcgatctgggcagggctgctggccactccccccacctcccaggatctcagggacatgggagaggggacgagggcggaacctcagccacttctcccctccc

SEQ ID NO: 30167 - DNA, 351 bp, Mus musculus
  source 1..351: mol_type = other DNA
ctacagtgtacttacatataataataaattaatctttttttttaaagtatcaaggtgtttactgtttaaaaaaaaaagagtgtgtatgtttgatatagattctagctcctaagtccctaatagaacagattgtaaaaaaaaaaattctttaaccctggttggttgtcaccaaggatgagaaatcttgccttccagaggggaatttgaaagagataatttgtaagttttagggaaatcacaattagactgctgaagaattacttccaatatttagttatatatgcaaattcgcgggccaccataagaatttttattcaggcgttcctttaaaacaggttaccagtttacctg

SEQ ID NO: 30168 - DNA, 452 bp, Mus musculus
  source 1..452: mol_type = other DNA
gttcaaactgttttcaaacgatctaatgatggaacctagatactctaaagagttttctccaaacatttgaataagacagcaataactgttttgtttgttattcatctctctgtaaacaaagtcaaagcagcacaaactaaaggcttgttcctctgtctgccatggcagacatgggtcaaacctcccacaggttgtaggtgggatgtgtacaaagatttagagtaatcaggaatacttgcagagaagattgctttccctaatcttatacaatgttcatattcttactgaataactccaaaataaggatactttatatataatatccttgtatcgtccaataatataaaactatgaaaagtagtttattctaattggatatactttttgtcttcttagatttttacaaggcacatcagagaacaatcctatcataatatgattattggttcccg

SEQ ID NO: 30169 - DNA, 281 bp, Mus musculus
  source 1..281: mol_type = other DNA
tgtactcacactgaggagctatcttttctcacctgggaaaaagggcatccccattcactggctcctggaattagagagcaccaccaattcaggggacctggaccccagcttagcgtggggtgcgggggtatagcccgcaacgcctcatggccagcccggggtctcccaaaggcctttagttagagtttctaatagtgtttttcgttttgtcagtaaaattcgatttttgtttcacagaacaagggcagggacctgatgacgggccaaggccggggccgctc

SEQ ID NO: 30170 - DNA, 366 bp, Mus musculus
  source 1..366: mol_type = other DNA
taaatttctttaataataatgccatttactattataataatgttaagttaacccgatggtcccggggctgactcagcatttgctaggaaacttgaattccctttgagaaatgaaggtacgttgtggtgaccccccaccacaaaattattctgtaattttgctactgttatgaatagtaattaggtgacccctctgagagggttgttcaacacccccctgcagaagctgccgggaacatttctgcctggaggaagatagcctgcttacacgaagctccttgccgcagcgtggccgcagtgactcctcccggccagcagagggcgccagcctgcacttggcccccggctgcccgaggccggtctcctc

SEQ ID NO: 30171 - DNA, 348 bp, Mus musculus
  source 1..348: mol_type = other DNA
cccaatctgtctctcactgatgggtctatgtcacacactttctgggagagccagttttgctaaaacagtgttgcgtttacttccctaaattaatttttaaaattttaagtatttccattttaaccagtaggaaatctatgttaaataagtaaagttaaatttaaaagcctatatagaacatacctgtggcacaaggacctgggaaccgtttgtgccaaatatgaactatttgtaccaagctctgaggccagaatgtcaactggaactgattgttagttgaaataaacgagagtcagcacattaaaagacctgggggctgcggctttggtcctgcgggactgacccggt

SEQ ID NO: 30172 - DNA, 488 bp, Mus musculus
  source 1..488: mol_type = other DNA
cactagaaaaacctttaaagttgtagtaaaataattatgtgctgtctaatgttaacaatacaaaaacagcagcaagggcgaagcttatttttgaaatcccaaaactcccttaaaatgaaatggtgactggaaatgtccagctaactcagcctgccacctgccgcagtcatgtgctgtcttcacagtagggcaatttggctaatttagataccacgtatgcatgtggtgtgcatgtgctatgcatgtgctgtacatgtgctgtgcatgcgctacacacaccactacatgcaggctcaggtcacagatggatgatctggccccccagggcttccaattgggatctctttattaatccagtgggaaaagaaggagaatgaaagcattaaaatccattcgcttgatatgtggaggatccagcttagatgcagaattcacttgggaatatgctaaaaatagcactgctattgtgacacactgactcttctcca

SEQ ID NO: 30173 - DNA, 385 bp, Mus musculus
  source 1..385: mol_type = other DNA
ggtgacccattccaaatacctcatttgtctcactgacactctggggatacacaggtgctttctgaaggttagcactagcctgggtacttccagacctgggagaatctgaaagatctggaagatgggctctccagaccctatatcctgcagagtctgccaatgccttccaatggtcagcagagggtactgagcaccagtgtatctcgcgatccctcaagtgactcagagactctcactgagcttgatcagcttcagggtctgaggggtacagaccccacagccccgggcgccggtcccccgcagaagcccgcccgggcatgctcagaccgcgcaggtccgggcggcggcggggggaggagggagcggccgcggcgctggggcccgg

SEQ ID NO: 30174 - DNA, 378 bp, Mus musculus
  source 1..378: mol_type = other DNA
atttttctatatacaattcataatatggagagtcctagttagacttgcaagaagcaaaaggggaaattttatttatctcatcttcccattctcatttttagtttgcttttcaattcaaaaagaaagggcacaaggttccatgccctctttttaacagagagttgctatcatcagtgtcttgatttctttctttaaaaaaaaagtctgtttctgctcaaagagatgctgagcagacaatagagcatcatttgaaacttttatctcctcatagggtcaaacaggtgaatgcagccaagtggatgaacaacttcagggctgagacttggtcccccgaggtcaagtccagccagcccaccctgcagcggagcgagcatcaat

SEQ ID NO: 30175 - DNA, 326 bp, Mus musculus
  source 1..326: mol_type = other DNA
gtcttatcacacattagagatcccaatatgttattaacatcatcacaagttggttgaagactttttcttggctgccgtcaaacataaacaattgtgttttccacaatagtttgggacacctttctggatgtcattctagaaattcagaaactttctggatacacaataggagtatgatagtatgatatgttccattcagagtctgtccctctttttccaacacacacacacacacacacacacacacacagagagagagagagagagtcctgaggaattaacaacagtaggaaaaggcaggaagtttccccggggagaacacgcct

SEQ ID NO: 30176 - DNA, 433 bp, Mus musculus
  source 1..433: mol_type = other DNA
ctttcagaatagcatttgaaatgtaaataaagaaaatatctaattaaacattttggaaccctagacttgaaagttttccagtattggaaacttgaaagctgaatatttttatttccaagtatttaagtattcaaccagtcctaatattgggcttacagtttccaatctttctatataaaatgtattcaagcgaacatcaaataaatttctgggatatttaaaaaaattgcataattgtatttgctctttattgaaaactgtatgaacattttattttccacaactactctttttatcacactctaaaagaagctaagggagaaaatttaaacagttaaagaattaactcttttctatgtggagatagcttgctacagcaagctatggctgagcggcaagctgagtttacccagctctgggctgccgctgggct

SEQ ID NO: 30177 - DNA, 104 bp, Mus musculus
  source 1..104: mol_type = other DNA
atttttttgaagatattttaagttgaaaatcttcacggaatcttaagtgagttattaatgcccttcttaaaatcttctatcaccatcatgagatatgattttaa

SEQ ID NO: 30178 - DNA, 479 bp, Mus musculus
  source 1..479: mol_type = other DNA
ctggctgtgagtgcggccagccagaaaggcaatcggcaagccccagcttggtgcaaaggaggcagctgtcctctcagcctccagctgccttccggaagccagctgaacagagcagggaactcccagaactgacttctctgcacctgggcctccaggaaggggcgcgccacttggtggccaatggggtggctgccgggccctggagcataggacacgccccgagagcctgcccagcgggacaggtgcagctgtagcggggctcagcatcggccgcagggctcttggtcggtcaccgaacgcggagtgcacacgcccccgttccgacagggctgggaggcgcacggtcccggagcaggcaggggcgcggcggacaccgggctagccaagcagccgctttggggcccagcacccagcagcaggggcagcagggccagcacgggcagcagcggggcaccgggcgcctgggcgcggcggggagg

SEQ ID NO: 30179 - DNA, 196 bp, Mus musculus
  source 1..196: mol_type = other DNA
ttttacaaaactatttagaaaattccctaggtagccaagacacacacaaagccgactgagttttgtccagagacccactgggttccagcctgggacccagcctgtgtaggtctttcagctctgtgagctgctagctgggcaagtacaggcggttcagcaccaaggacaagggccccggtcttggatgtgcaaggtc

SEQ ID NO: 30180 - DNA, 347 bp, Mus musculus
  source 1..347: mol_type = other DNA
acaaagccgactgagttttgtccagagacccactgggttccagcctgggacccagcctgtgtaggtctttcagctctgtgagctgctagctgggcaagtacaggcggttcagcaccaaggacaagggccccggtcttggatgtgcaaggtcagaggtcgcgagtggcagctgcgagccatctgaagcgatctcttcaggctgccggggagccttcttgcagctggacgcggagcagaagggttcccatcccgggtcctccagccgggagcccagcctccgtgggccccgcccccggccccgcccgcggttgcccggggaaccacgggctcccgcagctgcaggaggc

SEQ ID NO: 30181 - DNA, 529 bp, Mus musculus
  source 1..529: mol_type = other DNA
cacgctgaggtgagcggcacgcaagcagggacgcctgtttgtcttcggcgcgcggagcgaacgcagcgggctcgccagggacgagcccgccttggggggagctgagagacgcggcgcttccggcaggccacggtggctgtttgcctggagcggcccccatcgggtggccctgctgggcgggagagacaggaagctatggctctcactcctgatcaacaactggtaatagtctcgatcttgggacgccaccgccgtcgctagaggaaggggcggggcttgcccggggtcagggggccgcagcctcactttaaaaacgaagtccgcttttgagttttcctttaccagggcttacaaggaaccctgctttgtgagtcaggtcctgggtgacccgaagtggaacggagcgctctcagttcccttcctggtcccttggagggatcggaaggagactggaggctggagcggggctggcccagcggaggagcccgccggccgaaccctcaggacgcggcgcggacggaggcgcacg

SEQ ID NO: 30182 - DNA, 342 bp, Mus musculus
  source 1..342: mol_type = other DNA
tctagctgggtagaggtacaccttggttctaggtcaccacccagggacatagtaattgtcaaaaaaatttcaaaacattattactgttttacaggtaaaagaaattagtttgttactcttttgtttaagggctccaggaaaaagataaataaacacaaggttttaaacttacttttataggaatattaaatatatgcagctaatgaccaggataagcttggccaggaagctgctacgtgtaaaaaaagcccccggggttactttactccagcgataacataatccggcttctgagcagctgaaacggattaagtcctactctggaagagaccgtccctttct

SEQ ID NO: 30183 - DNA, 614 bp, Mus musculus
  source 1..614: mol_type = other DNA
acccaggttccgcctagggccttgctcatcgccggaggccggagcagggactcggagccccctcccccccaccaagccgatcggccctggctcctcaggccgcgggcccgctcgagcgcctcacccgtcagcctcgggctgctccttccacggccccgccgccgccgccgccagccagccagccagccagccagtcgagcccggagcggaacggcgtcccaattacctagttaggccccaaagtctccggtccggactccgtggcgcgacggcactggctccccccaccccccccagcggcggcgacggcggcggcttgtcgagctgagccgcagcaccgcgccgccgtgcgcctccgtccgcgccgcgtcctgagggttcggccggcgggctcctccgctgggccagccccgctccagcctccagtctccttccgatccctccaagggaccaggaagggaactgagagcgctccgttccacttcgggtcacccaggacctgactcacaaagcagggttccttgtaagccctggtaaaggaaaactcaaaagcggacttcgtttttaaagtgaggctgcggccccctgaccccgggcaagccccgccccttcct

SEQ ID NO: 30184 - DNA, 367 bp, Mus musculus
  source 1..367: mol_type = other DNA
gatcagtcatatgaagagtgaagaattatcaggatcacagatcttaaagctaatatctaccatctagctgggtagaggtacaccttggttctaggtcaccacccagggacatagtaattgtcaaaaaaatttcaaaacattattactgttttacaggtaaaagaaattagtttgttactcttttgtttaagggctccaggaaaaagataaataaacacaaggttttaaacttacttttataggaatattaaatatatgcagctaatgaccaggataagcttggccaggaagctgctacgtgtaaaaaaagcccccggggttactttactccagcgataacataatccggcttctgagcagctgaaac

SEQ ID NO: 30185 - DNA, 383 bp, Mus musculus
  source 1..383: mol_type = other DNA
ccttctaaaagatttttacgtgtttaaaagaatttaagttttcctgagtacccaagacactcagaatggccgccagccaaggcgtgtgggcagcctgcagaagctggtggctcagctagagctgccaggaggaacacagccttcagtgtgccaacgctgccagaactgtaaaataatgaatttgtgttgctttcagtcactgtgtttgtggtcatttatagcaacaaggactgcttgcttcatgtatttaacaaaatactaaaaactctccgagagcacaaagtttatgtcactccacaaactgctttttggctgagactcatatgagggtctgattcgtctctgggtaggctcggatccttccaaacgcaccctttttaaag

SEQ ID NO: 30186 - DNA, 289 bp, Mus musculus
  source 1..289: mol_type = other DNA
tgtgagtctgcacaagaatcacaagcatgcttatgtgtcagaaaattttattcacctggtatttcacaccacgtgagagctcattagacttatacgtttaacacagttttaaagatgcatttacctaaagtgatgattttggtgaactttaccaaatataatcgataaatgaagacataaagtgtactttttttggtgtatggttgtaatcagcagaggtctgagcctggagccctggacaggccctcgtccgctggttttctaacttacagaatgagaatgagcattc

SEQ ID NO: 30187 - DNA, 364 bp, Mus musculus
  source 1..364: mol_type = other DNA
ctaggaaacatacagctttgtatgtgtcagaagctgagtgatttcatcccaatgaagacaaagattcaatgaaattaaatccatagaatttatgcctttggaaagatcattgcaaggggcatcaatgcagccatcttgctggtatcactagtggacttgatcaaatgtcacaggagacatctgcaggaagtagccctgactgagtcctatgcatgtatgagtctgtctcagtgtgcttcctgcacgcaagtacggataggtgctggggacccaacccatgcccatgtgtgtgtgtgtgtgtgagagagagagagagagaagaatttgcatccatttctaaccagctcagaacagaaagggttaa

SEQ ID NO: 30188 - DNA, 419 bp, Mus musculus
  source 1..419: mol_type = other DNA
ctagaaaggctaacctcaggcatggcctcacatacttgtagcagactctctgctgggagacctgtcagggtagaggctcacctcaggtcctagaaagactcactggaggtgacagctcatcattatcaatcagaagggaggaccacatctttgtcctcatgccctggtggccactgctgcagcttcctcctgcctttgacttctaggctgggatgacaagtcttcagagacccaagtcttgctctgacccaatgtctatggagttgggggatgtcctcaatcctgggtctgagaaatcttgtcctggccagattcctgggtctcctgctggcctgagagatagggatccctgctcccctagaaggcactctcaggaactggctcagcttgctacaacattccaaaaatgatggatggga

SEQ ID NO: 30189 - DNA, 295 bp, Mus musculus
  source 1..295: mol_type = other DNA
cacctggtatttcacaccacgtgagagctcatgacttatacgttcaacacagttttaaagatgcatttacctaaagtgatgattttggtgaactttaccaaatataatcatgtgatcacacaggccgagtcctctgcatataaatgaagacataaagtgtactttttttggtgtatacctgttcctgcaggtcagcagaggtctgagcctggagccctggacaggccctcgtccctactggttttctaacttacagaatgagaatagctaccttcagaagcttcaaaaactttat

SEQ ID NO: 30190 - DNA, 180 bp, Mus musculus
  source 1..180: mol_type = other DNA
aataaaattttctgacacataagcatgcttgtgattctaggaagtacagagactcttctcagttgaacactcagagaagactgacaaattctagacatttcaaagatgctgttgttaatttaataacttctagcaatttttttcaggataaggaaggggacagtggacacacccttccca

SEQ ID NO: 30191 - DNA, 200 bp, Mus musculus
  source 1..200: mol_type = other DNA
agcactccctgtttaactgagtgtggggcgactcctggaccccaacaaaattttatattagtactctctagagtactcttaccttgaggaagtacatcaagcccaaataattacaaaatatttcattatgtgtaaagcaaatatcatcaaatctccaagctgaaggcctctcaacctggaatgcaaatttcactaaagtt

SEQ ID NO: 30192 - DNA, 509 bp, Mus musculus
  source 1..509: mol_type = other DNA
ggataggtgctggggacccaacccatgcccatgtgtgtgtgtgtgtgtgagagagagagagagagaagagaaagagagaatttgcatccatttctaaccagctcaacagaaagggttaaggacctgacctaagtaggacttgtgggctcaggccagagctgtcttcaaccacaattaatgatctttcttggacagagctgtcctttagaactctctgacagctacactgcagagaaggctgtgtagggttgtcaacttgacaatatttggaatgaactacaatccggaattggaaggctcaccagtgactggagatccttatctggatcttggtttgaagatcttcagccatagtggctatggattccagatctccgagtttaaggaacacacctttaatcggggcttcatctgggattaaaggtgtggtggaacacacctttaatctggcctttcatctgggattaaaggtgtggtggaacacacctttaatctgggctacaccttct

SEQ ID NO: 30193 - DNA, 287 bp, Mus musculus
  source 1..287: mol_type = other DNA
gaatcacaagcatgcttatgtgtcagaaaattttattcacctggtatttcacaccacgtgagagctcattagacttatacgtttaacacagttttaaagatgcatttacctaaagtgatgattttggtgaactttaccaaatataatccatataaatgaagacataaagtgtactttttttttggtgtacctgttcctgcaggtcagcagaggtctgagcctggagccctggacaggccctcgtccgctggttttctaacttacagaatgagaatgagcattccagt

SEQ ID NO: 30194 - DNA, 291 bp, Mus musculus
  source 1..291: mol_type = other DNA
atataaatgaagacataaagtgtactttttttttggtgtacctgttcctgcaggtcagcagaggtctgagcctggagccctggacaggccctcgtccgctggttttctaacttacagaatgagaatgagcattccagttagctaccttcagaagcttcaaaaactttatgaagccaggacagttccaagtctgagagactgcagacacttctttccttagaaggcagcaggcgtcccaggtttctggggacgtctttgctcctcccctctggggcagagactgggggtgga

SEQ ID NO: 30195 - DNA, 426 bp, Mus musculus
  source 1..426: mol_type = other DNA
ctagacaaaggctaacctcaggcatggcctcacattactcttgtgagtcagcagactctctgctgggagacctgtcagggtagaggctcacctcatccatgaggggcctcctagaaagactcactggaggtgacagctcatcattatcaatcagaagggaggaccagccctggtggccactgctgcagcttcctcctgcctttgacttctaggctgggatgacaagtcttcagagacccaagtcttgctctgacccaatgtctatggagttgggggatgtcctcaatcctgggtctgagaaatcaacccaagtcacttcagccagggacatggcaaccaaccctggggggatccctgctcccctccagaaggcactctcaggaactggctcagcttgctacaacattccaaaaatgatggatggga

SEQ ID NO: 30196 - DNA, 197 bp, Mus musculus
  source 1..197: mol_type = other DNA
aaaacccagactctgtcattagatctctgtaagacagcccgggctgacctaaacctgtgaagtctaggatgaccttgaactcctaattaaatccactttaaagttttcggcgactcaggcgtcccgagtccgcccggccgtccgggggcgcccgagtacgcagagggcgttgcggcgccgcccgacgtcccgccttc

SEQ ID NO: 30197 - DNA, 240 bp, Mus musculus
  source 1..240: mol_type = other DNA
tctcaatattgatgctggcatgatgatgtatgccttacactttggaaaaaaagcaattgcttcctcattttagatacagatttcagatgaaaaggcagattttcccttgaaaaaaaaattacaaaataatttgtttccatatcatccttgatgcctgcctgcatgcctctagcatacatcaaatcatgatctcatctttttagatccatgagctgagttgttggaatcttcattccctct

SEQ ID NO: 30198 - DNA, 217 bp, Mus musculus
  source 1..217: mol_type = other DNA
tagtgcctaaggcaactctgtccggtaggagagggcagcagagcctactggactgtcctcaacaagcacggcaggctcggtgctatcacagcctccctttccagcctaacacatgttggaggaggaaagcactctgcgtcttctctcaacataatcaaagataccaggcaacgtcgtgtggtccttccttggaaggcggggcgggacgcgttagagg

SEQ ID NO: 30199 - DNA, 357 bp, Mus musculus
  source 1..357: mol_type = other DNA
catcctcacaggaaaaaaaatatttcctttctttcttgtgtaaaacaatcatttaaatgtccaaaacctgctttttatccaagaaatgtgggtgagggtttcctgtcaacaaaacggatgggccccccagagagacccagggatggtgacatgggagaatcccctgggaactgtgcgaggaacaggggacagatctgtacttgtcacatctcagagttataattgtaatgtcatttcatctttaattaacagttgcctgcaagaggatccagttggagctaaatcaagtaactaggggctcctcctgggggcctggagcagcttgcagttgcaaagcagttgctaggcaaccagtac

SEQ ID NO: 30200 - DNA, 370 bp, Mus musculus
  source 1..370: mol_type = other DNA
ctgaagatattctcattaaaatataagatattgtagcagaatcagtgatcataaagagaaatctatcttttgctaggctagctgggcatggtgctgagacagatagatctctgtgagttcaatgcagagactctgtattaaaaatagatagatagatagatagatagatagatagatagatagatagatagatgatagatagatagatagatagatagatagatagatagatagatagatgaaagaaaaactacaattaaatttcctttaaaaatgagttgctccagtagagcaggcaggtctcacacagatgtctttcttctctctcagtcaactttccaggaagggagaggagaggagcggctgctgt

SEQ ID NO: 30201 - DNA, 590 bp, Mus musculus
  source 1..590: mol_type = other DNA
atatcctttttgggataataataatagtgatgacaataatgtaataataataataatagtcagcaaagtctttgctggctctagaagcctgaaaatagattctccagcttctggtgtctgagtagggcaggtgtactttacccacgcagcttacctacttcatggaggaagttctttttcaaaacactcactcttccaccctaaaatggaagttaaattgttaagagatatagtttgtttgacctaaccagtgttttgggaggtaataccaatgaaatgaatttgagaaatttttcgttttctgagaactggcttaaggtagaattggccaaattcgaggattcttataaaaaatcttcaggaaagttccctaaatgttaaccataatgtttgtgtttccttcctattcaggatgtcacgaaaggtgcctgaggctctggtcacataatcatggatccagttctcttaggcccaaccatggaggaacaaggcagctgctgcctcctgccggttcaagcaggaagccctgggagaggaaaccggtgccagagccctagccacaggggccagcctggcttttgtgacctcac

SEQ ID NO: 30202 - DNA, 334 bp, Mus musculus
  source 1..334: mol_type = other DNA
ttatcttgatcaccttaactgatgagggaagacccagcctgaagggtgtgacacccttcattggtgtgattgtacaaaaatattcctatctcttcactcttccctgcagtgcgacagagttgaagctaggatgttatgctaggactacttgttgattataaacattcacaactccagatccaggagatcagacgtcttaccctaagagggtacattagtcaggttaattagtagtcctaaactactgagcgaatgagtgaatgataaattcagtggtgcgcagggggtctgggcggctcggccctcgggggcgtgtcggccgaggcagcggcgg

SEQ ID NO: 30203 - DNA, 407 bp, Mus musculus
  source 1..407: mol_type = other DNA
tcttcctaaatatagccttagttagaagacacagggcctctggcgagggccctggagtagaccaggctggccttgaacccccgcgcagctgaaggcctggaaagtggttccgaggggaagggaagggttttctctggccttaagcacagggcagtgggctggccagaattctgagtagtatttaatgcacgctcctttactaaataaatatggaggaaagcgcctttagctctaagccatctcgctccgaatctgttttgttttacaaacctaaattcatacgggaaagacaaaacttcccggaagactctgtcggagtttcgtctgcagtctagactaaagtcttcgcccagcaagattggccgagtcgcctcacgtgacttcggctagcggtagcggttgcccgg

SEQ ID NO: 30204 - DNA, 584 bp, Mus musculus
  source 1..584: mol_type = other DNA
gcatatgtatgaatatgcttaataagaaactttaaaaaggaaacactgagaatactagaggctttttttttgtcttagatctaagtgctgtgacaccactgccctgctgtagctttaatgttaagccaggtttatagtttagagaaaatctcaagagcatacatggtaagatttatacattatttttcagaaatagggcagaaatagatttttacttcacattatacacttttcttcagatgctgtttaaaaatgaacagtgacaaagtttctgccaaaaatctatgtatacaagcagcatgcagctttttctgagtaaatttattgaaaatattgtctcacaggtgactctccattttatcttcttttctcaaaagggaaaaacagcctatcatcttatgctaaagtttagagtttaccctctaaatatcaaattgaatcaggtcatgaactggttggaacagaattacaatgactatagctatattctaataatgacagtatcaaacaacctctctggcaggcagacagctgcacaacacatttgttacactgcttacgagcaccagccgctaagactcaga

SEQ ID NO: 30205 - DNA, 300 bp, Mus musculus
  source 1..300: mol_type = other DNA
ggactcagggaccacctcctgagccaggcagaccggtgtgtgtccctgactctaactctgtccagacccccagacatctggatgagaggaggcatcaaggtgtcccctccctctactgtgattgtggtgtgtagcccactcccaagagaggtttttgtttgttttgagacaagagtctcattagggagattgacctgagctggctgggggtcgcccaggcctaagcgaaaccaggccgctaggcgccgggtgggcgtggaggtgggcggtgtccgacgtccccacgtgtcccgaggcggg

SEQ ID NO: 30206 - DNA, 359 bp, Mus musculus
  source 1..359: mol_type = other DNA
gaggaggcatcaaggtgtcccctccctctactgtgattgtggtgtgtagcccactcccaagagaggtttttgtttgttttgagacaagagtctcattagggagattgacctgagctggctgggggtcgcccaggcctaagcgaaaccaggccgctaggcgccgggtgggcgtggaggtgggcggtgtccgacgtccccacgtgtcccgaggcgggcgaccccgtgaaggcccagcagcggggaagtcgccgcctcaggatgttggcgatcttcaaggtctctgagtgctgtccccacagtgagccggggcacaaagggttaaccttgggccgcgggggtgcggctcggcctcgtcccgc

SEQ ID NO: 30207 - DNA, 268 bp, Mus musculus
  source 1..268: mol_type = other DNA
aaagacacaggcatggaggcaagtttgtgtcaaacatatacacatgtatatgtatatacacatatatacacatatacgcaagtagcacttgtaggccaggctggccttaaaaaggttgtatagcccaggctggcctcgaattcaattgcagtcccatagccttaggtggcgctgcgagcaatggaagcctgattgcaactagaaatgaatgtagagttataaaaaacaacgacatgtttttttaccttgttgatgcgggcagccctag

SEQ ID NO: 30208 - DNA, 625 bp, Mus musculus
  source 1..625: mol_type = other DNA
tttaagtaattggttacctacaattagttcacatagctgatgtttagtcttcatgagtgaaagctatttgaaatcatttcctttggagtatagtaggcaaataaagctttttgttgggtatgttttctactttaaatggcttaaactattttagaaaatagtgtaagatatataatggatatacactggtggttctagaattatggtatatggtacatggttgaagtgccatagacatgctttataggtgacccacttactgagtgtttaaatatacacagacatactctaacataccttgctaatgtgttatctttgtattttgaatcaaagactttggttttaagtaacctttcctacagtgcaacaaaagaaactcttgaggaagtatttgagaacttttaacctaaagggtaaaataatttttacgttagatgtgggacatactcttacgtataagagtaagactgtcctgttagcttaaaaaaaaactaaagttttagctatacaaagggcagtaaatattgatagtaaattaagctttattctgagaactgatatagaatttgcttcatttgaagatgctaaagaagctttaaattcctgtaataaaatggaaattgag

SEQ ID NO: 30209 - DNA, 212 bp, Mus musculus
  source 1..212: mol_type = other DNA
cgttggtaccaactcctggtaaaaaggccagcaaaagcagctcctgctgctcctgcctcagaggatgaggaagatgatcattagattaaaaactcattttgtgctcttagtaacttagcaaatacatttgttgccatctttcttccagactctgagaacttttaaagtatgctgacctaagtaaggcttttttaaaacatctagaacctgtt

SEQ ID NO: 30210 - DNA, 504 bp, Mus musculus
  source 1..504: mol_type = other DNA
ggccaggcgtgccatacaggtcgaggctaacattgtgtgctccacaggtcattgcttggaaccagttggttgcaatccatttaaagcaacgccagacacccccatggagggaacctgtgagcgcgggccgaccgcgagagggcttttattaggagctctcaggaaagcggggactcgcatcatagccaagaagccgttcgcgactccgcggagaacaggccgaggcccgctcatcagcccgagggaaccctaggccttccggcgttcttcagcaggaccacgcggcgcggggggcatcgccgcccatgctgcctcggaacacctgagggaatcctcgcccgtcccactgcgcaggcgtggggagagcccggcgctcaggagcccgccctcaggagcagacgtcaggccccgcccagagccccgccctcgtcaagccttaggcccgcctcacgctgccccgcgttaaggctcgcggttggctccggggacggacgcgagctctgg

SEQ ID NO: 30211 - DNA, 232 bp, Mus musculus
  source 1..232: mol_type = other DNA
gcttacatataataataataataaataaatcttaaaataaaacaaaagaagcattcttgacactcatgaccaatctaggaagctttcaaaattctttctcccaagggctctgaaaaatagccaggactgtttataaatgaagttcttaagaagactcttaggctgctgactttcagggacacggaacaagtcctgctcaaaatgggattgttgtctagaaaaagaagacact

SEQ ID NO: 30212 - DNA, 473 bp, Mus musculus
  source 1..473: mol_type = other DNA
cccactgccccgggtcgcgcgacacgtgcggggctccgcagagcacgtggcgggccgcgcaccagagcacgtgcgcggggaggcggggccccgggaccgctcgccgcctaataagtcagagggcaagcaccgcgagacctcccgctagtcgcgcgagactttcccccccagcatggcgccctcgaacgcgcccgggattgcgcgcaagccctcctcccctccgcgacggacgggcgggcgcgcgcgcgtccctccgaaagcaggggcctagtcgtccgcgtcggcgcgccaaggccttgcagtagcgggtaccgacgactctgccccagagctcgcgtccgtccccggagccaaccgcgagccttaacgcggggcagcgtgaggcgggcctaaggcttgacgagggcggggctctgggcggggcctgacgtctgctcctgagggcgggctcctgagcgccgggctctccccac

SEQ ID NO: 30213 - DNA, 149 bp, Mus musculus
  source 1..149: mol_type = other DNA
ccacctccctagggatgctggggtccctaggggcatcatcagatggttgcatctcctcaatgctggggatggcccagcccagatgagcagggttaactctagcacagatagccagcctagatgccgcccaggccctggccttgctatgt

SEQ ID NO: 30214 - DNA, 555 bp, Mus musculus
  source 1..555: mol_type = other DNA
gaaccccttcaaggactagtcctaagctgtcgcgacggcagtgacctcttacagcagacgctgaccagagagccctgaggcgcgacaccgccttgtggcgtgaggccccaggcctgtctcgctcgaggacaccgggactttgcatgagtccccccaagtgtgcagggcgcgaggcccactccggagctgaccctggacggcgggacaggcgagtcacagtcaccccgttgttgcgggcaggtcccgggcgcgggaaccacgcgggacaccgcccggggcaagcgccgcccatcgctcgccttccccctccctccccctccttcttccgagcagtcgcgagggagggggaggaccgggcagctgccgaaaacagctgcgggagcgcgcacgcgcgcgacccccctccggcgtggccggcgggggactgcgcagcgcgcgccaagccgaggcactgccgctttaagctcacttgcccattgttcggaatcgagccaatgagaggacgcccgctccctgcgctcagccaatagcgccgggactagggtggctgagcac

SEQ ID NO: 30215 - DNA, 360 bp, Mus musculus
  source 1..360: mol_type = other DNA
ttttattttttaaaaatttattttttttaagccttggctgttctggaactcactctgcagactaggctcaactactgtctggccagaaatgattaatttcaatgtactataatagtcttaaaaaacccttccggacgtggtgctgcacgccttcaatcccagcactcgggagtcagaggcaggaggagttcgaggccagcctggtctacaaaatttactgacttagactgttagccttagttgttagcatactcggaaaatgataatattttatacaggtcatagttttataagaacctgacaaaataacctgagggcagagttcctcagcctcaatctaggtgggaggtggcgccggtg

SEQ ID NO: 30216 - DNA, 294 bp, Mus musculus
  source 1..294: mol_type = other DNA
ttcaacactagttcagaaactgttcattaagagtagattttaacttctatttcctcatatttaaaaacaaaagataaagagattggattggcaaaatcttttaagtcttccattgagtataaaaaactaacactatttgaggaggtcattatggtttgcagactcctgagttccatgtaaacagaagttattgtagtccctggcctctagtgcagtctcagaccactagtgtgcccggcaactctcctcccgagcgaagccgctgagcgttgtattgatgccaatcgccaatgt

SEQ ID NO: 30217 - DNA, 368 bp, Mus musculus
  source 1..368: mol_type = other DNA
gtagctccttcaggacactaaagtggatctccaccttcaggaagggccagtacatcactgaaggtctcactcgtgggtatccgagacttacaaggtttgagcgtgtagacatggtcagcccttccaccctggctagtagattttggcaactaggacatttcttctaagcctttgcacctgcagaaggaatgcttttctgcgcgccgctttgtggctttgagcgcagcgagccgagccgccggctccttcggaggtgggtgggttggagcagaagagggagcccccgtggccccctcccggccccctcccggccccctccgggccgtcgattcggccgcgtgcgctgtgccattggccctggaggcccg

SEQ ID NO: 30218 - DNA, 246 bp, Mus musculus
  source 1..246: mol_type = other DNA
gcaggaagaaatccagaagtttcccatatcttcttttcttgacgctacatggagaaaaacgaagctgcctctccaatgaagtgcactccactccctactttgacattgtagtattgaattttgattattacagttggcagctgtgaccagctggtgtccaaggtggaacctgcaacggagagggaccccagtcagaaaggctgctgtcgctaaggcgggagccgcccacgcgggatgagccacgct

SEQ ID NO: 30219 - DNA, 380 bp, Mus musculus
  source 1..380: mol_type = other DNA
tcattcatttacaaagaggttttcaaacaacgttcatttttacatgctacggcatgtatcactcagacatgggattgctaaattgtagaaatacagtgaccgtggataatacactcacccttgggccccattgacctgagtgaacaggggttaatcttaccatctggcccaagacagctgtcccaccccagcctgcttccaggctcctgagatctacagggtaggccaaatattatttgtcccacacttaacagtgagtatctggacctatagaccaaagcctgcctgagtagagcctgcctccagctggctctcaggaagtgtgagaaatccctgacgcaggagacataggacccctggcccaccctttatagccaggg

SEQ ID NO: 30220 - DNA, 262 bp, Mus musculus
  source 1..262: mol_type = other DNA
ctcttcactacatcacatggtgaatagcatcatgtcttgatcagtcatcataacccccagggactatgcaacttgtgagatagagcttgcccaggtcaagcttaagtagacagcaggacattcagtgtgccttgtttcctttgtcttttggctccaggtatcagcaagccaaacctattggcccccacagctctcaggtccctacccggggaggacaccgagtgctcacacagagccagcccaggctgggttagacacaccc

SEQ ID NO: 30221 - DNA, 287 bp, Mus musculus
  source 1..287: mol_type = other DNA
atgcacacagtacaggaaaaaaatcattagtgactttagaaatgattcaaattaacgctataatcttagacaaatttgttgtaaaagaaatagtgtcttcatcagtattgttgttgtgaagtctataaaatatctgcatgacagaaaacttggtaggtctgacttgggcttctgaaaccctaaatgcttaagaatatttgagcctataggggcaatgacctaaaaatcttaatgaaattatatcagaaaatatctcaaatctagcaagtcaaatgatatccggaaga

SEQ ID NO: 30222 - DNA, 199 bp, Mus musculus
  source 1..199: mol_type = other DNA
gatttacctatgatatgcagagataactccaatccctagttatagcacaaatcacaagggtagttttggtgggcagggacaggggtcctgctggatcctgcgctccccaaactgggccacagtggggcggtgagactgcccaggacacccacgcagtggactccccagggtggcagaaacagatggggatccccccgct

SEQ ID NO: 30223 - DNA, 189 bp, Mus musculus
  source 1..189: mol_type = other DNA
acagtcattacaacggacaggcctgacttgaaaggaaaaaaaaatttaactccttcaagtttcctcttgcgcagaaacacactgagtggatgttttatttatttacttatttatttatttataaatctttccaggctggcctccaagtgctgggattaaaagcatcctatttttaaacaggtaacagtt

SEQ ID NO: 30224 - DNA, 363 bp, Mus musculus
  source 1..363: mol_type = other DNA
caccaatgtctgaaacattgcttaggccagggctgcaggctggagccctcccaggcgtgagggaagtggagcaagattcctccctctccccacctcaggaaaacctaaggttgaggaggccacagcctcagcctctacttgcaacctccccaggagagctaggtaaagggtcttgtaccaaccagagtccagaccgccggtgtgggctcggccagaagggaccgacagatctggactccggagtcctggagccagaagctggtgcatcactctcagatccccacctccgcactgctggagctgacaggtagggcgggagaaggagggtggagccgccggcgcgccccctccttcggggctggc

SEQ ID NO: 30225 - DNA, 299 bp, Mus musculus
  source 1..299: mol_type = other DNA
tggcccatctgcctcagcggaccatgagtcctcctaagcgattatctgcagtacatctgtgtcccttgtctcagggcacaggagaagctgctggacctgtggcctatgggtcacaggtcctgtgtcccagtccactggagtgactacagagccaccaggctagtggtggatgaaggttcttgatcagtcaccatctgagcccagcatcagacagctggtggggccagctagagctggcaggggctgggaggggagtgtaggctgacacatgacactccgacccccgcctgtagagctac

SEQ ID NO: 30226 - DNA, 619 bp, Mus musculus
  source 1..619: mol_type = other DNA
atcaccaactagggaatttattgagaccatctcggtcccaagagccagaattgcaagtttgtttgtagtgctctcgccagagaataccatttactaaaggttactatgcgacattttccccctggaatccacggggaggttaaagtggatggccggcagcctgcgtagacaatgctcagtgcaacagccccggtcggaacaagcgctgtcgtcccgggccacccgtccgggaaagaggccccgcccaaggcctgagcactgacgttccgctgagcgcctcgccagccaaccggaagtagccgggcccttagcgatgggacagtgtgagtggcgcgtggccgaccccggggccccttcccccaaccgtcccccgggaccgctcccgccggggccgggcgcgccctcagccgagccgctcgctcccgggccgccgcagcccgagccttcctgcgcccgcgggcccgacggggccgggagagcgcggccgaggtcgccgggacccctgagccgctggaccccggcgcggcacgggccgggggaggggaggccgcgccgcccggaaggagattttcggacgccccgccctggtgggtgcgggctgccggcggcgtggaggggc

SEQ ID NO: 30227 - DNA, 496 bp, Mus musculus
  source 1..496: mol_type = other DNA
atccaatctcagacactgtaagcaaagccactgggctgggtgtgacactcagcctcccttacatgccaggcaaggatgatcccctggtcttcctgaggaccaggggacaaccacgggccagtcctgggacactttgattaaaaataaacatctaacaatgtaatatgttcagcagttacatcaccaactagggaatttattgagaccatctcggtcccaagagccagaattgcaagtttgtttgtagtgctctcgccagagaataccatttactaaaggttactatgcgacattttccccctggaatccacggggaggttaaagtggatggccggcagcctgcgtagacaatgctcagtgcaacagccccggtcggaacaagcgctgtcgtcccgggccacccgtccgggaaagaggccccgcccaaggcctgagcactgacgttccgctgagcgcctcgccagccaaccggaagtagccgggcccttagcgatgg

SEQ ID NO: 30228 - DNA, 208 bp, Mus musculus
  source 1..208: mol_type = other DNA
tctgtggaaaacaagtggagcaaagctggtccccagtgcagccactattgtgcttagggagaatatttgtggaaacatttcaatggtatatgaaaggcaccttcgtactgccaggagcatctcctactccagggccttaggacacacgtgggtgtctcagagggtcctaggccgcgagctccctggtccctggggatcgccgggcccc

SEQ ID NO: 30229 - DNA, 375 bp, Mus musculus
  source 1..375: mol_type = other DNA
tggtagatgtaccaggtttagcaaatcaaagtatatagtatgtccagctaaatgagtttcagaaagacagcagattaatttcctgtattctgtatttaggtagatcaggctgaccttgaactcagaaatcgatctgcctctgctaggaacttttaaaaccttcctttccagttctataagaaaggaaacccatttgccccatgatggaccaactggcaggaaaatgctacagctcataaatgatgtgtctaggatgcagccaaaggccccactgtgcgcctgcgctgctccgtcctcgcccggccctgcatccgggtctcagggaggggcgtggcggggcggggggcggcgcggcgcgcggggtcacgtgacgtg

SEQ ID NO: 30230 - DNA, 424 bp, Mus musculus
  source 1..424: mol_type = other DNA
ctgcttcacccctggggttgcagatcagcgtcccagcttctatgaaggaggtaggatggattgcaagtacagtgagctgacattctgtgtttgcctccaagactggcagatctcagagtgtatagtggtagttcttctaaggtagatccagtagaaacttctagatatttttctgttctagcattccagtataatttttatatgtcttgctaaacttaaatgtcctgaagatgtaccttatgcattttttaaaattacatacttcttttaacaaaagttctagatagaaatttagcaaagttacataaacaggtgactttggtttgtggaaaaattgttattgcttttatacattttaattgttgatacttctaacagtattaagctcatgaagctgtattcagaatttatagatgatattcac

SEQ ID NO: 30231 - DNA, 358 bp, Mus musculus
  source 1..358: mol_type = other DNA
ttcaaacaaacagtgtctttgtttttcagatcctcttatgtgtaacatttgatcaaagtttttaaattggcagagtggaagctgctaccagtactgagttacagatcatgtactctgaagccttaagaaaattctttccttctttaccaaagttcttcctctgcaataaagaagggcagaggtattgtttcaggtaaataaatgacctatacctacttgaaagagatatctcacactttaacaatcttgcagggaattttatccctttgaactttcaaataaactcttaaataagattatgcaaacttactaaaaagggtaaagaaagacctctgaccaatcacatcagcttcagctg

SEQ ID NO: 30232 - DNA, 531 bp, Mus musculus
  source 1..531: mol_type = other DNA
tctatccagttgattgaaatcacttttctattttcgcaaacatttaatctatctgtagcattctttaaaacttaataggacatttaaaaataaacgtataaatgtataattatatgtgtgttgtccttttcttcaacaagaaaggattattctttcattttcccaacttatttgaaaaataaactttaaactcaggtcagaaataatcacaagtttattcttttgtctttttgaccttagaaaagagaacaagaatagtaatgattagtaaatttctaagttgttttggactcaatgtttcaaaccattctcattagctatgccaatcattgatcatgatggtgtgtctgccctatgtaatattagctatatgcgtagtgagtactataaatcaatgtaagtattttcctcttttaagagtcaagttgttagtcaaactcaagcttttagtttgttactgtagatagaggcattatgcaattaaccaagagatgcatcttcataggatccttcaaggcattgcagcatctt

SEQ ID NO: 30233 - DNA, 233 bp, Mus musculus
  source 1..233: mol_type = other DNA
gaactctgagccaagcccaggcttaaagtgcattgagaccttcctggaccccagagtcctgagcacagtggctcaaggcatgtgtgtgtgtgtgtgtgagagagagagagagagaagagacagagagagaggaaaggaaccctctctctcccctcccctcctctctctctctctctctgtgtgtgtgtgtgtgtgacggtgtcccagaggacagagtttgcattgatgaaaac

SEQ ID NO: 30234 - DNA, 455 bp, Mus musculus
  source 1..455: mol_type = other DNA
gaaaggtacatgctggggaacactgtgtcccaccctcatgcagtttctggaaacttctccttaaagacccactcagagtggtggtggtggtgggggggtttcacacacacacacacacacacaagtgcaggagaaataactgttttctctccaactgggagtagagggcatatattcccaaagggatgggacagagggtcgcctcgccctccccttcaagaagaggggagataggctgaggcagctctgttccctctgtccccgcgtctcccggcacccggcggccgcgggggaggcaggcgctgcgcggctccggtccatgtggggagtcaccgccccctggtccgggtgcacccggccctagcgcccccacctcgccgccgccggcctcgcccccgccgcgcgcgccccgcccgcctcccccgttgccgtggcaaccccgggagcctccaggc

SEQ ID NO: 30235 - DNA, 405 bp, Mus musculus
  source 1..405: mol_type = other DNA
agatgatctatgaacatatgtatctttaaaatgcacctgattatgcaatctgcttagttcagtgcctgccacgcagtaagcactcataattcactgtaatagtaacaatttcccctgcctgggagctgtcaagctgagccctgacggccatgtaaagcagtgattaagttggcaaacctggcatacctggccaattagtgagccctgacttccacgtgtgtgtgcacgtgtacacatactaacacaaaacccaatctcagactcagggggcgggtcagtcggggccgtttgggtcatgtcaacctgcacctcagtggcacctccctcctagggaggtgtgtctggctccctgcctaggtgcagggcacccagcaaggtagtgcctgtcccaggaatggggggaat

SEQ ID NO: 30236 - DNA, 494 bp, Mus musculus
  source 1..494: mol_type = other DNA
tcagtggggcagcaacacaggggctgttactccatagctgtgaagtctcctccctagattaaccctgaggtttgaggccctgcacgttcctgttgcacagggccctgtaagttattgacctgtcaggagctggaaagaggggtcaccctgcttcgtgcttcacagatgttgaaacacgctgggctggcaagatgggctgggagctcacaggcatagccaggacctcataggtactgctggaatcttgcaagggtagccaagttctccttcccatggactttccttgatctcatttcattaaaaaataagataaaataaacatatattttgctcacctcagaagtgtcctgtccgggcacctcagtgcaggtctgtgtgtcccccacataagaaagcctccctgggaaacattccccccattcctgggacaggcactaccttgctgggtgccctgcacctaggcagggagccagacacacctccctaggagggag

SEQ ID NO: 30237 - DNA, 136 bp, Mus musculus
  source 1..136: mol_type = other DNA
gctatgaacatgccagaggtattttccctgttcaggttaaaagtaagaacaacatggtcttccctgattgcctggggaatcaacaaagtcctgacggggcctacgggtggaccaccctcagtccccaggcaggtgc

SEQ ID NO: 30238 - DNA, 299 bp, Mus musculus
  source 1..299: mol_type = other DNA
ggctggcttcgaattttcatcagacttgaacgtcaaaaacagttaaaaacacggtttaaatgataatatattacatggtaggaaaatgtagttttctctcctcccgagagattaagattcagtctcagagttgcctcaacataccctgagggagaacatggggtccatctgtccttatgttcatcaaatatagcctttgttgaggataaccttggcaagggctcggccaaggctacctgcctcagggtggcacccacacagcgagggcagctggtttatcagcctcaggcagctgaggg

SEQ ID NO: 30239 - DNA, 467 bp, Mus musculus
  source 1..467: mol_type = other DNA
ctgttgtcacatctaacgtgacaaggttagatgaacttctgccgtcccttggtgggcctggcctgaggaacaaggtcacccagctcccttagtacctgcagaactcagctagtactgaacggtgacctttaagggtgtctagccacagagggaatagcctgactggccatttgggcttctgcagtgcagaatcaccaaagtggccagcttgcaccatagggacatgtaagcccttccgtgagccccaggtgcccagcagaggtccagagacatcgacgttccctcatggagattctcttcctggcaagttgacagttaaagctcaccatcacaagttgtggacatcagcaaaggtttctgagagcttgggccaggcttgagaagtcagccactggctgggtgggaaggtagatgatgccccccccccacctctccctcgctgagtgcctgaaacaggaagtcagtca

SEQ ID NO: 30240 - DNA, 385 bp, Mus musculus
  source 1..385: mol_type = other DNA
gcttcctttatcattttaaaaagaatttcctatgtgactactgtatttaaaattctttatcattattatacatatgtgtatatatgtgtgtgtgtatatatatatatactatatactgctaatgagtaacatttagtgttattcattgatccccaatataaaggctggctactagcatgcttgcgaagtgatctgggctggacagactagctgaactggccagctctgggttcatcaagatgtgatggagaaagtaaataagtaaataaataaaatatttagctctccagtgaaacccatgcatttgcatttgtgtgtgtcctacaaacactgaaggttaagaagcatgctccttagtaattttatagcagtttgcgtttccaaa

SEQ ID NO: 30241 - DNA, 436 bp, Mus musculus
  source 1..436: mol_type = other DNA
catttgaaatgtatataaagaaaaattgtgaatgggcttttctggaaaaccagaagtaccctaaaaggttgaaccaatcttgtggccttactccatgaattatgctactcacctccttttcattaagaaaaaaaaataaaaaagatatcttttaaaaaaaaattctcaattgattcatatcctttgagaataaccaaaagaccaaaaagatggtttgagtctaggtgtttgagatcagccttgaaggcacacacaggctgccatgcagcagagagaaattacatttcacggcttttcacggttagctaatacttaggcagggtgccccagcggctgccctcatcatcccgcgaagtctcggccgggagcttgcgcgcggcctaggacgtcgggctacgaggcgggccttccggccttctccagaataatttccggc

SEQ ID NO: 30242 - DNA, 474 bp, Mus musculus
  source 1..474: mol_type = other DNA
ctcaaaaagaaaaaagataaaattgtttgtatttattcatgtgatgccatggcccgaggtggcacaccttggaggagtaggtgttcctccctgtgggtcctcactgggccattgtactagattcttttcttaattggaaacaaaacattaatgaatccttcattacaaaaataattgtagtcagatgtggttgtgattacctttagcccagtctgatcatagtgagctctaggacagttagagaccctccctgtcttggggagctcagcaaacaagtgcttgctagatctgtctccactgggcatacacacagtaattagtaataattagttcagtagtagtaatagtagttcagtagtagtagtggtagtagtagtagtagtagtagtagtagtagtagtagtagcagcagtagttgtatataaagcaactgcagtggtgcttccacataatgagatcttttctcaaaaaaag

SEQ ID NO: 30243 - DNA, 185 bp, Mus musculus
  source 1..185: mol_type = other DNA
gacttgcctcttagagcagagcagagcaggaagagcacattacactcgggtatgagtgataaaacagtgtactcagagacctacgtctgcgcccactgcctatgggggcgcggtggggtggggcggccggcctctaggccccgccccgcccaggctccgccccaggcgctgggcccatcccatcc

SEQ ID NO: 30244 - DNA, 306 bp, Mus musculus
  source 1..306: mol_type = other DNA
cttactcctcactaagtgagggcaacacagagtggtggatactctgcctcacaggggcaattgtgcctctggcctaggcctgtgcctggggggacttccctgaggcaatgacaaggtaagggccacgtgcagcccagccctgggctgacctttgatgatttccagaacctaaagaggtttaggaaagctttcaattcccaggccagctggagtgggcaatctgccatctcgataatcctgctcctcaaatctgatttggtttttagaccccccggggcagccaggggcctcacccttgccctgtgg

SEQ ID NO: 30245 - DNA, 324 bp, Mus musculus
  source 1..324: mol_type = other DNA
ataaaagtttaactccacctggagtactgagagctgtgtactctccctcagctgaaataaaaattagatttcacctgtttccttccagttttgtgtgcatacatgcttgcatggttatatataaactacttaaaacgtagagcattttcacaagttttgtatcagagatatactttgaagaggaaaaactgttttaaggttcttttgttatcctagagcagagactatataaatacatactccacttaaatggtgtgcaggcagcaataaatacaaattttaacttgtaaatctccgcgtggcgcgacgcaccctgggaagtgt

SEQ ID NO: 30246 - DNA, 481 bp, Mus musculus
  source 1..481: mol_type = other DNA
atgtctgtgcaaaagccaggcttagaaataaaagccatcctgtcttagaaacgttgcttatatctaacacagtgagtgtttcctattttgacaacagcagggctcaggacttgtcagtcaagactcctaaactctcagatccatggactcaaagcaatatagagttgatttattagggagtggcccaagccctggctgtcctggaactcactctgtagaccaggctggcctcgagcaaccatgcctggcttagcttcacttttagaggcccctttaaggcagcctcaattatcacaatctaaagccttttttcataactcattgaaaactgtttctgtaatagaggtcatgatctttcctgagcatatttcataaccgtttttttatctgcagaccatatgaaagatatttaagacagtacagctaactaattatttctcttttaagtaaatcattaacctgaatttaacgtcacttgcaa

SEQ ID NO: 30247 - DNA, 488 bp, Mus musculus
  source 1..488: mol_type = other DNA
aaaaggttttcatgactccagtttgaagcattaagtgattagaataaaagacactttagtcattatatcctgactagtccatcagtctctccagggactgtgatgaaaggtttaaaggtaatccagatgtctgtccaaaagccaggcttagaaataaaagccatcctgtcttagaaacgttgcttaaaagaatatctaacacagtgagtgtttcctattttgacagcagagtcccaaggcttaggacctgtcagtcaagactcctaaactctcagatccatggactcaaagcaacatagagacctgggattttctaaattgtcaacatccaaaacattgtttcataactcattccaaattgtttctgaaatagacatcatgatctttcctaggcaaagtattagacctttttagatagttatttcagtcagtgaagttaattaattattgttcttttgtgaataattaacctgaatttaacatcactt

SEQ ID NO: 30248 - DNA, 349 bp, Mus musculus
  source 1..349: mol_type = other DNA
tgaaggacttgagatcagtagccacaagaaccctgcagatgctgcagtgcagccattgctctgtggagaaggtccctgggctactgaggggcatcaccggagagctctcaccttccggttggtgtgcacagagacagcagccctgctctctggcagagttgattccttttgccttggaagcagaggcagaatatctctttgaaacagagtcagtcgtcacctaaaaatgtgttcagattttgctttgagatcaatcctagaaatgtaagctgctttgaaagctcacattttcctcaggaaacaagcatgttccttaatcatgcttgctcattgtgagcgagtctcagca

SEQ ID NO: 30249 - DNA, 239 bp, Mus musculus
  source 1..239: mol_type = other DNA
tgattttcctaggaagggcccaggactcaggaaggacagagctacagtgttctgagtcaaaaatcctgtttatgtcacaaaagcagagagacatactgtgggacacactgtgacagtattacagcttccatgatggtttatgtgttaaaggcaaagaacaagtggagtctttgtaagccttaaagaaagaactttcaatatgcatatgcctgacaaggtctgggtgagccagttccttg

SEQ ID NO: 30250 - DNA, 285 bp, Mus musculus
  source 1..285: mol_type = other DNA
ccagtctgccctaagtgatccctcagtggagagactcctttgtcaaggccagcctggtctacagagtgaggtccaggacagccagggctacaccaaaactaccaactagttaaatgtatgtataatatttttatgttcatattggtccagcaatgttttttatctgaaaatatagtgacagtctgaaatattgcaatgtaaatccaaataccactcaggccagcctggctaaatatcaactctgatatcttcggcagatttatcctttaataattaatgtctggg

SEQ ID NO: 30251 - DNA, 177 bp, Mus musculus
  source 1..177: mol_type = other DNA
atggttttcctaggaagggcttgctcagctgctcagcaaggacatagggagccaactgtgacagcatgctgatgctccactccagcttggactgagtggagtctatttaagccttaaagaaagaactttcatcctggcatgtaggctcaaatgtgcatatatgtgaatgcaaagaac

SEQ ID NO: 30252 - DNA, 351 bp, Mus musculus
  source 1..351: mol_type = other DNA
gccctcacatggaggggaacaaggggctcttctactagcagtagtgttgggagtgtccccattcaggctgacacgtttccttttacaggcatggcatggacaggagaactgcagaacatttttctaaacacctgcccttcatgaaagggtgaaatgcagcaggggctcaccctgagtcagttccaggtcctctccaagcctgagggggctctctgaggcagggccagattcatggtcatgcacatggtgcctaaccctggagtcgacctgggcctcaaattcatcttttcttgactttcagcccagtgccctcaggggaaaaaaacaggattcttgtctgacactaagtgc

SEQ ID NO: 30253 - DNA, 442 bp, Mus musculus
  source 1..442: mol_type = other DNA
acctttcagaggaatgttacaaggttgaaactatttccattaacagaaatattaacttttaaagatctaattttctcataggcatatgcccaatgctggagtgatttgaagaacacaaacacacatcacccttctgaagttttgttttgaagaagttattttctcagaacatgttttatgattgctttactttctcttagagccatataaatgaaatcagggtcagaaaatccatttaaaaaatccagttttgtgaggcacacttgtgccacaatgcacgataatagtacttttctatagcagccagagcaaggatactagactcggtcctggagcacaacggatccctgggccctccattctgataggctgaggcaccgcccgcctccgcctggcgccggccggtaggcgggcgttcagcagctgccaccgccgctccagc

SEQ ID NO: 30254 - DNA, 316 bp, Mus musculus
  source 1..316: mol_type = other DNA
tacatattgtaccttatatcgtagtactccattgtgtaaatgtaccacaatttttgtatccttctggatatatgcccaggaaatttccagagtggttgtacaagcttgcaatcccacccttttttaaatgatggaaatgattaagccatggacaaaagtgacgtttcaacacaatgctcttttctttccaaaagactttctgagtaactgtcagtcctttttgacttacaaaaatgctagtttaagatggttgggccagctatattcacccaaacatgctacaagagtagctggcacaatcaatcattaactggtt

SEQ ID NO: 30255 - DNA, 323 bp, Mus musculus
  source 1..323: mol_type = other DNA
ataaccaatgggtaccagttttgtatgttgtacagatataacccacagaaatagataatttttaaagattaaaaaaagagagagagtctcagctaaggttcccatttcccagacaactttagcttatgtcaaattgtcaaaaacaaaacaaaacaagtcaatctgctcttgaccagatctcttagcaacaggtgaccaggaggtcttttgaataatataaatatttaatggaaacttgatgtgaagctttgatttcagcccaatgtacccagagctctggttgagagtgccttggggaggcagttggatctcaaagttccaag

SEQ ID NO: 30256 - DNA, 425 bp, Mus musculus
  source 1..425: mol_type = other DNA
ggttcatactggggtagggacagatgatccaatcccaggagagtcggacgaccgacggccctcccagaagcccaggatcttgaaagattgttgcaaatacattgcgtgggcatccacagtctatgagcctggaagctcttctgacttcctgatactcagtaatgattccattaattcccatatcgtgataatcacgttaataccaccaactagtggggttcaaccaaaaattctgaaaatgttctaaaatgttaatttattttaaaaccctaggataaaaatcacagattctctttccccaagccttcccaagagctgggaaatttgacaggcaactcacccagaagcctctaggggacgcgggagtgccgcatgaagtaatgcgcatgttccaccaccggaagtgctccctgggagcggcggcc

SEQ ID NO: 30257 - DNA, 350 bp, Mus musculus
  source 1..350: mol_type = other DNA
gtcagtaaggtccaaggattttcctgtttcttcctccctaatgctgggatagacaacacacacacacacctggcttctatgtggctgctggggaagcaatggattgactaacacatgtgatcataaactggagacagtagcctcttcttttctggcctagacacaaaggcagtaaagcaatgctggttaaatcacttccatttaagagtgtttttctaatcgtaattaaggattttaattctttaattaatttcaccatttttcatgatgtgaattaattaatagggatgctaaccttactggaatttaataattacaatcttagcattattctcttcaaagaagcttag

SEQ ID NO: 30258 - DNA, 305 bp, Mus musculus
  source 1..305: mol_type = other DNA
aacagtgattgctgtgctgattgtaagctgtaagcttgctatgttttcaggaacctgtgtgtttacaaaaagattgaacaatgtttgtgttaattatggattaagatctcaatgtccagaggatcagtgaacacgtgcacctgtatcacctgttacacaagacatcaaaaaggtgcatggattcacatgactggtggagagtggtctccaaagcaatagacacaccttttcctttgcaggacagtaaagtttctcactgcagagcaaatgagggaggcatctcaaatatgctgcaggattgattg

SEQ ID NO: 30259 - DNA, 266 bp, Mus musculus
  source 1..266: mol_type = other DNA
ggggcattttaaaagtcattgctttctgctggcaacaggatgctgttgtttagttcaatctggaagactctaatggaattgagttcaaaccaggttaaaagtaacggaattacaaattccagtggtcattgtcttgtggtaaccagaagttaccattgtggtttcctccgcgtgagtgcagtcccacaattaacttcaaaagtggcctcagtctggaatttttccacaggaaaagtcagcagtaaatattgacaccggaatcgcag

SEQ ID NO: 30260 - DNA, 318 bp, Mus musculus
  source 1..318: mol_type = other DNA
cccccactagacaaagcatgatttttctctctcaaagtttaaagcgcttcaactaacagtcaagcacactggctagttttgtgtcaacttgacacaactggagttatcacagagaaagagcttcagttgaggaaatgcctccatgaaatccagctgtaaggcattttctcaattcatgataaagggggaaaggcagagcaggtcttgcgcgcgctcgactggccaggaagaacgacgctgcaacaggatccttctgcacaggcctaggacaggtcttggcaaaagaactggccagctgtagccaactgccactctgca

SEQ ID NO: 30261 - DNA, 373 bp, Mus musculus
  source 1..373: mol_type = other DNA
attcatttgctacgtcaagctagctagggtcttctagtgacctagctttcctgaagcctggtcaggtgacagcagcagggctgcaggctcaaggaggtcagctcctctcctccgccctcctgagtcgctgcctttgcccggccagctgcgggctaggccccgggcgggggttccggagcccggagctattccgcgtccaggcccacagtcggcgcgcggccggcgggaagggtcgcctgggcgagtttcgaacgatcggagcgagaccccgcctgaccccgggagaccgcggggcgtggcgggcgaggggcgtggtgtgggcgggactagaggggcggggccggcgccctccggccgcagcaggctggtggcg

SEQ ID NO: 30262 - DNA, 708 bp, Mus musculus
  source 1..708: mol_type = other DNA
cagcagcagggctgcaggctcaaggaggtcagctcctctcctccgccctcctgagtcgctgcctttgcccggccagctgcgggctaggccccgggcgggggttccggagcccggagctattccgcgtccaggcccacagtcggcgcgcggccggcgggaagggtcgcctgggcgagtttcgaacgatcggagcgagaccccgcctgaccccgggagaccgcggggcgtggcgggcgaggggcgtggtgtgggcgggactagaggggcggggccggcgccctccggccgcagcaggctggtggcggcggcggcggtagcagcagcgcctagtactgcagggacagcgctaactcggacgccggggaagcccgcgccccgcctgcgcctttgcggcgctcccgggagccggagctagagcagctccgaggtgcgccgagaccagaggctgctgcagagccgcggtgcgggagagccgcaggtcgagccgggctaccgcgcaaggcgcagacatcctacaccgcggcgtctgtccgtggcggctgcgcgagagatccgcggagcacgcaccaggcgggccagggagccggcccctccgagcctaagcgcgcctggccgtgcgccgcggggacgccgagaccccaccgggtccagcaacgggcggggcccaggtgcgcccggccgcagagggcctgtgactgctcggggggc

SEQ ID NO: 30263 - DNA, 316 bp, Mus musculus
  source 1..316: mol_type = other DNA
taagagaccctgtctcacaagtgtgatgaatggagaaatgacatcccagaaagtaaattatgtccttaattacacttggaaatatttagtcaggtgtgttagtacacgtagccagagctaaccaaacaaacaattggaaattgtttttaaattgtttattaaagaagaaaatcacatcccgcatgagcagccgtgccttggcaagctgggcaggaacgttcactctcaccagagactctatttccaggtgaatgtgtgacttgactattcctctcagaacctggcaggtatccttcagggccagtttgaaaccctc

SEQ ID NO: 30264 - DNA, 230 bp, Mus musculus
  source 1..230: mol_type = other DNA
gtgcacatgtatataccatatactcaaattgaaaggtttaattagattccatatataaaaacgaggctattgtatgctctgaaaacgccttctcgaggtcagagcactcccaagcctgggctgttgcctgacaataaaacattttctctgattcgaggctttcttttgctatgataaaaaccaaaactaaaagcaacttggaagtgaaagggtctgttccccttacctct

SEQ ID NO: 30265 - DNA, 276 bp, Mus musculus
  source 1..276: mol_type = other DNA
tgaagacatgattgccactggttccaagtggaagccttcacaggcctctgtctactcccgtgagagatgactcatgactgagctgaagtgtaactatgctgacatgtattcagttgcaatctgctgggtccaggggtaaagatcccgaggccctaaccccactctcttaataagccaagccgcttctttaagtaaatcagcggctcagtcagcccgctgtttgcgccccggccccgcccgcgctcgcgccccgccccggcccagaccacctctgcg

SEQ ID NO: 30266 - DNA, 565 bp, Mus musculus
  source 1..565: mol_type = other DNA
aactcggaagagttccaagaaccaagagctaggctgcctggggccctgggctgcccattagcttgatgtgggctgtttataaaacacccctgcattagacccaggacctttacggcctcggactcgtcctggatccttggaaatctacaacaatctaattcatttggagtcgttacaactcagttgtgcaacattttcgtggaaaaagacggggggaggggaccccgcgcgtcgcagaggtcaaaagcgcgggcgggcgggcgggctcgtgcgccaccttccccgtacagaggcgcgggggctggcacggggcggaccagggctctcagctcgcagatccgcgggctgtagcggcatccggacgtcccgcggggcccgcccagtgcgctgcgacgcgatcgcacagcgcaccccacgcgcgcgggccggccggcgtgatggactacagtcccagcaagcccagaggcagcgcggggcggggtctggcgcaattccccgggatccggcgcgctgggaagcgccgccgaggacgcagcggcggccggagggcggcgagcgcaggcgg

SEQ ID NO: 30267 - DNA, 267 bp, Mus musculus
  source 1..267: mol_type = other DNA
acacaaagagaacattcagtgtgtactaggctcaggaatccctagtgtggttcacagagggttcagaacacctgttacacctttactagattttctaaaaaatagtttagagtgtgaggatgtcagacagatccttggaaaccagctaaacttgagtcctctggaagagctctttaccagattcttgaaggattgcctaagcaggtccctactactcactagaaggtgcttcctctgtgtagacagggtttcctgactgtcctggaa

SEQ ID NO: 30268 - DNA, 780 bp, Mus musculus
  source 1..780: mol_type = other DNA
agacggggggaggggaccccgcgcgtcgcagaggtcaaaagcgcgggcgggcgggcgggctcgtgcgccaccttccccgtacagaggcgcgggggctggcacggggcggaccagggctctcagctcgcagatccgcgggctgtagcggcatccggacgtcccgcggggcccgcccagtgcgctgcgacgcgatcgcacagcgcaccccacgcgcgcgggccggccggcgtgatggactacagtcccagcaagcccagaggcagcgcggggcggggtctggcgcaattccccgggatccggcgcgctgggaagcgccgccgaggacgcagcggcggccggagggcggcgagcgcaggcgggggcggggccgacgtgggccagagccctgcgtgccagggagggggctggccgggcagcggcgggcggcgctcggagcggtctccgcggctggcaaggcgcctacagctcggtcccggcttggcggacggcgcagggcagctgagggccccggcccgcgcggtagcgcggcactcacaagcgcgcggacccagccgcagccgtgcgcccggagcagagcggccactgcccgggggcctcggccccggcgctcgcagcgccgtgctgcctgcgctttaatggctgctcggccggccggcgtgtaggggtgcgggcggctgcggcgcgggaaggcgcccgagcgagcctcctccgcggccggccgcgctccatggcgccgcggtcttcccggacggcccgctgacccgggacgctggtccctgc

SEQ ID NO: 30269 - DNA, 269 bp, Mus musculus
  source 1..269: mol_type = other DNA
cagatagacaaactgaccctgtccatcaagagccttcacatccagatcactagtctgaattttcaatatacaatgtccctatgtccatggagcctctcggaggacacatttgcccttgcagactggggtgacattgttgtccatatgctccagttatctgcagatgggctgattctgttgttggaaaagtcctggtggcacgccacctccaaccacccagagtctggctgtcctgtgccaggcaggaaggcacagtggtcctttcagac

SEQ ID NO: 30270 - DNA, 437 bp, Mus musculus
  source 1..437: mol_type = other DNA
tctaacagcttaagtatcaggatgctgctcggacctgaggcccaagagaatatcccctttgtttccctggggtccgaccaagggggagttcatgatcctccccgtgacatgtgtctccttaggttcctagtgcgtgcatgtacacacacacacacacacacacacacacacagagagagagagagagaggagagtctcgcaggaatctgattctcttggatgaacagagaacccagtgaagatatttgagtctggactctattgggtacatatgcaactgaaagtgtgtgtgtgtgtgtgccaaacacgccaccagattcaccgcaactcctccagctattcccgcagaggtcgggcgggggcgcggcctcgtcccccgggtctcggcgggaacccggagctggcccgcccccactccctcccgtccccgcgttccg

SEQ ID NO: 30271 - DNA, 559 bp, Mus musculus
  source 1..559: mol_type = other DNA
aattcccggctttttaccattgtcgagaacaggggaaataggaaccgcgtgcccaggagtcctcgcgctgcgcagagccagggtgagagctcagtgcctatttacaaaacgcagcttttatttgagcaaacatcataaagctttcatcaggataatctcacgtaaaagactcgctttattatcataattatcgtggctgaatgagggagaccaccgccggccgccccgctgccaccagcgggccgcaagcgggctgacagcaggcagcgcccctggttaaggtgagcatcacacagggttctgctgtagtaaaacactcccggcccatcggtggcgggtgccagttccaagccgcctctcatgaggcctccacagggatgccagggactcctccgcgcggtgcaaaggctccagctcccaggccagcacgctccaaccgtggcgccggtagcccatttgcggcccgcctgggtgaagggggcggagccctaatttcgccccgccttcccctgtggtgctcggtcccacgtgacacgagctccgctgggcagctggcaaa

SEQ ID NO: 30272 - DNA, 350 bp, Mus musculus
  source 1..350: mol_type = other DNA
cagccacagtcactatggctgattccggcgtcaggacatgctgagttgtgcctggcctatcaaaaaaacatccctgggacccttggtgtgttgagcctctagatggaggttcatactgctacagggtttcagggcatgcccctaaaggaactgcagattctttgtaaagtttgccactaaattttaacgttaactaagaatgaaaactaagaaaagcctttttgacataaacagggcactttttatggagtcaaagtgcgcaacttctgcacccactctgaagggagagccggacgtagctcctcccacccggttgcagttgccacggaaacggaataagcaggcactgc

SEQ ID NO: 30273 - DNA, 296 bp, Mus musculus
  source 1..296: mol_type = other DNA
ggaactgaattccgtctgcagccccacataaaagaccaggtcaggtgtattactgtggttcaacaacatctttgagctgtgcgtaaggcacatgactgtcgtcaatccagaggcttgattcagcccaagctacataggggctagcctcatcccctgtcctctacatgactgtggaggtcatgtgaccagctgcctcatgctcctgtcaccataatgggccagtggccatctctccagcacctgcacagtaaggccctggaagaggcctcctcggccctgaaggcaaagcagcgtgt

SEQ ID NO: 30274 - DNA, 363 bp, Mus musculus
  source 1..363: mol_type = other DNA
gcctttcagaggcccaggggggcatgagagcagagtgaccaccagccctttgggttttactaaatggggaattaatgtgcatcgcgattagaatgtagattttgagccttttcagtgactggcactgctcgactccgtggaacacggtcttaatagggccttaaggactttgtcccctctgtccatcgaagttcagaagttcagagtaatttgtcttgggaacaaagtcttccctgaagctaccaaaggaactcccggcctttgcaaagggagggatgggttacaggagggcgtgtgcgcctgtacaagcctgcatgcctgcgcgcaactgccacctagaggcactttcccgcagtgtatata

SEQ ID NO: 30275 - DNA, 440 bp, Mus musculus
  source 1..440: mol_type = other DNA
aaaaacagaaaaaacaatttagttatgttacctcccttttctattgtgcatgtctcaatatgtaaaattattgaattttattaaataattttattattaaaatgtatttgattttaatcaaaagcgttctctcagcaaaatagaatctgttcttatcccattacttggagggtttgtctgcatgttttttcagaaaagtgcgcgtgcgcgtgcgcataataacccaaaccaagaagagtttcaggtttggagtttcttgggtccaacggttttactgttctcccacggcaactttggttgtggaaaaacgagccgcagccgaacccttccggatcgcagggctctgactcagatcctccagagcaccgagacgttggggcagagcgctcgccgcccttgtattccgctacggcgtcgctcgggaagtgacgctcatcgcg

SEQ ID NO: 30276 - DNA, 522 bp, Mus musculus
  source 1..522: mol_type = other DNA
ggttccctttcctctcctgctgacagggaataaatgctactatcgaggcctctctctgtagctcaggctggcctgttcctcccaagtgttgggattttgggtgtgaactagcacacacttggctaagatctctgggtggagctcagaccacagacctactggaccccctgggggacagcgactccagctggaaacctgggctcacagtctttcctcagtttccctgtctgtgaagctaagtaaagaggaggatgcggtttgccagcagatccctcctatgggggaccaaggtggaaatgagcgcacaactccaacgcgtgttctgctctcaaccggcttggggacaaggtgcctctgtcctccatacccacttcagcgcctcccaggagggccactggagtccgctggcctgtccaggcaccctggggtgcacgtcgatcccggagctgggcgggtcaggagtagcccacgatctgagccgcaagttgggcaggaccggcgccacagctgcctggatccccg

SEQ ID NO: 30277 - DNA, 236 bp, Mus musculus
  source 1..236: mol_type = other DNA
ttactgattcagctaaattcactgacagtaagacccagggatctgcctttctctgtcgaatatccaattcataacattatgattcgtgacagtagcaaaattgcaagaaccatggggctaaagctgtttccccgaccagtaaccaatgactgttcttagagctggagtttgcaggagtccagctgcaacagagccccaggtctggtttcccctggaccctgtccagtttggagttc

SEQ ID NO: 30278 - DNA, 333 bp, Mus musculus
  source 1..333: mol_type = other DNA
tcattgtaaggtagtccgacaagctgttagaaatgcaaggcagtgtactccccagtaacagtctgatgttcaacagtcgaactgagctcatggggttaataactctttataaacccctttccagtaccatttccagtgtaaaccggggtgccacaccttggatgccaatcgttcagaaacagacggctgtgggggcacccagacgtgtggacagggtccagtggcctctgcagagaaacaggttcttcagggtgcattggaaagcctcttgggaatctgagttccccattgggaacacaagctggtaatcctggccccggcccaaattaagaa

SEQ ID NO: 30279 - DNA, 326 bp, Mus musculus
  source 1..326: mol_type = other DNA
ctgtctaatacgaaacagtcccactctgagtactctcaaaggacgattcgcagtgctttgagtcccaggtacctgggctgccatcagaagccacctggaaattccagattgagatagggatgctggcttaaattataaccccagccaatggtgggcatgcccctatgaaggagacccggggtcccccacctcgcggtctcggggtacccgaggatccccgcggtcctggccccggcctcccgcgtcccccgcgttcccagccccgcgccgctgacgccatgacgccgcggcggagcgaggggcggagcgggcggccggacgagcgc

SEQ ID NO: 30280 - DNA, 381 bp, Mus musculus
  source 1..381: mol_type = other DNA
cgaagaaggctcttctcgtggaaggcgcgtgctgcgagtcgggtcactgtccagcgtgggtagctttgtggtccccaaagccgtgccggctcggaagacagtagtgacgggcgcagctgcgctctggcagaaagccacgcgtgtcctaaccgaaggcgcgcctccctaggcctgggctggtctcccgcgctgactcagctggggacggccagggcgtggccaagggtggggtccccagggtctttccctcagtcctgtctgccgcagggacccgggcgtgccatcgtgggcgaagccgacgagctgggcggggctggggcggagtatgcccccggctcctctcttgccacccccgcccccggccgggagccacctgcgccc

SEQ ID NO: 30281 - DNA, 248 bp, Mus musculus
  source 1..248: mol_type = other DNA
tggaaatttaggcgtaattacaaataaaaagctttaaaaaatatgtatataatgaaaatttaaaacctcagcaatcaaataatcttttgttttgtgttttttcagccctggctgtcctggaactttgtagaccatggctcaaataatcttttaatgcagtcatataaaaatcaaaatgaaaaaaaaaaaaggatactggtttggataattttctcattttgagtgtactgaaacagcctccggcagcc

SEQ ID NO: 30282 - DNA, 412 bp, Mus musculus
  source 1..412: mol_type = other DNA
cttccccatgtccccttgactttaggacatgtggggtccccaagacataggtttatgaaccccaaattggccagaaggtggcagcagcctctagccttgttccccttgctgtgaggaacgctgctcacctgcagcgtgcagagtgcagacctgctcagttagtctgagctgctgcatccatgactctccaggtcaggcctagcctgtacttgggggggctggttttggccacaccactccagcaccccacaggaacccagccgtcgtttggggacctggagaccctccaagcccatccggccctgcagacattccaggaggtcaggtgccgcccgccagcttccgccctcgacagccgcgggcgtgggagccgcagtgggccgggcgcggtctctccttagctcccgccccc

SEQ ID NO: 30283 - DNA, 325 bp, Mus musculus
  source 1..325: mol_type = other DNA
aacaggtcctcatgctgacaaacgagatcattccccagaattgctaagaaaatcactttccacagaaatcccacagggacgaatgcatgtagaccaggccttcctcttgtctctgagcgccgggactgaggtatgcgccggaactcccggcctgagtagatttttaaaagtgcatataggaatatgagaaattatggtgccgggcacaggaacttagtaggcggtcggggatgcttgcgcttcggtgaccaatcagcaaaggtcttgtggcccaccctcagggagggccgactaacactgcggtcacggcgcagtccccgccccg

SEQ ID NO: 30284 - DNA, 438 bp, Mus musculus
  source 1..438: mol_type = other DNA
agaattgctaagaaaatcactttccacagaaatcccacagggacgaatgcatgtagaccaggccttcctcttgtctctgagcgccgggactgaggtatgcgccggaactcccggcctgagtagatttttaaaagtgcatataggaatatgagaaattatggtgccgggcacaggaacttagtaggcggtcggggatgcttgcgcttcggtgaccaatcagcaaaggtcttgtggcccaccctcagggagggccgactaacactgcggtcacggcgcagtccccgccccgccacttccggtctcgccgccgggagccggtgcggctgtgaaggccagcgcgactcagtgccgctgctccgccggggctcgcctcgcctgactcgcggtgctcaggtaagctggtcgcgcgggctggactgaggccgaggctcctgtcgc

SEQ ID NO: 30285 - DNA, 315 bp, Mus musculus
  source 1..315: mol_type = other DNA
ttactgtctcactgacagacagagaatctcattttacaataaagttagcattatacttgaaaaataaaaaataacaggctggcctcgaactcacaagtactactactgtttcacgcctttcaattgtttaaaaaaagatttttatgtgtatgtgggaccggtgaagtcactggtccttctgtcactagtgacagcccagggaggtgggctcccagagcacgagcggcgcgcgctttgccgatgaccggaccggcagcgcggtggccctactaaggcaggggcggaggcagggcccgtgcggctcacagctccggg

SEQ ID NO: 30286 - DNA, 366 bp, Mus musculus
  source 1..366: mol_type = other DNA
ggtcatgttttgtgcaggaacctgggaagcttctctgtctgtgaagtgtgtccccatgaaccacacactgcatgggcctggagcacccaggaaaaggccaaggctttgtttgttatggagaaccccaggctctcccacctgcacacccaggtgtcagggagcctgtccatgggctgaccaacctgtgcttactcaagatgcccagagcaagtgcagagctagctctagatatgtcccacaacaagagggaccatggctatctgggtccctaaggtcctgcctgtgtgatagagacagtgtagcttttcaaaggagacagtcttcgaagagctgtgtggtctgcccagcccagcctagcccagccca

SEQ ID NO: 30287 - DNA, 339 bp, Mus musculus
  source 1..339: mol_type = other DNA
tgtctgtgaagtgtgtccccatgaaccacacactgcatgggcctggagcacccaggaaaaggccaaggctttgtttgttatggagaaccccaggctctcccacctgcacacccaggtgtcagggagcctgtccatgggctgaccaacctgtgcttactcaagatgcccagagcaagtgcagagctagctctagatatgtcccacaacaagagggaccatggctatctgggtccctaaggtcctgcctgtgtgatagagacagtgtagcttttcaaaggagacagtcttcgaagagctgtgtggtctgcccagcccagcctagcccagcccagcaggtct

SEQ ID NO: 30288 - DNA, 334 bp, Mus musculus
  source 1..334: mol_type = other DNA
gatgacaaagtgctgttatttcaaaatcctattgcagctagagaatatctggtctacatttgcaaggaagcaatgacttgttacctatcttttctaacacacaactttgtaattggtaaagcgtcccagtgggacagctgagaccccgctgggcgccatcctgctcccgggcggtcagaaggtgctttgcctgctcggtcacacagagacccgcctctccggccaaaagcctgtctggatgtcaggctcggcgccggacctaatgcccaggccaagagcgcccgtgcgcttgcgcagcccacccccgccccgcccccgcgcgtagcactctggg

SEQ ID NO: 30289 - DNA, 502 bp, Mus musculus
  source 1..502: mol_type = other DNA
gcctttaagggcaggtgtgctgctttatctacagccaatgtaatgacagcagctcaaggcagctaggcctgcctctctggaggagaaccacccagaaaaggctgggcagtgggcagcagtctgagctccatctgcctggcttagcagagggatccgcctttcagccagactgggtcagttctctgtagctgctagtagcagactccgtagctggagcctgagaggtgccagctggcagggaaaccttaaaagtgctccaggttccccagcttgaaaaggaggagccataagggctgccatattcgtggaggcgtgcacggaccggatcgggcgcccgcctcctcagggtcccctgtgcctgcagagcgtgccctagccgcgagggggcgacggcagcgagggcggcgcgcgcgaggcgggggattcaagcgcgttataaggcgccgacctgcagccgtgctctttactgccgccgccgccgccagcatggcctcgacccgcc

SEQ ID NO: 30290 - DNA, 457 bp, Mus musculus
  source 1..457: mol_type = other DNA
taaaggcacttgccagtcacacatacacaataatttaaaatatatattttaatcttgagctgcgtgagttcaaggccagcttgttctacacagagttccaggacaccctgggctatctgtactaattaaacacataattaaataaataatcttgacctccgttagcaccaagcatgcacaaggcatgcgtacggtgagcaaatatgcaggcaaatatctatctatctatctatctatctatctatctatataaattaaatactatttttaaattaaaaaattgcaggcatccgcgatttcctgatgagccataggttcagagcctctgggtggggggtaacccaaacctcggccccgcccctcccgagagctgccgaggaccctcctctagcgggcagttccatgcgtgcgctcccagaaacctgtgcgtgagcaggtgccaacggtgccaacgatg

SEQ ID NO: 30291 - DNA, 321 bp, Mus musculus
  source 1..321: mol_type = other DNA
gctgcagctgccaactgtcacgggcatcaagttactggggccagacagcagatgggtccaaaaggacacacaagcaccggtgacccgaagccccttccaggtcccgaggtcacggacttgactttggcactgccctgtctgaagtcagctctgggactggacggaccgtagctaagtccgagcttacaggcaggcaggtctggcccaggagtcctgcccggcctaagtggcaggaggtctggctgtgggctccgccccgccagctgccagagacccgcggggcctgacaaagcgcgccgctctcattgatcggtgcattga

SEQ ID NO: 30292 - DNA, 437 bp, Mus musculus
  source 1..437: mol_type = other DNA
tgtcctatcactggaggagtaccctcccctgactagctagtgtctgtagcttccacttcagaagtgattgagggcaggaagaaatcacttctttcctaatgacggtcagcctggggggcctgtcctagggtcacccagcctgtcctgggaaggtgctcagcagcagatccagagggcagagagcattctcggtcctgccctggtctctgccggctgtgagttgcgcagcggccaagcaccattcccccgcgccgcagtggtacgcgccactccggggctgcacgagcgggccaccgccgtgccaggtgtcccgcaggccggaagtggacgagcctactcgcccgggcgcgggggggcgcaagagcgcgcagctgaggaacccgggcggcgaacatggagttccatgccaatggcgcgcgcaggggcgggctcagcgc

SEQ ID NO: 30293 - DNA, 336 bp, Mus musculus
  source 1..336: mol_type = other DNA
tttagagacaggacttctgctctctgaattctgctctctgaactcccccagagaccaactccagctggggctcagagtgagagcggacagcagcaacacctgatccagtagaagcatctcctgcatagccagctgcagcatcctacttagaaatatcatctgggcagtgctgtgcagcgccctatggtgcgccgggttggcggagcaagccacagaggcggagcgcgtgtgtcctccagagcagctagagaggccggaggggatgggcggggccgggcgcgcgtccgttgccaaggccgcgcggccctagagaccgggtgctggtggcacgcgcaa

SEQ ID NO: 30294 - DNA, 395 bp, Mus musculus
  source 1..395: mol_type = other DNA
ccagggatgtgcagccgtggagcagagccataaggctgagccacctctggctctttgggtgtcacctgtccctcgtgccaacggtgttatcactctgttccaggatgcctcacacagctccacagacctgtgcaactgagccagtagtcacagccgcggtgttggagactgtggccttgcctccatctcacaggacagcggggcgcttctgtctccttaaggcgcggtctccccccggtccactggggtcctccccctgcaaggtcctgttcgtaacgcaacgcacacagtgtgaccgatgttctgtcaacggagaaagtcaccgactcggcggaccacagtccactgggccgtaacggtcccgcccacgtcccgccctccagtgggcgggcccc

SEQ ID NO: 30295 - DNA, 403 bp, Mus musculus
  source 1..403: mol_type = other DNA
cgctcggcgctcagagtccagatggcaaagggccggggccctcctgccctgcccatcagtgcccagggcaggggacttcagacatggcgggcacatgggcgctcccgcagaggctcgcccctgccccgggtcgtggcactctgcctgcacagctccactcactgcgggcaggatcgcgttgcagacgccggaggtctcagtgcgcgccccaagaggctcccagctgcgtccttggtccacggagcacatctgggcttcagcaccgctgattagcggcccgcgcctggggtaggagcgcaggctgagcgcgcggatctggcctccgagatgcgggccacagtcaggggggcgggggcggccggcgaaggccccagaatttgtcctgcccctggccacggccggg

SEQ ID NO: 30296 - DNA, 416 bp, Mus musculus
  source 1..416: mol_type = other DNA
ggcctttcacgcccatgccgtggcgggccgcacccccaagcggcgcgcctgccccggggcagggcggggcccgccgcgcctgcgcactccctctgggctcggcgtcccccgcacgcagcccacgtgatctgtgccttgcctaagatggaggttgccgccaggcccggccgggccctcgccttagtccttagagcatgagacaggcgctcaggcgacccgggcagcgccgcgggctgccaaggaggtctgtccacggaccagctccctgctctttctaaaacagcaaaagctctcagagcgggcgcctggagagtcttcggtacgccgaaggcggagccccttcgcagcgcccgcgaagcggggctggggggcggcgcccacggggggagccggcggggctggggcgcctgacgggc

SEQ ID NO: 30297 - DNA, 381 bp, Mus musculus
  source 1..381: mol_type = other DNA
tctggcatgaggcaaatgccagtctagcaagcagggcagttggggcaggtgccctagcccatgggcatgccacagtgacctcgagggtcactggagtgcaagcacccacatgggaaacagtgtttctcaacactgcgtagaggtgcccaagtgtggatatcccactgtggacctggttgttgttctttctaataacaagagtgatcatcaggttcactagatgcttacatcaaagtctctgagatattcgctccctacagagcagagtctcatatgtgtactgtaaggaaacagatacacatatctggctctattatgcatcccaactatggtgtgcctccagcttgcccaggagaagcctagagccgtctggactctgat

SEQ ID NO: 30298 - DNA, 305 bp, Mus musculus
  source 1..305: mol_type = other DNA
cactctgagcagcccagatctctgagccacctgaggcagctcactatgagaggatatatctgtgtcccaaatatgtctgggcacagtcctgcattctccgtacacagtcctgcacaaactcaggaccaggtttggaggcattctgcaagccacaaggcatgcagcttcaatgtagagagggctgatccctgctctgtgttcagcctacagatggaagggcaaccagatgtaacaccaggatgctaaaaaggctacttgttacctgagggtcactggaatccaggggcctctttaaagttgtcaca

SEQ ID NO: 30299 - DNA, 385 bp, Mus musculus
  source 1..385: mol_type = other DNA
aatgaggagaggtttccccttcccgtattcaatgtactgtaaggatacaggactttctagaaatccaggtccaaaccctcagaggctcttggagctgaagagctttccatcggcagctgtggtgccaggtctgtggccacctcagctcttagcactacaaaagctcagaactgctctcctcagcgaccagaagggcggggagcggatcctcccctgggagtggggggtcacacttttgtcacacaactgagctcaaagctgggagcctcaaggcctctagcctaacttgtctaggatctaggcgcgctcctcgcccaaacaatctaagctcaagcaactagagcgtcgactcagtggtgacgtcatggcagcgcgccgcggacga

SEQ ID NO: 30300 - DNA, 375 bp, Mus musculus
  source 1..375: mol_type = other DNA
caggtatcagctggatttcagacttgttaaacctggattttatcaggaggtgctcagaggatcctagggggacatccaggagactcactagagtattctagtctgtcagagcatctcaggccctctctgtctttcattcattctttaaaaaccatggtataatatagcaggggacagtccagtccttttgatttgcagatctaaaaactgctgcatttatgagtctgactgctctagggatcacttatgactaaacagtagccattcggatgctctgctggagtctcttctccgctagctcccagagagctgccctgcagccaggccagcgagtgccaccgaggcgcggtcctccgaggtctagacgtgctcgga

SEQ ID NO: 30301 - DNA, 382 bp, Mus musculus
  source 1..382: mol_type = other DNA
tgctgcccggcagcagcggggtaggcctgcagctgcgtgacagttggtggtctgccacacctggcctggagttgagctgcccaacagagggaccgtaacagtcgctggcaatctgcatcaactgtcatcttggagccgctcaggacgtgatgtcacgtccggcgagggaagccctgcctcagctgccccccccccccgccctgcccccgcccccacaggtggtgccgccgccctgggtgctgggctgggggggacaccttaggggaccccggacgcctgggctgagagaacattccctcctctccctccggagagcgaaggggcgcccggtgcgccccgatcgtgccccgcctcgccccgccccgccccgcccgggcgctcc

SEQ ID NO: 30302 - DNA, 482 bp, Mus musculus
  source 1..482: mol_type = other DNA
agagggaccgtaacagtcgctggcaatctgcatcaactgtcatcttggagccgctcaggacgtgatgtcacgtccggcgagggaagccctgcctcagctgccccccccccccgccctgcccccgcccccacaggtggtgccgccgccctgggtgctgggctgggggggacaccttaggggaccccggacgcctgggctgagagaacattccctcctctccctccggagagcgaaggggcgcccggtgcgccccgatcgtgccccgcctcgccccgccccgccccgcccgggcgctcccgcccctccctgcccctctccgcggccgccgtggggccgggcgggcggcgggggaggcgccgagccggggctgcgcgttcgcccgccgcgctctaggcggcccgactgagcggccggacctcgcgcctcgcgcctagctccccgcgccgcagccgcagccggccctctggaccacgagcgtcgcg

SEQ ID NO: 30303 - DNA, 271 bp, Mus musculus
  source 1..271: mol_type = other DNA
aggaaagttgctaatttgctgaaagcaagttggcctgagatcagtctccagtcgtgttcctaggttttcttaacgaatgttaacatattatgaaaacattcaaggtctcactctggtccaggctgacctcgtgtatgcatttataaatataaatccatttttggcacccatggggcgcagagcgctttcccagctcagggagggtgtctgagacaggcccgtggcaatcgcagctcagctatctaattgcagattcgtctccacggcaacg

SEQ ID NO: 30304 - DNA, 425 bp, Mus musculus
  source 1..425: mol_type = other DNA
tgaaactgacttctagttgcaaatcatagccatgaatgaaaccaaaagttttcactattataacaaaattgaaactgaaattaactagaaaaaaaaaattgactctcatagacactgtttctatttctaatttttaaaattattttgtgaggcttagcaacagttgttgcttttccacagtcactaaatattctaaatagcctttgggaagtcacatgaagacacaaattcagtggtagttttattgtatattctctgtatagccctggctgtcctggacctgtggcctgctgtcctgggcaaagggccaaccccttgaccctcacggcatgacagggcctccctgtcctgcagccaaatcgccagctgccggccgagccgaggacaggaaagaacgagctggtgaggtcgcctcctagaggcaa

SEQ ID NO: 30305 - DNA, 384 bp, Mus musculus
  source 1..384: mol_type = other DNA
cctggagttcctgcagaatctgaaatgagctccaggagtgatccagccgtacctctcccagaagccactatcagagtaggagacagaatgtgtctttggacagctcaacctttgaacggttttgttgtgctagcctagctctgtagataggagcctcaaggcagaactgcgttcatcagtgtgtcttcttctctttatgcctaatttgaatctaaatagtcacactcagcgcgcaggctgaagatgcccagccttccccagcgcgcgttctgctccgccgctcgcgccgcgtctcggtgcacaggcccggggccgcacacagcgcccccggtggctgccgagcccagcctgagcggggcggcgcacggcgcggggacgggccgg

SEQ ID NO: 30306 - DNA, 503 bp, Mus musculus
  source 1..503: mol_type = other DNA
cttttttttttttttttttttttttaaataacctcaataaagagttaaggtgtcatgccacagcagtaattgctgctgatgcaggagcagcccagcctctcactgcagactctgaagcagcaggttatgggtaaaagcttggcctactaccttttatccaagactgagaaaaagggtaggtggcaaactgcagtctacaaggtgtgaagcctcgtcgtctcccttcctgtatgaagcttctagtcttgatgaaatacaggagaagacacagagaacagtccttggctgatttgtgtccttcctgggacctggaagagtaggcaccagaaggagagtgtcctgtccctgcaggccatttaaggcttcaaggaatgccattccctggccgcttaggatccagagcgtctgaagcccaattgagccacttcctcactggctgggttgccaagttcctgcctcacaccggaaggagcgaagcacgtgatcagcgacgtatgctggga

SEQ ID NO: 30307 - DNA, 728 bp, Mus musculus
  source 1..728: mol_type = other DNA
ggcaatatgccacctagggcagacagactcttggtccaggctgcccctcgccctctgcaggtgtcccaggggcagggtgcagctggcccagcagtgccagaagcccacccgggcgggactcacggccggggcgtcggtcgaggtggaggcggtgcgcctgcacctgtccagcctgaaggccagcgggcagctggcagactccgctccaggcgcatcggcgaagccgggcagcgggggccccgaccccggggcagggaaggccgcaaggccgggtgcgcgtcgagcacgagcgcgcggggcgcgggccgcagcgcgcacagttccagcaccaggcagccggccagctcacgcgcctcgggccgcagctccaggcccagctgcaggtggcggaggcggaagagctgcgcgctggaggccgaggccacgtccagggcgggcggcggctccggcggcgggcgggcgggcgcggcttcggcgccgggcgccttgcggcagcagcactgcgccgccatgaccaccggatccatgggcggcggccactgtaggccgcggtcagtgggcgaggggcccgggcggcggtcggcggtggtggtggcggcggcggcggcggcggtggcggccgggcgcgggcacaacaggaagtcgcgccgggagccgcccggcccgtccccgcgccgtgcgccgccccgctcaggctgggctcggcagccaccgggggcgctgtgtgc

SEQ ID NO: 30308 - DNA, 167 bp, Mus musculus
  source 1..167: mol_type = other DNA
catctcagaggaagtggctctgtgagaactctcagctccccctcactgagagactggccccacttgcccagtgtgctctgtagaccaggctggccttgaattcacagagagtgctgggattaaaggcatttatttgccactactgcctggcggccagaagccagcct

SEQ ID NO: 30309 - DNA, 369 bp, Mus musculus
  source 1..369: mol_type = other DNA
gtggggtcctatgaaggtacctgccctgcccatgtgtctgtatccagtgaaggggcaggagggacactatcccccaacgcctgacacatcctagggtctgagggcaatgtttctcagccaatcatttggctaaatacttcctcacagcctttcttttaaaatgcattttcacatctgtaggctgctgcagcccagagctcccttctagggcactactccagtgtgctctcagatctaagggcgcctcctgcagtacccctcgctggtgagagagggaagccagagtggggaagacgccaagcagggcgggtccttctctgtgaccaatggtgtcacttgtaagggtcacaggtgtgggtgttcccagta

SEQ ID NO: 30310 - DNA, 369 bp, Mus musculus
  source 1..369: mol_type = other DNA
tcatcactcccaccaccgcagtgcggggagtcctggtgggaggccttagctgagttactcagccccgggctgtctccgggttagcctgccgtctgtagcttcaccccagcagatggtgatagggcccaaaagccagatgagatttttgagacctacctgttaacacttggattttatgatttcaattgaaagagctgggcgccaccgggtccctctcctttgggagtgataggcactgctgagcgagggggtgctgcacccgattacgggcgtccgtctaccagctggcggctgagcctcggacgcagcgctcagccaaccagcgcatcgggaggggcttggggagggccgggtcgggggcgcggagcc

SEQ ID NO: 30311 - DNA, 366 bp, Mus musculus
  source 1..366: mol_type = other DNA
acacccatgtacatgtgcttgtgaacatcttggtaaagatattcctttactggaaggcagactataaacaaaacactgtagttagaatgttattctattctgcatagtataagaatatatctgcaattaaccatttttaggtattaacgtaaaaaatatgacattttgtctttgaaatctttttaatgtgttttggtgaaacccattcttcctaggcagccaaatgcagtgggtaaccttacattggaacacagccacacccggcctggctgccatggaacccctcttgaagaagtttcagacccctggctgggctgtgaggggacccagggatcatcaaccaggcctggcctctgagttcaacgc

SEQ ID NO: 30312 - DNA, 369 bp, Mus musculus
  source 1..369: mol_type = other DNA
aggttagcagaaggcctgctcacaggttaggctctgagcagcccctctaagcagggcagaggctgtcaacctgtaggctgtttgcagactagaaaccctctaggggccaagggtcgatagggtccttcttgccagtctggacttgcacaactctgagcagggaggcggcaccgggcagggcacccactgcagagccagagactgcttctcctagaaggccccagctcctggccgcagcctgcaagacctgggacccacacagggtctggcagccttcacaaagacactgtgactagcttgtgaagcatgaggtacacacggtgagtagggcctccgcacttcaaaggccttggccttggttcagctatt

SEQ ID NO: 30313 - DNA, 397 bp, Mus musculus
  source 1..397: mol_type = other DNA
acaatgatgacactgtcccagccatggagagctcactatggatagcattctggcctgccgggcataccaggtctaggcagcgccttgcttaggcgtggtctcctagggctccaagcaaggaaggaacttcctggcctggctgccgagtggattctatagtgcggtgggacccacctcccacagaccacagtggtggggacactgtctgcagccttgggcagccatattctgggcatccccatcgccagagccagggcaggctgcagggatgcctatctgaggttagcagaaggcctgctcacaggttaggctctgagcagcccctctaagcagggcagaggctgtcaacctgtaggctgtttgcagactagaaaccctctaggggccaagggtcgat

SEQ ID NO: 30314 - DNA, 400 bp, Mus musculus
  source 1..400: mol_type = other DNA
cagggtggcccctcctgagatgagcacactgtgcccagaaaaatagatggaatgtgcttgtgttttctgtgtcaaaatttattgactaacaatgaacatataagatttagcagtttcaataacacgttttacatatataactttaattactaatgttaaatctgtatgcatatgcatggagcaggtaacctgccaggctccaagaggaaacctttgctacaaaggaagacctttgttcctggggaatagacatctgtgacacacatctcactaccgatcacaaagttctttggcacatgaactaagtcagttagtgaccctccagggaaacctgggcactcagcgtcctggttgccacagccacaatcaaggtggggcatctgggtgctcaggagcaagt

SEQ ID NO: 30315 - DNA, 271 bp, Mus musculus
  source 1..271: mol_type = other DNA
aatctccggggcagctgctgctacttatccaactacccccagggcctgggtgaccagcctgctgcatgactgatccgtgagtctctggcattctgtcaggaaaagccagatgctctggcctgacagggaccctcaggccttagggcaacaagtcagcttcagaacttgggcaggccttaagctggtgacaggagccagtactagttcgcctgggagctacgctccgtccccgcccctcccgagtggccggctgggcaggctattaaacccc

SEQ ID NO: 30316 - DNA, 277 bp, Mus musculus
  source 1..277: mol_type = other DNA
ttgcaagagttgtcctttccactagtcccagcacccaggcatgttaggaacgtccttgactggaggcctttgtaacctagcttctgaagaggtatctgagaccctcacagcttcctctgtccctgaagtaacagagagggttgctaaagagaaggccttcctcatggttctgcctgaaaccccatgcagggcccttctggaatctgctctgagggaccctgatgtgcatttgccgaggtggcggatatcccatctgacttcagttccactcagtaca

SEQ ID NO: 30317 - DNA, 268 bp, Mus musculus
  source 1..268: mol_type = other DNA
cattgagatgatcctcactgagagggacaaatttggttttattactagctagagaataaagccataaatgaaaacacttaactcagttttagatattatttagtgatgcatatattttaaaaggctaagaataatccatgataatttggttttggtctgcaggatcctgttcctggcagagaccaaagggagctgcacctgcaagctgcaggtgctgggcacgagcatggcggacacagatcggaggccggacgttgtgagccaggaa

SEQ ID NO: 30318 - DNA, 294 bp, Mus musculus
  source 1..294: mol_type = other DNA
gtgaccgcccagcccgaagctcgccgctccccggtcactaggccatgggcatagctgacaatgcttgcgcgggcgcacaagcttgcggattcgctgtcactgacttcgggagcctcacttcacggtgagccggtaggcgagccacagaggggccgcggtccggtcctggggctcacgtttgcggcctccagcccctcgccttggaaaggtggccgtcgtaagaagggctgcacgtccacccgcgaagaaatcgggtcttttggctcctcaactgtttgcgcgcgctcagctgct

SEQ ID NO: 30319 - DNA, 469 bp, Mus musculus
  source 1..469: mol_type = other DNA
atagtggagtctttcaaagacatttaagatttgcctaatgctacaatgggtagggttaagtacatgtacatatgtacaagtctgttcgtatacactaacacacatatatgcacgcatgtaatgaccatgtatctacacaactgtatacaaaagcatgcacacgtgtaacatatatgtatgttacatatgtatatgacataatccgacaacgccttgtaaaccatgccgcgtgaacaaactggccagtgagctgacggaggacggttccctgccccctcgcctaagactaggttcctataggccgctaccgccctcgggacgggactcccgggctccgagcctccctggctgtccagccatattggcagctgtcagagctctgtggtggggccgtgaccgcccagcccgaagctcgccgctccccggtcactaggccatgggcatagctgacaatgcttgcgcgggcgca

SEQ ID NO: 30320 - DNA, 285 bp, Mus musculus
  source 1..285: mol_type = other DNA
ggtgtctcaccccaggctggcgcaagtctagcagctgagcgcgcgcaaacagttgaggagccaaaagacccgatttcttcgcgggtggacgtgcagcccttcttacgacggccacctttccaaggcgaggggctggaggccgcaaacgtgagccccaggaccggaccgcggcccctctgtggctcgcctaccggctcaccgtgaagtgaggctcccgaagtcagtgacagcgaatccgcaagcttgtgcgcccgcgcaagcattgtcagctatgcccatggccta

SEQ ID NO: 30321 - DNA, 222 bp, Mus musculus
  source 1..222: mol_type = other DNA
ctggtgagagtccccactgacctgaagtgactcttccatctgggtgcactgctgacacagctgtcaccgttgcagatgccatgtcaggggtcctgactcaagactcgtggccctgagtttcccaataatctacacatatacatatatagagaaatttactggattagaatacagtaaccagggcccttatggaagcccggcctgctgccacggagagctcag

SEQ ID NO: 30322 - DNA, 295 bp, Mus musculus
  source 1..295: mol_type = other DNA
ggttaagtgtgtgctcagcgtcagcctggcttccctttgggcctgtacccgtcctcaagtagaggagggtacagagtcttcgagaactggatctctatgataatcagatcaagaagattgagaatcctcagaacttccccaccagtcctggcctgtgctatccagcttcatacatgctgtaagcattgaagactccacctaggcttctggccaggttccatgcagtataaccccctttttaaacagaagtgtcagcgacatttctgactcaagagatgatcttgactctcaggcc

SEQ ID NO: 30323 - DNA, 322 bp, Mus musculus
  source 1..322: mol_type = other DNA
ttctaagtacatactaagtctgattgcatttgtaagccttagaatgacacactgcatatcactgtccagtataggtcagaagtgtgctcatgtcacctcaggagaggttcaaaataatgattgtgtacaaattcttcaagtagtctagtcctttcaaacattctgagggcagaggttctgctctgtcccaacaggtaattaacttaccaacctcttaaagagttggtccgctcccgggcgctgtagggaccccgcagcgggcggggcgggcggccggtctgacgtgtctcggcgggattggagcctccgccctatatagcag

SEQ ID NO: 30324 - DNA, 555 bp, Mus musculus
  source 1..555: mol_type = other DNA
ctgaactagaagttctatgtgttgagtgggcctgcggtccggttagacttcatggcttctcaggcgtcgcatcccagggtgactagtccttttcatccctaggacgaaatggcaccgttacctgggcccagccacgcccgccccaatgccctggacctggccagcaggatcacccagatgggggccgcccgtccagttgtcctcgaagggacgacgccagccaggcatccatcgctggagccccggactaagggtgcggccgcccctcccccacgcgctcgttatcaccgcctaggcggcccgggcgagggcagaactcgccctttcccaactcgagcccgcgcgacagtgggtacacattgccacacacttacccggagaacgctcgtcaggcgagagcacggacctgccccgcccagtagagcgcgcgcgaacagatggcgtcatcgcgccgtcccgcccccggttgcatgcagagcgcaagcgtggacgcgatcctgccgtccgcctctgcgcaggcgctgtgcccctcccacggcggttggccatatagag

SEQ ID NO: 30325 - DNA, 529 bp, Mus musculus
  source 1..529: mol_type = other DNA
actctagggtgttttcctatagaaaggccttggtgaaaggcccaggggacctcctgccccagccagcttcaagccggtcgcagagagcagggcatgccgcagatctctccgcccgccccagtctgaaagagggtagggggccgtgccggctccgccctcccccgcggggcatgggctcacgaccacacaggaaggccacgtccccagggacaggcaccactctatggtgtgcatggggggggggcggcagaggcggctagagatgcccgccggcaagtcacaagcgcccgcctatcccggctcggtgttcctagctcggtgctgccgccatcttccaggaggaaaggatagaggcaaagggctccctccccttcactgagaatctcgtgctcctcttttatggaatccaagctcataaggtactccccccgccctctatatggccaaccgccgtgggaggggcacagcgcctgcgcagaggcggacggcaggatcgcgtccacgcttgcgctctgcatgcaaccggggg

SEQ ID NO: 30326 - DNA, 459 bp, Mus musculus
  source 1..459: mol_type = other DNA
taaggacttattgccaaaggctagatatttagctagactggttcaaatgcaggcccattcgcttaaccatttttcatcctcaaatccagaaaggaaccgcgagggcttcgaggactcttagcgtagccaagcgtccctttaggaacagctggtgcctccctggttgggcaccacggcaaggccccacccagaatcggggctgccctgcttgccaaagccaggctgtaggctgagacccgcccctgtgccaaaagcccagggccacccgcattccagagtccaggtctggggtcgaagcccctcccagggccgcggagaagctgcacagctttgcttctcccatgtgatcaccaatcagagctaggtgctgcgctcgcaggcgccggtcgggaggacccgcccgcaggccaatcggtggtgcgtccgcgggggggcggggctgcggcggacgcgcggcgg

SEQ ID NO: 30327 - DNA, 193 bp, Mus musculus
  source 1..193: mol_type = other DNA
tcaaactagccccaaagtttgtttgtttgatcacagcagtagaaaaatgactaagcccacctcagctgacctggcactgagattacaggcacagctgtgtgtggaaggccctaataattcagggatgactccaggtcagggatgactccaggtcagggatgactccagtaactagttgtacttatagaatgag

SEQ ID NO: 30328 - DNA, 295 bp, Mus musculus
  source 1..295: mol_type = other DNA
tctattttcttctggggaaaaacacaaggtcttgcatgcaaggttggacattgctgactagtcactcatactgaattcacaggatgaaaggcatcttccaacctttggaacgccaggtcatgtcctgggggtgtgtgtgttgctaagcgcagacaagcacacaggcacgcgctgcacccgtcaccgcgcggcctgacaggaggggcagcccaggggacttgtagtctgtcgccatcagggccccgggctgggtacggggcgggctgcgggactcctagtcccacagagcttcgcg

SEQ ID NO: 30329 - DNA, 529 bp, Mus musculus
  source 1..529: mol_type = other DNA
gaccagagtctagtagatgatgttgacctgttcacaacgatgtctgtgatgcaggttggaccagctggtcaacacagagctccagacaagcctctctctcttttttttctgtcaaagggaaatactaactacaaaagattatatattggattggatataaataagtccagctcattaaaagcaaagctagacttgagtgggaatggatgggtatttgtagtatcttcaaccatgtacataccaagaatgcagaatctatttttaaatatttacttattgttatttcatgcctggtgtccttggagatcagaagagggcatcagatctcctacaacttcaagaatccaggatctttaaggagcctctattcattttagctgcctgccgggacagctccagtctggcggcgttcccgggcgcatcccgagagggcagagctgggctgcggctccgcccccgggggttgccgtttccttagaaggcgaagccctaagcctggcttctcgcccgcggggagaccgcggtacgc

SEQ ID NO: 30330 - DNA, 354 bp, Mus musculus
  source 1..354: mol_type = other DNA
tcaagttgaccaaaaaatttattagagtctgtcattctaatagtctcagtggactaactaaataatcaaacataatctttgcagagactaatattagagcctgttttaccagaccccgcacctccgcctagcttctgctctgcttggcacagcaggaaacactgttactgtcagcagagcagtgatgtgatggtaagaatcgtgtttagttatagctaagctaaaaagctctgggcagatgttcctagttgactccctcagctccactccaatgcagctagctcagttccaaatctccttagctctaaagcttagtcttttatagtagactacaattcccagaatggattggca

SEQ ID NO: 30331 - DNA, 432 bp, Mus musculus
  source 1..432: mol_type = other DNA
ctctgaagagtgttttaactggcttcggaattacaaatgctttttttttttaatattttatttatttattacatgtaagtacactgtaaccaatggttgtgagccagtgcacacctaggccagcctggtgtgtgttattagaaataatgagcccaaggaatggacataaaaatttttaccagccagagttgattacgaattttaatgctccctaccttgctgggtaggaagttttataacaccacttgtctttcctgagacaaattcaggtgctaattgtttgtataagatattacaagacttttcttttaaaaagtgtattattattgcacttctttttaaatgtatgtgaaggaatccattcttttgtgggtcccagggattgaacccaggtcatccagaatgtattctgtttatcagaaatgtgtttct

SEQ ID NO: 30332 - DNA, 510 bp, Mus musculus
  source 1..510: mol_type = other DNA
ttagcaaacaacttatttgatagattaccagcggccaacaacttggtcggctcaggcccaccctcgcggcgcaccggtcctctccgggcaccagggtgcccgcgtcctgatgcgtccctcagactccctgccctcacgcccgcagccgcgagcccacaggctgggacgctccccgagggccgcggccgagcgccggaggccgaggcgctgacgagtggccccgcgaacccggtactgagcgctgcggggaggcgcggcccgcccagcccaacacaccggcctccgccccagcgggcggccacgggagcccgcccgcgacagggcaggcgtccgccctccttacccggctgccgactgaccgtgccgtcgctccgacggactactgcgcgacacggcgacgggaagccgcggcagccaagcgcggcgcagcggaagcgcgggcgtcgccatctcgccgtacggcggtgggcacgcggggggtggggcctcggcgcgtgtggttcctaaccg

SEQ ID NO: 30333 - DNA, 153 bp, Mus musculus
  source 1..153: mol_type = other DNA
tcctgtaactagagttacaagagcagggtttctctgtatagccctggctgtcctagaaggctgactttgaactcagattatagaccaggctggcctcagccaccaccacccagctaagttagctggtgttagaatatactttgtatgtctgtc

SEQ ID NO: 30334 - DNA, 768 bp, Mus musculus
  source 1..768: mol_type = other DNA
agtagagctgcgtgcgccgggccgcactcctgccacacacctccgggcgggcttgccccgccgaggcaagagccttgcagaatactcctgaaattggcagggccagcccggaggtggcggagggggcctccggccgctctgcccgaggcatggccgtgcccggccccccactcccggtccccggagctcggcccgccgcgcggcctcagtttccccgcgggccccggccagggcgggggcgtggcggacccggaggcgggccgcgtacaacagttcacggccgcgcagcagatcaccattgcgggcctcggtcgtgagcgccgccaggctccgatccttgccgcccgcccgctggcccgacccgccccgagggagcgcggcgacacagctcgggacgtgggccgcggccgagccgtacggcaagatggctgcgcgctgccgcccgcaccacgctgcgctcggactgcccggccacggcgccggcgtcgcggccgcagcgggcggtgagtccgtaccgagacatgcgcgggtggctgtctgtacggaaagatggcggcgccggaggagcgcagctcgggccggctcccgggtgttccgaagcggcggcgcgggccgggggcggggcggccgcgtccggttaggaaccacacgcgccgaggccccaccccccgcgtgcccaccgccgtacggcgagatggcgacgcccgcgcttccgctgcgccgcgcttggctgccgcggcttcccgtcgccgtgtcgcgcagtagtcc

SEQ ID NO: 30335 - DNA, 493 bp, Mus musculus
  source 1..493: mol_type = other DNA
agcatgatgtgtagatttgggctattctcgaagaggtgaaattatcttaattcatgattcctaacaatatgtttgtgttgcacatttttacatatgtgcaaatgtttgcataaaccttgagggtttataggctatgtcactcactatatccaatttattctgtgctgggtatggaatctttgttcattaggcaaaacataacccagccctatgtaagtggcctcagactcacagactttattttgtctgtaaaaacacggggggtggtttcaattctgcccacgctgcaaataaattcctgattttagaaccctagcgcgcttaggggcataaaaatttgattccgttacaggtctcgaactagtccttaagattggtgctcttcgggagcggcgaacggaagttccgcgagttggcgctcgctaaactgcagactcccgggcctagattcgtcacgtccggaagctgttccccgcaggccacagaattcgtt

SEQ ID NO: 30336 - DNA, 544 bp, Mus musculus
  source 1..544: mol_type = other DNA
ttgtatcagctctagccacatttgcctaaatatggaatggtaattacacagtgaaataattttgaagtaaaaagtgaattatcagttacttactaggctgaaaagactgtgtactgtaaaaagagactctaaaacgtttattggttacaagtatgcggaaaaatattcttcaggatatacttaatacttctcagaaatattagagcaagatatattgtttcattaactgtaacagagttgccgtcagcgtgggcacgcccccctcgggcctgtgagggggtctccttccgggaggccccgtcagccaggagaaaccacaggcagcggctggcaggtttggcgccagcacacgtgcaagcggagtcccctgccagggcttggaatccggctgggccagagcagctgggcaagccccacagcgccgcctggcgaccacagccggccggaagcctaggggtggcccctgagttgccccgcccactttccggccatcggagcacgcggctcatgaatagtgagcgcgcggcgccgccccgccccgagt

SEQ ID NO: 30337 - DNA, 239 bp, Mus musculus
  source 1..239: mol_type = other DNA
tatttgggaaggaggagcaatctgctgtatataccaggctagctgggatttccagtaagtgcactggaatcgcagaagtgcggtccttgaggtcctagaggactcgctggcctgaactcgctctgtagcccaggctggcctcggactcagagatgcaccagcccaaatgctttgggccagaagtaaaagtgcatgttaacggccttcacctgaggtcaggtgtgggctctcccgtcatg

SEQ ID NO: 30338 - DNA, 252 bp, Mus musculus
  source 1..252: mol_type = other DNA
agatctaaagtaattatcttaacatcttaaagaaggtagtttctggagctgccccaggaaactgggagatgaaccctgtttcagataccaggtctgtccagccagcaaaatttgcaagaaatagcaattacctgttgtataattcagactcagcccaggaaaactactgctgggctgcagctctgtgtggctgggcctggccccaggaggtcagggacagtggcccctgcggaaaaagccacagtgaactga

SEQ ID NO: 30339 - DNA, 514 bp, Mus musculus
  source 1..514: mol_type = other DNA
tgggtggtgagagactccagggtactgtcctagctaaggccataccatggattgctaagcagttctcagagtgctaaattaattcagtcagtaaggaaggaactttgagataggttcttactacagagagtaatcagattaaaagctctttattttatttccttagaaataaaattttcatacagtaaaagtctacaaaaatacattcttgtatttatttcttacatcacagtcatctttcaaaggtctctttttttatcccaagtttgtaaaaaaatttttttccttcttagtataaataaagctttgaagaagaaagtatttctggcatttagttacacatctacagaactattaaatctgtggattcctcactccctccaagacctctctgagagggctaacatggtgacttgaccaaggaaatcttcatggctcagacattccagggctccacccccctggtgatacaggaaggggagaggagggaagggccagctgtcccttctgagcc

SEQ ID NO: 30340 - DNA, 509 bp, Mus musculus
  source 1..509: mol_type = other DNA
ccataccatggattgcagcagttctcagagtgctaaattaattcagtcagtaaggaaggaactttgagatggttcttacagacagggagagtattcagattaaaagctctttattttatttccttagaaataaaattttcatacagtaaaagtctacaaaaatacattcttgtatttatttcttacatcactgtcatttttaagtttgtaaaatttttttttttccttcttagtataaataaagctttgaagaaagtatttccgacatttagttacacatcagaactattggcaatctgtggattcctcaccactccctccaagacctctctgagagggcttacatggctgacttgaccaaggaaatcttcatggctcagacattccagctgtcagggctctgcccacctgggggaggtgagtgaagggccagctgtcccttctgagccttgaggaggtctcatttctcattaggattcaacagttaagctagatccacacctgagcag

SEQ ID NO: 30341 - DNA, 496 bp, Mus musculus
  source 1..496: mol_type = other DNA
tctcatcaattcattagttagattaatttaatttaattaaaaattcatgggggtgtgtctgaagacagtggctgtgtactcacataaaataaataaatctttaaaaaaattcacaaaagaacttaacaatggactcagggaatttctaagacaattttattagagtttaagagaaaaacccctgatacttccctggtgactgacaagttcaaacatgaggcaaaggcctggcctggctttggtgttctagggcaataggttgcccaggtcaagctgtactatttctgccagagctgaaaagcttcaatccttcacctaaggaagacttcgtctgtgcagaaacatttgatggaggtctctatggaaacccagagcaatctcagaaaagccctatgtacaatgtccaggctggggagtgggatcaggctcccagcaggctgaattcacagtcatccaaatagacagagaatgtctctcttgtgcctgttcggtcttc

SEQ ID NO: 30342 - DNA, 277 bp, Mus musculus
  source 1..277: mol_type = other DNA
caagcaggaggtgaggtgggcctccacctcctctaccccagcctggtgttaggtttttctcccagggtcttcgaggcctcctctgacccatttgctcctcagtagtaaaggactaagtaggggagggtccagcttgccctcgctgcggccataggtaccaaagccaggccacaagagtctggccctagtttcagtctctctcagccctgggacctgttctcccacccttgtggaggtggaggaagagggggcgggagccaagaacaggtctcctccc

SEQ ID NO: 30343 - DNA, 422 bp, Mus musculus
  source 1..422: mol_type = other DNA
tccaggacatggactaaattgcagttccagacccttaaacagctgactcttgacagatgtctgagaaagccttttaaaaaatctgtttataatagacttacttgatggaaatcttagataaaggcaacattattcaaatgtaagagaactaaatttggagttcaagttctgtaaagtaaaaatatacaaactttctctcttccaaaaactagttaagcacaattttctttggaaattgacaagagaggtttttacaaatatttacactttaaagggggaaaacctgaataaacaactttaaaaaagctctctttaatgacatcaaggaaattaaatcgactctgaccggaggcgtccgtagcagcagtggctgcggggatgtacgaacttccggttgtcccggcaggctgctgccgccgccg

SEQ ID NO: 30344 - DNA, 133 bp, Mus musculus
  source 1..133: mol_type = other DNA
acattgatcagctcatcagctcctgtgaattttagcaaacacgctttgtctcatctttctcagatgagatgcgcaagaacgcgtccgcgtgcgaccagcacggtgattggctggccttgcttatcgtttccct

SEQ ID NO: 30345 - DNA, 414 bp, Mus musculus
  source 1..414: mol_type = other DNA
accttcattttgcaaatatctataagaagatcaatttgggcataaactaatatattggggtattttcttctcaggttatttttcttaaactagagtaaatgatgctttaaactgaagtagacacaattttccctctgagagtaccaattcttttcaataatagtttaaaacaatagtttatgttgaatataaaatctcttggaataaaatctaaggtaaaacacaaggtatattttattttttaattctataacaaccaagaccctacttagggtcaacagatgagagacttcaatttagttttctattaatttagcagagaaatccttgactattacaaaaagtttgggattataccaaaaatgtctgcataccaaattcaacttaaatttcatcaggtttagattgtaaact

SEQ ID NO: 30346 - DNA, 380 bp, Mus musculus
  source 1..380: mol_type = other DNA
tagagtactctgtgtatgcattgagtagactcttccagactcccaacagtgttgatcagtgacttatagaatgagtgtcaatcataaaattgtatcaatgttttcaatcagttacattttttacataatgttcatcactttcaccagagaatgccatggatgtgttttcaaagttttgtcattccttcagtttggagaaactaaaactaaaaggaaggctattaaaagtactattattgttttcatggaattcaaagcagtgggggcccactgaagcgctgacacctcgaggtgcctaggtcccggaggtccgggagtgtccgggtctgcggtgaccctagtccggccttagggcgctgtcacctgcccaggggcggagc

SEQ ID NO: 30347 - DNA, 545 bp, Mus musculus
  source 1..545: mol_type = other DNA
agttctacaaactttgacagaccttgcaactatcaattgtgaccacaagtaaacattgatctcttaaagtcaaattctcaaacactaatttttgcagaattctatgatccacaataatacaatagtacatacacacaaacttttttctttatctcacacattattatccagttatagatacatcacactgaagcaaatctagatatattggaggctgattcctctgtcatatacttaaatgcacatacatataagcacatacatggataaacatatacacaatcaagagaatagaggctatgaattttatttttgttttttattttaaagaccgtcacagtggataaattcgttatttattattttactactttaagaaatttgcatcaagtgagattatctagttaactgaaggaaaccttgagaccttttacaaatatttttattagttatttgagcatattgttcaacatcaggtttgaatatattctcttcttttcttctctgtgacgcagagaagatggaatcactcaacccttctgaag

SEQ ID NO: 30348 - DNA, 457 bp, Mus musculus
  source 1..457: mol_type = other DNA
catgatcatatatatatatatatatatatatatatatatatatatatatataatcctaaaaattccaacctgataaacagctcagtgaagtagctggatacaaaattaattcaaacaaatcagtgacctttctctatacaaagaatatataaaataccttagggtaaagcttttcattcaaggccattaccgtagacactaaatgaattttatcaaatgagattataaacactgatgatcggttatttacaaatattatttatttgatattttcccttcttttcttctctgtgacacagagaagaaggaatctaggcttgtttccttacttatttattacttaagtgaatttgtatttagtgagccacacaaatagttttattagttgtttgaactttttgatcaacatgatttaatcatattctttccttctctgttacaaagaagatggaatcca

SEQ ID NO: 30349 - DNA, 870 bp, Mus musculus
  source 1..870: mol_type = other DNA
acggcgggccgtagctggcgccgagcgcggtgggagagcagcgggtacccggctggctccgctggcggcctctgcccacacctcggcgccgcagccccgcgcctcgcccgcccttggcttcggggtctgcggctgccggccatagaggaaccggcggaaccctggacgaccggtacgttggggggagcgccactcctcctgcaaccttttgtgctgcagaggtggtggtgtgggtgccccagtcagcgagccactgtgccagccccaggcacggcgccgccccttcctcctcgcctcgtgtcccggccgggcgcgcggtgtgtgcgcagcgcagggaagccccgggccgcgccggcctccgcgatggctgatggctcggtgacaccggggctgcgagcggcgctggtccctgagccccgagcggggtgcgagagcccgcagcttcctggcacagggggccggcgacgcgggagtgtgcggcgcgggtgagtgtgcgggggcgtgcgccccgtgcgcgcgcggcgagcgagcgagcgagcggacggaccggcgggcgggcgggcgtgcgctcgccgccgacatgcggtgcggggactctgcgacccggagcgacgctcccgcggtgccaaggtgcggaagtctgagcgcgtcggcgcgcgccagctaggcggctcgccctacccgcagcgccaggcggcaggcccggcggaggcccattgagaagtaacgctcgcccggcttgccgcgcctctggccccaacggtgtacaagccgcggctgcgggctacagatagcggcgggagacagcccctggcgaccttatctcggccaccagtgcgcgctgcaccccgcgggcgaggccgaggccgg

SEQ ID NO: 30350 - DNA, 664 bp, Mus musculus
  source 1..664: mol_type = other DNA
tgcatttggcacctcatccctgtaatcccagcgctctggagactaaggcagaacggttctccggagcttaagtccggccttgggtgttgttgacatttattattattattatttattattatagtataattttaacttcacttctcaacttctgatcagcagaaacgcacaccgctctgtgggagcggcccgcattgtcaggcctgtgagctgcggctccccggagggtgcggcggactttggtccgggagcagtgtggcatcacgccgccgcctctcacgccgccggcccagccgcccgcccagccgagcgtgcgagcctggcgcaggaggcgggctctgcgcttcccggcctcgcctccgcagcccgcgggaggaggcgggaaggcgggcacggcgggccgtagctggcgccgagcgcggtgggagagcagcgggtacccggctggctccgctggcggcctctgcccacacctcggcgccgcagccccgcgcctcgcccgcccttggcttcggggtctgcggctgccggccatagaggaaccggcggaaccctggacgaccggtacgttggggggagcgccactcctcctgcaaccttttgtgctgcagaggtggtggtgtgggtgccccagtcagcgagccactgtgccagccccaggcac

SEQ ID NO: 30351 - DNA, 586 bp, Mus musculus
  source 1..586: mol_type = other DNA
tgctttaagtttgtattagtctagatgaaatgtatgactttatgttcagatactgaatttaaatttataaatacacaaacagctcagctatatgaaaggtctgtgacttcaaggatgtaactcatgttttctgtcttaaaaaataaatatcagcaaatatttgtaatgctgcattgaccactggcacctcatccctgtaatcccagcgctctggagactaaggcagaacggttctccggagcttaagtccggccttgggtgttgttgacatttattattattattatttattattatagtataattttaacttcacttctcaacttctgatcagcagaaacgcacaccgctctgtgggagcggcccgcattgtcaggcctgtgagctgcggctccccggagggtgcggcggactttggtccgggagcagtgtggcatcacgccgccgcctctcacgccgccggcccagccgcccgcccagccgagcgtgcgagcctggcgcaggaggcgggctctgcgcttcccggcctcgcctccgcagcccgcgggaggaggcgggaaggcgggcacggcgggccgtagctggc

SEQ ID NO: 30352 - DNA, 501 bp, Mus musculus
  source 1..501: mol_type = other DNA
cagttaaactttaatcagacttctagaactaaaaattttggattgtgctttgtatattgttcaatttttttttaaatatcaccagtcatcaaatgaagtatttgcacaatttcatcttggtagataactaactttaatatcaccggtgtttaaatacatgtaaacaactttgtaaagaatactttgagattatgtcattagcatatgatagttaactagttcactgaatcacttacagtttcagtaattttgctgtagcatctgagaagagttgaatgaaatcttgttttcagtctactttaacaaaaggttcttattatcaggtaccttatcttctggaatataatcttcattatttgattttatggaggaaaatatattatcattttctaatgtcattcaaaattgttttttgtgagtatttttgaagaatgctgttgaaattaattgttgcgttttaaactacaacagcaattgggtgtcagcacatttcatgcgatt

SEQ ID NO: 30353 - DNA, 350 bp, Mus musculus
  source 1..350: mol_type = other DNA
aagaattattctgctttaatctctgaaaactgaacccgtacaattatccctttatttccatatgcatacagataaagccgggtccattttgaaaattgagatttttttaaaaagtgtattttccctttgaattgactactatgcaggacgaaaccgctgcactcggggcagtccagcattcgccgccgccggcaagggagagctccgcctaggtcccgctaatccttgcctaagcaggaaaaggcgtctccgtttttaaaaaaaatgaactaccggaagcggaactgccgggggtcggagttcaggcgggtcgttggtccgccggaaactgttccggccggtgcagtttc

SEQ ID NO: 30354 - DNA, 337 bp, Mus musculus
  source 1..337: mol_type = other DNA
gtgtcttccaggacgcactcaggaagttgtccagaacctccaggagccgctgtgcacacacacacagtgcttttgttctttgaatttcgggcttttcaaactcggctcttgcaagaccacgtgtcccgcaaggcggcggcgagcctcgggctgccggagatgtcgcctctcccggtcctcacctgccgtggctgcgggcagcaagcggggggttcctccccctttaattgcgggggcgagggaagggctctcggaggcgtctgaagcttccctcgccggccaccgcggaagaaactgcaccggccggaacagtttccggcggaccaacgacccgcct

SEQ ID NO: 30355 - DNA, 282 bp, Mus musculus
  source 1..282: mol_type = other DNA
ttattcatattaatatgaagttcttgaccatagtctttctagatatacttcatttggaggatggctgagataaactttatgtaggataggaccacaacaggaagaaattattgatttgtatattagatgccagatttttaatgggcctttgcaaggcgctgcttatgtagagatgtctgtgcaggcagagtcaatgatttgagtgaataactttgtttatgctcagggtctgtgaagtcactcagcattttccccaggcttgggcgcaagcttgtggtcatc

SEQ ID NO: 30356 - DNA, 408 bp, Mus musculus
  source 1..408: mol_type = other DNA
gttgcagagccacagtagcacagggatctgcgggagatttaaatacctgtttctattaaaagctggggttctggccaggaaaccgcatgcaacctttcgaacggtgacttcgaatggagggcgctgaggaggaaggaggtccctcaccccctcgggaacacgcagctggcgcggtcaccgcgcggggctggccagaaaggacccgggactccgccgcgtcccagagactatcgggccctggccttctccacgctccccagagaccttgggacagtggccaccccgcccgggactccaagcacccgccgcgcgctccccgggagcggggaagccaaagccgggctctgagggctggcggagccgaggcgggagccgccccgggggagggagcgggcggtcccggagccc

SEQ ID NO: 30357 - DNA, 353 bp, Mus musculus
  source 1..353: mol_type = other DNA
aacaatagttttcatactacagatgataaattatatacttattaaagtgttgagataaggaggatacattatagcctcaccaagaacaaagagttcaaaggaaagctttatgttctgtgtggctttccagggaagggcatcattacaatagaaatggctggttatcagcatgcagacatcctacagatgtgggctttcttttcaaagtgaatcaagcattcactctcaaggaaaaggatatttgtaatgcaataatattaatgcttgttaagtgagagaattatatatgtgtaatgacatttgccattaagaagtcatgctgaaattagtaattccagaattcactgagttag

SEQ ID NO: 30358 - DNA, 497 bp, Mus musculus
  source 1..497: mol_type = other DNA
ttctttaaaggtcattttccttgatttttgaaacagggcctctcattggccttgtatgtcaattgacctagcttgccaaacactctaggctgaccgaccagtgagccctctccagtgctggaatgaagctttcagcccagtcctagggactgaacccaggtcctcgtgcttggaaaacaagtgcttcagcgactaaggttcagttttctttcagaatatgactgagaaagaaaacatactgtattttaaaaggatgaatccattcaattccattgctcatcaacattgtatgctatcctcttttatatactcaattggaaaatggagctaacaataagaactaattatgttttgattaaatgagatgatacatttagaccccacaagtgactttgtgaaaaggcatctagtaagtatatattctaatagtaggttacatgaaatattgatatcattatgaaagtgagaccttcctttaagaataattattaactatg

SEQ ID NO: 30359 - DNA, 514 bp, Mus musculus
  source 1..514: mol_type = other DNA
atgtagtgattatgatgaaaaaatcaagtcttttaatgtaaggaagaataatattttattctttggatgtatactatgtaccatattgaaaatcaagtggtaaaattgttctaagcttcatgagttttggcaacatgtcgaaatcttaagacagaagattggttcatctggaataaaaagatactttgtgcatacacatgagtcagcttcattgctgatctgaaattgcaattttatataaaacaagttacataccatataccatgaaaatatacatatagatgaattttcagcagaactctttctcagtgcaaagctttcttacttacttgttactaaagaatctaaatgaatttttttcaaatgagattatccaatttcttttacaaatatcaattattcgacattttgttcaaggttgtttgataacttcttactttctctgtgaaacaaagaagatagaattcagacttctgtagggacgttggttccctgcactggaaataacgttccc

SEQ ID NO: 30360 - DNA, 391 bp, Mus musculus
  source 1..391: mol_type = other DNA
gcccaaatgtcaactgtgcccatagctgatttgtagcattgcaagagccagtgttgcaaaagaatattgctctttagtgccattgaccattagacagcactagtcactgaatacacacacacacacacatatatatatatatatagttattataatttttataataacagaatagatcatattgtgtaatatccaaaatccctctgaagggactttcagaaatatagctgtcaaaatgactgagtgttctcagaaaaataatcatcaatagctgtgatgttaatagctgtgacattaatagctgactcataaagtgagtcactaggccaaagggttacttagtcaccctagagaaaccaaccaattcctgatagggttacttgctacatca

SEQ ID NO: 30361 - DNA, 366 bp, Mus musculus
  source 1..366: mol_type = other DNA
cttattatttaagtcgaggtctctttcctaaagtgaaaggaaagacaggtccacatatgtctagttttgaatttaaacacatgggctttcatgctcaactttcatgcaataatggtaatctgaacttatattgcaagcacttggcatactgaatcctaccagagctcctctactttggctgggcagacaaggtgggaagctacagacccagccctcggagtggggtgatagagggcagtcctatgtctctgggcctcacggaggcaattggggcccccaacagtggttcagtcaaggccttccaatgagacttcacgttcaatcaaggcaggccttgatgagcagagccttgctgttgccaggtaa

SEQ ID NO: 30362 - DNA, 412 bp, Mus musculus
  source 1..412: mol_type = other DNA
aacaggacagattcctgatctgtcctgtaaatagcatttcttgatatctgacactgtccttcagagctacaggcagtgcttgccaagtacccagccagctcaggtgctaagtgagtagttcacacctctgacctaataacattcctactttgaaatgaataaaagcacaatgctggtgctgttttttaatcgtaaaatgtgtttcagaaaatatagttaaggagttaaacatctattgaacctttgtttccctgcttttcattgactcaaataattgtaagaatcaacattgttttcacgttttttcctatattcttgtaacttttaaaatgtaagagtgcacatttggtactttgcacaaacattttagtcacttcttgaaatgaacaattgtaacctttagtttccatat

SEQ ID NO: 30363 - DNA, 319 bp, Mus musculus
  source 1..319: mol_type = other DNA
gtaaactgtaatagtgctatgaggataaagaaatcatgacattttctacccattctctgaaaactgtcaatggagtggggccagaatccagagtctactttctaactcccccagccaataaaggagtttaaacatttaaatgcggtttttaaactgcatttaaagaattaatcgctggtctaaaccacggggtgccaaccagaaggcaattggctaattcaatttactcaggcagctcttttcaccctcctggcagagagctgagggccgtgggcatcagcggatttgctgctcgagactttggaaacatccgaaggct

SEQ ID NO: 30364 - DNA, 551 bp, Mus musculus
  source 1..551: mol_type = other DNA
ccgacgtcgtactcggttcccgacctccagcgcctccgacgatggaggcgccagggatcccgggcgcccccatccctgggggggtcccactcagtcgtggtagctcgcggccgctctccaacagctcggtgtgcagctccagggcgggtattgatcgcgcaacagctgagcggcgatggcatcgattgacaatcgggcaggggtctccccgctgccccccggagccgccggggcggcggacatctccacagcgagccccggccgcgcgctgcttcccagggccatggggtcctgtggcgacagggagcctgcagaaccaggatctaggccgaccccggcacccagccgaagtcctgcccgccggtcctcggtggcccgacaggccctcagcctgaatccccgttaggtcccgagagccgccgaccacctaggcagcccaggccgctctcctcacctagagcctaggccggactgggaggcaggagcccggtatgcagcagcacctcccgtctcagccgctgctgcaccagtagccgactctgcaggagtgg

SEQ ID NO: 30365 - DNA, 433 bp, Mus musculus
  source 1..433: mol_type = other DNA
tctgtgcaaacagagctctagagatgaggagacataactcaggtcagttttcagtttcttaatagaactcaggcatggtgccccagaccagcaggcctatctccccttttctccactatatgttaagtgaaaaagcaggaagattagatgacattaaaagcatatcccaaaggtaagggctttgtttctgtttaggaacagaggataaatccagaaacttagtagaccctccctttacacaggaaggggaaaggcaatagcctagactcctccctctcccctgtggtcttgagtccagagccgcagctggtacggtgggtagagggcgcgtccctgcttccccacccagccactggggaccgaccgacagacagacagtcggacgtgccggccaagctgccgcggggaggggcggtccgcggagcagagctca

SEQ ID NO: 30366 - DNA, 337 bp, Mus musculus
  source 1..337: mol_type = other DNA
tggtgtcctagtgcagtggacatgaccaggccactgaagcggcccagacaacttaatgtaaagtgtatgttaatttccatgggtttacatacaggctgttcacagatgagtgtaaaggcatctcgaaactcaaatgttgcaaggacggagggggcgggaaggcgccctccttaaccacaaggaggccatgccgtcgcgaagccagattctgaccgctgctcagagcacttgctatctgggcggtgacagcaatgcaagggtcccgggactttacctgagaactatccggctcaggcccagtcttgggaacggcgggagggttcccttcaacccactc

SEQ ID NO: 30367 - DNA, 414 bp, Mus musculus
  source 1..414: mol_type = other DNA
tccttgttattcctggcactcaaggaattgaaaacactgtgtttctgttgactgggagacaaagctcttcctcttactgttactacacagaggcaaggctgtatgtaggtgacctagtggcaagtttctacctacctggaaagcttgctattgtgtagattctttagttacaggggtgcaccttgtgcaggcagggtccacagtggcgacccttggcagggctatctagcgcctgcacgcaggtgctgcacccagagagctcagagcctggggacactcggacaggactccgcgcgggtctgaaccgtcacggcagcccacgctcgggcaccccctggcggagctggtcggcggcgcgggggcaggtgccgggcggagccgggcgcacggggcgggacgaggcgggcggagggc

SEQ ID NO: 30368 - DNA, 316 bp, Mus musculus
  source 1..316: mol_type = other DNA
aggatggtcctgatggctctgagagcaatcatggttgggctatacatatcactgaaagttaaaaacttaaaaccctgacaagacagtaacttattaaattgtttaaaagagttacaggaagattgcgcaaaccatagattttcagccgccacttggcgtgatccagggcggtggctgacgcccgctccgggccaagctcacctcgccgtggtccgcaagcaggaccgcgcggccagagggcggctcccggcggcgagaagctcgcgtcacgccagatctggctggagtgcggtgcgcggagcccgccagcgtctcc

SEQ ID NO: 30369 - DNA, 677 bp, Mus musculus
  source 1..677: mol_type = other DNA
gaggccgagcaggacgccgggaggccgccagcggccgaagacgccgaggacggcgacgaggacgacgaggcggcggcggcggccgacagattcctcttcagccgccctctcttcagcagcagcgagttggcgccgccgccggccgcgggcaccggagcggccccaccggccgcgggctggggagctccccgccgccgcctgcgcccggtgcctccggcgcggccgggcagcggccccggcggcgcctcgcagggggcctcctctcgcgccgcgccgccgttcccgccgctcggggccgccgcgctcagcgcgggatccggacaccggccgccctcggccgccgccgccgccagggcttggtcctcacccgtggggtccgcgagtcgctgtgccggggctgcagcggcgggctccatcgtagcggggcttcacgtcgctcccccagctccggaggcagcggaggaggaggaggtcggcggcggcggcggcgcgaagagaacggagacgccgatggcgttcggcgcggccgctccagaggcgcgccgcccgccccccgcgggtcgcgggctccccagcgccaggccccgcccgctgctggacagcctcagctcccgggagctgcggcccgagctcgcctcatgaatattaatgaagcgtcatgaatatgcatcgttaca

SEQ ID NO: 30370 - DNA, 331 bp, Mus musculus
  source 1..331: mol_type = other DNA
taagcttcttttaagcttaaaaccaacgggatacaaggctccaagcaggtccttagctatttctgtcctacaaacactgctagctttcatttgtctcatacaaaggccttacctagagtttagagttcctaaaaactctcaatttcaattagccaggaaaataaaactcattgtaacgatgcatattcatgacgcttcattaatattcatgaggcgagctcgggccgcagctcccgggagctgaggctgtccagcagcgggcggggcctggcgctggggagcccgcgacccgcggggggcgggcggcgcgcctctggagcggccgcgccga

SEQ ID NO: 30371 - DNA, 748 bp, Mus musculus
  source 1..748: mol_type = other DNA
acactatatgtggttgtatacactacactgtttaaagggtccacatttgtaacacacacacacacacagagcgactgtgtacacactttatgtgtggttagaaagggtccattggattgtgcacattccatgcacgcggttagaaagggtccatgtgacctgcacatgctacatagaagtgcacactgtacacgttgaaaaagatcgtgcccatcctggtgcctcgccacagcctggccctggctataggcacgtccagccagcagccagccccgcaggcccgaggaggcccctcacacgcccactgagccactgccgcccgggaggcccgcgccacccacggtccggggcccagcgtagcccgcgggtggccgccacccaggccagcggccgcggccgggcgcgcgctccccggggcggccgcggcgcctttaacccgggcggctggcgggcggcgggaggaggcggcaagtaagaggccgggccccccgccccgcgcccgcccccttcccgtcctcccgccccgcgtccgggtccccgccgagccgccgccgccaacaccgaggtgcccaggccctccccagccgcagccgtcaccgtggaacgggctgcgcggcgcaagcacgaggaggcggccgccagcgccgcccgcagcggaggaggagagggtgcgcagcccggaggcggggtgcgccggtggggtatcctttttaggaaaaagagggggggcaaaccctcccccaccacc

SEQ ID NO: 30372 - DNA, 642 bp, Mus musculus
  source 1..642: mol_type = other DNA
ttcagagcagaggagtactcagacctgttctaaaacaagcatgctaacgttgttattctaagtattttcatttgtattcacccaagggtagcatattggtactactcactacttaggagtacactatatgtggttgtatacactacactgtttaaagggtccacatttgtaacacacacacacacacagagcgactgtgtacacactttatgtgtggttagaaagggtccattggattgtgcacattccatgcacgcggttagaaagggtccatgtgacctgcacatgctacatagaagtgcacactgtacacgttgaaaaagatcgtgcccatcctggtgcctcgccacagcctggccctggctataggcacgtccagccagcagccagccccgcaggcccgaggaggcccctcacacgcccactgagccactgccgcccgggaggcccgcgccacccacggtccggggcccagcgtagcccgcgggtggccgccacccaggccagcggccgcggccgggcgcgcgctccccggggcggccgcggcgcctttaacccgggcggctggcgggcggcgggaggaggcggcaagtaagaggccgggccccccgccccgcgcccgcccccttcccgtcctcccgc

SEQ ID NO: 30373 - DNA, 441 bp, Mus musculus
  source 1..441: mol_type = other DNA
ttcttttgttattgttttgatcaaaaagtgatgagtgaaaaaataatctagcctacactaggatattatcaatactgattctctgcagagggcatattattagaactccacttgtatgaatagacaagtccagagcagcctggtctacaaagtagttccaggacaggcgatagtttagacactaaactaaaactattttaagtcggtggaccagatgttggaattaaatctctacaacggtggctcctcagcgaaatagcgaaagggagcggtgaccattatctgtgatttcagtttgcaagcctcccacgacgttggcgggcgggccaacggggaggccaagtacccggagcctacgcacgcacagcctgcgcagccgcagcctgaagctgaagggggcgcgggcccaggagctagtccgacagcggagaccgccccgct

SEQ ID NO: 30374 - DNA, 327 bp, Mus musculus
  source 1..327: mol_type = other DNA
actgaacactgactgttcagttcccatatactacaagaggaaactcctttgatgattggagagtgaatcactgtttttttttaatcagaacaacagtatgtggtttttagctgggtcttatatccaaccagagagtggctggctattcttacattccattttatatacacaataggtattttattgtgctggaatatattttagtttgaaacgcttgcacaagagttgcaaaaagaattttcgaattccaacgtaaatgactgtactattgcttactaaaactaaaatgttaatgtccgatacattagctgagctacacacttttgt

SEQ ID NO: 30375 - DNA, 498 bp, Mus musculus
  source 1..498: mol_type = other DNA
tttaatttgtaactatgcacaagtttaattgcctttagattgagtctagagcctttctctcaaaatccaacttgtgttcattctaccaattagaaatttcttaacaaaatacaaattgtgcttaaaaaagagccaatagtttatgttgatagatactatctgctgaatcatactggaggattaattcatctgttaagaaaggaaggaaattgtttcctttgccaattgtttatgtattgtttgagatcccagaaggaaaaaatattaactatgaatatggttagggaattaagaacacctgaaaatatagctatagattttcatgtggctacagactcgtctgtattctctatgtagattataaatttgtgatgtagcattatgcttaaaggggcatgtatccaggctctggtccctttagcaaccaaattattaaaggctctagcccctaaggcagtgtgccagcttgaaaaaacaatctgattcacgatcattatt

SEQ ID NO: 30376 - DNA, 270 bp, Mus musculus
  source 1..270: mol_type = other DNA
cagagttgaatttatttatttatttatttatttatttaatgagttcctttcattcactgagtcaagcaatgtttgcattggaaaaggagtcctggaattccgaaaatgtttcaggacaaaaaatgtgaggtcagacttagaatttgtagtaatttttttccgtatgcttagctcagggcaggatccacctgaatatgtctttcttgcacaggctgccaagagtcatgaaggcagcgcaggctgggcggggccaggctggtgtggtcacag

SEQ ID NO: 30377 - DNA, 387 bp, Mus musculus
  source 1..387: mol_type = other DNA
gttgttcaatatcttttaataaaagcttttacaaaagtgttataagagaaaaagctcctgaaatttcttgagtaaacatataacaactagttcttttctagaatgcaataggtattcagttactctagcaagtagttaaataagttgtagaagcttataatagttgcaaaccacttgtaataggatatatggaatataaatgagacccttgccttcctttactgttgacattcgaagagtaatggacaaatattatttttagggattcatgaaaatgtaaatagcaaagaaaatataaatgtattgtgttaaatatttaatttaattgaaagcatagggcatgtgaccttgctttaagcaatgacatctacctggaagcttgccagc

SEQ ID NO: 30378 - DNA, 391 bp, Mus musculus
  source 1..391: mol_type = other DNA
atttattgaatacattctgattggcatcttaataaatggacacaatatttgggatcatattatcttcttacttgcatttggcactacaaaataataaaaccagaagtcatattgtaggacccaaccactgatgtcttcattagactacataaatcaccataggtgattaaattctctcactacagagaggctgactctggtgacctgaccattaaagttttaccctttagtttctgagggatcttgaagttaccttccagtgtacttgaagtacatattaaagttgaaaacacagttgctgataactttaactaaaaagaaattaagctcttagttttctcataaaccttgcctgctatttttattagggaaactgtttgtttctataaat

SEQ ID NO: 30379 - DNA, 392 bp, Mus musculus
  source 1..392: mol_type = other DNA
aaatacacttggttcatattctctataaattttacagggtctctctcatgacatgtccattagtaagagtggaaagcctattttattggatattaggagagcaactcaaataactttggactagaattagaattatttttcaatttgaatagagtaattgatagagaaattgtcagaactcatgaaaatttcataaagaaaaagtacctaatgaaggttatttagttgtttggtatcttaggtgttcattaaaggaaattcaacactttaaaataaggcttaaagtttaagttactcacattgcctatgtacatttcagatgagtctgcagctgacaagagatcaatcatatgacatgtaaaaagactaatctggttatgaaatctgaagtc

SEQ ID NO: 30380 - DNA, 396 bp, Mus musculus
  source 1..396: mol_type = other DNA
agaaagtgtatttttttaatattctgaagatatctgttaaaaccatttggttcataatctctataaataagcctattttattggctattaggagagcaactccactttggactagaattagaattatttttcaatttgcatagagtaacataaagaataaagacctaatttaggttatttagttgtttggtatctggtattcatttaaggcaattcaacagtttaaaataaggtaatttttggtgtatagagttgtcagaagtgtaacaaggcttaaagtttaaaatactatcattgcaaatgtacattgcagatgagtctgcagctgaaaatttgcatacctaaaaagactaatctggttatgaaatctgaagttgattaacttgaaatacaact

SEQ ID NO: 30381 - DNA, 343 bp, Mus musculus
  source 1..343: mol_type = other DNA
agggtgaaatattctaaagatatctgttaaatccatttggttcataatctctataaattttagactagaattagaattattttttaatttgtatagagtaattgaaaaagaaattgacaatgtcataaagaaaaagtacctaatgtaggttatttagttgtttggtatattcatttaaggcaattcaacagtttaaaataaggtaattgtaacaaggcttaaagtttaaagtactatcattgcctatgtacatttatcatatgacctgtggccaaatttgcatacctaaaaagactaatctgagtatgaaatctgaagttgatttacttgaaatacaactgaa

SEQ ID NO: 30382 - DNA, 402 bp, Mus musculus
  source 1..402: mol_type = other DNA
tataaaactatttttatgagaatacactcaagttttcacggttttgagtcttgtataattaattaattgcaactaagaaaaggctagggagaaaactgtggtcacaaactatttttttttctaccacaaagacacatgaatctgtctttgaatttcatgcataagcctggatgcttgcagttatttctataaaaaccacaggattgtttataatgactctgaaaacccctggaaagttgacatgggctctatcaatgggatgtgttcacgctatctcttcagatagctagttcataaagcagtgtgattcagaaagcacagttcattggtaattctgccaaagccactatatggccttcagaaagacttccttcttggagctgtacttcctgcccagcaggt

SEQ ID NO: 30383 - DNA, 513 bp, Mus musculus
  source 1..513: mol_type = other DNA
agctttgatgctactcagctttgaatgaaattattgcttttgagactatatttagatatctcttctcatgaaatcatagtatattccctttagaggaaatgtcaatgatgatgacacacaccccatatgttcaatgtattagtcagagaagatattcattttagagaatcttgaatgatcaaaagtattcaatatttgcattatgccatacaattaaaatgaaaggaattctagaatacaaggaataatgtatgaggtcaaccagaatcaataatataagcttgcttctccagaaagagccactaagtttcatgtcatttatatacatatttaaaatatatatgctataataatattaaaatcattcaatttcatgagaacatatcctgacaactttgaattgaaattatagctcattacaaattttcttcaatttgcttgagcataatttcacttgaatggagttatctttaaactattgtggaaacagggagtgtctgagtcagaggcttt

SEQ ID NO: 30384 - DNA, 654 bp, Mus musculus
  source 1..654: mol_type = other DNA
ggaatgacatgacatttgggagtaccccatgaagtgtggcactttccatgttcttatgtatgtgcttccatataaatgtacaattaagaaatgagaagtgatctggtagatgtgtttccaactcttcctaataaattatgacagtatgaaaatgtttagattcatatcacatttatttatgtgtaatttttgtctatttttaattaacatttttagtgtttttagaaaattggaaatatttccaaaatgagtaattagcatgtataggtttctgccaattataagtcaacataagcagtaaaagttcttgttagaattatttcagattattattcctgagagaatcatagtttaaaataattattaaattagaaaaatcaagtgtgtttttttctctttccttcttttgattccctgtagatccaaagggaagaaaagacaacatcctttattgtaaagactcccacagatggtggctgttatcatgaaattcatgctgtcattgaatgcattacagctaatagatttaaaattggaaattgctaaattcttgaattttgaatgacaaactgagtattacaagcaagcatttcttttctaatgatgtctttatgagtaaaatgttgaatcatacaaagaatacaaattaaaaag

SEQ ID NO: 30385 - DNA, 365 bp, Mus musculus
  source 1..365: mol_type = other DNA
agtaaaaatacagctggaaatgaataattaccagaaaaactgtatatatatttgctttttcctatgtgataaagaagaatgctaggttctagtgttgcaagagagagcagaactattctcacactttaaaggataccttaacagatcagcaacaaatcatgcattgataatgttttccatttttttttttttcttagaaacataccagtggaaaccataataattgctgttacttggcaacctacagaagggatttaactttggagttacacagaattcggtctctgcatgcagtcctgcatggaaaaagtaattaataattcaggcaagatttttttcttttaagtttcttcagttaaaagtta

SEQ ID NO: 30386 - DNA, 389 bp, Mus musculus
  source 1..389: mol_type = other DNA
gacaaatgaccatgaaatttgtattcataataaagagaacagggttaaacttctcactgttcattagctgtgcccttagacagcccatctaatttacttttcagtgtgtgtagctaatattatgtatactgtattctatatattcagtttacacttctaaaattttcaaaatagcaattcattttgtaaatgatgtcccattgctagtcagccatctcaaaaaagaatggcaggtatctcatgagaaacaattgaagattgtcctatgtctcaacatgtatgtatacccacacatacatgcacacatatgtatgaataacatacacacagtaagctcctgattactcaatatttatatctaaattatttccaataaaatatcatcttag

SEQ ID NO: 30387 - DNA, 455 bp, Mus musculus
  source 1..455: mol_type = other DNA
gtgtgcctgcacattgtgagtgagcacgcatgaaccctaagtgattaaacattttatatcaactaagtgaaagtttgtaactgttcgtatgtggctaaattagattaataagcagtcaatggattccatttccacatatgcgtatcttcttcataaatgtcagcatttattaataaaatgagtttttaaaaactcttacagttctcttagtatataagctttatgtccacaggtagatttggtttctgtagttactacagaatatctattttcatctcagatttggaactagtcacctcaaatgagagagaacatgagacatttctatttctgagttggggttacctcactcatagtatttcatagtgtatatgtattacagtttcattgttttcattttctagatattgtgaagacagcaccaatccacgaaatgacacaggccaggtcatctg

SEQ ID NO: 30388 - DNA, 582 bp, Mus musculus
  source 1..582: mol_type = other DNA
ttttgttaaaaagcacaattgatcccctagcagataaaggctcttttgttcagtcaatgagatatgaactgttctttgaaaccgtagttaccatcttaagaataactaactcatatggctagaacacataagtcttggaggcttggaaatttaccttctaaccttcataatgatcttccaagtagaagtccagtgttcttaaaatgttcttaacattttgaatatttaataccaaacaaatcttaagaaagaaagcttgcatttcattttaatagatgtcttttcttcagtatagaaaaaagtacatgaatttttgcagtaaaaaatgtgtttattcctaattttcaagccttcttgcttttaaaaaaaagtgtgtgtgttacaacagttgtttgtgattaacatttagcatataatcatgtgattaattttgaggatgcatgccaaaagctaggttgccaagcaaaacagttgcttttgccctgagaggttaattttgaaagttaaattccaactgccaacccaagaagctgcctggccaggctctggctcctcccagatcccactgtgggaagtgtgagt

SEQ ID NO: 30389 - DNA, 260 bp, Mus musculus
  source 1..260: mol_type = other DNA
gcctttttagttttggtaatgtactagaaaacaaagaagcataaattttacgattttaccttatgtatttattgtttatatttattttaagacattgatgaatcagagtctgagggtgagtctgagcaaagaaatgcacactgatctgttcacctctcatctcaagcaataaaattgtaagttctggtggaaggcttgaaaataatttcttaaaactcccctactttgatgagggggaggcttgaggccctcccactttc

SEQ ID NO: 30390 - DNA, 416 bp, Mus musculus
  source 1..416: mol_type = other DNA
gcgcgcgcgcgcatgtgtgtgtgcatatgtctgtgtgtgtgtgtacgcgcgcgcgcgcatgccgactaagcgtctggcatagccaacagcgctttctgtttctccaggaggtcctgaagtctctgtcgccctcccgccctctccggggacgcgcgctcaagggaagaataatgatggcccttttcgtccctatggaccctagcattcaatgacccccagggtccttgtgccctgcggggctgagcaggtgccggtccgctgcttctgtgtctgcccggcgctcatagctgggagcacagcgtccctgagcgcccgtggatccccctgagggctggggaggtcgccctcgcagaagcgcgccctcgctgcgcaccgcggggagccggctggcaggacaggcttgaggactgagttct

SEQ ID NO: 30391 - DNA, 624 bp, Mus musculus
  source 1..624: mol_type = other DNA
atactttctggcaccaataagctactatttttgatatatccatctactgctgtattttcatggattggataaaaaaagatgtgcatgcagcccaaatttttcatgtctcaattgttatttctgaaatttgaggctgttttctcataagtatactgccatttacatattcaagttcagaataattttatagaaattatttactttctaaacaatgcttatattattttagcatttctcttctttgatgaaaatgcaattttaatgaaatataatatgaacaagtaacatgtaataatacactgattttataatagaagttttataattttaattatatgaattaattaatgaatataattttaataagtaagctaaaggaaataaaaaatacataatttagatgatgttttctcattagtaatgtatttgattcataaataaaagtccagaattgcagggggcatgtcctctccactcctcaagtgagtacttccttttgtttgttgttaggaaaaaaatacaaaacacgaaaaagagaaagttggatcttacaacttgtttagctgtcttcagatcagaatgcccttatggtactttgaacaaaaggctcatatactgacgtgt

SEQ ID NO: 30392 - DNA, 472 bp, Mus musculus
  source 1..472: mol_type = other DNA
gtttaactaatccacatctgtttaaagactataggttggcctatgtccaagtgtactgagtgagtacaatgtgaacaaaatctcagtctattctgcgactgaatttccaagcttcaaatttcaaaagtaaacacagtaaacagttttctactgattgcttgtcccatatttgcttcaatctagcagaaacttacatttggctattgaagttgttcctactatattcagaatttcaaagaagtgcttatagagtcctttttcagctcttaagggtaactagatgtttaacatatgttttctctcaatatccaaaatccaactgggttgtcttagtagcagttgccaagctgactgaaacactgcctggccccgcccactggcagtgcgcgggcggctcaggcctttccctggcctcagcctttctgcggggcgccccgcccaggcccgccggccgctaggcgggcgttttgct

SEQ ID NO: 30393 - DNA, 259 bp, Mus musculus
  source 1..259: mol_type = other DNA
cacattgcaaatcggtgggagctgcagtccgctgttatcacctgctgtgaattcctggctgagattaagaaccatgaagctcattagagctctgctaacttttggggtgcttgcaatagaaccacactaggatagttcacagtttgtcgctgttagatctcttccaatagaatcccaaattcgcaggcacgagccttgggctcgatcgaacctcgttcggaatgagagctgtgtgcgcagcaccgcccccggctgagcc

SEQ ID NO: 30394 - DNA, 403 bp, Mus musculus
  source 1..403: mol_type = other DNA
agctcattcagaaagtgcactcggtgggcctcttcaagactgctcaagaccagagagatcttcatgatactcatgtacaaggacttcaaagccctgaagcacgttcatattttatgcatatgagtaaagataatatttttattcattaatatttatttagattatagtcttttattatttttctttgttgagcagacagagctatcagccggcctacggccacgggccactgaagcccctacgtagggctgtttccggcctacgtgcgggcggcaggcgaggctcggccctgccgtcgggattctgggcaagagcgcggcacgggactgtgcgcgcggcgcttcaggcattgcggcgggcagcccgggctccggtgcgccgcgggtgtgggaagaccccggcg

SEQ ID NO: 30395 - DNA, 380 bp, Mus musculus
  source 1..380: mol_type = other DNA
tggccactgcaggcactgcacatatagggtacatatacaatagctcacagttaaaagtattttgagttcagttctctcaacagcctgaactccaagttcaggagatccaggtgtataatatcaaaaatataaataggtgttgtggaatttcaagtcctgaacttgatggatctcctcaggcaggggcctggccactttcctgcggaaggcttttcctgttgcacgttggcatgaacaggcaacgccaagtgttgggattacagatgggggcagtttatgaggcactgggtttcaaacctaggactgagaggtggcgctcgagctgcctcaattctagacaccggggcctccgcttccgagacgcgaaggaaacgtcactt

SEQ ID NO: 30396 - DNA, 173 bp, Mus musculus
  source 1..173: mol_type = other DNA
aaagtgattttaagcgcgaagaacggtttaaaacctgggcttccggtagcagcgcttgtacgcaggccttctttcactgaagtcggtgaaagattgtttaattcaagtatcaaacagccatagagaggaagccacctctctgggcggacacagggagacctctctgcgcaggc

SEQ ID NO: 30397 - DNA, 338 bp, Mus musculus
  source 1..338: mol_type = other DNA
atttgctactgaaacagttgtataaacagaattgcttagtgtttacatcgataactggctccttttttgtaggacttttcaaagaaaactgagtctccgtaaaaatcctcaattggcaatattataataattcggggatgagagcctgctatgctagctaaggctcacctgtgcccagcgtcagcggtgcagtgggatggcgctgacatagctggtccccgcgggcgcccagcgactgggacgaagacaagcaggcttcagaaagccccttgggagtttcagaaaaattggggtaggcctcctgcggtggtcaccgcaaccaaacccgtctggctgcc

SEQ ID NO: 30398 - DNA, 403 bp, Mus musculus
  source 1..403: mol_type = other DNA
cagcagcacagcacaggtccttgctgagtcagtttgtcaaagaaggactgtcacaaacctgtctgaaactttcttttctggactcagactaaggactgattctgggctctgagtaagaggccctattttattttatatactgtgcagcagaagatgagacctgttgtaccacacctggtgacttcatgtatgatatgctcagtgagctagtcatggagttgcttaggtgctcctggccacaatctcgccctgagcaactgccttgggctcagcgtggaagctcagagcgtggctgtgtccccagcagaaaggcacagctccggcaggtgcggctcagcgcctccctccggccgtgctagccgtagggacggccctgcaataaccacgcccccctataaaaggc

SEQ ID NO: 30399 - DNA, 467 bp, Mus musculus
  source 1..467: mol_type = other DNA
agcaagcctaaggttggcgtcacttgtcgccggcgtgctctcagatggcggcgtgagcgagccatggcgaggggcgcctgggaccccgggcacctgcactagctgcccgggcgacgagggcctggtcgcagcgcccgagctccggagctcatctgaccgaactgggttggaagaatctgcgatagtcccagctgagtggcgtctgggtcgtcaccccccacccgcccgctggcaatccccctccagggtggtgtccccccacccccagcctcagaggcagggtgcacgcggcggggcgggcaagacgatcagggtttgcccaagctcagcgcgcgggggcgctgcgccatcccagagacgctgatggagagtgccggcgttcgccagccgaggcagcacggctccgcggaaactcctctcatcaatgagacttcgaggaggagcgggaggcggcggcggcggctaca

SEQ ID NO: 30400 - DNA, 496 bp, Mus musculus
  source 1..496: mol_type = other DNA
ttggactggattcaaatccggtagtaccaagccctgagcctccagagaccttgggtcctcaagcagagctggccaagcctccagcagcccagggggttaacccatcgcccattgggacagcggcctcggacgctagaagagggcgctgtagcccgagggtggcatccagctcgtcccttgaaggctctaggggcagctgcggcgagagagggtcgcccgtcccggttgtgaaacacccggatcctacaccaggagcgtgtcggtgccatttatccatcgccccatggggcgagggggggcgcagggtggagagaaccttcttgcccctcctcgccaaggcagaaagggaaaggaggatcaggcagcagcgacctgcagaatccgcctccccctccgcccccgggacgcccgagtagggaggcgcggaccgtctcctcccgcactgcccgtatctcaacgcgcgcgcacatacggagattgtgcggcttttttaccc

SEQ ID NO: 30401 - DNA, 350 bp, Mus musculus
  source 1..350: mol_type = other DNA
acaaaagcctctgatataatatacaagtatcctagtttagaattatcagcaagaggttatcactgtttccctcttatcagcctgcagcttgtagttcttgccgctggctatagctagggttagggttcctgacctggcctgtgacctaggtcaaattaaggagtgcacccgcccacgccccgggctctgccactgcagcagcggtcacgtgcgcgagtccggctggggtggggccgttccgtgggtgccacgcccacacactcagacagcgggaacgcgctccggggggtggggacgcgcgagctcaccactcctcaggggacagctggggtccggccccaggacggggc

SEQ ID NO: 30402 - DNA, 299 bp, Mus musculus
  source 1..299: mol_type = other DNA
gtgtctttacccctccagccaccttctgataaagcacaaaagcctctgatataatatacaagtatcctagtttagaattatcagcaagaggttatcactgtttccctcttatcagcctgcagcttgtagttcttgccgctggctatagctagggttagggttcctgacctggcctgtgacctaggtcaaattaaggagtgcacccgcccacgccccgggctctgccactgcagcagcggtcacgtgcgcgagtccggctggggtggggccgttccgtgggtgccacgcccacacactca

SEQ ID NO: 30403 - DNA, 413 bp, Mus musculus
  source 1..413: mol_type = other DNA
tgcgcttctgcccagcaacccattgcagcttatcagagagggggtgggttggtcagccggtggctggcagggtctaaaagaatcagactcatgcagtgtctgataaaatgagactcaagtgagctgtttctggcctggtggggcaccctcccaggtacccctccaccaggtagaagagtattggtaagcacctaggcgctccgcagtggctctgtggagttttgccctgggcagagccctacttcgcgccgaacccagggtcaaagccactgggcagtcacagttaccggcgcgctctctttgcccgtgcacccccaggctccggggccagacaacggcggggaccggctcgccctgccctccgcccgaccccgccccgtcccgggccccgcccccgagcctgccgggaggat

SEQ ID NO: 30404 - DNA, 430 bp, Mus musculus
  source 1..430: mol_type = other DNA
tgcgcttctgcccagcaacccattgcagcttatcagagagggggtgggttggtcagccggtggctggcagggtctaaaagaatcagactcatgcagtgtctgataaaatgagactcaagtgagctgtttctggcctggtggggcaccctcccaggtacccctccaccaggtagaagagtattggtaagcacctaggcgctccgcagtggctctgtggagttttgccctgggcagagccctacttcgcgccgaacccagggtcaaagccactgggcagtcacagttaccggcgcgctctctttgcccgtgcacccccaggctccggggccagacaacggcggggaccggctcgccctgccctccgcccgaccccgccccgtcccgggccccgcccccgagcctgccgggaggatgtgagctcactccctcc

SEQ ID NO: 30405 - DNA, 360 bp, Mus musculus
  source 1..360: mol_type = other DNA
caggggcacgacaatggtgatccagctgatggccatggtcacatgtagccacggccagtggataatcctgtccagcctcagggcgatgaagatgaactgcaggatgttagcacaggatctccagttccagacctgtcgtgtcggaagccccagacacagggtgggtgcaagcatggctttgaattccacgcaggcttccccctctgtacggtagcgtgggttgcgggcccacacgcccgcacccaccgtccactggatgatgccgtccaggcgcaggggcaccatccgcccgctgcgtgttagaggctccagaccgcagctccgaggggccggaacacgtgcgagcagtcacgtggcccg

SEQ ID NO: 30406 - DNA, 433 bp, Mus musculus
  source 1..433: mol_type = other DNA
cattaaaaataggaaaatactcatttttgctgtctggtgtatcttaaacccaacgtttcattttcaaatcatattacatatctttccctgacccataccgcacagaaaaaaataatcttttttaaaagacaggatttcactaggtagtggggcggtgccattgcccctttaagagcggagcgtcccgcccttcggggggcggaccttggatggggctttaaggggcgtgccctcgggcggccggggtcctccggggattagcgcagggtgggctcgcgccttgcgcgggcatctctctccgagggtcgcgcgtcccagtcgcagtgggtgttcacccccgccctgctcactgagccgaggctctcgaccgtgccgggtgggcggcccggctccccgggcgacgccgcgggctgggaggggagtggcggcgacg

SEQ ID NO: 30407 - DNA, 316 bp, Mus musculus
  source 1..316: mol_type = other DNA
ggaatgtcgccctgccacttagggcctccattctgtgaccacagtgcctggaaacatttaaataaatgctggatcaattaataaacaactacattaaaaataggaaaatactcatttttgctgtctggtgtatcttaaacccaacgtttcattttcaaatcatattacatatctttccctgacccataccgcacagaaaaaaataatcttttttaaaagacaggatttcactaggtagtggggcggtgccattgcccctttaagagcggagcgtcccgcccttcggggggcggaccttggatggggctttaagggg

SEQ ID NO: 30408 - DNA, 609 bp, Mus musculus
  source 1..609: mol_type = other DNA
aggtcatggcatgataataccaaccctcattcttaaaatgattgaacgactttgatttaaaaagcagtgttccttgcacacagaaagcacctatcctttgttttatccatgaaaacttagttgggacaacctgatgccaggaggtgacagtcaaggaaccaatcgctgcctggcgatggggtgtggacacagagccacgccctcccctcgagtaccagtgcttctaggcaggcgcccgcgctccgaaaccgggtaggaggcgggaaggaggcggagcagagggcgtggcttcacctctcgcgagaccgcctcctgttgccgaggccgccgttccggggctctgactggtcgggggctgcgcagccgccatgttcggttgctatgctgaggaggagggtgaccgaggctctcctttgcactctcgccgcctccctggagtcacccgccgcttcacgccgcgcgcgcttccctgctccgcggacaagactcccgggagctgtcagaaatcggggctccgggacttgaaagtcggcccgcagcttgcggggaccgcggcactttcggggcgcgtgtgaagggattagctcatctcgccgcgaggtgcgagcg

SEQ ID NO: 30409 - DNA, 386 bp, Mus musculus
  source 1..386: mol_type = other DNA
ttaacacccaaagcccctgggcactgtttttttagaaaactcctcagacttcaaaaccaaaaacctggctgttaatggtgtatgattgtagcaggcagacccctggggctcacttgatcaggctggctcacctataaatgaatgagcgcacatttgtgtatccacgcatctctagtaagtacttattacttaactctaatctctgtatagccctggctgtcctggaactcactttgtagaccaggctggcctcaaactcagaaatccgcctgcctcctccggagtgctggaattaaaggcgtgtgccaccacacccggcttcagatactattcggcgctacagaaatccgggccagcaggtctctatctccgtaggcccccagacc

SEQ ID NO: 30410 - DNA, 352 bp, Mus musculus
  source 1..352: mol_type = other DNA
aacgttggatgacctttaaaacaccattggaaggacatattgatcccactttctgctactgtgtgactggggcactgaattagaacttaaaagaatggtccctctctttcccagggaggtcacacagagcagtgctgtttgttatcatgctagaaaaatcactggaagctaacaagagtgttctgtaggaccaagttgaggtagacttaattctgtttgtattcaaagtaagcctggcttatatagtgagaccatgtcgttgcctaccttgtcactgctgacgtgacttaagtcctccagagaaagttgcagctgcctcctccctgctattccctgcagggtggagtcgcga

SEQ ID NO: 30411 - DNA, 263 bp, Mus musculus
  source 1..263: mol_type = other DNA
aattatttcactaatgagactaagaattcaaagacctcagtgtcttataacttactctttactttttgcaaagtagcaagtctgtttgtcctgctgcgtgtccaaggtctaggacacgtgtttaaaaaccatttgaaaagttattcacttaaccaccattgcgctgtgcaccggggatgcatgagagttaaagggaaagaatcatactgatttcgcgcgcgtgatccgacttctgattggctgctgccgctcgcccgagctca

SEQ ID NO: 30412 - DNA, 304 bp, Mus musculus
  source 1..304: mol_type = other DNA
tctctgtattggcctgcactggactccatccagaggctttactgttagggacagacataagaggactgccagtcagagcaatatggacctgctctagtttgaactctgggctgccctcaaagccttggaacccagaaatgataataacaaactgctgagagaattctcgagaagcctgtaacagccatggtgattgcaatgaattaccctcctagaaattgatcagggccagtccctgtggccagctgtaggtgggcaaactgagaggggaggtgtcccagttacccacgccctagaagggccc

SEQ ID NO: 30413 - DNA, 551 bp, Mus musculus
  source 1..551: mol_type = other DNA
aacaagatagatgatttattccatctaatctcacccaccttcttccccaggctggaggaaggaagtaggatccaccctttgggggtgggagtattttagcatacccatcggctgggaaaagaatctagggcctcctgcttgctgcactaagctctgactgggcccttcaaatgctggatttacaggaatagttgggactaggagtcaaggacgccgtcacatcctccttaacgagtaaagtcacaaaagctttgtaacacaatcacatagtatctcacttattaaccaaggctctgcggtgttaaactagccggtgtaaaccagaatcctggcgggatcctccactttgcacctaggtgctccttctcccagtcctcgaggaatctgcatccaggggaagatcgcgagccgggtcaccgctcaccccttctctgggacccagggcgctgctgagtcagcgtaacccgagcagcccagtgaccgcgaagcccccgcccccggcttgcgccccgcccagatagagggccagccccgtggccgagcacaagtgc

SEQ ID NO: 30414 - DNA, 318 bp, Mus musculus
  source 1..318: mol_type = other DNA
gcaattgctggggttccagtaaagcccgacctggaatccagtgtctggagccagctggtcccttcctacaggggcctggagttcagcgttgacctctgtcccgccctacagggctcagtcctcggtagtggtctccactggaggacctccaggctcttcagccagggcctgtaggtggcagttttacatatctgcaagggacccaggctatgagctgggctcggatcccagaagagctgcgggatacgcagcccggcggggcacacgcagtacctgagtgagctcgggcgagcggcagcagccaatcagaagtcggat

SEQ ID NO: 30415 - DNA, 384 bp, Mus musculus
  source 1..384: mol_type = other DNA
gtaggagttaatggacttctttcctgtgagtcaggaaaaccacactccatgaagctaatgcccctagggccatcggtatctctgaagtgacatcattatgctgtgccctagtgggttgctgtgcgacaaagcagaagacttctgagagcaggtcaaaaatcatttctgaggagacaccggtctggttacaaacctgtgcacccttgttggagacaggaggggtttgctaaactcactagaaagggggaggcacgcagaggtcaccccgtcttcccgctccctctgatcctccacttgtagtgcaggggctacaagctggcgggcagccactaccccgccaggtccggccccacgggcgggcgggactcaaggagaggaggagcc

SEQ ID NO: 30416 - DNA, 391 bp, Mus musculus
  source 1..391: mol_type = other DNA
gcctagctaggcagtcctgctcatgccaaggtagtctgacatggtgtcagagttacaggatgtctctttccaggaaactcgtttcctcccagcacaagatacctggagaaattccagtttcttggagttcattgttttaataatcttagagctaaagagcatctctctagaatgtcttcattcctgcctggagggctgtataatctctaaggtcccccagcctgtcacaggatggagcctcaaaggggcagcacccatgcacatgggtgagagtggacatgcagcatgccccaggccatcctgcccgctatgccacatacttaccaaatagctaggtgatctgccaccttgttaagaggctggggacagctgctgagccatccctaggcag

SEQ ID NO: 30417 - DNA, 449 bp, Mus musculus
  source 1..449: mol_type = other DNA
ttaattatttattgtttccacttagttgctcaattaattaatttagtctctgtgtagctcaggctatcctggaactcactctgtagaccaggctggccttgattttgaaaattgttcatcaacagttactaaacgtgttcgaattccattcacttctgaataagatgaggcgctttctgttttaaaacagaaaaggctgcaacatacagtgtgtgcttctgttctccgccaggacttcgcaggcaccacatcgtggtcgtgtgtgggtgctgtatgcacccactgattgggagccccagctaggggctgctgcccgctgctcccacttgtggctcctgggcgccgccagcaggcacatctccggaggacgccgcgggataggagagcgccgtctcccgagtgatggcagcgcacgctgctgcctcgccgcctccgccgcctgggtaccc

SEQ ID NO: 30418 - DNA, 229 bp, Mus musculus
  source 1..229: mol_type = other DNA
ccttgtaacatgccaggaaagccagtccaccagctttgggggattcgggtcccagtgatccgaactcgggatcaaccttgcccagttctggtttttcagtggaaattacaattttcttcaaaacagcattgaagaaaccagtagctcaggctccagtaactggtgagagctatccctagccagaggctgactttgtctctgcacagaaccctagccaacaccaagttca

SEQ ID NO: 30419 - DNA, 461 bp, Mus musculus
  source 1..461: mol_type = other DNA
tgatcaaaacgtattgtatatgtatgaaatttttctttaaaaaaaaaaaaaaagagtccttaaggacttcatacaatgcatttttatagaacttcaagtccttaaaatcttcaaggaataaagaaaacaaaacttcagtagctctcgaggtctgcctggtctacctgggtagcttcagaccggctaaggctacatacactgtgtgaccctgtctctctcgagagctggcgacaaccgtggagcctgtcacccggctggcaactgcggcccacgcagagggtggagtctcgggctgcgcgtgcgtgcgcgcacgagtcccgcccggagtgcccggcacaccggaagtccttttgccccgtctccgcagagcggaggcagtgcgcgcagaggcaaccggaagctcctctgcccctaccgtcagcgtgaagccgccgggcggcgcaggcgcagtgcggctcagg

SEQ ID NO: 30420 - DNA, 555 bp, Mus musculus
  source 1..555: mol_type = other DNA
agttaaagttatttatccttctaaaaatactattgaactaaaagtatatcttgctgttgatcctgctttggaaaaattcacatccagagcaagtgatttcttgactcttactcatgctcttgatgtagtatatttatatttttattccacagggcagtgagtaaaaatcaaaccctgggtttggttctcagcactacacaaacctgatttggtagcacatataatctctaaagtttaagaccaaccttgaccactctgtcttaaaaaagaaaaacctgttgtttaagtgttcattaagtggtattgaaaattatgggttttcatatttcataatagctatttctttaaaagtttctactacactatgtgtgtatttgcacttgtaggcatgcacatgccacaatagacaatgtgcaggagctgattctttgcatgtacctcatatggctatggaccatatataagcactgttctgaaatttagacattgagttttgttctaaaattttcacttaaggtagtttgaaaagtacacacttaaaaggcatgattaaat

SEQ ID NO: 30421 - DNA, 231 bp, Mus musculus
  source 1..231: mol_type = other DNA
atgtgatgaggattattttccaaaacaaaattttcctggaaataaaaagggactgactctgggagctgtccaagccaggcttttaagaagctccatccttaggaagtgctaagccaggctggctaagaccacctcctctgaggggaggatcggttactcgggatccagccccgcccagcagtgctggctgtccttgcgcaggcgcagtggttcctcgcttcagcactagtg

SEQ ID NO: 30422 - DNA, 202 bp, Mus musculus
  source 1..202: mol_type = other DNA
aaaaattcagtgttttaccatgctgccctgtggaccaggctggtctcagctcagagatccaagaaggttttaagacttaaacctcttctgacaggactctgcagtgaagggaaagagactcttctgagccacaaggaattccgtcttcgaacgggttcacaacgagtcgtcctccagccgcccgaagcatttccgccccgcg

SEQ ID NO: 30423 - DNA, 296 bp, Mus musculus
  source 1..296: mol_type = other DNA
tagctctgagttccatccctggaatccacacggtggacaggaaaagagaatttcacgtaagtgccgttttcctttacccaagggtaaactgcctatcctggacaagaccccctcaggtttaaactggaagagatagtagactaacagcttcagcctggagttgttagcataaaactaagggattgggcaccaagcagctgggatggagcacagagcactgatcagggctccaggaaaccacaatgcctttggctggttctctccgcccctcggaggtgggagggtggaggctccaa

SEQ ID NO: 30424 - DNA, 517 bp, Mus musculus
  source 1..517: mol_type = other DNA
agaaccatgtgtggttaatgttctattgccttaagtcagtagatgtgtatgggacaaatgtctccggtgcagacaggtgtcgcacacgcccagtggggccccaggcggggatccccctcgcaccccctcctggagcatgcctagtggccgctctggagccaccaagggtttatccagagcccgcggggggtgggcctggggggagcccgtagagcctggcggcctggcgcgtacggggctgtctcccgcgcgctttaaggttgctcgggagatgctggagcgcaaagcctggctgctgctgctgctgctactactgctactgctgctgctgcacctggcgcgctgagcaccgtgcggggagccccgagggccggcggcggtgcgggtgcgcgggtggcggactgcggtagaatgaaagcctggctcctccggcgttgcaagccaccgctccggcgcgatcaggtgctggcagccagccgcccgccgctccagagggagactacttgcttctgctgcc

SEQ ID NO: 30425 - DNA, 607 bp, Mus musculus
  source 1..607: mol_type = other DNA
ccagcagaggaatcatgaacatgcaaatctacacatgtacagaaatacacatgatatgtaacatccaatctagattacataaatatttcataataaagtccagagaagtgatattttccactttctcaagcttctgatatgcccatatgggaatattcacactgatcaatgctgctgtgagcatacgaataaggagagagtttttcccttataagaaaatattaatgatttatttttccacaatgacatttgaattaaagaagtgactatatgtgactgaatggtagtctgtccctctctctctcaatgtgatctcaataatatctatggctgacaagaaaatcagaagacattttaagctgtggtgaaatatgcaacaattatactgtttttaaacttcatgaatacatttagctttccacagcttaaagaaataccagtagctttaatatccatagacaatagttgtttttgtagttagcactaaggagaaatagaaaaatatttattattagattaataatgatttattgtaaaaaaatcatcaaaaagagccaagactattggctgcactgtagatctgtcacaactcagtactgaaaagata

SEQ ID NO: 30426 - DNA, 567 bp, Mus musculus
  source 1..567: mol_type = other DNA
aggcaggagactctctatgagtttgaggccagcctgatctacaaataatattgatgctaaaacacatgaaaataaactaaataaaaatatttttgtaaaatatgctgtgctcatcagctggtcaataagatgataagccttttgtatctataatccatatatgcagatatatgtatatatcataatttgatgtacattcatgaattggaggttattttctttgaaatgacactttttctaatttattgtgaaagttgttgaggacaggctagagtccactgtttcctctttcaaacacaaatacacacacacacacacacagagagagagagagagaaattcaaccctaaactcaaaaatagaagggtgaattgacttaaattttcttgaaataccatttatgcttcagcaaacagaaattttggtgtacatttcccaaaatgtcagaaaatattaaaaagtttaatatctaaaagtttatgtgtaaataaaattattaatgtttacagcaacaacaagaatgctcttaaacaaaacatttaatgacctcataaaatgcattgcttt

SEQ ID NO: 30427 - DNA, 368 bp, Mus musculus
  source 1..368: mol_type = other DNA
ctcatccaacacttgcctttcttggaagacaaaggccctcggaagcggagccgcgacccacagctgcgcgccactgcgcatgcgtagcttcaagctcagcttggcttctgggcttccagctatttgaaaacccaaagtggactttctggctatccggaagggagccggggccgggcggccgcacagtacatcgcacgcacgcgcgcgcgtgctcgctcctcccacccggaaccggaagtgggagcgatcgcggcctggggcctggcctggccggggcgtcggcagcggcggccatcttggctccccgcggaaaggcgggtagggcggggacagccagcctgccggccggccagcctgctgggcttgcg

SEQ ID NO: 30428 - DNA, 319 bp, Mus musculus
  source 1..319: mol_type = other DNA
ttcttaaaggccggagataatctcactactcttgaaagaagaacaactcatccaacacttgcctttcttggaagacaaaggccctcggaagcggagccgcgacccacagctgcgcgccactgcgcatgcgtagcttcaagctcagcttggcttctgggcttccagctatttgaaaacccaaagtggactttctggctatccggaagggagccggggccgggcggccgcacagtacatcgcacgcacgcgcgcgcgtgctcgctcctcccacccggaaccggaagtgggagcgatcgcggcctggggcctggcctggccg

SEQ ID NO: 30429 - DNA, 289 bp, Mus musculus
  source 1..289: mol_type = other DNA
tagcaatgtctgcacacacgttgggtgcgattttcgattctagagttacatggaatttctacactgaaaagaatccctccacccgtttaagaggaggggcgggacctctttgagagcccatgagctcctgccccctggggagaccaagccagacttcaaaaatgggggatgacttccaggtagtaattcattgcaaatacctgggtatcttataattgcctctctccatggccgggagagacctccgagtcagaccctgaggctggctcaggctcttcccttcccttct

SEQ ID NO: 30430 - DNA, 462 bp, Mus musculus
  source 1..462: mol_type = other DNA
gtttttgtttttttcttcccataaaaaaagtgagggcctggtctacaacttctagtggggaagtctggcagccttgccagggctgggttctgttaggcttgccctcccccggtccgaagtcgcgtccggcgtgacgtaacctgcgcgcccgcagtctttgggctagggggcggggcgcggggactgccgggctgtctggggggcggggctctgggcagaccacccaggcctagggttgactcactgagtggtcacctagttggtggacaagctgggggcctagagtctccaggatggggtccagggtacccggagcggttcctgtctaccgggatgcgctgccaggttcgctacccaggggcggagcttgactgggtggctgacgggcaggaggcggggcctgccggttggccagccgtggccagcagtgggcgtggcctggctggctgaccggccgggggc

SEQ ID NO: 30431 - DNA, 184 bp, Mus musculus
  source 1..184: mol_type = other DNA
tcttgccacaagtggatttctctttcgacggggctgtcagggatagctaaggttaaggaacctgtttgtttagctcattagcaaaatagggagctaggggcctgttggatcactctctcctttctttcttttactggaaactgggaagtgaaagcaaggtttctcctggaatccacttttcctt

SEQ ID NO: 30432 - DNA, 198 bp, Mus musculus
  source 1..198: mol_type = other DNA
gagctgcgactgcctgctctgtgcacagcacagtcttgagagcacaggtgtccactagtcaatgcatccccctgcggtgcatgcaagcctcaggaagaggcgcggctgcgtcggacaccccaggaggtcctgcctttccaagggtggggacagtagagagacagtcccagccttccgcagccgtcacgtggtacccgg

SEQ ID NO: 30433 - DNA, 587 bp, Mus musculus
  source 1..587: mol_type = other DNA
gtgtgtgtgagtgtgcttgcatgcaggcacatgtgtgcatgcactcacgtgcaggagtgaacatgtcacgggcaagtgcccttttaaactttattttctttatattacttttaaatttcatttaaatgttgagctttaattgtgttatatttagcttttaaaactgtattttatttatgatagtgaaaatacgcaggaaacaaaaacaaattgcgtttttgggggttttgtttttgtttttgttttgtttttgcaaacgcatacagaattttgccttcagatttctgagggcccttttaaaattccaagttgggaaactttcgtctcagagtttatcatagaaagttgcaatcaaccagcggcgcagagtggagcaggtggccgcctgtcatccgctggagagaggatcctctcactttttcagagcagagaaaagccacgctgggccaacttgactccatgggggtcactccatgcacgcatcactggaatccgttcccagacgtttttgacagtcagttaataaagactcaacagtaagcagctcccagttctgggactttgtccacagcgcctgtatttacaag

SEQ ID NO: 30434 - DNA, 241 bp, Mus musculus
  source 1..241: mol_type = other DNA
ggctgctcataatatttcattacattttcacaataatgtcatggagcaccgttaattatgagccgctaagaggatcaccaaatcctgtactcaggaagtctgggttatctataaagtataaaaagggcgtttgttaaaagttggcaagaccccctaaacaggtccctgtcctgcagctgtacagggtcgaattggctgagcgctctgccggggtgggcggggaatttgcggaacgtccgtg

SEQ ID NO: 30435 - DNA, 520 bp, Mus musculus
  source 1..520: mol_type = other DNA
ggcggcggccccaggctcagcccaggtagccgcatctcagtctcagggggcgctctgaccccgctcctggctgtgcctgggacctctgttcctggagcaaggctgctcccctactagcaggtaagagctgctgcagggtcgagcgatcgattcagaagctcgccatcccccttcggggagatgcacggactgtggagcccttatccggcccaacgctgacacacaaccgagggacccgcttggagggtccacccagaggatcccctctcatgggaccccgaagatcttctctagcctctgaggcttttaggcttctgggaccgcgatgaaaccagaaaccaggatgccagcgtgggccgggctagggtcctgccccaggtccctggggcagcccgccccggccgcgatcctgccggcgtgcacccacgactgggagtacacactcccccagagcatgctcagtgcggtcctgggaacttcctgccgagtcgccaggccagcctcttcccctttggggccg

SEQ ID NO: 30436 - DNA, 427 bp, Mus musculus
  source 1..427: mol_type = other DNA
cttctatgttccctggcagagcggaaagaaaggaaaccggttactctcaaaagaaaacagggtggattcctttaaatgaaggaactattgataaaatctagactctctagagctcggatgtaatcaatcgggtccccaatccgttaggcggccggttcgcctgtgcagccggccctgtggaccaggttgcagcttcgctggggagaccaggctcactgcccaatgcctgcttgggcaggcggggacaaggtgcaaccctctctcctgcccacgcgacgtgagtggggggcgcgtcctccgtcacgccctcacccagccctgtctggaccgtccggggcgataccagtgcccgggcttagcgcctcggggcgggtccctgccgcccgcacctgcccccgggggcggagcgcagcggcgacagcgcggc

SEQ ID NO: 30437 - DNA, 403 bp, Mus musculus
  source 1..403: mol_type = other DNA
tcttcataggaaaacgatgctttcagtttacagttgaaattattgtttaaaaaaaacacatcactcagatctgatcatcctgacttctatgttccctggcagagcggaaagaaaggaaaccggttactctcaaaagaaaacagggtggattcctttaaatgaaggaactattgataaaatctagactctctagagctcggatgtaatcaatcgggtccccaatccgttaggcggccggttcgcctgtgcagccggccctgtggaccaggttgcagcttcgctggggagaccaggctcactgcccaatgcctgcttgggcaggcggggacaaggtgcaaccctctctcctgcccacgcgacgtgagtggggggcgcgtcctccgtcacgccctcacccagccct

SEQ ID NO: 30438 - DNA, 396 bp, Mus musculus
  source 1..396: mol_type = other DNA
agtcaggtatggcagactacattacatattagaagaaagttggtgagttcttctatgcctacagactctttaaaaagaactacagtatttcattattattgaaaagctcaactagctcctgtcaatagctgactttagatagggctgatcttatctcaattataaacactgctgtcagataaataagtctaatgctcatttgagaaattacattcagatacagcactatctctggtcccgggggctgagggaccgactgagtccagtctggggcagtgcaccatgtctggttaacgtggtgctgtgaatggagctcaggacttcattcacgttttttttttcttttaaaaaatattgactgggctggccaggcctcctgacgggtacctgaaggta

SEQ ID NO: 30439 - DNA, 417 bp, Mus musculus
  source 1..417: mol_type = other DNA
tgccaaattattctaatactcccccggcgcaacagagccgccctggagccggcacggaagcttttctgacttccgaaagtggaaggggccgccccttggcttgggaagcaatacaacgcgggctcccggtctgtgtctttcccgagatcaaaagacggcaaagggagcggcgccatgttcccgggacactaggcccggtcacccggcgagcgcgaccagggcgtgtgggtgccccatgtcctggagccgcctgctggcgcttccactccgcagcggcggctcggcgtgctccgggactccgcgccaatgtgtcgaggccccgccccaatgtgctctccgtagggtgggccacgccttttccgggcctgctgctacccacgcgcacgcgcagggacccgccctgccggctcgcgctgg

SEQ ID NO: 30440 - DNA, 274 bp, Mus musculus
  source 1..274: mol_type = other DNA
tctggatggaaggcctagagagtcatgacctccaattattaacttcatattgtttgacaggtaacttaataagaaagatatctgctttaaaacaacccataccccttgagtggctttaggtttaaagtaactctcccaatgacaaccagcgcgagccggcagggcgggtccctgcgcgtgcgcgtgggtagcagcaggcccggaaaaggcgtggcccaccctacggagagcacattggggcggggcctcgacacattggcgcggagtcccggag

SEQ ID NO: 30441 - DNA, 500 bp, Mus musculus
  source 1..500: mol_type = other DNA
tttctggtatactcatatacataaaataaatatactcatacacattctagtgtaatcatatacataaaatgaataaataaatctaaaaaaaaacccatttgaatgaaaactcaaagaggtttttaaatacaattgtgaccatgcatatctacatataggactacatatgccccaagatatttatgaatgtagcccaatacatctgatgtgtcatgtaacaatttcaaaatgttcatcagttagccctggctgtcctggaactcactttgtagaccaggctggcctcgaactcagaaatctgcctgcctgtgagtctacaaaatactcttattatttttacttttaattctttaaacaatacttgttaattttatttcattttaaaaaaaatataagatctttctgtctggaggaaaaaggtcttcccaccttccagcaggccctttgtaggcgggcccgcttcggggccccacccaccacccaccgaggccccgccggcc

SEQ ID NO: 30442 - DNA, 395 bp, Mus musculus
  source 1..395: mol_type = other DNA
agcgcggcacagcggggcgacggcggggccggcgcccggacaccggctccagcggcagccgcggcggcagaatcccgccccttccgcctctccgtcgcgttgacggaacccccattatcactgcgggacagcgggagaacttgtgaaagagccacctttcccacgagtagaatccactctctttcttcagggaatgattatagagctttttaaggatgaaaggacaattttgtcgttcctccgccccttagcggtaacgggttccaggctgaacacctggttcctccaggtgggcgactacagttcccaagctccttgtctagatgagtaaaaaatataacagggttgggaattttctcaacacattacaatgttttagagtgctggtatttgaa

SEQ ID NO: 30443 - DNA, 356 bp, Mus musculus
  source 1..356: mol_type = other DNA
aagtgcatttttgcaagcgtcttcaactaagcggaagttcaaataccagcactctaaaacattgtaatgtgttgagaaaattcccaaccctgttatattttttactcatctagacaaggagcttgggaactgtagtcgcccacctggaggaaccaggtgttcagcctggaacccgttaccgctaaggggcggaggaacgacaaaattgtcctttcatccttaaaaagctctataatcattccctgaagaaagagagtggattctactcgtgggaaaggtggctctttcacaagttctcccgctgtcccgcagtgataatgggggttccgtcaacgcgacggagaggcggaaggggc

SEQ ID NO: 30444 - DNA, 551 bp, Mus musculus
  source 1..551: mol_type = other DNA
agcagtacgggcagtacgggcacgacgtttccccggagcgggggtatcagccccgggcatctggtccaggccccggagaacagttccgcgaacggtccctgctccagcctggcccggatctccagggctcgcaagagcagcagctgcagcagggacgctcgggaacctgtccccagctcccccgctaggcctcaaggggttggcgctgcacatggcccccagcgaagcggcgggcaccgcgcggtggaggcgactagagggctcgcctcagaacccgacggcccctggcgggccggaggagaggggagggacgccgtctcctcagcgcttagctcccctctcccgctccgttagcgctaccggttggcgggcgggggaggggagcgtattcccggggcgccgcgggggaggcgagcgcggcacagcggggcgacggcggggccggcgcccggacaccggctccagcggcagccgcggcggcagaatcccgccccttccgcctctccgtcgcgttgacggaacccccattatcactgcgggacagcgggaga

SEQ ID NO: 30445 - DNA, 695 bp, Mus musculus
  source 1..695: mol_type = other DNA
tctgcattcttgtggaaatagaatctttgtttaacagaagaggaaactaagataaatagaataaagacttttcagttactcagtgtattatccaaaaggtgagactaatcttgtcttacttaagtcatccttgggctaaggtagacagcatctgacagcaagctgagatatcctttgtgaagaagtaatgcttcttcctaaatatgcagatgctttgttttagcaaaaacacattaagcaactaaatgtattatcttttcctgtgacaaaaagtcagtttaaagatactaaaagtgtcatgagatgttttagtgatactaaagagtcacttaaaacttatatatattatatatattaaaacttatatatattgtaagtggtgtggtagcaccttagtactcaggagcctgagtcaagttatatatattaacaatatcagattccttactttattctttaggaaatatgatcattttatcttttttgcaatatgatcggatcaggtgtcatggtgcaaaaaagtaatttttagcaagaaacctggcagtctttgcatagtcagattgttagctcttacatcattgcttctgacttactaatgaagagctcaagatagcttctgatgcattccagatattctgggtggtgactggctagagaatcactgacatcacaaccagcagctgttgatttct

SEQ ID NO: 30446 - DNA, 584 bp, Mus musculus
  source 1..584: mol_type = other DNA
attaaatcatttctattttaattcttggactatttaacttaagttggtaaatgatgaagtatctagatttttctgattgcaagaaatatttttataagcctcactagccagttaatatacacttgaggcaagaaacttgaaaagtatgtttagtagagtttttttttaatagaatatatttaatagagttataactgatataatttcacaccttgttggttttatacctacatttgagttacataaattattacaggcagctgtcttgtgtaactattagttctatgtttttgttaagtacacctaaaaattacttgtttggaataatgatacatcactgtttttcacatgttgcctctataattagttttattaaagtgactagaaaactgatacgtttaactaaatggttttatggaaatcctcttttttaaatggggcatatattagttcatttgttagcttatatccaataccaaaatacttagagcctcatttacggattttaatttttggatcttgaaatattatagtgaatagaaagtagaatgagtaaattaagaccttagggaagttattgttcc

SEQ ID NO: 30447 - DNA, 544 bp, Mus musculus
  source 1..544: mol_type = other DNA
aactcactgactgtggtcattcaaaataagatgaagtcagcacatgtaagtcctgactgtatgaagctttccagacaatacagtgtgtaatgtgaaaactgtaaatcagaatcccagtgacctattaatttattttatttcattttatttattatgtgtctgtgcattacatacatacattgccctctgagactgaaatcacacacagttgtgagcctgcagtggatgctattttttaaactaatattagttctgttagttaatggtttgatcactgtggactccaaaatggaaagattctgtgtctttttttttttttttttctggtttagaaaggtgaatatcagaattgacttaaaataccttagtgtcttactgttaataactgcagtcatgcaagcagctatttcaaaaaatctgctagttcttaattgcaatactagtaactaattatttcaactcttagcatacgtataggatagtatatacagtataatacatacactataaaaagaaaagtgtctgagaggtttacatttctcac

SEQ ID NO: 30448 - DNA, 334 bp, Mus musculus
  source 1..334: mol_type = other DNA
aacactagaaacttgtgcaaatgttttttcttccatttatgcatccataaaccttacatagttattaatttattttcttactggcctatacacaagttgattctatcactcaaggaaacaacagaaatattttctttacatgatattcatacaagttaagtacaagaattaaaaataaataagttttttcaatagggttttacaatgtgatccagttagtaaatgcacattatagccaaaagccagcattctgccacttaggaggaacactgttgtacctcaatgcgtggtttgccacgcccctctgaatcaaggcttgacgtcaacgtgccgt

SEQ ID NO: 30449 - DNA, 358 bp, Mus musculus
  source 1..358: mol_type = other DNA
gctgaggcacttatgcaagcctgaggacctgagtttgctcctaatacacattttttttttcatttttaagtaaaaatgaaagatgaacaaacattcatgcactcatactatgtgcacatgtatacagagaagggttgcttcccatgtatatgtaccatgcatgcctggtgcctgtggtcagaggaaggcctcatcctttgcaaagttaaagacgagcactgctattcaagtactgaagaggacagactggcctgtgtgtgcacacaagtacacaaacatgtatatacaaacatggttctgatttatctgtcctagataacccagttaaatattgtatggataatcactgtattttaca

SEQ ID NO: 30450 - DNA, 355 bp, Mus musculus
  source 1..355: mol_type = other DNA
atttgaggcttcaagtcttcaacaccttcaattgcagatctctatagtatatttcctaatagattataaaagtattaattttatatactctgcctggcattaaatttttaacatccagtaagcctcgaaaaagtgacttatttattctggtccaggtttactgtgtcctggaagcccaggattagtccttcaccacgtgaacccagaattcaaggtctcagtaagaaagtcaaatggtatgcagattgtcagaatatatctatcttatgcacatgtgttcttagaagcttcatggcgtatgcttttggcgcgaaaagtgcgaagtagctcagctcctaccctgtgcgcgcgcgaa

SEQ ID NO: 30451 - DNA, 420 bp, Mus musculus
  source 1..420: mol_type = other DNA
cattttatgtcaacttcaaatttcatcccaagttgttgttttaagatagagtctcactacgcaaacagagtgctgttaactgcaggcccgaattagcatttttcaaaagtctaatttagggaagattcacccattaggctattgcttttaaaacagggttgcccagagacctcctctgggcagtccagctggcaggacgcgagacaagctgtctgccagggagggtgaaacaatgatactcacccccctgtctttaaaataattagaattaaatttaaaaagagggctctgcagggaagattcctcggagcctatcctgggccacgccccatgactcccgtgggcggggcagagggaggagctggcggcggcgcgcgagagctcgctgtggctctcgcgatatttccgaagccaaggttc

SEQ ID NO: 30452 - DNA, 450 bp, Mus musculus
  source 1..450: mol_type = other DNA
ttcccttaattgtgaactatagttcatttatcaaggcaactctgtttatgaagtcaggctcagaaaactggccttctttggttttctgcagtgaaaaccaattccaggcaagcatttaatcactgagttatatgccaggcagttagtattttgagacaaggtctcagtatgtagcctaggctggccttatcagggacatgtcactgtgccctagaaaatgttttttatacaaattgtcttttcttagaccaattctttttatacaatattaattttttaaaaatatatttctttttattatttttatttatgtccaaaataggtcctctttaagagcagtaaattctctctatatctatttctatatacatctgtccaatgtatatgcatatctgtatagatagttattttatactatcatgctctattcttgagaacagaatgtaccta

SEQ ID NO: 30453 - DNA, 291 bp, Mus musculus
  source 1..291: mol_type = other DNA
gaagcagtctgggcgcccactgcaaccttagcctcgaaagctctgggctcaggccaggctttgcagtcccaggctgctccatttggtctcttggagctcgtggagcgcccactgaattatctgttaactagatgtctttataataaagcacattacgaaattgttgccactattgttgtcattataatagtaatggtctaaaattctatccacgtgggtaaggatggatgcgccacccgccccgtccgagctgcgcatgcgccgccccgggagcgtgtttttataaaagtc

SEQ ID NO: 30454 - DNA, 114 bp, Mus musculus
  source 1..114: mol_type = other DNA
attctaaaagtcctctgcaagatttagcaaatttttaactttacattgttttctttatagagaaatccaaggtttaaagtttcagaaaccaagcatggttaatgttcctgatac

SEQ ID NO: 30455 - DNA, 503 bp, Mus musculus
  source 1..503: mol_type = other DNA
aaaaaataccctaagttatcagtttgaaggttctgatattttattgcatgcctttttaaaaagtaagtaaatgcatcatgtgatattttttattcttcattacttaagggtccacccattaattcttaaactcatttctttggaaaaaaacctattactgaaaataaagtactttagaaattgtttctctgtatagccctggctgtcctgccttggagctcactgttctatctagctataaagctatgatctttatttaacgcacatgtagggttagagagctcggtgacaccacttctgtcacttctgggccctgacattctagtggcacatttttaacaactatgagaagaaacacacttgatagttataaaacactctacctttgtgagactcctttagaaggtgcccactggacaactaggtcccctgggtgaaactggaggccaggctcccgccctcattaacgagggaacgccccctcttgcacgcgggctgcctca

SEQ ID NO: 30456 - DNA, 335 bp, Mus musculus
  source 1..335: mol_type = other DNA
cccacctcgaccctcccggtggggatttgcaggatcaattaattaatttaatgtcacaccacgaaataaatctttttcttaagctctactatttattcctgaattctatttcatagcaggactgaaatccatggtgagacctaggagagccacaggggtctcagcacaccagagttgggagtgtgggtagctttctgctggagcagagtgctgaccgacaactaggtcccctgggtgaagctagaggccaggcacccgccctcattaatgagggaacgccctcttgcacgcaggctgccccacccagggtgacgagggccctgccccgccccgcc

SEQ ID NO: 30457 - DNA, 366 bp, Mus musculus
  source 1..366: mol_type = other DNA
gtatattaacttaacagaagggccacagcagcagtttcctgctttgctgtaagcaaaaattgtggctataaaattttcatgaaaccatggtcacactgaaacatgaggttgttggtctagaataaatgatctctttttatggattacttgtgtttattctatataatttctatagtaattataatatatacaagatgtaaatactatgaaaattctttttacatggtgttgcttaggaaataatgtagaagatagtttgtacatgttcagtacagataaaaccactttgtctggcatctgcagaatccacaagtgagaagactgtggttacagcagtagaaacatagtatatgttatcatcagaac

SEQ ID NO: 30458 - DNA, 457 bp, Mus musculus
  source 1..457: mol_type = other DNA
acatctggtaagaactaatttttactacttagagttacaattatttatttatatcaggtctttaggcttcatgacaagaagtgctttccaagagcaatcctaaatctttaaacttattattaacagactaagggtccatttcaggacttgactttatctgtatatttatgtgatcgcaaacacataaattagttacatttttctgaatattgacgagtgtcagactatctgtggagctctgagtatgttccagtcaggtcagcacaaactcaataaacaacacacatactgtgtctattgtagctcaagagaatcattttagtcagagtgggtctgaactccaactcatgatgcataactcttatgattatgaaaagacagaaaattctgattaaataaacactgctgctctagtctgttaatcattcaccgggacagaggagactgtctccctgtc

SEQ ID NO: 30459 - DNA, 81 bp, Mus musculus
  source 1..81: mol_type = other DNA
gaagatgattttatgtgatcctaaagcctgtatgaatctgactccatgctggaacctctgactctgctgagctcaaggttc

SEQ ID NO: 30460 - DNA, 280 bp, Mus musculus
  source 1..280: mol_type = other DNA
gactgtcaagcattgtcaggtgaatcagttacagcgcacaccaggagcgggtgcacttctcgaggctcccggatcttgccttctggtagccagcaaggggggggggaagggaaggcttttaattcaccccgcctccagcggccggctgctttgcgagctgacagccttaggctgtcacaggtcctcccagaccccaggagcccgccccctgccctgcaggtgcgtgagggctgacgccagcgtgggcggggccaagcgccccacgtgactcgccccaacc

SEQ ID NO: 30461 - DNA, 498 bp, Mus musculus
  source 1..498: mol_type = other DNA
gatcttactatgtagcccaggttaatcttgaaatcattacactacatctggtaagaactaatttttactacttagagttacaattatttatttatatcaggtctttaggcttcatgacaagaagtgctttccaagagcaatcctaaatctttaaacttattattaacagactaagggtccatttcaggacttgactttatctgtatatttatgtgatcgcaaacacataaattagttacatttttctgaatattgacgagtgtcagactatctgtggagctctgagtatgttccagtcaggtcagcacaaactcaataaacaacacacatactgtgtctattgtagctcaagagaatcattttagtcagagtgggtctgaactccaactcatgatgcataactcttatgattatgaaaagacagaaaattctgattaaataaacactgctgctctagtctgttaatcattcaccgggacagaggagactgtctccctg

SEQ ID NO: 30462 - DNA, 249 bp, Mus musculus
  source 1..249: mol_type = other DNA
gagaagtgcacccgctcctggtgtgcgctgtaactgattcacctgacaatgcttgacagtcctcccgggctacagagttggaaactggctagctatctggtcactgggatacgaggaactggaatcctgatgaccaagagtctcttaccgcgggagtgaggcgatcgccccaggcacggctgctgacctcatctcaatgaatcagttcggcgcagccacgaaccccgccagcggcgtgactgtttggtg

SEQ ID NO: 30463 - DNA, 244 bp, Mus musculus
  source 1..244: mol_type = other DNA
gtaaagccttaccaaattgccatctttcaactctcagagttctgagacaagtagttgtcaaagtgacaatcactatcaaccatcatagctgctatgcatcagtctgcctatgcttcacatcacagataacttgtataattaattctaacaatttgcttcactccactgtgggtgtgggcttaagaccctcaccgtagctgcctcagtttctaatacatcatctaaatatatgtgatgtcacaat

SEQ ID NO: 30464 - DNA, 145 bp, Mus musculus
  source 1..145: mol_type = other DNA
cggaggtgatttcttccaggaagcaggaggctccctgaaagaagtacttcacctttttttttttttttttaaatccggaaaatacctctttccgactgggtgactcaggcagtcagagaagcacctcctggtcccctcctgtcct

SEQ ID NO: 30465 - DNA, 166 bp, Mus musculus
  source 1..166: mol_type = other DNA
acctttaaaagttgatatattcagcctatattcagggaaatagcagaactgctgggaggtgatttcttccaggaagcaggaggctccctgaaagaagtacttcacctttttttttttttttttaaatccggaaaatacctctttccgactgggtgactcaggcagt

SEQ ID NO: 30466 - DNA, 287 bp, Mus musculus
  source 1..287: mol_type = other DNA
gcatcaaaaggacctgttaccattccatgaaatgatcatgttgtccatttataaaaatagtatcaagcatggtgtctgacaaacagtaggcattctggcatccaatgtaagcatacttacaaacaccagaactgtttaactgtttctaaaggaattttcagcttaggtaaaaagaactgaagaaccattcatgcatccttccttaattcaacagtttacggaaagaaaatagatgttccagaggaacttcatctactttggttattgtctttcagcattctcataca

SEQ ID NO: 30467 - DNA, 220 bp, Mus musculus
  source 1..220: mol_type = other DNA
aaatccaatctgaaatgtcattgatttattgtggatttacgatcttcaattgagctctgtaataaaaaataatttcttttcttgccatcaaatgtgtgacaccaaataggtcatgacctggacttgctgtagtgaggaaaggagttgctatctccacacagctcagcttcagggagcaatggcattttccctagtttgtggcagtcacgtgatctggctg

SEQ ID NO: 30468 - DNA, 339 bp, Mus musculus
  source 1..339: mol_type = other DNA
gcttgcccaagaagtcaagcctggacaaaccataagggcagagtttgctatgtgacttgtcacacctgactcttagcatttagacagtggcttgtgcctctgccagagggaagcgcctttcagaggccccctccatctgttttctagataaatgtagttcagacaaaagcagtaatccatggctaatatcactataaatagtaggtgttcacaagtacacagagaaaccctgtttcaaagcctagctttggtccacaaaggctttggcaaggcctggcagctgctcaggctgaggtgttttcttttttagacaaagactagctagcaaacaaaacagat

SEQ ID NO: 30469 - DNA, 399 bp, Mus musculus
  source 1..399: mol_type = other DNA
cttgctagctggagatacagttggttctaggcccagaactccctaaacctgaggattaaaggaagatatttattgctagccttagccttgtctcattgcaaacagacataattattcaatgattttggcagtatacaataaaacaggctggtatattttgcatagtaattgtatgtttacatgtgtagagaatatacaaagtactcatgtattgctttttatatcttttttctaggaaaagtaggtcagaccttttttttctttcttttttatttagacaggagctagaccttgaaccaaagatcctctttggtgttttgatactttaaaaatacaattttgtagatgtaggaactgcagttcagagaagccaggtttcatctcttctccagggaagca

SEQ ID NO: 30470 - DNA, 356 bp, Mus musculus
  source 1..356: mol_type = other DNA
tcaaagagagagagtgtctccgagagaaaataactatctgtgaggacacaattatacctcgtctttcaaggatcctctgggcccagtatactcccagtcttttgcctataggagaaaaaagatttgtccctaaggccagaggacctgcagagtctcaggattcctgactgtgcctgcagggtacggttggtaccttgccacagctcctaggaaagtggcctaacatgaacacaaaattgcaagtaattctcatttgcatggtgatgggagtttatttttcccagaagcaatgtgtcaaaacaaaaaaaggaggtatttcttaataatgattaatcagttgtttaacggtggacccc

SEQ ID NO: 30471 - DNA, 271 bp, Mus musculus
  source 1..271: mol_type = other DNA
cttgccgtagtaggagaagtccctctaccagagatctcccaggtatctgtagaagtactaacatctccatccttcaacagctacaggttacacgtctccaaggctgggacggatctgagctcacggggcagaggacttccgtcaacccaggttgagtggaggaaacaattatttctcaatcctaagagggcctctgtacatagaacaaacttttagtattgagaagctaaaaagacagttctttagcgcttacaatgcaaaggccccactg

SEQ ID NO: 30472 - DNA, 196 bp, Mus musculus
  source 1..196: mol_type = other DNA
ctgctgtaacagtcaaacccttgtggatctcagcagtgctaagacagagtctgtctttttgggtttatataaaaatatgttcgaattcataataattaaattgttcgtggtatcacagtagtacattcttctcagtgaaaaccaggtatgttaaggaaattgttactattggattcttattagtgcccggcccggg

SEQ ID NO: 30473 - DNA, 396 bp, Mus musculus
  source 1..396: mol_type = other DNA
aaaagatcatcattgaagaaaacatttttacttatatcacaaccccaaaaggagcctcggttggtgaagattcgattatgaaataattgatccaatgggctcatcctatgtgctactctcagatgtcagaactgccacgaccgtgttgggaatcaaatccgctcttgcagaggagttttgcagcctccattttaactgtcgaaatagacttaacatacgctttcacatattaaagatgcgcagagctctccaagcggtctgctgagcaggcaggctgtgctgcgtgaatacgaagaagctcttttgcctcctccccgctccctccaaggcggcgttgcgcaggcgcggcagggcgtgcgcggttgctaagcgacgcggccgctcccgcgtggtctc

SEQ ID NO: 30474 - DNA, 463 bp, Mus musculus
  source 1..463: mol_type = other DNA
gctagcaactaggccctagtatatgacaggtagagattgccaggcactttggacaatcaatgtgaaattagtttagcaactaggatgatgatgatgatgactatgataattagtttaatagaacataagcaacctaggtttaagtttaatttaaacctaagtttaaatccttgtctctgctattattacagcgtgcgaaaaaaaaaaaaatcctagctgaagcctttagtttgtaataccatataaagatatggataaataaaagcctttaagcatttaaaagcatttttaaaaattcaatgaaacctgcaagtttaataatatatgaattcaaaaaataaaatatgaactcagttcattttgtggacttgacgcatgtcgaatagactgcccgcaggctcctaggtacacccggttccaagtggaagagcgggagcggaagttccggagtctgtcccgcccc

SEQ ID NO: 30475 - DNA, 348 bp, Mus musculus
  source 1..348: mol_type = other DNA
tgggtcacggctctggcctgaccctgtcatacatggcctgtttaatggtctctatttaatgtttaaaattaatgacagacagcatgggcctctgtggtctggaaggatccgtcccaaataagaaaagcattccttctagccaagggtggatgggcctcaccctgcatcaaaattcttctccaggcaggcaggataatggagggatataactttactccaaagctatagggccaagggaactgtccccctcgggtccatcctggttggtccctatgctggaatctccaccaggagtcctgggcactcagccggggggtggaggtgcgggggccccaggggccccaaact

SEQ ID NO: 30476 - DNA, 470 bp, Mus musculus
  source 1..470: mol_type = other DNA
agggcccaggacccttgctagcctacgagctgcactgtggaggtgctggtctgcgcccctgggtggaccttccataccaaaggaggtgtgtaggcattcatttccgcagtgattactaattcgggaggaaagttcctgtccacccatggggcacagagaggtctctcatgatcaccggatcaccaagccagcttcccacgggcagctcggagaatccgcgggccgccttactgacagcggcgggctagctcctgtcccggggccacccacctgctccccgccccgccggtgttagggcgccctgggagacgcccagaggcgcaggagccggcgcctaccgagctcgcgaagcctctcgggtgctagtcgccgagccacgcggctccgacccgcagtcacgcgtgtttccggcctctcggtgggctccgccccgccccgccccgcccgcgggctgcgggccctttaaaagc

SEQ ID NO: 30477 - DNA, 346 bp, Mus musculus
  source 1..346: mol_type = other DNA
caggtggaaacctgtaacacacaggctggagtgtggaaccctcaggtctgcccctgccactgtaagggctctagctgtcacattcagcgacaagctccgggcctgttcttgcctctcctccctgtggtggggtgggggagaaacatggaatttcctgggtttcccaggatatctggacttgataccatcaaacctaaagcacacagtgcatttgagtggctgtaacggcaccgaaagctctaaaggaagataagcgacttctttagttaactttaagcagagctttgctcagtggcctgtcacagagcccccagcctccctctttccctttactgaagggggagtg

SEQ ID NO: 30478 - DNA, 302 bp, Mus musculus
  source 1..302: mol_type = other DNA
atgcttagctaccatgcatgaagccaaggtaggctactctgtctttaaaaaaaaaaaactgggcatggtgcatgcctttaatccagatttctaagttcgaggccagcctggtctacaaagtgaggaaccacttttggtttgagcaccagtgcgcctcaggcatccccaaagaccggctctgggcctatttttcagacaggcagtcatggaaccgtttgctttagaggaaccagatcttccctggagctctagagcccttggatgacctttgctgacccagggcccttcctcccacactgtgt

SEQ ID NO: 30479 - DNA, 414 bp, Mus musculus
  source 1..414: mol_type = other DNA
tcctccagccgccgggagtaggcgacactgcctggagccgcttgtgcgccggcggggacagggcggcctaggaggcaggggcccgccgcagcattggagctctgagcgtcccacccgactgggggtatttgtgatccctaggcttggggggcttggggaaggctaccgccgcctgccgcctccctcccgtgcggagcgggcccttcctgcagcgtccccccccatctgggaggtgccccagccggaggtcaggggccgcgtcgcgggctaggcgggaggacccctctggaaagcgccgaggtgccgcagtccccacccgcagctcagctttcccgccgcagtctccgcccggagcacgcgctgccggctgctcaaacctggagggaacatttttcctccctacattggcagggc

SEQ ID NO: 30480 - DNA, 171 bp, Mus musculus
  source 1..171: mol_type = other DNA
gcccgcagagcgcacccacattggaaggccaagggccttctcctgacgtgagctcagaggccacgccccagtaacggtgccgatatcagatcggctctctgattggttaatattagctcagcccctaagatcattggacatgccggggaggagctcactctaggactgcgc

SEQ ID NO: 30481 - DNA, 291 bp, Mus musculus
  source 1..291: mol_type = other DNA
cctgggaccggtcgcggcagagccaggtaaaggctccttctgaacaaaccgggctttcggcgccgccttagccgtgtcgccgcccgcggtcactgccgaggacggtcctcacgcggcgacaccgccctcccgcagcccctttgcacacggttggccgggtccacctaggggcctcgccgtaacggtggtctcctagccttggctgccagcccaggacccggaacagcggtccaccgcgcgccctctctggtcgtccaagcttgggcggctcgagctggcccgggctctctc

SEQ ID NO: 30482 - DNA, 249 bp, Mus musculus
  source 1..249: mol_type = other DNA
gaccgcgggcggcgacacggctaaggcggcgccgaaagcccggtttgttcagaaggagcctttacctggctctgccgcgaccggtcccagggcgcagtcctagagtgagctcctccccggcatgtccaatgatcttaggggctgagctaatattaaccaatcagagagccgatctgatatcggcaccgttactggggcgtggcctctgagctcacgtcaggagaaggcccttggccttccaatgtgggt

SEQ ID NO: 30483 - DNA, 286 bp, Mus musculus
  source 1..286: mol_type = other DNA
aatcagctgctgccttatcacatcagctttggtgaaaataatgtaattatcttagtttaacttagcttctgttgtggcacagaacaactgcacactggtctgttctcagagaggctagaagttcagatttagcctggagatgcaaactctatttggaatttcacacatgccatctctctctctctctctcacacacacacacacacagccagaaagtgtctgaagagagccactgagtctcactcgcggcagcctctggactaggaatccaagagcataaaacgct

SEQ ID NO: 30484 - DNA, 424 bp, Mus musculus
  source 1..424: mol_type = other DNA
tctggccaggcagtggtcagatttctgagtttgaggccagcctggtctacaaagtgagtttcaggacagccagggctatacagagaagccggctcctggtgtgtctgaagacagctacagtgtacttacatataataaataaataaatcttttaaaaaaaaaaaccaagaacatctttctggttgttacccgcaaaatttcatttctccaaataaatctgaagttgtcttaaagaaggctttgacatgttcaattcatgtcatttacaaacagtcaatggttgctttgacaccaacaaaaaacaatcttgtgtttatggaaataacaggctagcctcgagtcagtatgtagctgaggcaagtctgtttcctgtttatttgaaagagcaggcacacttcctgtaagtgccaaaaactgtatgccc

SEQ ID NO: 30485 - DNA, 398 bp, Mus musculus
  source 1..398: mol_type = other DNA
aggacagccagggctatacagagaagccggctcctggtgtgtctgaagacagctacagtgtacttacatataataaataaataaatcttttaaaaaaaaaaaccaagaacatctttctggttgttacccgcaaaatttcatttctccaaataaatctgaagttgtcttaaagaaggctttgacatgttcaattcatgtcatttacaaacagtcaatggttgctttgacaccaacaaaaaacaatcttgtgtttatggaaataacaggctagcctcgagtcagtatgtagctgaggcaagtctgtttcctgtttatttgaaagagcaggcacacttcctgtaagtgccaaaaactgtatgccccacaacttcatttgttcctcagaactgcagatgccc

SEQ ID NO: 30486 - DNA, 353 bp, Mus musculus
  source 1..353: mol_type = other DNA
agagctccctggggggactggtcacccctacctctcttaagtcaggaaaagaaaacttgactttccaacctctaggatcatgagacagtagatgctgcttaagccactgacttgtggtacattgttatggcagccctggtacaccaacacagcaggaaatccaggacctgtggtgagcaagcactggtttgctctgaatttgagagccaaaagcctggctaatgttttgagccacaatcatgctacacttatatcaaggggtttcttacagtcaatgttgcatgcccatcattttcagagagtgtatacacacacacacacactcattgggtcctcagactgggcagggcagg

SEQ ID NO: 30487 - DNA, 195 bp, Mus musculus
  source 1..195: mol_type = other DNA
aaccagagaggcccagtgtgggattgtggggtgccaggacacacctcacctcttacaagtctgatgtggtgtggtgtgtgtgtgtgtgtgtgagagagagagagagagaactgtttgggaaacaaacaaagggctcctttcctgagactcccatggcccagcctctttgcactttcccaagtctgtgcacagaat

SEQ ID NO: 30488 - DNA, 251 bp, Mus musculus
  source 1..251: mol_type = other DNA
ctggaggctcagagacacaataaaatagccagaacccagtctctggatttcgtgaggccttcacctagaaagtctggcagggtgggtggaactcctctgggccccaagggcccttggcaccaagatctgccctgctcagctcctggaacatcccaagcacaccattgtccttcctggggtgttcagcgggagtgacagtgatgtcacaggtgtggagtgccagccacgtgctgggtgccaagcaaaacagc

SEQ ID NO: 30489 - DNA, 339 bp, Mus musculus
  source 1..339: mol_type = other DNA
cagaacctctcaggggacagctataccaggttcctgtcagcaagcgcttcttggtccctaggtagggcagtctctggatggcctttcctttagacaggaacaattctggattaaaatttgggtgagtggccccaaccctcaattgggggccacgcctatatcttggcatgctaaggctggtttaacagacacactgttgcagtttatgatgaaattaaagctataacgtaaatgccagaacaagagcaggctagtcctgacccttgtctagagaactcaagggcttgattggttggttgctgtccaggtcaatcaatgattggtcagcagcgagtcatc

SEQ ID NO: 30490 - DNA, 351 bp, Mus musculus
  source 1..351: mol_type = other DNA
gctttgctggagcacccctatatcaaatttcagagcttctgttttatcttagagaaatagaaggagcattggtggccaagggacccacagctctgctcccaaaggcatctgggaacatggtcattggctctggttcctgacacctttcctaaatttgctgtaggtccagatatttctgagcactgctccacctcagctaaggccctcagggcctcctgtgtggcttgacccccagccccatagcaggctcagagaggaatctgcctgctgcccctcctctgccgactgccttgggggagtctgtagggaagggctagtgttcaaaaccatcgaggtagttatttataaacg

SEQ ID NO: 30491 - DNA, 331 bp, Mus musculus
  source 1..331: mol_type = other DNA
tcagttgccccaaggaacatttctaggtgggagttcctttatagggaggtcacatccccttcacaaaaacaaccccccgggatggagacttctctcccacggggccacgaaggctggaactttattaaggcagattaaggtcgcgatggctgctgcggcccgggcgatcgccagctggccggctctcttctggaaggcccagaggggaactcaggagcgcagcacccgcccgcgcttgagcaccgccccgcccccagctcaagaaacgccggggaaatgggcggggcctgggcggggcccgccccttttcctgcattcttgatggaggggg

SEQ ID NO: 30492 - DNA, 575 bp, Mus musculus
  source 1..575: mol_type = other DNA
atagctagttattaagtgttgtaacttttgacatagattttttttaaaaggttgatcttttgggtcaaatgtccccaaatgtgcctgttattggtcatatggaaaatttgaccttgtctttacaaggcttatctttgtgttataaaacctttaaaatatggctaataagaaaggccgtctagaaatctttaaaatgtgattttaagaaaacatcttctacgtagttcagggtgaagaagacgatggatgaactagggttttatgatcctcctggattgcaaacctgtgcttcgacgccaaactttagaattgtttttaaatagatttctaaattctttaaagtttgaaaaccttaaaacttttatgtaaatttgctcaagatagctaggaaactcactttaccaagaggcacactgggaaatgtagttctccgagcagtggggctcagtgcgccgccagtggcaggacgaccctcgtccctgaaaggaccaatcgcggagggtcgagctggtacccgccccacccaggctgcggccgcgcggggaggaagcgcgcacaggccgagtgcaaaagtt

SEQ ID NO: 30493 - DNA, 399 bp, Mus musculus
  source 1..399: mol_type = other DNA
ggacctctggaagagcagtcagtgctcttaacctgtttagttctagtaataaggtagccttgtatcctactctactcatcagtactaagtggtggacttagaattttgaagcaagcgtttctttctctttgaaatgctaatatcagaaattgaggttttaatgagtgtctctcaaagattaacgctgaagtcagagtactttctaagattaaggtcaaatttttgaacctaagtaatttccctccaattcttaagtgacgaatgcctatcccatgagtcttgcaattagctgatttgcaaaataatcaagtcagagaactctatataaatcaggttatttcccaagccgaatctgcagctctggcggggcggagcgcacaaaccctacggggtttggtt

SEQ ID NO: 30494 - DNA, 382 bp, Mus musculus
  source 1..382: mol_type = other DNA
ctggttttagtttttcaaacttggaagtgttaagtcccctgaaactaacatttccttcttgtgaactaagaatatgaaatactaactctgtatggtagacttttattaagaggcctaccaagcactgggtagtggtggttcaagcctttaattcaaggccagcctgatctacacagtggccacacacagaaattttgtgtggcatgtataaataccccctgggcagttggtcagggcctttcctctgcagcagatctggggcactgacctcgctcacctgttggggccagcacctgggattcacatactacatagtttctaagttgttatcacccagtggctggcatatagcagtcaccaggctagctacagttataaatcg

SEQ ID NO: 30495 - DNA, 274 bp, Mus musculus
  source 1..274: mol_type = other DNA
acatttgatacgatgtaaatgctcatatatgtaagctctggcttaataagaaaatgtctgtttatattcataccgagatgatgaaaacaaatatataatattcatcaacaactttaaaaacctaagtgaatgtctctccaccttagacaattccatggatgaagttagctttctgagagcaaggaaaagtagctctcagaatgtggccgatcctttgaagtctaggagccacgcgggggctgcccgtccggtcgcgaccagaaatttaaaaggc

SEQ ID NO: 30496 - DNA, 399 bp, Mus musculus
  source 1..399: mol_type = other DNA
aagtcaactcagctctcacatttgtaagaaccagcttacgcttaacatcctcataatgttgatactgatgagtggcacagtcattacagaaactgtaagttttgaaaattcacagtgagtaatcccaccacttggggccaggagttgaagcagaaggatctcctatgagttcagaacagctagagctacgtgttaataagttggtaagggggaaagcttttcccattctagagcgccgccacagccctgggcccagattgctaccccgagagccctaagcaggactttgggcctgcgaggaagagccccgggccagaaacaaaacactggctttggggcccggcccctcccccggaagtgacgctcgcgctgcttcggcgtcgaggaagggccccggca

SEQ ID NO: 30497 - DNA, 603 bp, Mus musculus
  source 1..603: mol_type = other DNA
agccctgggcccagattgctaccccgagagccctaagcaggactttgggcctgcgaggaagagccccgggccagaaacaaaacactggctttggggcccggcccctcccccggaagtgacgctcgcgctgcttcggcgtcgaggaagggccccggcagtgccgggagacggcggccgtaagcgcacgcacggcgagtccacttcgccgtcccggccgcgtgtgcgagggcggggctcgagacctgcggcagcgggagatgcgggcggctgcgggcacgcggctggctcggctcggccgccgctttctcgggccccggcgcgggggtcgccactgttcgccgcgcggcgagtgtgaggagcggtgggcgacagagtctcgcaccgcgttcaaggccgaggagtcccgtgccctgcctggtgagcagcacgcccacgccccgtcggggtctcgcaccaccgcccctcagccaggtttccgcgcgggccgggcggaggttgcgggcgggtgggcggggcccgctggcgcgctctccttgggggagcagctcggtggagctcaggtgctcgccggagcgccccctccgccttgcccgcacctccggg

SEQ ID NO: 30498 - DNA, 269 bp, Mus musculus
  source 1..269: mol_type = other DNA
aatgtaggatctcgcagtgtcatactgcatgaaccagtggtccacggtctgtgctttcctttgacataccactgggagtcaggactaggtctgattcagagtgagttcctctggtctagaatgcttttttaagatgaaggccttccccacagacatctttaatgaaggatgtatacacccaggaagggaagctcattggctgaacaccctgggttagcacggagaactccaggtgttggagggaacggctccactcctgctgtctcaac

SEQ ID NO: 30499 - DNA, 324 bp, Mus musculus
  source 1..324: mol_type = other DNA
ggcaccggatcctatacaccactgtccagggctgtggggcaacccctccaccctgtcaaggcattttcaagtgggaagagaactctgcctggaggatcatctcagaattcctctggttgctccgcgaggagcctttagcactagctggcgggtcgcgctcccgggtgaattaaccaacgtggggcccccaggaacgtgaagcgaggcggggcggtcccggcggcgggacacgtgcgtccgcgacgccccggacctccaggcgtccccgcgctggccgagggcggggcagccgcgcggcgctcccctcctctcctctcctccccg

SEQ ID NO: 30500 - DNA, 366 bp, Mus musculus
  source 1..366: mol_type = other DNA
gtttttgtggcgtgctttaaacaaacaaaaggtttatttatatttagcttgtgtgcaacagctgtgtgtatctaacacatatgttcttgggaaccggggtcctctgcaagagcagtaactgctcaggactgcttaaccatctccagctgcctatctgcaaagcttcttagttgattcatgttcctcttcatagtggaagagggatgctgaaggaactcttcctccaggccatggagttatcaggtaagtgacaatttcacactcccctgtgccctgagatcgcacattagctcttaggtgctaggcgctgggcctcaccctgtacttaggactgtgggcagggccggtccggacacgtgaaaaact

SEQ ID NO: 30501 - DNA, 639 bp, Mus musculus
  source 1..639: mol_type = other DNA
acaccttggccgcgcggcctccggcagcgctgccgcttttgtctcccgcccgccgggcgcaaagttgccgccgcgccgcgccgctccggctgccggccgcccgccgccgtcggggggcgtggagggcgggtgggccgggcgccgggccggggctggggggcaagtaaggcagcgctggccccttcctttgagcgggcgtgagcgcgcgcgggagtgccgatgcgcgccgggcgtgcgcgcgcgtgtgtaagggcgcgtgtgtgcatgcgggtcgggacccgaaggcgcgagcagcgcggggcagagagcgggaccggcttcgcggtctttctcgcccgcgcagaactcgggcaggtagccggccgcctccggctcctccccagacgcagctagcggctgctcatggaaacccgacccgggccgggatcaggcgggctgcgggacgagggctggagggaggcggcccgcgggggtctgccccaccgcagggggcgccggaggtgcggggagttcccggaggagccggcgatggcccctgcgagccccggagggcgcgagtgcatatttatgccatgccgaaatacccatgtgtgtgtacgcgcgcgcgccccgtgcgaacccattgagaagaataattat

SEQ ID NO: 30502 - DNA, 176 bp, Mus musculus
  source 1..176: mol_type = other DNA
ttccttagctgtaactatgtgttgctcagaaaagataagctcctttttcagcgttaccctgacaagggcagggcagggcagggcagcctgagggttaagcaaagtgtactcactctccacctaaggcgcatgcgtgcttgtgggcatatgatccataacgcacacaccactgagcc

SEQ ID NO: 30503 - DNA, 132 bp, Mus musculus
  source 1..132: mol_type = other DNA
ggattgaaggagccctggctgtcctggaactcactttgtagaccaggctggtggaaaaacttttgatgccggagtagcttaaatccaacactgtcagtattatgattatcataatatctaactcgggtgaga

SEQ ID NO: 30504 - DNA, 213 bp, Mus musculus
  source 1..213: mol_type = other DNA
cctgtaatgaaaatatactctgtttatggcaaatctatagttattgcataccaacatataagcacgtgagtatgtgtatgtgtgtgtgtgtgtgcgcgcacacacacacacacacacacacacactaagctaagttttcccgagcttgagcctttctgaattgggtggtttgagagaccatccacccagtcctgccactggcaggatctgcct

SEQ ID NO: 30505 - DNA, 389 bp, Mus musculus
  source 1..389: mol_type = other DNA
ccccacagtccgggtgttatagggtctgcttggcatttgaacgcaaaccctcatgcttggaaagcaagcagtcttgctaaatgacttttgttctgataaaactcaaaactgagtaagtgtcctgtattttcgttttcccaatctggaaatcctaacatcaggaatgggctattgccttgggctactgacccacaggatgagagaatctcccattctggacagctttaaaaaggtgagtgtggcggtagcacacacgccagcctggtctacagaagagactcatcttctgtagctgagctcatgtccccagaggatgtcagagcaggaggtgctgagatcatctggctaccccacccccctcactttgggccaaggggggtggctgaggg

SEQ ID NO: 30506 - DNA, 310 bp, Mus musculus
  source 1..310: mol_type = other DNA
tcttttgaaaaattatggagacccaggcctgttggattccagaatccaattaaggttggtggaatccaaggtcaggacagctctctaccagtgcttagctggcgacctcaagaagttatcaaaaggcttttgagaaatacttcgggactttctaccttagattgtcccttgccatcaatcctaaagactctgggcctcgggtccaagtgggcggggccccattcacacctttccgcgcctagccaaggggaggaacggggtcacgagccgccggcaagtcggccaatgggacgcaggggcgtggtccctc

SEQ ID NO: 30507 - DNA, 418 bp, Mus musculus
  source 1..418: mol_type = other DNA
aatataaaagaaataattttaaaaattcttagttcttattttgctcttcaaggacccaaacttggttcccagcacccacttcggaggctctaacacctgaaactccatcttcaggggatccagtatctccgtagaggttttttttaactttaaaaatcttaaccagcctggtctgaacttccattccagttcactttcattgtcaatggagatcggaagggcccagataaacagaaggtctacttctttccttcctttagtttagtagggacagcaaaactttttattaataaccattatacaaaaggaacagtatggctccagacatggagacctgtgtgatgtgacttgccagcctcctcacaaagcctaagtcatcagctgacagctgcatcagtatgatccacatatttaagtc

SEQ ID NO: 30508 - DNA, 314 bp, Mus musculus
  source 1..314: mol_type = other DNA
tttcttaaattcaagagctgcagcggaagacgctgcttgccttctgccaggcgcggacctccggcatggggaggcctcgagtgctaactccgctggcgggccaacttcagatgctggcgctgcggtggcacccaacccgggtcccagctaggcaccatttcagcaaacgttctaatgactcactcatctgagattgtttgaagaacgtgtgtgaaaccctattttgcagagatgctaacttagaaagttcacagtactctcccttctgtaggaaggctagggaagctaaataggtgaccgttacctgaacgaag

SEQ ID NO: 30509 - DNA, 350 bp, Mus musculus
  source 1..350: mol_type = other DNA
cttctgttttaccaagccttttggaaagcaaggggaccttttttgctagcctaccttaaagtgcaggctcatttgaatgcgtgatcttttaaaaagtgcaacaagttacaggttaaagccttcacatttcacattagtccgtgacagtctgcgtcgatggaagtctggcacactgacagataatcagtttagaaggctacttaacacaaacagtagagttttcactattctccggggaattcgtgtacagtctgtgggcgttgtggcattccacccagcaagtcccaggagcccgcgcagcgacggtgcctctgtgagctcgtccctggctccgctggggagcggagtaa

SEQ ID NO: 30510 - DNA, 435 bp, Mus musculus
  source 1..435: mol_type = other DNA
cctaccttaaagtgcaggctcatttgaatgcgtgatcttttaaaaagtgcaacaagttacaggttaaagccttcacatttcacattagtccgtgacagtctgcgtcgatggaagtctggcacactgacagataatcagtttagaaggctacttaacacaaacagtagagttttcactattctccggggaattcgtgtacagtctgtgggcgttgtggcattccacccagcaagtcccaggagcccgcgcagcgacggtgcctctgtgagctcgtccctggctccgctggggagcggagtaaggttctggccggagccaggcgctctggctgctcagccgcggcagtgacggaggctggaggccgcgcggagcgccggcaggggcgtcgggaggcggattccgccttctctgagcgctagggggcgggaggagggg

SEQ ID NO: 30511 - DNA, 394 bp, Mus musculus
  source 1..394: mol_type = other DNA
tttggatatttaggagatagtaactggtaaatatgcactttatatgcttaactcatttaatcctcgtaattctctaagtagtattattatcactgtcattttacgtcagttaggaggacctctagattactgtcattacatcaagtctgacagaactgtgggacactcagtcttttatgtgatgagcatagttttagagacgtgaaataatcttcacgaaactaagtcagacacatagtaattatagtactctagaaagaatcgcccggaacctttcttgcggagtctcaggcagccgccgggacaacccaagaaaagctcatttttttctccctcgataatattatagttgtttgattacaagagcgtttaatattttttttaattagggaga

SEQ ID NO: 30512 - DNA, 419 bp, Mus musculus
  source 1..419: mol_type = other DNA
cactgcagtggtgtgtactgagtacctaataattattgtacaagatgagacttagccttgggtacttcttgctaaagctttaatgctttgtaaataaaattggatgtttattaaaccacaagtatacatgcttgtttgtaaacactgcctgcttctggaactcagcagccgctgatgttaatgaaaacagtcacatagggttttcttattataagcttcttccaaggatctttgttatcctgttctctgatgaagtaattttaacatcaatacagaatagttgttatctcataaagaataagatatctcagagactcaagtagtatggtttcaaagattaccaaattaagaacccatctttagcatcatagctgcttcatagcaaccttcattgatgcgaacaatgagctcttctgtgc

SEQ ID NO: 30513 - DNA, 603 bp, Mus musculus
  source 1..603: mol_type = other DNA
ctgcctgcagacttcagtcttcccgagcagcaggaggggtacactcctacccagggtgaacccctggaatctcagagctagcagaggcctcagccatctttaaccatggtacccgtgtacaaaggtgtccaaactcaattgtatagttaatatattttgcacattacgatgtattttgtggtctcattttcataaattaattctcacaacccaagtgaaaatataaacctagaggtgggtattcaaatttgttagaatgggttaagaatctgagacttttgctatttttaatgtcttttacagtttaaccattttgacagcaacaacgacaaaattccatgttacttctgggcgctgagcccttcttcacagctgccccgcagcagtgcccttgtgtctccagaatttcagaagcaagagacacttttttgtgccttctcagagcgcccctctgcagctttgggctgggcacggagctggccaagcttgatggaagcgctctggctcactccctggtccttaaatgacagcaaatggaagccatctccggccgagcgttggctgaggagccgagccagccagtgcatcctgatgcagagatgc

SEQ ID NO: 30514 - DNA, 385 bp, Mus musculus
  source 1..385: mol_type = other DNA
catctgcagctgttgggttggaagcccctagctgaagagattcctgagcccacagatcacagaaggagtctcagagtgagtctcagagtggtacaggtctccacctgtgcacattagctgaggtctaccaagggggcggatctcagctaagatgcatgctcagacctgctcagtcaccgaggcagggctaacatttggatatgaaaagtttttggagggagctatgctctccaaagctgtggacaaattcctgcccctaagaactcatacccagactctggttcacctgagcatccgtcggagctgctgggtcctggtcccagcttctcgtacgcagggaggggttcgggggcgcgcacgcaggccgccggggacgcgctggccg

SEQ ID NO: 30515 - DNA, 254 bp, Mus musculus
  source 1..254: mol_type = other DNA
ctgctggttgtattcttagaataaacagaacccaacctattcttagtgggccacactgaaggcctctcaaagacttgggcctgaagccttcactgcagcagatcacgatgaccagcctgcaggtgtagaaccctccagtgcccatggacaaactcgcccacggcttttgtcctgtccaccgttaacttggggagggtagtaccgtgcaagagtgggaggcataagccttgggtcttgatgcagaaggaccgctc

SEQ ID NO: 30516 - DNA, 388 bp, Mus musculus
  source 1..388: mol_type = other DNA
ctgagggtacaaagtttttaaagtgagaactgcctatcccaggctccaggaagttttgattactgacaggaaacctaactttcactgtgtaaaagggttcgtggcccttaggcacttttatccttgggtggggaccaggcagtctgactccgaggaccctgctcccctgtgagacagcgccagtgtccacaccctgactgagtctcacactctcattttcgttatctaagtaacattttcaataataaaaccaataataaaagcagagtgtcttctcatcactgagggggtcactgaccttctggtctgtccccaaatgccagcatctggagaccccaagcgttctagggcattctagagcgttctagagcgttctagggcttaggag

SEQ ID NO: 30517 - DNA, 364 bp, Mus musculus
  source 1..364: mol_type = other DNA
ttatgaaattcaggtgattgagaggtagttcgacctattcacctcaaatgcccagcgcttatctgctgctgagaaggccggggtttatcagtgctacaccacagctctgggggacctggtaccaaagcagccaaggccaggccattggtaactgcctgcctactggcctcttgctgcaagtgtctgcttgctgcaaaggatgggatgacactgtccccaatttcctggagggaatccaactggaaatgggcccacttggtttggaaggagccatcagccatggggcctggaagatgactccaggagtctctggcatctgctgatctctgaaagaacttggatccctgttgaccaggctggcagg

SEQ ID NO: 30518 - DNA, 365 bp, Mus musculus
  source 1..365: mol_type = other DNA
cttctgactagctgtcttaaaaacagatttaggcttagtctcagtaactgttactttgttatccctcccagtaagagaagaattaagtaaatgcagtcaaacagttatctctcaaattacatacaatgctctttttcctttttttaagcaagtacagttattttttatacatttcaaagttccagtatgtgatagcagaagccctggctgtcctaccaggctggccctgaactcagaaaaaaagtgctgggattaaggggtacaccatcactgcccggctgtagaaatgtatttttaaagacttgttttgagaggaacctcagttaccaggcaaactttgacactctaataggtatgaagatgga

SEQ ID NO: 30519 - DNA, 242 bp, Mus musculus
  source 1..242: mol_type = other DNA
agcttgccctgctggagctgctcctccaggaggcttggcccccttcttgcggcccaggggcagtgcatagtgggactcgttcggtacagcgtgtgcacaagctcgttgttggatgcattgtagacaacatcaatgatccttgttttatcgagacagggtttctctgtataggctttgtagaccaggctggcctcgaactcagacccggcctccccggaagctcttgcgaacgctgggtttga

SEQ ID NO: 30520 - DNA, 310 bp, Mus musculus
  source 1..310: mol_type = other DNA
gtcagatgaagacatcagatctcttggaactaaaagttatgtctttaaccatagtgcttagtgatttccaggctagcctaggctatagtgtaaaaccctgtttcacacaaacaaaacacgtattaaagctttatttcaaccactagtgtggtgccacatataagtgtgtaccaggctccttgaggcctagaaatgcttagtaaatgtcaggggacagggtttctcgaggggagagacaatttttttaattaaaaaaaaaatgacttgtctgtttctgcatttgtatatatgtgcacatgtgtgcagatgc

SEQ ID NO: 30521 - DNA, 293 bp, Mus musculus
  source 1..293: mol_type = other DNA
ccatgtgttttataaagacctttctgactttgatagaatcttaaatatttgccttgggagctgagacaccttctcccaccaaggctttggccagtactgggtagagcccttcaaagtttgcttcctaccttaatagggttatgcataattatgtctggcttgtttcacctgacccagagcaaggggttccagcctgggccagcgcccccggggtctgctcaggacgccgcacacggtgcggaggcgggagcggaggaagaggggagggagggggcccgtgttcccgccgcccc

SEQ ID NO: 30522 - DNA, 321 bp, Mus musculus
  source 1..321: mol_type = other DNA
tctgactttgcctcagcctcaaggcagagttggagagtacctaatttctttctcaaactgacaagcacagagctgctcatttgtgcatttctgcatagatttgcatgcctaggattaaagagaaaaggcggaattttcgtttctcccacccccctttctaaactcctcagtaggacaggggggagggcagagaggcaccccagggtctgagatggccttctctctgggtgaggaggcctgggtgggactcccggccctcactctcctccggggaggcagcagtccagcagctggattgtgacagccccagtcagcagggaa

SEQ ID NO: 30523 - DNA, 248 bp, Mus musculus
  source 1..248: mol_type = other DNA
agcctgagcttcatagtaaaatctgtttcaaacattacagtaattaaaattaatcagccaataatgtgagtgattcagtttcactatgattacacgtgtcagataagcggataatttgcctagcagggctcgggagaattctcgggttctcttgaaaccccacctccccagccattccctttgacctagagggtggggcgcggagcggcgaggccacgcacgagggtgaggcaagtccgcctctcggg

SEQ ID NO: 30524 - DNA, 207 bp, Mus musculus
  source 1..207: mol_type = other DNA
cttttttttttatttgcaaggaaataatttttattaggtattttcctcatttacgcttggatacatatgcgatccatccaatagctgacttgctaggccggcagtctcacaagagacagtctttcaagtctgtagcttagaacaacagaaatctgttcgctggtccccgctgacagtgctgagggaggctctgtccagacctccctc

SEQ ID NO: 30525 - DNA, 376 bp, Mus musculus
  source 1..376: mol_type = other DNA
ttaaccctgaggacttgggggctccccttgcccaggagtctgtgagcacgagagaagttatttaacttgagccctgcactcagaagggggatatttttgcctcctagaggaagaaaccttttcttctcctcttaatgaagatggatgcctccctcctggagaggggctaaaaatgacaccagaacgtggggagtttttttttttttttttttttaaatctgttcgtttgtacattcaacaaaactttattgaatacctgtgctgtttaaatatcaacagctgtgaccccagttacacctggccagctttctgacctcagtccaaaaattagatcagggagtgtctactgtgatatcacagagttgccataacaaca

SEQ ID NO: 30526 - DNA, 316 bp, Mus musculus
  source 1..316: mol_type = other DNA
tcaggggatccactcctggttgcctttcttgggttcccttgcaggagcagcaagtggtcctcagtgctgggctggcccctgaggccccatctgccccatgtctatctagctactcagtggatcgacacaggttccctaacctcaccaccccatcagggcactgcgggggcggggtgagatgagtccagcctggtctacagagcaggacagccagggctagaaagctgggtgtggtgacacatgacttgaatctcagcaaggccagcctggtcttcatagtgagttccatagtttcagaacaggtctgtctgtccct

SEQ ID NO: 30527 - DNA, 295 bp, Mus musculus
  source 1..295: mol_type = other DNA
tattattataattattttatttttgagagaacaggctgtccatggattggaggaatgtgccaccatgcctgactctgagagtctagagctctctgggcatcccagacccaggaggtagaatcacatgccaaacccctgtgtctgcagatgctcagtaattagtgggaaagggaggggaggagaaccctgggcaccacccccggtctcagctcacagtacaggagccacctctggtggaggccacgtcccccgctgtgagggaaatcgctggctccagacttgagagcctggaggc

SEQ ID NO: 30528 - DNA, 186 bp, Mus musculus
  source 1..186: mol_type = other DNA
aagccagggtctatgctgtctgtacccgactctgtctaagctagatagcttggtctcctgccatgatgactgatggccacagaattatggagctgggtccttggccagaaaacaggctgcctttcatggtcccacaggccctggggtaataaatcaaagcagagcctgtgatacatggtgtgtata

SEQ ID NO: 30529 - DNA, 374 bp, Mus musculus
  source 1..374: mol_type = other DNA
gcaagcccaggtctctctatgctagagagctggcagctaactggtctcactctctggcctgtcacctctccagtcagccttgcaggacagggaggaaggcttaaggattatttagtgagccaaactcagtcttgctcaatgtgcttgtacactcataaaagtaccctggaacattctatcagagtccagtctgcctatgggacactcaccgccttagagaggttgggacggagctcttcacctggggaggctccgccctttgcgtcattaaggcggggcatcccccacccagagctccaggtagcggtggagccagcaacgggagatggcgggctgcactcgcccggaggcgggggcggggcgggcaaggggcg

SEQ ID NO: 30530 - DNA, 196 bp, Mus musculus
  source 1..196: mol_type = other DNA
gagatccaagcctcggggatctgagcttgtggacacacacctgtgggcagaaacacccctgacagcctgctttggagggtctgaatgtggtaacattttcagcaaggacctctggccaccaaatgtctctctgccactggatagagcaggagatacagctctgacttgcctgccttaatgagaggcagctgatcag

SEQ ID NO: 30531 - DNA, 596 bp, Mus musculus
  source 1..596: mol_type = other DNA
ggccgttgggggtggcgtgcgcgcgccacgcgagccgggcttcgggggtcctctacccccagcctgagcttagatgtccccgtgcgagccccacgtggggctcgggtacccgcaacgcggagctccggtcccggggtgcattgggcagccggggttcagcgcgcgcccttcccacggctccggttccgcggaccagccgggcgccccttgccacccctgcgtcccacggtggagtgtcggagaagcgcctccccctttccggtacgtaaacacacactcacgcgagtgtgtgtgtgtgtgcgtgcgtgtgtttgcacgcgccagctgcggctgctcagattccccaggagctctagggtcgcccgcgggatctccccgcaaccaacctacatgtcctggcaggaggtgcgtcccagagtccttggcgaggccgggggtccggcttgggctggactgaacttcagccttggatcattccgggaggaccccgggcgcttgagcggtggctctagcctgggagggtccccagcagctggcgctcttggcaaggagttttcctggccgggcccggcgccttagcgctggcgctggcagag

SEQ ID NO: 30532 - DNA, 489 bp, Mus musculus
  source 1..489: mol_type = other DNA
gagtcttcaccctaccttctgagacagggtctctcattgctctggaattacaggcatgtcccaaggtatctgcattaaatgcatttttttttaacttacatttctaacttaccttaagtttatgttttgaaacaaggcctcatgtagcttagatctggaacgtactacttagcttaaggtcatactcaccttgcgagctgagattacagatgtgttctaggagcacaagctagttagattgccatcttcagttgccactgcaacagttaacgagggttgaatctgttattgaacaagccggctctcagaagagcacctaggcagaggcaagcctctcagcctacctccaggtggcctgtaggaccgacctcgacttcaagagcggttgagtcggaaggccgccggcggagtctatggctcctggcctagagaggcgttccccaggaccggcccgcgtcgccgacgaccactgcacttccgtgcttccgg

SEQ ID NO: 30533 - DNA, 499 bp, Mus musculus
  source 1..499: mol_type = other DNA
gcagaacttctgctatggaagtccttcaactttgcaagagaaaagtagttttatacaggactctctaaatagtcctggctgttttggaactcatcggagctaatttttaattaaatgtctatcaggtttcattatacacactctggttaacataaattgaatgtttggtatcttttacaacaaaacaaaactttcgtgaagaataattttctgataggcgtgcctccgtgacacgtgaccctatgcccaagaagccattttaaggctggcctcatatgcctgcgctttgcgtcgtgctggcactttcactggcccagccttaaaggcgagcctgtagccgggcgccatcttgaggacggcgggcgaccgcaaagagggcgaggggagtggcagcggcctcccctcgcccgactttcggcctagcccgggaagtctgaaccgggcacggcagctacccggactcccgccggcggccccggcctgctgggctcctaggcag

SEQ ID NO: 30534 - DNA, 522 bp, Mus musculus
  source 1..522: mol_type = other DNA
caaatcgttcttacagagtaattttaatagtaaatataattacattgttcttacagaataatggtaactgtgtgcatccttaagtcagcacggacatattaataattatttttagtctaagcactagaaacagagaatttgttacaattcagtaacagtaaggaaacaacttacgtacattccgcgccggactctccagcgccgaccgccgggagcatgcgctccctcggatcgccagcctggccgggtccacccggagcccgccttccgcctcccctccccgttcgccccagggcctcacgggaagcggcccgcagcgggctgcccggctccccgcccacgctcacggcgcctacggcccccaaagccccgagttcacgcagcgtaggatacgatgggctgcaccatcaccgcctcggaaagcgacttccggaagcacggaagtgcagtggtcgtcggcgacgcgggccggtcctggggaacgcctctctaggccaggagccatagactccgccggcggcc

SEQ ID NO: 30535 - DNA, 420 bp, Mus musculus
  source 1..420: mol_type = other DNA
ctcagatctgatgccctcttctggtgtgtctgaagacagcttcagtgtactcatataaaataaatgcctgtctagcctggtctacgcagaacttctgctatggaagtccttcaactttgcaagagaaaagtagttttatacaggactctctaaatagtcctggctgttttggaactcatcggagctaatttttaattaaatgtctatcaggtttcattatacacactctggttaacataaattgaatgtttggtatcttttacaacaaaacaaaactttcgtgaagaataattttctgataggcgtgcctccgtgacacgtgaccctatgcccaagaagccattttaaggctggcctcatatgcctgcgctttgcgtcgtgctggcactttcactggcccagccttaaaggcgagcctgt

SEQ ID NO: 30536 - DNA, 292 bp, Mus musculus
  source 1..292: mol_type = other DNA
ccagcctggcctgtgtagtgaaatacagaacagggcagtgagttcgaggccagcctggtctacaaagtatgttccaggccagccagggctatacagagaaaccctgtcgggtaagaaccattctgagccctgagcctgattcaacttgactggatacaatgtccaacaccctagtttgactcttgagaccaacacagtaagtaggaaagaacacactccctccagtgttctctaatagtcatgtctctgactcttcaaccacatgggccccagatgccagagtgcctgtggg

SEQ ID NO: 30537 - DNA, 376 bp, Mus musculus
  source 1..376: mol_type = other DNA
aatattgtagatgcaaaagtttgggtgtgcaaccaatacataggctgtggccatgcctttggttgggtacacaggcaagagagagcagtctgtgatctaactcccagttcagacggggtcagtagggcgaatgccccaggaagcagaaaggcttgcgagctgagcaatgctctggcctttcgccctcctcctgctctgctgggggagagagctggggagccccagtctggccggagttggctggagctgttgccatgacaagcattttcttaagacagctctcacgaacttcttgggggtccatccctccgttttctcccagggacggtccttcgcgtggaaaggttggggaacgtttgccacactggggagagcg

SEQ ID NO: 30538 - DNA, 316 bp, Mus musculus
  source 1..316: mol_type = other DNA
gggcagcagcagggtcaactggccagacttctgtgtccacatgaggctcgtggatcaggggctgtgcccgcccgcctgctgcctgcatcgcagggtcaggcgcaggcgctgtgcagggctggctgcgcagcctgggattgcgggggcggacgctcaggctcggctgtctgtggggcccgagggtcttctgaagctgtcagttcccagatgggggatctccgagacaaaacagccttgttctggcaggcggcctcttctggctgccggaatccccttcccacagcagctgaggagtcctcgggcagcatcgcaagct

SEQ ID NO: 30539 - DNA, 182 bp, Mus musculus
  source 1..182: mol_type = other DNA
aagtgcaccttaaagccaagttttctgtgggatgaccacacatgtgacggcttgcggatttacaattggaaacctgctttgccagagtactgcacagtgtgtgtatgctctgaacctcagtgaccagggctggacccagcgaccccaccgaggccttgccaagttgccaaataaagacttta

SEQ ID NO: 30540 - DNA, 272 bp, Mus musculus
  source 1..272: mol_type = other DNA
attaaaatccagacagtcctgtttgactttctccagctcagcaggtaagtgcactggctgctcttctccgatgggcactgcatgcctaaacactgttttaaacatttaagctaaaatcttttctgtgctcttaaaagccgtcatcttgggtttaatgagaaacccctgcagaaataacttctggggcatcgctaacttattcagcagcaaggctgagtgtgagctcaagctcctcagccctttgggggcgggccctggcctggcacagactt

SEQ ID NO: 30541 - DNA, 346 bp, Mus musculus
  source 1..346: mol_type = other DNA
attcaggcccctgggtgacaagttgccccactttcctctggggagctagtgtttacaaaagcctcagtgcactttaaaggttatggaagcaaaaagaatacaatccccattgaacacgttttgatgtgcagagacgacgtccgggcatgcccggtgtagcgcgcttcctctgcccaggagcacgggagtccggtgcgtcagtgagcgatgacctcagcgcctgggaggcgcgggcgagctggcgggcggggaggcgagacaccggaggggcacgcccccatccgccagcgtcggccaatgggcgccaccgacggctccccgcctccccgagtggtatgaaaggcgc

SEQ ID NO: 30542 - DNA, 428 bp, Mus musculus
  source 1..428: mol_type = other DNA
gttctctcgtatagtcaagagccaccctagaattacaggacaaggatctgaagccattgcctgggacccgggtcccacttctgaacctctgtttcccgacatattgtcagtcaggaaaatagtccttacgcaacttcaaataaatgttgaagaagatatggaaagatttctaacttgtgaacaaggattgtctggccaaaggttgatgtctgcctttccggctctgagccgagagtgcacaatatactccttcagatgcctgagacccttctgagagcatctcagcacagtggattgttaagtagacttagttacaggtccttataaagattcccaatcagccctaagaagtttctaagatttctgagttggaggccagcctggtctacaatgtgagttccaggacagccagggctacacagagaaac

SEQ ID NO: 30543 - DNA, 293 bp, Mus musculus
  source 1..293: mol_type = other DNA
gggatttgagtctgagggttcttatgcccacactcccctaccatagtatgtgggtttattgagcaaacaatagtggatgtcagtcagctgccctgcctgtcagctaccctgcctggcctatggcttgtagcaagcttatgtcagctcacaattgtctgtaactccagttccagaggatctgacatcttcgcactcaggaagcagaggtaggcagatctctgtgagttcaataaccaaggttacacagagaacccttgtctcataaaaacaaagccaaactgtggtagtgtgga

SEQ ID NO: 30544 - DNA, 238 bp, Mus musculus
  source 1..238: mol_type = other DNA
aggtctgcctgagctacttcatcaggccccacagggctgagcacttcttggaagccactgtagggtttccagtgggatgcctcactgggtttgggatcccaaatgagggggagacagcctccggagggatttgggactcccctctttacctagcctctggaaatggtccagcctggacctggcaggtactgcaagacttgccccaaggctttcaaaactccagggacacacacagttc

SEQ ID NO: 30545 - DNA, 325 bp, Mus musculus
  source 1..325: mol_type = other DNA
gaggacatcctctaattgtcactaacagtattaagatggcttttaaaaagtttttttcctgaaaactggatagaaagccacaaagctctttagggggtgcatccctcttttgtttataattcacagaacctatggtgcgatgtcacaacagctgtcatgctggagcacctgcctcaggccagcctcacctcacacatgggaatccccagagactgtgggcagggaagactgcttcaagcatggcccaagggggccctggccccagcgatgtgccagctgaccccacagctgggaatggtttgctgggggtggggcagcccctgcc

SEQ ID NO: 30546 - DNA, 393 bp, Mus musculus
  source 1..393: mol_type = other DNA
cagagaggggccctcttgagtcggcacctcggtactgtccctgtcccgaggccggatggagggcgacgagggaggggcccgcgggtgccgccgccgcccccgcccccgccccctccccctcccggtgtgcggagcccgattgtcactcagctcccgcgccgggggcgacgaaggcgccggcgccagagtggagtctcggtggctagccctgggttcccctggcatcctctgagggagcgactgtggccaggcgccttggagctggaccaggcttctgttaagaatcgggcaccagcggcgtcccaggtgggtgggcacagggtaggcgtgcgcgcacgcggggaatgggagccggtggacccgccaggtcctgggcccggggctgagcctctg

SEQ ID NO: 30547 - DNA, 334 bp, Mus musculus
  source 1..334: mol_type = other DNA
gcatttgaaatgtaaatgaagaaaatatctaataaaaaataatttaaaaaatctgtgagttctaatccttgctaacttaagaaagttgaatccatttgcccttctgggtttctgtctttgcctccatggacgatagggacacacacaccccaaatctggagtgggagaaggctaagtggattttcaagacccctttccaccagctgccttggaccatggaggagagatgagacgggggaatgcacccacccccaccttccctgccccacaggggctgtggagaaagcctcccgacccgtgcacaggagccgcctgggccaggggcaggcctgca

SEQ ID NO: 30548 - DNA, 346 bp, Mus musculus
  source 1..346: mol_type = other DNA
cttggactaagggccatggttctccttatagttaataagttaggagaattgcctcattttctcattaagcacttacctgtgactgtgttaaacagtcccgtccccagaagatctgggacacccaggtctcagaagaggaaaacggtaatacggagtgtcttggaaggaggaagcattgattttcgcttcttctttgagcccttcgttgtgaaggggaaagcagagagaatgtctggtgggatggagccgtccatactcaggatgggtctcgccaccagaggtgcctttgactaacctaggttagttaccaaggtgactgtcaaaattagcctgcacaggcccttcc

SEQ ID NO: 30549 - DNA, 304 bp, Mus musculus
  source 1..304: mol_type = other DNA
ggaaggcgggagtactgagccctggggaggtacactgttgcttctgggaggatccttgcagatctggggacgagctagcctgtggggagctataggctcatgccttcctctctgcctgcagtcttcagggaatgtctgggtgacccacgaagaagggatccagtatccctagatgagattgggactcatatgttacaagctctgttccagtgagtcacagttcatggcttggtcctagggagcaatcaaacccgggaaccaggaaacatgtttttgctacataaacgtgtttccctgcccacta

SEQ ID NO: 30550 - DNA, 222 bp, Mus musculus
  source 1..222: mol_type = other DNA
ccctgcccagccatggaggggttacactgttgctcagccagcactgcttggactaagggccatggttctccttatagttaataagttaggagaattgcctcattttctcattaagcacttacctgtgactgtgttaaacagtcccgtccccagaagatctgggacacccaggtctcagaagaggaaaacggtaatacggagtgtcttggaaggaggaagcat

SEQ ID NO: 30551 - DNA, 413 bp, Mus musculus
  source 1..413: mol_type = other DNA
ttatgtatacatggaaaattatttagaacaattattgcttcctgttataattctagataaattagagcatgattataaccaattatgttgtttcagtaacttctgtgcacagtactaggtaaaaatggagacccctttgaggtgtcttataaaaaaagacacaacacgggacttctcttttaatacaaaggaattatattctagcccagctggctacgaaccgaggatgactgagagaatttcaaagcctttgtaagcaaaattatagcgaccgctttgatatttacgttcaggttacttgacttctaaagaacgcggtctacgggaacctggcctccgctgcggctgagggcgccgggtgatgacgtcaccgggccccggaggcgattggctccccgagaggggcgagagcc

SEQ ID NO: 30552 - DNA, 342 bp, Mus musculus
  source 1..342: mol_type = other DNA
tataaagcatgtccgccattaaaaatttgaaccttgaacagactagcatgtcattccaagatgccttccaggctcgaacccggagctgtcataagacaccatgatagtaccactgaaatggcttatcattttagagggttatgaccatcatggtagggagcatggcaacaggtttccaggcatggcaccagagcagtagctgtgtgctcacatcttgagacgtgttttgaaacctcaaaaacaactggatatttgagaacaattttgtggtgatctcccaggctgcgcgccctttgataaaaaagggacaactcagaattcatacttgttgactcaaactgg

SEQ ID NO: 30553 - DNA, 487 bp, Mus musculus
  source 1..487: mol_type = other DNA
caactagaaagttacctaccaagtactaattagcattataaagtcatccaggcttttcagttagttgttcactaagataagaaaggacagtcttatccaggcagaactattgagcatagataattttcgctttttcttttttttttaattttgttaataaaagggaggagatgtagtctcccctcccccagcctgaaaggcgggaatcgggtcccctccaggctagaacccaggttgtggtctgctggccggacacaacagctaggcatttcaattgtctggcaaaaaaaacaagaactttcatctgaaagcttcctgttctattttattccactctccgtgagactctcagaccggcgagatttctcatcatgctaattagcctggctccatgtcttggaccacctactccgcacggaagaggggggggcatagtccccgctagtcctgcctcagtcaggccacgccccggagagctccgcctccg

SEQ ID NO: 30554 - DNA, 413 bp, Mus musculus
  source 1..413: mol_type = other DNA
ttagagcagtaacagctgtgcatcgttttttggagtataagaaaatgaacactcccaaaatactatattgtgtggttcagttccggcagagaagcacactatattgtcttctaagatgttcacattgttaggaaccaaaagttaaatcagttgagtgaatagattcatggtagtcgtgcccacatttgaaatcctagcatttgaaaggctgagataggaactggggtgggaaactaagattgccttcccagctcccctacacgcgcccgtcgtaggccgggagaagaggcttttgcagtccgccagtgtagggccaagctgggacagccagagccagcgattggtcagatcaggggcggggcggggcgagcctgagcgcgccctgatgattggcaacgcggctgcggaggtga

SEQ ID NO: 30555 - DNA, 508 bp, Mus musculus
  source 1..508: mol_type = other DNA
gcccacatttgaaatcctagcatttgaaaggctgagataggaactggggtgggaaactaagattgccttcccagctcccctacacgcgcccgtcgtaggccgggagaagaggcttttgcagtccgccagtgtagggccaagctgggacagccagagccagcgattggtcagatcaggggcggggcggggcgagcctgagcgcgccctgatgattggcaacgcggctgcggaggtgacgccgtgcggtcgcgcggcccttccggcgcgggcagggcgctgaggatcgggcgcccctcggccgcaggccgcctccagtgccgcgggatgtagcgcccgggcccgcggcccccagcagaggcagccagccaggccgtaagtgtcccgggggtgggcggggcgcgggccctgcaggctctggaggggacagcacgggagtggcccgcccctggatcgtcgctcaccgcccgggcccctcccaccgcgcaccgcctccgttcggggggctgct

SEQ ID NO: 30556 - DNA, 307 bp, Mus musculus
  source 1..307: mol_type = other DNA
ggtgcccaagatcgttcctgcccaatagacaaaatagatctacattgatcattttaacctgcactctgtccaccatatttaaatgtaaactggataatccaattagtcattcatctatacatctttcccttctcaggagagtttccttggagtgaaggaagctcgcctcatggtgacaggcacattcagaacgcagcctagcgcctgccataccgcgtggggaccgcctcaggtaagcaggactcttggctcggcctcctaaggtgacgtaacccaggagaggcccgcccctcccgtggcgtgacgt

SEQ ID NO: 30557 - DNA, 487 bp, Mus musculus
  source 1..487: mol_type = other DNA
tgtccatattatggcttcataatcaaatacatgtattgatgccaaaagttttaatttatttgcatgtctatggagaagaaaattcatcaaatatatgaattcctaaataataatccaacagaggtctaatagatatctttgaagcctgtactttatagcttctagaaagatattcggagagccaagtcctatgtatatattccttttgagttttatttctccactgaaatagattactgagtgtctgtcctcagtttataatgggtttaatgctttgacattccataggaaagtttgctacctaaagaaattctgtggccttccaggcctgccagtgtgtgtctgtgtactcaagaggctgacataagatcacaagcttgcctaggcagcagtgagaccatgtgaagaaattctgtgatacactttgttgattggctacaaaacaggtgtgtatgttacaaagtaaaagttttactttttttctctt

SEQ ID NO: 30558 - DNA, 424 bp, Mus musculus
  source 1..424: mol_type = other DNA
tgtaagccaaacacttataaaaaatatctttaaataaataagtggccagatctgtctgagaacaaccagggctactttttctgaaatctcacatacacaatgtccatcatcatgtaatgtctagaacagtaaggtggcttaattatgcccgagggcataccctctaaggaaatgaccctaataaatggccactattagtctaggcttaatattatcacacttttcgcaacactaaatgtactaagcattatacatacttcttacatagaaagcaattgttttgtatctatcatgaggcaagggaaatatcccaagagttagtggtaaggctagccatagtgatttgcttaggccaatagcgcctgcgccgcctgagaggcacgggcggggcgcccccagggacctgcgccagcgtagttccggg

SEQ ID NO: 30559 - DNA, 240 bp, Mus musculus
  source 1..240: mol_type = other DNA
ttgagcctccatgtcgacacacgcgcgtgcgtgcgcgcgcacacacacacacacacacacacatgagttcaagagaggtattatcctttttgactttccttcctcagaaagataacagacctgctttttccatgatggctttctccgttcaaagagagccactgctgcttttttagggcaaataataatttgtaggtagggattatgaagtacacactcatcacaacctatgcccctgat

SEQ ID NO: 30560 - DNA, 337 bp, Mus musculus
  source 1..337: mol_type = other DNA
cctagaacatggtcccagggatgcttttgctcaagtccaaccttgtatagttagattaccctactttccagtaaatagactgaactgttggatttggctttacacagtgtctaggataagcaagtgctcgaagagttattgtctctacctggagaatcctccaatttcagtactctgcttctcgggttttactaagcaaatctttcgtgccaaaatatatgacgcttcttgagaggaagaattctgaaacttcagaggttaacggaaggcccctgcccctcccggctagggggcggggcgagacctggctcggggtgtttcctcgccgtggcggcgg

SEQ ID NO: 30561 - DNA, 392 bp, Mus musculus
  source 1..392: mol_type = other DNA
aggaacaacaaatgtaattttaaaaaatttaaaatatgttaaatagattgtgcagagcaggttagcagcgctgcagttttctccccagctctacagcgcagggctcagggcctcgaggctgtttgaccatcagtagaaaacaaatgcatgaaaaaattccctcatttactttcagggatcccaaaatggctttgggtgggtggaggggaccagaccctgcctgctcttcccgtccctgacgggaggcgaggcggtggtgcggcgcccagcgtgctgcgcaccgaggacagtcccgcaggcacgcccgccccgcacctcccggcgcgtgcccgccctcccgcgccgcccgccgggtcgcagcgctcgccgcgctcgcgctcgcccatcgagcg

SEQ ID NO: 30562 - DNA, 421 bp, Mus musculus
  source 1..421: mol_type = other DNA
actgggactcaacagattgccagatcctacctcttctgtcctaagccagtaaagggaagccgcgagttatgcttttcttgttttctgcctatctgagattaacatgggaacaccatgggtcaaagccctaagcaccaggctgtgttcttctgggcgggcaggcgaatgatctcatctggcttgcagtgaacatgcctgccgtgctagccatgggagccgttctcgggaaatgtgcgctcatttttcccctgactggaaatttaccctgaaatatgcttcattgcggattgaaatagaatagcgaggacgtgtcacccccactccatccctgcatgaccagcagacctgaggccttaggcttccggacccatggggacttttggactccgaaggcaagcactggaaggcctccgtgaatggc

SEQ ID NO: 30563 - DNA, 283 bp, Mus musculus
  source 1..283: mol_type = other DNA
agtccagacgagcaaaggtgggctgggctgggcttcagtgtccccactcagggtttgtggaaacccttggtgcagtggcccccggaccaggcggaggcactgcgcgcgggtggggattctccgcagaggcaggggggagccccatgcggttccggggtctgagccgcccagcctgccggggcgaccaggacaggtccctgctccccgagatccaggatctggatcggggatcgcctccgaggggccgcacgcgcgtgtgcaggcggatgtgaggcgcatctca

SEQ ID NO: 30564 - DNA, 325 bp, Mus musculus
  source 1..325: mol_type = other DNA
tctgaggataagcccactggctttgaaagcatctggcttaaacaagatgtttcttcaaactctgatatattttctaatagaaacttagccaataagatctctgctctacagagcttactttgtagtgcccagagtttcaagctgctggcctttcttgcagcgcaagaatgacaaggctttaaaacttcacataaaaggcttgaaggtactttcatatttctgtctgggcttgagagatatgaaagctgaaaatcaccattctcagccttggcaaggggttgcccctaggcgtgcccgcagcctccattcctcccaagttctgggt

SEQ ID NO: 30565 - DNA, 672 bp, Mus musculus
  source 1..672: mol_type = other DNA
aaattaccaagaaaatctcattacttgttaaagagcttttgttttattgagactaagtgtcacgttccaggccaccgggaactgcctatgcagcaaaggatgacgacaggggaatagatttgacaggtttcactctgtagcccaggctaaccttgaactcacagtgtagtccaggttgctctaaaactcctggcaacctgggtgcagggggattcctagtttattccaatagaaaatgagcaacgggcaagtgttcatttgttaggaaataataaaagttcttttttctgatgacctgtgaaatttgtgaaatgaaaaatttcaacagtcagggaatgtcatattgaaaataatttatgtaaaactataatactgtatgtgtatgcatacttttctccatgcacgttcataactaatacatgttaataaaactagatgtaaaaaaaaacaggacatgaaatatcatccttctgttacttcatgtttagtcttcttttctagaaaataagggtaattactgctgctttttccactcttgaaggatcgcagcaataaagtctgggagacagttgcagcttcttccaggcataggtgctagattccccctcggaggagggtgcagccgtagggctccagtgcgccctcagggcaggtctcctactacaagcccgt

SEQ ID NO: 30566 - DNA, 269 bp, Mus musculus
  source 1..269: mol_type = other DNA
actatatcttagaaatcctcttgaagcttctgaactttccagtggtggagaaatttgttcaccagaattataaattaaaaaaaaaaatcttttttcatctggaggaaagatcttaaagccaggagtctcaggctagcctgagctacatagctacgcgtgcgcgcgccaatttgagcggtgcgtgagcggacgcaagcagcggtggccaataggcgggcgcgcgcctcccccaggtttgctgcggacctggaagggggtggagtcatccg

SEQ ID NO: 30567 - DNA, 338 bp, Mus musculus
  source 1..338: mol_type = other DNA
agcccaggctggcctaagaagagagctgagtcttgactccagtttccaaggtcctgggattatgagctgcatctgtagtactgggcctccaggtggcgccaatcagccgactcgctggcaagctctggcaaccagctgtgcggagggcagcccctctgctgtcctgggtcccgagatcaaggttcagggtgatctctagaccttagatcttatagtctacatgagttctgcatcaggtggaatctactttggtgttgaggagtggctcctcaatgagggggcccctcctcatagatctgggcactagttctgagaaattcctgccagctgggaaggaa

SEQ ID NO: 30568 - DNA, 410 bp, Mus musculus
  source 1..410: mol_type = other DNA
tagctagtgctgctgaagttcccagaagtccttgtgcactgcagctcttggggaaccagatagctgccagtccccaaagggtcaccctgtaacattctgggtgggaggtggctgttcctgactgcagcctaggcttgtccttggccgtggcacaaaggccgaggcaccccagcgtgccccaggctgtacctccgtgacagctgtcccaggtgcactggtgcagaggaccaattgcacagctcagcatggaactacccgctgctgggctcagtgccccggcacaatgacttcaagctgaaggggattccctcccgggccagagggatggacacctgccccacaatggcccttcccccccaggggctcaggagaaactggaccttctccctttcctggtgccaaggcctggc

SEQ ID NO: 30569 - DNA, 328 bp, Mus musculus
  source 1..328: mol_type = other DNA
agctggggtctgcatgaggccaacagcctgctacagctctctgagtctagccagctagcaggcttctctaagcactggatccagtcagggattgatgagggcatcaccttttgggggcagcccctgtctctcagagctaagcagtgtgggcccatgcaggtgtggctgggacagtacttgcccagtcacagggatgtcacttctcatgccctggccaggcatggggtcacttcaagtactgactgagaggtttcaggaagccagcttcctccctccaactgcgggctgcccttctgtgcctgccacaagctgccaccaggggtcgggt

SEQ ID NO: 30570 - DNA, 387 bp, Mus musculus
  source 1..387: mol_type = other DNA
gtgtcacccgtttgacagttgaatcggagaaggagtcttgcaagcaagcatgaagcctagcaaagccaggagttctagacttggggactgctccctttccacaccccaagcatccatgtgagggtcacagccttcaccgaggggtagtctgaggggctgctatggaagccaccccagagtcctctcgaaagaagctttcctgcctagccctgcagagcaaggatgtgacacagaattcccaggctttgaagcaacaaagggaggcccgaggtggtcagggaaggcctcatctctcgccgcttcccagagccttggcaggatgcacccgacccctggtggcagcttgtggcaggcacagaagggcagcccgcagttggagggaggaag

SEQ ID NO: 30571 - DNA, 347 bp, Mus musculus
  source 1..347: mol_type = other DNA
cagagcaaggatgtgacacagaattcccaggctttgaagcaacaaagggaggcccgaggtggtcagggaaggcctcatctctcgccgcttcccagagccttggcaggatgcacccgacccctggtggcagcttgtggcaggcacagaagggcagcccgcagttggagggaggaagctggcttcctgaaacctctcagtcagtacttgaagtgaccccatgcctggccagggcatgagaagtgacatccctgtgactgggcaagtactgtcccagccacacctgcatgggcccacactgcttagctctgagagacaggggctgcccccaaaaggtgatgccctcatca

SEQ ID NO: 30572 - DNA, 358 bp, Mus musculus
  source 1..358: mol_type = other DNA
caatgtactttcatttcatataataaataaataaataaataaataaataaataaataaataaataaaaataaatcttcagctgatagatgttggtggcttgcatcttcaatagttttggcaattattataattcaagttttgaccttggcaaattaaaaaaaaaaaaagggctgggattacaggccatagtcaccggagatctatgctccgttgcagtgattggagcaggtccctcgagggatgtgcggccaggacagacagctcagtgtccagcagagggccctggctagaccatggccatgggagggccatccatgccagacgcctgactggaggcggacccagctgccagctgcc

SEQ ID NO: 30573 - DNA, 355 bp, Mus musculus
  source 1..355: mol_type = other DNA
aatgtaaagcaatgaaaatctattactttgtatgataacttaaactttaatttaaacatgtcagacactgcacagccggttgatttgtatcaaaatagcatacatttttgtctctttatagtgaagacaagcatcaagttcaaatgtttgggcttggagtattaagggctctaaatccggctcaaaaccgtttcttggagatcttcatgcgctcctcccggccgccgcgggtccccgccgccccgcccgcgggcgctggcctaggccgcgcgcgagactggagcgcgctcgggtgcgagcaggacgcggcccggcccgcgggagggcggcggcggcggaggaggaggtggaggcg

SEQ ID NO: 30574 - DNA, 445 bp, Mus musculus
  source 1..445: mol_type = other DNA
tacctctacttcaggagtgctgggattaaagatttttgttttttaagggccccggtaaacagtaaattaacatgtgcatcctgtttgtctttgtacggaagacttgaagtagtgtcagacaggcaaagtgccagcaaatggtctctgtagctgactagacatcccagcttctgggtgttgtggaggaaaccccttagcctcggtagtctctagacctctagacagttggaagcatcagtcttgacccagcatcagccctggccaggcccccaggaagaatttccagggccagagggcagccgggtgcggaatgacagattctgacaatcattaaaccagccaggcctgatttcccagcaccgcctgctaggatctgggccaagtggcacggaatatgcaaatcacctgggacagaggagctcctgctttgctctatttagagcgg

SEQ ID NO: 30575 - DNA, 493 bp, Mus musculus
  source 1..493: mol_type = other DNA
attgataaacaaatattatctaggaagggtgtaatcccataactcctcaagctatgggctacatagtaacacaataattttttttaaagttgcatgatttcaatagctagggagtttaactagtcttaatgaactcatttaaaaatctaactgtaactccagttccagggggtccgactctatctgcatccatattttttcaaaagaaaaaattaaaaatagaaacaactaaatttaagttgagtgggaacatatagatatatagtcctgacacaaaagcgttaaagatctgaagaacagcattacaactcctgttttacaattcattcaagatgtcacacatgtcctttgcagactgcttagaagatggggagcacaggacctgtgcagccccagggggttaggggctgtggccgcccgaattcctcggagggcggggcgcatggtggcgcgtcgcctcgaggcggagcctgccaagacccgaggagcgacc

SEQ ID NO: 30576 - DNA, 189 bp, Mus musculus
  source 1..189: mol_type = other DNA
ctctgtgcacccaaggttacaatcctcttcccaagagcctctgggccttggaaactgagtgtgtaaactccggggagtccagtgacagaaaatgcattcttaaacagagcttgtgtcaggctggcaagttcacccctggcttccagtgaccgtgaggcaggcccgccccctggcttggggattggcgct

SEQ ID NO: 30577 - DNA, 392 bp, Mus musculus
  source 1..392: mol_type = other DNA
cttaagtatgactatagccctattttctaaagtacgctgtcagcccacatacatcaattaataaaaataatctttattttaaaagttatctattacattccagacattatgactatatagatctgctctaaaagagctacatatatttattaaagattcactgttcacggcaaattaagtagcactattaataaatacacagcaaaagcactttttaaaaaatagcggctggatagtggtcctttagcacacaggctggctgatctgagtttgaagccagactgggctaagaaactctgtctcggggctgatctgaactcacgccctggccggggagcctccacgctccgggtctggctgcggcaggaagagtcgcggggatcaatttccgc

SEQ ID NO: 30578 - DNA, 362 bp, Mus musculus
  source 1..362: mol_type = other DNA
ctgggccacatatgaccttgtctcaaaacaagataacgacaaataggtagataatattttttttaaaaaaatcattctagaaaaatgctcccatctaagctaaaaagctagaagactggaaaggttacgcgcctttattccaagcgcgttttctaacagcgcgtgcgacttgttatgagaattctgtgtgtgcatagacgcccaaagctttcctggcccgcgaatcgcggttcggttccggcagcagaaggcgctgtctcccgaggctgccccgcccgctcccgcgtacttaggtgcgcaggcgcggcttcgcggattggccgtacgcgggagccgtcattcggtggcgggtcccggccgcg

SEQ ID NO: 30579 - DNA, 438 bp, Mus musculus
  source 1..438: mol_type = other DNA
aaagggttgccaattgaatacatttcactattaatttggttattttaattgttggagccccaggctctgacgctgagtccggtaaaggtacattggctccatgaagaaaaaagtggcggcggccacccctaccggtgatctcaggagccagtgcagctgccagggcccaggccctgtgggcaccgatggggacaggaatgggggcagggtgacgctgccccatcctccccctgcaggacgtccaagactcccacacaagggaaggtgcggccctgcccctccagagtactgccaggcctccctgaccgcagtgaccagctgttggctgtgcccttaagggctcagactaaaggagtcaccacactgttgtggacagtgggcagacccctgggcggggccctggcagggttactgcaggcggggcgttagtcccgcccc

SEQ ID NO: 30580 - DNA, 294 bp, Mus musculus
  source 1..294: mol_type = other DNA
accgtgttggatggtgcagccacttggcctagagtcctacaggcaccctaacctgaggttggcctcagagcaaactccaggctctgagtagattttaagcttgaaatcccaggtacttgagaggttgcgtaacttagtgaaatctctcaaattttgaaaaaagacagaatgcgtatttgcctgggagcccaggactctgcagatttacaggaaacatgtcctcttgttatgagggtaacaagaggaccatttgctgcagtgctctctgccccctagtggccaaaatggggaatg

SEQ ID NO: 30581 - DNA, 476 bp, Mus musculus
  source 1..476: mol_type = other DNA
tgacttaaaattaaggtgtcactgctgggacctgagggcagaagagtcccaaagtttgagccctgtttcatgccttcggttaaagggttaaagacaggtgtctttaaccttagtctaggtgaaggcgcagaccctagcttgggaactgtgaactgcacatctgctgtagtagtccgcagaataccagaaatctgttttctccccaccccttacgggtatcggagagaggtcacaagtgtatgcattcagtacgccaattttgagcaatttgtaaaatcctagtaagtggggaggctctgcccagggagacctggaaatgctcagcagctcacgcctggcggtggaggtcgaggccctcaaccccctcggctacagaggccgcagaggccaaagagcccgctggcagcctgcttcgctaagtcagagacagagaaattgggctctgtcgctttaagtacagctggagccgtaagtac

SEQ ID NO: 30582 - DNA, 255 bp, Mus musculus
  source 1..255: mol_type = other DNA
ggtttgtgagagcttccctcaggctctgtttctcctgggtcaaatgcagcagggaaccttctaccccatctctctgtagaaagcaaggagaagggatcctctctgtgcccccggggctcagctcatcgctgggagctgcagcccgcagcctctccacgagctgctgccccggagtgtgcagcccgcagcacggatcggctagccgggggatttaaattttttaatttcgccccgtgcctgcagacgcgcggatcg

SEQ ID NO: 30583 - DNA, 336 bp, Mus musculus
  source 1..336: mol_type = other DNA
gtccacatgtcattgggtcgacgcatggtctcagagccttttcacacacaggcatgcttgtctagagtcaggcaggaaacccatggctctacctctgctgctgaccatgagtgggatggccaacgcagctgcggcctccccagcgaggagcctccccaagacggggcaaggctgcagtctcccagggctgccgggccagccagagaactggctgggagtgtagaaagccttcccagctccccctccagggcctcctgaaggtcggatgcctcctggctgccgagaagggaagcttcggggacttcctctccagtgtgcagccccgtgcagagcatg

SEQ ID NO: 30584 - DNA, 210 bp, Mus musculus
  source 1..210: mol_type = other DNA
tgtctaaagacagcgacaatgtatccacaaaagtgggccttccgttttaagtcccaggactgggagcaggtgggcccagtaccctggaggagggcagctaggctaagtgctcccgggtgttatattaggtcgtcacggctggggcggcagccacgcccgggctcccgaccctaggttttggatgggggtggttggcgtgaaacgccttcc

SEQ ID NO: 30585 - DNA, 333 bp, Mus musculus
  source 1..333: mol_type = other DNA
tgagagcctgcttctgacctcccagagggggtcgactgactataatagccactggattaacatagcagtggttgacttttagtctcccttccttaaaggccatctgaagatgtggatggaagtctactccatctgcaggcttccagtgtttctgctattggccaccagaactcctgtctcactgtcaccagagacacaaacacttaggtctttggttttttgagaggaagtgtcagcctgccagctcctcacagcgttggtgtgtgctcctgatgcacacacactggtctcttgctacacggcagcacatatctgccctgcgggaggccacct

SEQ ID NO: 30586 - DNA, 504 bp, Mus musculus
  source 1..504: mol_type = other DNA
aagtcctcacgtgctgagtccttggtggctcacacagagctttggggcctgagctaggagcacagttcacctggtgtgcttgcttgctgcagcctgaaagcctgcaggaggcaggcgccctcttcctcctcccacttctctggaagaagggtaggccaattggctaaccaatctagaacaagttagacggaggacccctcagcccccgccacgcagcagccgcctttctgcggccggccggctggggaggcggggcaggttacgggaatagctttcctccgcccctctgcgggttaagctggcacagtgcagggaggaaagcgagggcgatccgcagccgggcctcccctcccgcccacccccagccgcgggcgctcccggctcggccctcagccgaggcagccggcgtgtgcctagggcagcgggtcaccaggctccgcccccggccgcccggcccgggggacggcactttgttcaggatgccgcctccttctcgtagtggag

SEQ ID NO: 30587 - DNA, 366 bp, Mus musculus
  source 1..366: mol_type = other DNA
gtcactaagttgcttcgcaacaatcctaccagatcagaatggattagttatcccatttgatacatgaaccattctctgctgtggactctgcagagaagccacaaggctgaggctgagctttgtgctctagcgggtatttgacacccaccctgccatggtgccacggcagcaatgacctggctcctctaggagaggatcctggggcagcccgcaggctattgagaaagcagccccctcccgggcccgcgctgctgatgggtgttggagccccactgcagccccgccccccggggccctgtccgggcgggtgcgcggcgcagaggggagggccagcggggcaggaatgcgcggcgggcggcgcagggg

SEQ ID NO: 30588 - DNA, 349 bp, Mus musculus
  source 1..349: mol_type = other DNA
gaatcacttctgggcccacagctcgaagtggtggctcctgcctttaattccagcatcctcagctttcaggaggcagagggccagactcttgtgtgctggtagcagctattgattccatttctgatctttcaaggaaaataaaattggaaagcagctggtgctgcgctcgcccacgggttcccacgggttcccacgaattcagcacagttatacaccttatctgcttggctaagtcgatttccaggcagcgagctcagcctgaccccgatctggcactctggaccgcgactcccagggaagacgcgggccggcgccgagctggtccaactggttctgagcaggaagtctc

SEQ ID NO: 30589 - DNA, 457 bp, Mus musculus
  source 1..457: mol_type = other DNA
ctcgaagtggtggctcctgcctttaattccagcatcctcagctttcaggaggcagagggccagactcttgtgtgctggtagcagctattgattccatttctgatctttcaaggaaaataaaattggaaagcagctggtgctgcgctcgcccacgggttcccacgggttcccacgaattcagcacagttatacaccttatctgcttggctaagtcgatttccaggcagcgagctcagcctgaccccgatctggcactctggaccgcgactcccagggaagacgcgggccggcgccgagctggtccaactggttctgagcaggaagtctcccgccctcgcccggggcagcagagcagccccgcgctagccccggcgtgggtgcagcccgcagctcggtgcgaccgtcccgcagagcggccgcgcgggagacccgccccagcggtgatcagcgcggcttt

SEQ ID NO: 30590 - DNA, 289 bp, Mus musculus
  source 1..289: mol_type = other DNA
gaagaggcaccccaggacttcagtggggaccggtggaggccctctttgtcagtctatcaatcactgaatgttctgtctgtcccttcagaatgttgggagaggcggggtccatccacatccgtcaggacctgtcctgtggtgccagcacttatattttatctatgtatataatgtgtttctacactagggaagacccagctcagatttccacgccaaatttaggggtacttaccagtcagatgggacccttctgttggatttcactttactgtgctccagtttgaaccag

SEQ ID NO: 30591 - DNA, 162 bp, Mus musculus
  source 1..162: mol_type = other DNA
acttgtgttgttcaagctgcagtacaaacttggtcctgatcttatacttccgccagcggaaggaaggaggctacagctatctgcctgaggccatttggctcatgagaagcaaactttatctgagcagctggaggaccacatgagcttatatggccgggcggg

SEQ ID NO: 30592 - DNA, 304 bp, Mus musculus
  source 1..304: mol_type = other DNA
attgtaaatggaagatagcactcagctagatgggtgaaagattcactcgataaaaacaaaaatacagttatgaagtagtgataattttataccacaatataaggaactatattaaaggattatctagagttttaaaagtgagcttgcttagccttcatttcaataatgcatttttttaaactgatctccagttcccagctggtggcatcatctggaagatgagcactgattgcggtggctcacaaccatttgtaaaggtatttgtgtgtctgaagacagctacagtgtacttacatataataaa

SEQ ID NO: 30593 - DNA, 433 bp, Mus musculus
  source 1..433: mol_type = other DNA
cgcacatctgccatcaaagtgcttttaagactcagctgcgctcaggagggtgccacatgcttgaaacatccccacatcccaaggttgtgtgcacatgagaaggtccattattgacaggatttctagctaaaggcactctctttggccagtggcaaaagatccctcatccatcagcctgagagctcccaaggaacagggctggtctctgacagggaactgagctagaagagctcccttttcctcgacagccccgttggtccttagcgagcacgcactttctcctggaggcagcagaagcaggacccaggggcgtctcccctggacgtcacctggagaggaaggacgagcctgggagcattgcacaccgggcactccccgcctggcagccacagtgccctgcagctcgcgtctgagcggcggcctgcggagtggg

SEQ ID NO: 30594 - DNA, 421 bp, Mus musculus
  source 1..421: mol_type = other DNA
tatgtctaaggaggaaaactcttttgtgacacatgacgccatagggacccttagctaagttcgatgcacttgaggccaaagctcaagtgtcctcactgcagtggcccctggactcaggtgactccagtttcaagaagtgtgccaggccttcagaaccagtgcaggctaaggaggcacagttccttgttaaaaaacaaaacaaaacaaaacaaaaatgtgtctctataataatattttcagactatgaataagcacaatggtccttgatcttgttctaaaatcattactagtttcatttctaaaatgctttctctgaaacaggtaggaaaggcagacattcccttttcttgctaaatcctggtagagaaatgcgtgcaccaagagaaggtgggtcttgttgtcttggcagactgtagcagcc

SEQ ID NO: 30595 - DNA, 428 bp, Mus musculus
  source 1..428: mol_type = other DNA
aaagggactctgatcctctatagtgagtgttacaggcagttgtgagctcctggctgctggaaacccagtcctctgtaaaaagcagtacctgcttttaatcaccctgccgttatctgccaggccaagtaccgcatcttaggaactataaaggatttgaggagtgaaccctagatttgagctcagaggagtaccacaaaggcctttccttagtgatatgttcacttttctctacttttagcaaagttctgggaactcttctgctgagctgacgggctctccgcctctgcccatccggtgctggcggccttggactgcaggaagaggcaagactctaccgcaggcgcgaccacagcagatacctgctgtgcctctgctagctgctgcagtgctagcaatgtcctttgtcaggaccacacagagcccgtgca

SEQ ID NO: 30596 - DNA, 399 bp, Mus musculus
  source 1..399: mol_type = other DNA
acatcaaggactaaataaaaagggattgttgaattttgtgattcctgattgcaatgtttgctagctggtgcagtcaccacctggagcctttccctctggtaggagaggggctcgacagacactgagactggtgtgagtggagctatgctgagcgccaccacccaacacattctctggacagagccacggagttggggtggggagaatggatacccagcccttgcctcctcgggggcagatggggatgtcaccggctggacagctgcctggccgcaggagcctgggctgggcagcaggggctaattttactcgctgggagcagagagagtaatcctcccgcccccagtccccaaggtgggggcactgcatggagccgccctcaccccaggacgagggcct

SEQ ID NO: 30597 - DNA, 258 bp, Mus musculus
  source 1..258: mol_type = other DNA
cttcgtcacaaagagtgtgaaccaggccctgtgggtggggaaatttacttccacctctttcaaattgcaaattgctcatctctatgagatgctgaggtgcccgttcctcatttaggaaaggaagatcccactgagactgaggtaccacgaatgggaagccacccgatggacgggagccaagagggccttctattggcggcctctgggaggggcggggccctgcgcggctctgaggggctgggggtgggtcctgaggtg

SEQ ID NO: 30598 - DNA, 323 bp, Mus musculus
  source 1..323: mol_type = other DNA
tgcatttcttgcaatgcagaggaagccagtgcctgctgcacagagaggtcccctgagaggttataacccgggttaacccaggggcctggcccccttccagcacacggctccatgaggcctggaccaggacagaagtgtcactccaggtgacacgtctagtcttttatccgaactgtggtgccaattcttgaaggaagccgaggcgttgccctccctagccaccaattctgagtggccgcatgtgcccttccctttgggtcagccccaacttggaattctcaccccaaagcctcggcctagggtggcagggcacaggctgtgaa

SEQ ID NO: 30599 - DNA, 628 bp, Mus musculus
  source 1..628: mol_type = other DNA
gggggaggggggattccctcctataccccagaatgagacagcagcctcatgattttctgatcattaagtgctcccaacagtccgctgggccgccgctcccctgcggcagccgggccagcgcgcgtcggcccctcctcctggactgcagactccagctcgagcggtgcccgcgccccccgcccgagagcagtcgccctggccagccatggtcctccggcaccagggtctgggcgcggatcaggggcgggggtccgggggccactgctccaggcagcggctgcggctgcagaaggcggaggcagggaccctgctagcgaaagcgacctcgtaggctgcaggaggcggcagaggggctcagccgcggccggccccacggggctggtcccatgcgtctcctccagccatcgcgcggaggtgctgagctcgttgacagcgggcagtgagacccgcagctccctacagcgcggcacacgcgcgcgcccgccacctcccgccgcagcgcgaacaaagggggcgggggccgagccacctcaggacccacccccagcccctcagagccgcgcagggccccgcccctcccagaggccgccaatagaaggccctcttggctcccgtccatcgggtggct

SEQ ID NO: 30600 - DNA, 376 bp, Mus musculus
  source 1..376: mol_type = other DNA
gagacgaactgcgacaaatcataattgtggatgttcgtttatgtttctttctacgaggaaacagaaggtaccattcacttagaaaacttaagtagtatcaagttaaaacgtcatgacgtgaaatgtatacagctttggagagtttaaacctgaccttcaaccctggttaaaccccatgggtgactgtgacataatttgaaatgtagcgggaggagaaaagcctctcctctcccttcggcggcagcagcccaaagctgcggatgtacagatcgcgcggagcccatcgcgggcggcagcgaggctgggcatgctcagtgcgcatggcggcgcaagacagcggcgggggcggggccgggcgcgccaggcgcatgctcag

SEQ ID NO: 30601 - DNA, 438 bp, Mus musculus
  source 1..438: mol_type = other DNA
gttaggagcactgactgctcttccagagtgcactcatataaataaaataaatcttttttttaaagcaaatactgctacacatacataaatatatatggtatgcattatttttataacgctcaaaaggtaaacaaaacattgtcgatacagaaatgctttagcgtttattaatttactaatgccaacataaaagtcagagttttgttttattagtattttcacacttaacgtagctggtaaattaattttgtatgcatcaaatattgggtcgaaatgtatctttcaaaaaaaaatagcaagtcctgggacctgtcaggctgttccatatttggcatattaactggctaagcgtggagggccccgcccttccccctgtgcaccgccctccgcagcgcgtcaccgcgagggcgtggccagatgaagctccgcctcccgctg

SEQ ID NO: 30602 - DNA, 573 bp, Mus musculus
  source 1..573: mol_type = other DNA
ctgggggaagggatacagtctttttcctcagactatggagcaggtattatagaaattctacagcatatccttcaatacttcacaattaagaatctaaaatgcaattatatttatatacataagagtgctcccctaagttcatatatgtatatatttacatgatatacatatcaggtagcataatcgatacatgtatattgaatgattgggaatgtctttgctagcaagtgagagtctgagttccacataattaagtttatttattcaaataacaattcctaagtgttagaaaccaagtattcctgctctggagaacaaattagtgattgggaaagaatgtttaacattttgggaccatgaaataaacttaattttctcaaaaacaaaacaaaacttaagatcgctagtacccattttctattaaaaaaaaaaaaaacgcttctgggtggggcgctcggggcggcagagccgacaacctcctcctccggccaggcaacgcccgcatcccgcgcattcccgccctccccacccgcccgcgggcccgcgctccaggcacgcgcacgtcacgaggac

SEQ ID NO: 30603 - DNA, 403 bp, Mus musculus
  source 1..403: mol_type = other DNA
ctgaaagatgtctctttgtcaaacttttaaaaatgagcttctggtaatttgttccttgattgtaacaatgtccaaatagtttgaatcagtgacattttgtaaggtagactcaggaattcaattttaaagagttgtttacgggcagatattgttggcctatatttacctatatgtgtgtaaacgcatgcctgtacagtgtcaggctggccttgaaagttccagtctccatctaaggctgggatatttaggatacattgacaagtgttcagaaacctactttgctgcagactaatcagtatgcacctttcttgaatcactttgttgagattaaggtcacctgtcctaagggaaccctcagtagatatttgatcctctgagagtttgcttctgtagtaggaagatc

SEQ ID NO: 30604 - DNA, 385 bp, Mus musculus
  source 1..385: mol_type = other DNA
tttatacattattaggcactaaattaatatctatttggttttgtcgatagaacttttaatttcaagattttatctaattttgaataaggaacaacttttcaagtttctgcatttaaggctccttcaataaaggcaaagacaagcgttattgctgtctccattctgaaaaggagtaaaagctatctgtaatcaataccgttacgagtttaaaaaggaatcctattctctgtttgattttgattcaatacttggattgcaaacactaaagtgaaccaaatgccaatgttcagttgcccctcagcagggcaccgcccgcttgattgacaggctagccaggcggaaactgaggcgcaggcgcacggggctcgccgagcgcccctctggt

SEQ ID NO: 30605 - DNA, 404 bp, Mus musculus
  source 1..404: mol_type = other DNA
ccagcctgaatcctgcttgctcaggggtggagcttcccgctcaatcgttcagccatgcccactgctggactaattggcgggaatcgggccccttcccctgctgttgtgatctgctggccgaacacaacattccagtactaggattgcagtgtgtgcaccgccatcacttatgcatccacttcaaatatacatataaataaaatgtaaacacatatatacattatcttaagaaggtatcatgtgaacatgtttgcaggtttctgcatgcaaaatgtgctgtcaggctcagaatccttgctgcagaacacaggaatgtctcattcaggcagtgagccactattttctgacacacagtttccaaaactttaaatgttgcagatgtttaaacctcagacaggatgggg

SEQ ID NO: 30606 - DNA, 440 bp, Mus musculus
  source 1..440: mol_type = other DNA
tgttgtgatctgctggccgaacacaacattccagtactaggattgcagtgtgtgcaccgccatcacttatgcatccacttcaaatatacatataaataaaatgtaaacacatatatacattatcttaagaaggtatcatgtgaacatgtttgcaggtttctgcatgcaaaatgtgctgtcaggctcagaatccttgctgcagaacacaggaatgtctcattcaggcagtgagccactattttctgacacacagtttccaaaactttaaatgttgcagatgtttaaacctcagacaggatggggtgggctgggccaacaacttgctcaactgaagaagcacttttaaggtaaactattttccctggcctcccccccacccccacccccagaggggaaggtagaggagttgcctcatttccagctgctgcagaaggaggagg

SEQ ID NO: 30607 - DNA, 342 bp, Mus musculus
  source 1..342: mol_type = other DNA
ctcttggcactagccctggctgtcctggaactctgtagaccaggctggccttgaactctgctctagaaaaaaacctttctttcaaaagccaggtaccttttattctgtttcacagatagaaaccttgaagctggagactggactctgaattcagactgcaagaagcgaggctacctcaccctgtctcccctgaaactgttcccaccaaaggacataaattctaacaggtaggaagttcggtggtagaggaaagccaggcatgcctgaggcctgactactcctggagtaagcaattcagcagaactgcctgtgcacagcagggggttagccaccgccctgggt

SEQ ID NO: 30608 - DNA, 264 bp, Mus musculus
  source 1..264: mol_type = other DNA
gtgtccaggagatctgaaaactttaaacagatggttctttataacttaaaaaaaaaaagaaatcaagggtcggatctttccatcctaacagtcattaagataattttagactcaagtgttctccaaacctctctgatgtctgccttcagggaggaccttgatagaagccccactagcccctcccgtctcaagccagggtggggtggagtgcaggccccgaggccagagcttcgtggctagtgtccgacctgagtccggaacctg

SEQ ID NO: 30609 - DNA, 355 bp, Mus musculus
  source 1..355: mol_type = other DNA
taaaagttaaagaataatgcaaattcaatatacatgtgaaattgatcaggaaacaagttaactttgtaaaagacaaggcttggttttcattgctcttctttcattggtaaatagcacagagcaaccccaaatgtagggcactgagagtcttgaaggtagttttgcataggaaagccacatcaccgagctccttatggtgatgtattgtttttgaataaagcttccttaaaaagatattaaaaaggagcaatatttatatagtttaaaactgttttcctttagaggaaaactaacagcataattacttgaattaaggaagtaagaagccattgcactgactttgaactttacagta

SEQ ID NO: 30610 - DNA, 462 bp, Mus musculus
  source 1..462: mol_type = other DNA
tcaattacttctcattgaagtttagccctaaaggaccatttctagcctagattaaaaccaggtgggtttatagaggagagagtaccacagacctcttggccaactggtttgtagacatctcctttgaagatccctgtaattttaaagataaagagccttaaattccaaaactcctttctttcagggtgagggtggaggactcccattttccccaggcataaagcccaggatgggtgccccaattcgggattggcagcccgccctctcacggaagcggaggatgtccccaccttatttgaaacaatcaatacaaagagaattttttttaagtttttttttttttttttgttttgcaaagcttggtcgtctttagaaaccgggctgttctttttaaaacaaagcgctccggggctcaactgagttttgcagcttcacctgcagagcttcagagttgataaattc

SEQ ID NO: 30611 - DNA, 539 bp, Mus musculus
  source 1..539: mol_type = other DNA
tatatatatatatatatatacttattaaagccacttaagagtctacataagtataatgtagtaactttctaccctagttagttgatatttgaaatcagttttgaagacatgctcaatagagttcatactaacttgtaaatgcacttcatttcaagaacacctaggaaatggaaagcaaagaatttgattccttgattgttttaaaaataagtatgtttaaaagaaattatactaattaaaatgcctattgtaaaataaatgcttattccatgcacattgtaaacatagaagttcaaaattgttagcaatgtaacttgagaaaacctaagtggttcttattatatacataccaatatttaaattatgagatacttagatactatttgttttgaaaggacttttcttcccttttgaaaaaaaaaaatccgattcttttctttgacacagcacaaagtggaggtttgccaagctcttttgaaatggtttaaaataatgaacattcaacgctgtcggtgagtttggaattcaaataaaaacca

SEQ ID NO: 30612 - DNA, 326 bp, Mus musculus
  source 1..326: mol_type = other DNA
agctgattcttcagcgtctttaattttccctctgaaatttcacaaacattcctgcacaaacatcatgaccaagaagcaagtgcctttcccccttggtcactaattgagaaaatgtggaggcatttcctcaactgtctgtggtaactccagctgtgtcaagttgacacaaaactagccagtacagtgctctattgtgatatgatatcatttctgtcattgatgtccatctagccgtcagacgctcatagagtatgtgatgagtgttttgaaatcattagacactaactataaattcctaagtaaagaagagaaatattttctaaata

SEQ ID NO: 30613 - DNA, 435 bp, Mus musculus
  source 1..435: mol_type = other DNA
attaggaaaaaataatctttgaaaccttaaaaggcttggccctcctttttaaatttgtgtttaaatccaagtttttcaccctcctttccaatacaagcattggatgcatagaaatgttacgttgcactgtacagaatcaatattggacatcactgtacattgtgcatagatggacatagatatcatcatgaactacaagagaacagcataaggtgccctaatggtcttccttttctacctgaggcctaggacaagaagaaaatagatcttcacccacaaagacagacaatctctttccttgaagaaggaaaatcaattttcctcaagcagataatatttctttaaggaaacctgggagccctgtatagagctcaagtcagtgacagtgaattgccagtgtcttggagtcatttggaacaaacacctatgtgttca

SEQ ID NO: 30614 - DNA, 358 bp, Mus musculus
  source 1..358: mol_type = other DNA
cttgaaatttaattttcttactaaaattaacgtttgcattcttttctaattatatttcacatacttgcattcgtgtgtgtgtcacattttgcttctattgttttaatccatttgagctataatattttggctctattcccttggcaggggaacgaaaccagaaaaaactgatatcaaatggttaagatctgagtaggaatcaaagctttgcttttgaaaaaaacgaatttatctaatgtaatatttttgttctctttcggaagggccagactcctgacaccatgtagaggcagcttaaactactccccagttctcagcagggtgcgggcgcggggaggggcctgcggcggcccgccct

SEQ ID NO: 30615 - DNA, 292 bp, Mus musculus
  source 1..292: mol_type = other DNA
acaaaggggactctagaattccaagtttaccttcaatctagaattaggtaaattaagtatacagtctacaaaagcatgtcctggtgtacactcgaaaaatttactatatatatgtatatatatatatagtaaatatatatatttccaaaagtattactctggtggcaccgcctgccctcggggaggttaggcatttaattctggtgacagtcttgtaaaacggggatttaaaaaagatgtggggagggggtaaagaccccctccttctgcctttcccggagaggactcctcc

SEQ ID NO: 30616 - DNA, 374 bp, Mus musculus
  source 1..374: mol_type = other DNA
gtgtgtctgaaacagtgtacttacataaaataataaataaatctttaaaaaaacccaaaaccatcaaattgtggtttcggagttgccaatagctctttacctcttgaaattcaggctatggcatccaagttaatttaatgaacacataaaattgtacagtttaggtttggttttgtgaaaacttcactacacttcttgattttcattctagagtgatccttcttattatttttttaaacaagtatgattatgcagaatacgatctctcgtcctttatctgagaaaaaaatagtagcgactttaagagtaaagaaggcaccttcttccagtcttcatatgcataaggcagcccagtctacactgaacagtgctcc

SEQ ID NO: 30617 - DNA, 369 bp, Mus musculus
  source 1..369: mol_type = other DNA
tttcaaagcacaaatcaaatccttgtattttaatatctatatctatctatatatgtatatagatatatttttaatttagtctttttaatgttgttcagggttaacaaggcttcccttcactgtcaacatgcacttagttcatgtggagtgtagcccatacgccgtattttagggaaatttactaaagagattgccaaataaaattatagttattttaccatcttagtatactgtgtctcaggaaaactcagttgatgatgtaattcacaactggcatttcttatgtactcataccatgacagattaaaaaataagttaagaccatctttatctttaaagaatatgagaggtgagcacaaatgtaattgt

SEQ ID NO: 30618 - DNA, 590 bp, Mus musculus
  source 1..590: mol_type = other DNA
tgaagtaacccttactgcatgacagtcactctagccttgtcaagggggaatgctagctgggagaaagccttctccagtccctaaggagtctgtgtgactctccagccctggacaatgtaacgtctagatcctgcatctgagacagcagcagaaatcagcagcagctgagcttggttagattctctggattaaggtacctacctatagctcaggtgttgaaaacaccaagccagtgtttgtcactgcttctagaacgacactctagggggcctgcggcaggaatgtgccatatgtgccggttcctgaatcagggcggctctgggtttccgagagagcactaccggggggcagaagtgctttcccaggccggggatcgcaggagccggtgcccaggacagcaggagggcaggtcctgcccggagcccgcgcggccaggtgcagccgccgggcgcgtccccgtgcgccccctccccctcccgccgacttcctggttcgcggaaggtggcgaagccgccgccggccgggtcgcgggaaccgagaggcgggggcaggggcaggggcgggggcggcgtcgccgcggtgctgtcccc

SEQ ID NO: 30619 - DNA, 747 bp, Mus musculus
  source 1..747: mol_type = other DNA
gcaaaaattgttttgtactacatgttaattgggtttttataacccaaccaatgagcataattctcagaccctgtggaatatgaaattctgaatgcatatttgccattttgtaatatatattatatatacatatacattatatatacacacatatattatatgtacacatatacattatatatgtatatatatatatatatatatatatatatatacagagagagagagagagttatggtctttcatatgtaagcagaaaatataaaaccttcaaaaatagatgctgcagcatcattaaacatctgaagatttagtttttatgttatataaataccaatcaaaaaattcagcattccatttttagttaagggatttcttttgccctattaatttgcataagttaatgatgttaaaaggttaataaatccaagaggataacttcgtgtaaacacttgaaagaaatattacccccatgtctctataattctagttatatgatagcttattttttcttataatttttctctatcaacagcaaaaattgtagggtttagaaaaagttactaacctgtaaacagagttttgaaagagaatgtaatttacaaaaatatagagtgtttctttaaaagtagccacatcagaataatcacgtgccaatactgtcagaagaaattaatttctctattaggctttccaggaggcattgttcacggaagcctgcaatccaggctggaaaaatctgctcca

SEQ ID NO: 30620 - DNA, 332 bp, Mus musculus
  source 1..332: mol_type = other DNA
agcttgttagtaaaaataccaggtctatgtctattattcagaaactaaaatgggcattaaaaaatgcattatacacacacacacacacacagagagagagagagagagtagtgtgtcctacagtgtataaatgctcattgcaatgagtcattggcattggagatcctgcagctttggatctgcaagaccatttacagatgatgtagatgccctggatttgggccagggtggtagctgaggcggccagcctctggctttccctgatcagcaccgccaaggtgagctctgcagcacccatcagcaggaggcagtgtcagcctctcttgctaggg

SEQ ID NO: 30621 - DNA, 196 bp, Mus musculus
  source 1..196: mol_type = other DNA
cccagcactccaggagagaaaccctgtttggaaaccagtgctgtatttctccatacaactattttacacaatgctattaagactagctagttgtgttgaagatgccacttctttccaggaacttgttcacaagttggttctaattgaccggctcgtagagtcgaaaggcaaaagcggctgggctactttcccggga

SEQ ID NO: 30622 - DNA, 388 bp, Mus musculus
  source 1..388: mol_type = other DNA
ttagaaacacggaccgtggggctttacttaattaatctaagaactgttttttgaatgttgctagaaagcaggcttgaagactgactgagttggctaggtcaagacagggtcttactttctcataagtgagtaatactgtaatacccaaatacagcacatatttactgcttttataatttgctgtcatactttaagagaagatcatttataatttgtagttcaaagcttatatgttcttattaaactcagaaaattattgtcagctaatactggcacaatattttcaattatttgagactagtttaagtaaaatgttacctcgttccaaaggtacttagacagacattgtaattattaacttgttttgtcaagagaagtattgagtatt

SEQ ID NO: 30623 - DNA, 452 bp, Mus musculus
  source 1..452: mol_type = other DNA
aatgacttgagtatgcaaatttaaaacatgttcacttgcactgaagattcacatgtgagttcacatcctgacgtaactacagaaaccaaattgtgtaggtctatacacatatataatacacatgatattattatgtacatatgtattattatgttatcatattttaaaataaatttttatattctatgctcatatgcttatgagttgttggtcaaagttgtcttatagaacccaaaacataacagactatttgtattgtatatggtggaagataaatacatattgacaatatacttcatcaataagaaagggaaaaggaaatataatctcctctttttttaatagttcagtttgattggctaggatacttgcaccaaaaaaaaaaattaaaaaataaaaaataaatagtattatattgctaaatacataacaaataaaatgcctattggaca

SEQ ID NO: 30624 - DNA, 230 bp, Mus musculus
  source 1..230: mol_type = other DNA
gagttggacatattctatatgtcacacaacacataaacacatatgtattgcacatttataatcagttttacatatcttaattgaatccactaaacctttgaattttggcaaagtgatatcataaaattccaactctttaaaggagttattccttcttatagtcctccatcatcattatgagaagtgactttagttctgtaataccagttgtattagaactctcagagtcc

SEQ ID NO: 30625 - DNA, 273 bp, Mus musculus
  source 1..273: mol_type = other DNA
cttagggaagtggttctatatgtgaaggcccatatagacaagagaagcactcttctaatagaagtcaagaagataattctaaattgtgtattcgatgtagccgcctgcagccacacctaagagtctgtgcttataaagctgatcagcctttaaaaattcattttattagaagtagccatgtaagcttacaaagaaaccaaaaattgaatattaaattccttcataaatgtaaaatgattaacttattattgtgaaatagttgattgaatattg

SEQ ID NO: 30626 - DNA, 326 bp, Mus musculus
  source 1..326: mol_type = other DNA
tggaatgtcataaggaattatattattaactcctcaatcagtgtgtgtgtgtgtgtgtgtgtgtacatgcgcaaacagacagttctatatgtgaaggcccatatgtcttgacaagagaagcactcttctgagttctaatagaagtcattgtactataagtagccatgaaagctataagaaggcaaaagtaatttattctctcctctttcttgaacttggcaattgaatgctattacattgctccataaatgtaaaatgattaacttattattgtgaaataattgattgaaaaatgtttgttaccaaactggatgctagtaatacac

SEQ ID NO: 30627 - DNA, 249 bp, Mus musculus
  source 1..249: mol_type = other DNA
tgtgtgcatacactagcaagattttgctgaaagttgtgagactatgccggggcctagcatacacataagtggatgctcacagtcagctattgtcttgaaaatgatacctaataaaaatatataaaaaaatttaaactcagggtccatgattacagcttcaatctttgctctacaaagtctctctggagatgattagtctagtcactaataaagcagaatattattagcaatcattgatttttttttttt

SEQ ID NO: 30628 - DNA, 300 bp, Mus musculus
  source 1..300: mol_type = other DNA
attacataaagtacaggtaaatacagtccatgttcttagaaacactgacagtcaatttcttactataaaatacctcaatgacaagttagaaaattagcatttcaagttgatgggtttttattttctttatttacatttcaaatgctaactggggatataaaaagaatttcttgggagattcaattcattaattttagaaaaccaatatgactgttctgtggtttgtccacagtagaacacactcacatttccagaaatgtgaacttgtttccaagcaaaacaagctgtgatttacaagaa

SEQ ID NO: 30629 - DNA, 429 bp, Mus musculus
  source 1..429: mol_type = other DNA
tttcagagtctctaatatgtaagggaaaaaaaaaaaaactgtttgatggcattttactaaaccattttctaaagtattaaacattattagaagcaacagactctagcgcatcactatacttatttaaatctgcaatctatataagcatactattttctatataagaagcaaagttccaaggttgaagaaactatatcatttttaattctgtgatacacattattttacatgaaaaaaaattaatattgataacaagaaagtgatttaaaattaaatttactactttcaagaagttatttacatgtaaaagcttttattacttctgctctaaaaaagtctctaaaaaaccataacctccatttcatcctaatgcttgtatttgttctgaataaatatgatgtgtcacataagaggaagatgctctgtcag

SEQ ID NO: 30630 - DNA, 632 bp, Mus musculus
  source 1..632: mol_type = other DNA
ccttctcacaaagagtgaaaaagaaatattaggcttgaagtatatgtttaaagtacacaggccatgaatagtatgcagaattgatttctaggttcccataatcataaaggcaccggtaagccttttgagtaccacttaaaagtctgttcgtctgaaaaagtgttctaatcttccattcataacctgaaatcacttgaggctttttttgcgagtcaacaatgaatggtccttcgtcgacgcagcctaaacttgaaaacgtccacatttcaaagctccagctttccctaggagctgctggcgcagggaaagtttaaatcacccggcggcggcgcgcgctctgggattgaaaagcgcggaagcgcccagcaggtgcgcgcgcacctgtcgctcgccccgtgcgagccttgagaccgcaccggggcccggttccgctagggcgccgcacacgcggagcgccgaggcccgctccccgtttcccgaagtcggcggcgcgccccgcgggcgtctgggtggcgcgtgtgctcgggcggccacggcgccccctggcggcggcccgcggccccggcggagcgtgggtcagtcaggcgttctccgcgggcagcccgcggcggggccttgccttatatagcgcg

SEQ ID NO: 30631 - DNA, 455 bp, Mus musculus
  source 1..455: mol_type = other DNA
gaatcttaagtttgggttcagcatgcgcacgccttgaggccagcctgctcgggtatggatagtttcaacgattgttcatagttttaggtgtatagagctaagggcggatccccctgaacttatgaaggcttaggagctgcggcagccatggctgttaaagccatgatgaaagtttattttaaaaacaccaccttgctttcttcggaaagaacgttaaacattggaccgcctgtgtttttcactttactccggatcaataaattaatcttaagatgacattccgggaagaactcggcaggcaggtgagtgcctcgctctaccgccgaggatgcgaacctgcaggctcgcgggcacgcgggcgcgtgggcgcgcggagacgggggagccaggaagcgcggcgagcccggcggcggcgcggacagcccgatggggcggagcgaggccgccggaggggc

SEQ ID NO: 30632 - DNA, 614 bp, Mus musculus
  source 1..614: mol_type = other DNA
gaaagttctgcttttgggaaactagaatctcgagtttctgggcggctggagcctcagacaccacccggggaaacacacgccctagaccggctgctccgcaggacagagggactccttcccctcactgcggagacgcggccgccccgggccgaggacgcggcagagtccctgaagtcacttctccgacgccgggcgtcggtggcggcaggtgaccgcctggcccaacgcgggcctcctcccggaacccccggcccaggacggtccccctggtgctcaccgaatcctttaatgagctcggtgaagaccccggggtcgctttccatgagacaccactcccctctccggagccccgcagcacaagctgccaccggccgcagaccccgacagcctccgggcgccgtcacctgccgcgcgccggagcacagaaggaccccgggagacgtcgaaacgcctctcctgcctctcaggatccgtagcgccctctgccgggccggagaagtagcggggcctcggagcgccggagggaggcacatccgggacccttggcaccccagagctggggcggggcgggggcggggctcgagacggggcggggcggggctcgctccgacccg

SEQ ID NO: 30633 - DNA, 572 bp, Mus musculus
  source 1..572: mol_type = other DNA
aatgataagtattaattacaaatagctattttttgttctattcatcaaaaccatttcaagtgtttttaaaataatgatgagtctctcatcccttggacgagaaatctttctaggggccttggcacgttcgctatcctcccggagcaactaggccctctcctccggcgggtgccggagcacagaggcggcgaaggctttgcctggcctctgacgctgtgcgcaccggccagccctcaagtgcccaggatcgctgggcccggcccgcagcaggcctgcagtgacccacctttacctggaaggtgatgctcaggacccgcggcgcctgacagctccaggttcgggtcggagcgagccccgccccgccccgtctcgagccccgcccccgccccgccccagctctggggtgccaagggtcccggatgtgcctccctccggcgctccgaggccccgctacttctccggcccggcagagggcgctacggatcctgagaggcaggagaggcgtttcgacgtctcccggggtccttctgtgctccggcgcgcggcaggtgacggcgcccggaggctgtcgg

SEQ ID NO: 30634 - DNA, 425 bp, Mus musculus
  source 1..425: mol_type = other DNA
aagcagttgaacatctagtaattcctaaatctgttcaaccgtgaatgactcatgaggaaatcctgattccttacgcccgcaggagatgcccctcgggtctcctggggaacgactgctgcagccagaactggttaaaacaccaggttttaatagaaagtggaattccctttaggaattccaaggtgcctgagcgatttgctgagtgcagccagcagggctctccccatcccagctgcccaccctgtgtgcgcacgaggatgcggcgcctacgtcaacagcgccctcgcttccaggcccttcgggggctgccgtgactgccacaggccggggcgactccgccctcgtgccgtctgcagccgcgctctcttggggcgtggctgacgcctccaggtcccgcccctatgccgccgcccgccttaaaagcc

SEQ ID NO: 30635 - DNA, 561 bp, Mus musculus
  source 1..561: mol_type = other DNA
attgatgaattaataataaaatctggacacacagacaatgtaattctattcaacttgagtgagtaactcagatccagaaagacaaatatgtcttatttgtggatcatctctcaaaatctttagatttgagtataaatttctaaatatttcaagaagtgctttctatgagagagttctgagagttcacacacacacccctacagtttgtatttagtagatcatgtctgaagtgtggtgttcagttcaaagtttagcaggcatgtcaactgactcaaaaaataaagagagagcccttagtttgtttcaggtctttaatcaattgactattatgaacaggttgctgtcaatagttcccatgacttgataattattcagaggagaagttttgactacaacagttgaaaattctccagagctgctttccagccatctggacatgtcagatgttctgataagtttagataaaaacctcttttatcagcaaggcattgcaatgccacagcactactttccatattcaaaaaacctctctttgcatagatacgtgtctgtaaaactaga

SEQ ID NO: 30636 - DNA, 379 bp, Mus musculus
  source 1..379: mol_type = other DNA
ttttctttaattttaccatgccatcttaattattgaacacaattacagtgacacatcacttatagtctaattatagaagtagcattaaaaaacagaatgctccttaaggtcatcttattttgtacacaccttggaaaattctaacaagaatgttccttgtgatggaagcaagattccagacaccttccagatagatacagagtagtcagtataaaaaaaacattaatcttatactgcttcatatatactatatgacaaggaaatctacttttaatttttaagaaaggagaaaaaacattgtgatcctgcgtgatacagaaaatatagcaaatgtaacattgaccagaacatatagttttaactcaaactaaaagttgag

SEQ ID NO: 30637 - DNA, 717 bp, Mus musculus
  source 1..717: mol_type = other DNA
attcacaaggtaacagtattaattacttctgctaattgcttctgagcaattggaaaaggagtaaaactttaagactttcttttttgtaaggtttttcttctatgagaaaaagaggaggaaagaacactcctaagtcaggtataacttagttcctcattaagatgcttttctatagattatttctttcaaaggccattacattactttatcagaaatggatccatcactcaaggaaaagattgcctatataaaaagtaagacttttttttttcattaaacattgttttgaaagagtaattcattcaagagctgttacaggtgttgtataattctatgtcatcaccatcatcataaatacatgctgagaacttttgggtaagtatggaatcattctgtaccaattaacaaaagaaagtcaatcaacttctagagtaaaataagcttttaattatgacaattcatttcaattttttcatgtagtttcaaaatattttttctaggataatcaactcatacaaaataaaagatggaatatttatttccactttttaccattaattatgaaaaatacacaaaattaatattaaagtatatcactaaagctatgtgtacaagtcacagttagattaacacctgtgatacctatttttaaatttgtctgttcataaagatgaaaaattataatttagttacagaaaataatctgaggtagacatt

SEQ ID NO: 30638 - DNA, 831 bp, Mus musculus
  source 1..831: mol_type = other DNA
ctagtatctatattaaatatattgttaaatcaatgattcaaatgaaaatacactttcttttgctttgtgttatttgattatatatatatattataatttataaaagttaaaataagttaaaagctgttagaaaaattacatatatactgttgatcaaacatggataattactgatttctttttctgaaaacatgagtcctcagatagataaatatctcaaagacttttagattcaagaaaaagtaaaaaaaaaaaaaatcaaactcagagttgtcaatttttaaatccgttaagtttgtcagtttattttagaataatgatataaacaaaatatacgatgtatcattagtatttgaagcttttcattaagaagaatgtttttaacaaaaaattgaaagatgtgctcaattctaagactataaatactttcaactgcaaatatgagaatacagtataaaatttgccatattccttttcctatacttatccaaaagattccgatttgttttagatcactttatggactgatgctttaaatatattaaattatgtgagttctattctatctttcattcataaatcttaatgtttatgcaatttattaagcaaatgtaattaatcaacacttcagtgcagtttgtgaacaaatgaaatttattaagtcaatttactaaaactaaatgaaattatagtttaaggagagcaaaactaagctgctcatgtttgataatgctttgccacaagacattttatgtcctttgaagtaacgctgtggtaataccagcttttatcttgaaggccagaagcggttttgcaattcagtacaagaca

SEQ ID NO: 30639 - DNA, 373 bp, Mus musculus
  source 1..373: mol_type = other DNA
tggaaacactcagtagttcctggtggcatctaatcagaacccaaaaatgttaaagaagtgctttctttctttcttttttttttctctgagaatggttaacagtgggaacctttcttatgataatcgtagacaactagtgagctaggctgtagtcatcttcagagagcagcagcactgattgctgccaggagagcagcgcttcggaaatcctgcaggaagtttacctgcactgggaatgttatcattaggattaatagtattccatcagtctttcccttgcagaaactgatccatgggttacctaggcggcagcagccttcgtgtttaaggcaattgctttcagtactgagcccctgcgctaaagaccctggcc

SEQ ID NO: 30640 - DNA, 299 bp, Mus musculus
  source 1..299: mol_type = other DNA
aataaatcggttacattacccaatcgatccagcgatcaggtgatcgtttatgcaaagctatttctttctctagtttagcttggtggccagggtctttagcgcaggggctcagtactgaaagcaattgccttaaacacgaaggctgctgccgcctaggtaacccatggatcagtttctgcaagggaaagactgatggaatactattaatcctaatgataacattcccagtgcaggtaaacttcctgcaggatttccgaagcgctgctctcctggcagcaatcagtgctgctgctctctga

SEQ ID NO: 30641 - DNA, 383 bp, Mus musculus
  source 1..383: mol_type = other DNA
attttgcaatgcattaaagaggtctccattcagatgaagagagctctcagaagccactgattatctgggttctaacacattgaaattcagggagggactttacatgaaaaatgtttcctccgagttgctttgaggagcatttaaacttcacatttggccaagagtttggtaattatcaatcacaaacatgcacatggtcataatctgtaaagcacaaatttttgcacaatccaaagaactgttccagtcattggcaatgattcctttctttttaattcaaaaggctttaaagcttccagacatgatttggggctcacacagtgatccgcactcatttgaagaaaagaggctttggtgtaattcgccaattcaactctctagag

SEQ ID NO: 30642 - DNA, 427 bp, Mus musculus
  source 1..427: mol_type = other DNA
tacagggaccctttgtcctgtgaaggttctatgccccagtataggtgaaatgtaaataaagaaaatatataattaaaaaaaatagaggtctgtttgaagatataccagtcctataaaatatactaaataaatttcacaaccattaaactgtacttcaaagccttttgacatttctgtatttattctaggcttcaggcaaacagaaatatttgtcaataagagaagagctagggattttcttttttttttacacaattaataagtctgattttttaaacctcatgccaatgttttgcaatgaaatcggtgcaaatacaggtatatgtgctgcacttaaatcctcaatttattaatctagtagtttatttatagtttaaattttactcttctctttgttttttttttcctttaaacaaagagcatgcca

SEQ ID NO: 30643 - DNA, 536 bp, Mus musculus
  source 1..536: mol_type = other DNA
atttagctgttttttgtatgtagtaacataacagaaacaagagagatattatttttgtgggcttcatatgatgttcaacattcaagttcttaggtatgacataagttcaatgaagactttgtctatctatggatgcagagaaataggcataagtagttttaattacacatgaatattattatctgtttaaatgctttctagaaaattaactttttaaatatgtttcagacattttatgaacacaaaccaaacaaattctgctgcctcataggccacatcttgtagagaacaatgtgcaacgtagttgaattattattttatttaataccagtgttctaagtgatcgtattgatacctaacatgaataatggcatttcagttgatgccaggactcaccctagctgtagacagcaaggattaaccttctctttctggcaaaactgtgctgatttttcactccctggaaaataaaaaatgtagggctttcaaggaaggccagtcttcaactgccagtgttacagggggaaaatcatcct

SEQ ID NO: 30644 - DNA, 304 bp, Mus musculus
  source 1..304: mol_type = other DNA
gttttcttccagtctagctttttaaaaaaataactgtagacattttatcttcctggtaggtatattaatattaactgaagtagacttcctgaaacaagcaagaaacaaaatttgtgttttaactatttttctctttcgcagacttccaagctcttaaaaaacagaacactgttttgaacatagtttataacaaatgcatttaaatcaataaaagtagttcatttatcattgctcagaaatgtcatgcagaagacttctacaaacaagcctgagtgataaaactttcttgcttgggtgcagtagc

SEQ ID NO: 30645 - DNA, 442 bp, Mus musculus
  source 1..442: mol_type = other DNA
gccctgaaggcattctaaccagggtacttagagtaacaggatttcatgaacactttcttcacatagaagttattatatgcttcaaattagattgcagattctttaaacaactcagaggcttgaacaggtttgcttttcaaggttgtccaacactgttcaactgtaaaatgtatatgcgttttgtatttgcggtttgtttaaaacttcaccttttaaagactctaaaaattctcaacataatgcattatcttttcaacttcacttttagtcttttggaaaaaagaggaagtagtgactgcttaagggcaagcagcagcagcagcagtctctctctctctctctctcacacacacacacacacaacatatttttaaagtatattttctgactcgaaaggcctgtttctgaaaactaaacatgtccatttagaatgttagtcttc

SEQ ID NO: 30646 - DNA, 450 bp, Mus musculus
  source 1..450: mol_type = other DNA
ctctaggcaaataattttttatcaaacactgtttctgaatgaagtgaattttaggctagttatggaaaaataactattaccttttgatccgttgccataacatactttcttgtaaacatggacagaaaaagtttttaaaaggtacatttgaaaacaaattctttctagtgatacatcccgcacagcatctgtccctgggaaaggcgagtgccaggggctcctgtgactgcagaacccggagggtagttccactcatttcattaaaaatagaagaaattaaatgtgctctgagcagcgagcacgtcagactgcgccccagtggggagaggtgaggggaagggcgcctggagggatggagagggcggtgcagctctcttggcaccacctggggcagccaagggcagcttttgcgcaactcactccactacgtcacgtggagtccgctttaca

SEQ ID NO: 30647 - DNA, 389 bp, Mus musculus
  source 1..389: mol_type = other DNA
gattttaaaaagaggaagatacgtgctcagcattcttctgggccacagaataagactttgtcaaacaggtggggtcaaagcaggctttcacttgaactcaggtctgaggtggccagcattacccttccccctctgaaggtaccgcatagccagggcaggcagatgattagcagatgtttcgaatcaaaatgaaaattaaattaaatccagagctgtagtttcatacatttgctgtctgggattgaacctctttcaagcagaggacagaactcatgctgacctgggttagttcccaaagcaagcctggcagcttggcagcgatgcctctcccagtctcagacttggaaactccaagtgcgttttcgttttcaaatgatgaattacacaca

SEQ ID NO: 30648 - DNA, 530 bp, Mus musculus
  source 1..530: mol_type = other DNA
ttattggacaaataatggatccatatttgctatatgatttttaaaaagaaaaaaatggctgttatttcattgctatttcataattgtcactgtgctactggtatgaactgtaatgtgaatatctgatatgcagaatatctgttgagacctgcaaactgtaaactgacagctctgaaatcaaacatctaatttttgaaggcttttctgataagtatcctcttgtaaaaggcaagtagttaacaaattgccacttactaaatattcagggttttttttttaaatggtacatgaaagaatactcacatactgtgccagatgtctttgagaatatgtattacatactaaggggactttaataatcaggaaaaattatttttttgttttttagaaaatgacacgaaacttttgaaaatagatgtcagaagttcagaaaagtgttttctcaacacagtgctccaagctcctttatgcctttaattctcttatggaaatacatgttcagagctatttctgcaagaagcttaacactg

SEQ ID NO: 30649 - DNA, 600 bp, Mus musculus
  source 1..600: mol_type = other DNA
caaaggaggtcgggccccagctccagaccggagcgcgaagagcgtctccacacttagtttcagttccgggcgctccagcacttgctgcaacaccgccgccatgtcggccgggatcgcggcaacagccgcagcggctgaaggagcgcggagcccagccgccggagccgccccgtccgccgcctcgctcgcggtctctcgcgcgcctgcccgcctgagactcccgcggcgggaccctgggaaagagagtcccgcgttaggtgcagccagagccgcgccgccgcgccctctctgcgcacgcagccaccgggagctaggcacgctgggaaagcgagttcacagcagcctcggccccagttttttggggtttccagccccagagactcttgggaaattcctatggctgtgacgagtgcccgcgcgggggcgctacataagtacgcagccaccctcgtccttatcccggaggagcaagacgaccccccgggatccacttctagaagccgagccaccagaggtcagggtgtctcgacaggctctgggctaccgccacgatcttaacggtgccccgagaggggcggggtgcaggcctccctcgcttgg

SEQ ID NO: 30650 - DNA, 278 bp, Mus musculus
  source 1..278: mol_type = other DNA
attgaatcagagcctgactcctaacacaggctggtgcttccttattttcaatcaaaaggctgagtcgtgttcgggaaacagacatagttctgttactgtggcaaaatgacaagtgtctcaataaaactgtcctaaaaatgttaaaattaaaaacgtcttactacataaacaacaaaatttgattttttttctgtttaaaatattaaccagactactttatctcagaatgtgcacatgtggcaaataaatccctggagctttctgtcagcgagagaact

SEQ ID NO: 30651 - DNA, 435 bp, Mus musculus
  source 1..435: mol_type = other DNA
atctcagaatgtgcacatgtggcaaataaatccctggagctttctgtcagcgagagaactccaagcgagggaggcctgcaccccgcccctctcggggcaccgttaagatcgtggcggtagcccagagcctgtcgagacaccctgacctctggtggctcggcttctagaagtggatcccggggggtcgtcttgctcctccgggataaggacgagggtggctgcgtacttatgtagcgcccccgcgcgggcactcgtcacagccataggaatttcccaagagtctctggggctggaaaccccaaaaaactggggccgaggctgctgtgaactcgctttcccagcgtgcctagctcccggtggctgcgtgcgcagagagggcgcggcggcgcggctctggctgcacctaacgcgggactctctttcccagggtcccgc

SEQ ID NO: 30652 - DNA, 583 bp, Mus musculus
  source 1..583: mol_type = other DNA
cttaactgtcatttaaagtacagcaaaacaacattagacctaaaaatctggtgcaaactgggccaaattctccagtttctgtagatcggggaggatccccccgccccccgatctaaaccacacagcggggagaagagagctgctacctgaacacctcacagggaggcgtgcaaaggaggtcgggccccagctccagaccggagcgcgaagagcgtctccacacttagtttcagttccgggcgctccagcacttgctgcaacaccgccgccatgtcggccgggatcgcggcaacagccgcagcggctgaaggagcgcggagcccagccgccggagccgccccgtccgccgcctcgctcgcggtctctcgcgcgcctgcccgcctgagactcccgcggcgggaccctgggaaagagagtcccgcgttaggtgcagccagagccgcgccgccgcgccctctctgcgcacgcagccaccgggagctaggcacgctgggaaagcgagttcacagcagcctcggccccagttttttggggtttccagccccagagactcttgggaaattcctatggctgtgacgagtgc

SEQ ID NO: 30653 - DNA, 490 bp, Mus musculus
  source 1..490: mol_type = other DNA
tgatgttacattattgatataaattcatgagcttttgcacactgctcaaaagcttccagaagggtttaccatctcagaacaatttgttcacttcacttagaaattagaaatgtgttttggccaataaatctaactttattttgtagtaccaacaaatgaggaaagcttgatttcatagtttgcactgctatataagacttccagcacactggagaaatttatctctcctttttacaggaagtgtgtttgaaaaaagtgtgttagagagttttgaaaagaatcatacttctgtgagataccttttaaggttggaaagacagcttggctacttttgctaacctcactttaggacaggatttaagccccgcactgtgagtacagactgctcttccaacatgttctaaaataagcttgttttggtttttttttaaattattattatattaaacagaacagtgactttgaattacatttcgaatgtttctgaatg

SEQ ID NO: 30654 - DNA, 509 bp, Mus musculus
  source 1..509: mol_type = other DNA
ttcatgtgcaaacggaataaaacttcttaggcagggaaactacactaggaatgtaaaagatctttctaaacactgctggttttaagatctttctaaacactgctggttttaaataaaaggactatgggaaatacagttttcatttttgtgagtctcttgcctcagtctcgcgtgaatgaatttcaatagtgttctaatgcaagctttttcatggtaatgaagcctcaaaccccaatatgtggatattttacctttaggtggagcatttttttttttctgggccccaaagaaatgagaacagcagcagcatgatgttacattattgatataaattcatgagcttttgcacactgctcaaaagcttccagaagggtttaccatctcagaacaatttgttcacttcacttagaaattagaaatgtgttttggccaataaatctaactttattttgtagtaccaacaaatgaggaaagcttgatttcatagtttgcactgctatataagactt

SEQ ID NO: 30655 - DNA, 339 bp, Mus musculus
  source 1..339: mol_type = other DNA
acttttagtgtgtggtcctggcaacacacgtgtaacctaatgggaaaagaaagtattttatttgttttcttcttgttcatgatcttgccacatagcccagagtctgcagtaagttacatgtttctcatgtttcttttgatattaccaagtaactaattactaatagctttattgatgcatactttacttaccagaaaggccatcaaatattcatttaatgagggctttttgttgagttaatgataaccgcaaactcagacaaatagatttcctgttgtggacaatagcacttttgtgtatctgttcagcagctgatgggcatctgaattgctctctgtg

SEQ ID NO: 30656 - DNA, 387 bp, Mus musculus
  source 1..387: mol_type = other DNA
agtttccttaagtgcaggaaaatgtcattaacatttcagtggatcgcttcgcagaggatttaggctgatcagcaaagtgaatcttgccccttttcttttctttctttaaaaacaaacaaacaaacaaacatagggatcctgtagctgcagcctagaggaaagaaagctccagctcccccttctggcggggcgacaacgtgcaccaattcccaatttgggagtgggccacacattcctgaaagccattgtttaccttggagttttggagctatagctctgaagggaacaccagagctgactttgcgagcgcttccccggaagtcgccctccggggtgggggctccagcagaggagggaaggagaggtcgcgccgggcttcgcctccaa

SEQ ID NO: 30657 - DNA, 436 bp, Mus musculus
  source 1..436: mol_type = other DNA
atgtgtatactttatagacctttggatataatctcaccaaatttcccagcatgtgcttcagagtcatatgaagaagtgttaaatcacatttgacctaaacaactgcctgcctcctaggggcaaggtggttatggcacaccgataataacgcagctccagtctaggctagttgcctagaagtcagtgtgacgctgagaactctaaagggagcgcgcgctcgataagtaacaggaggagcggtccccgccgccccgctctcccggatcaccttgcgctgacctagttgagccggggccctgtccgggggcggagcctcagagcgggatcttcccgggagctcgcctgtgattcgctcaggcatcagagccggaagcggccgggaggcgttggcggcagcgcacgtggtgacgtgcgagggagtgcggcgcgagcgcgc

SEQ ID NO: 30658 - DNA, 283 bp, Mus musculus
  source 1..283: mol_type = other DNA
ctgctccagtgtgcttattagaaataaagtcaagtccaggatatatatatttataaaactccttagagaatctgaaatgcatttggccgacctccgaccagcccccgcagtcgcccggcccagacctcagctcgcgggtcccgagcccgaccgacgtccgggtacaggaggccagagctgtcgcccctgagtccgcggcagcagcagccacagcgacagtggcggccgaacgctccagccggaactgagcaccgcccatgaggcgcgatgcctcctcgcttct

SEQ ID NO: 30659 - DNA, 381 bp, Mus musculus
  source 1..381: mol_type = other DNA
tatccttcaggatgatatcctcgaggagaagggcctcccctattccccagcgaggcatggtttctcgcttctctgcggcagagagatcaggccgtctgcacttactgctttcagctcaggctagggacggggacagggccggagccggggccggggcaagggctggggctggatccgagtccggcgtcggagccgagtccagagccgtatctgcggccggagctgggaccggagccgaatccggggcccgggtcgggaccctgacctgggcctcctccttctcctggggtagcagctcctcctacgccaccacagactgcgcagaagcgaggaggcatcgcgcctcatgggcggtgctcagttccggctggagcgttcggc

SEQ ID NO: 30660 - DNA, 406 bp, Mus musculus
  source 1..406: mol_type = other DNA
tagttgtttctatagaaaaccccgcagtgtatcctttcaagaggaccaatgaactttttttcctacgtgttacttaaaagttaaatgcaggaattaccgtggtaatgacaactatctatggctacttatattttcaaattcagaacactgaaatggctttgtatgccttagagatccaaagtccggaaagttcagtcagcaggcgttggctgggggctgcgccggcgctgggggcgtctggcgagctgtagccacgggcgggggcggagccagggccagggtgtgggcgtggcccggcggtccgggcctgcactaggcacgccccttcccctacgccaggggcctccccgcgcggtgcgcgtccgcgtcccgcgcctccgccccgcagctccggccgagccggctc

SEQ ID NO: 30661 - DNA, 396 bp, Mus musculus
  source 1..396: mol_type = other DNA
gtggagaagccttaaagtcctctttaggcccctctgcccagggtgttcttgccttgcttggttacaagaagctttgactctccaaggttcccatacttccgtgcaagggaattccgaaggggaagggctcctgacctccacctggtgggactgtaaatctccatctgggagaagtttctgggctgtccccaaactggtgaaaagtcagtctcgagaaggaggaaagtattactatggttactccctggagttcctaggacagcccccggggttccagcgcagcgagggcgggaagacagcccccgggccagcccacacatcttccgagggcgcgggcctggaggaggcgcccgggccggcgacgcctctcaaggaagttggccctttaattacaga

SEQ ID NO: 30662 - DNA, 287 bp, Mus musculus
  source 1..287: mol_type = other DNA
gcctaggacacagtgagtccgcccaggtatagaatcaggcagatctctgaattcttttgaagtgttaaaagaaaaataagctatccaaagaattgtttagtatcagcctcttatttgaaatccgtcacaactgctctgtaatgaaggttacaatacagtaatgatcaccttgctcagctttgacgaagaagctgatgatagtcatactttgacaggcatttgtaggaagcccagaaatactgcgtgatcactaggtttgctctctgttcaagaagagctcggaggta

SEQ ID NO: 30663 - DNA, 409 bp, Mus musculus
  source 1..409: mol_type = other DNA
cactaaattaaaaaaaaaaaatcacttttgcattgtacacttctttccttttaagataactattattaatcacctggggtactgaattagaggagtaattcaggagttactaacttcttccaagcctttgtgcaaaagttcaagctacgtgtgcaaaagtagaaggacgatatatacatattagagttgtgtatatgcgctaatgaaagtaaaactctcacggcagccaggcctttacagaataggactacaagtcagcaaggcgcctgcgtgggactagtagttcctaggtggcaactcctggggtcggaggtggatcgaagggacagctccctgcccagtcccctgcggccagcccctcacttcggctctacccggaagtagccttggagaggcggtttcctagact

SEQ ID NO: 30664 - DNA, 574 bp, Mus musculus
  source 1..574: mol_type = other DNA
ccctgacatggcagaggcgctgactgtcacaggctgcccaggagacacgacagcccccgaggtcacatcccggggatcagctcccatcgtcctggaccccgtccctggcagccgcgctcatgggcgcggcccctgccgtgcacacggacgtggccacggccgtcgctgccaccaggctccatgacgctcgctgggggacccggcacccacagccccggcagccgccggctttgctcatggccccgcggttccgcgcacgcgcagctgctacaccggcacggtgggccacattgcgggctgccggcggcgaggaggctgcgagccgtgtcgagggcggactgtggagtgaggctggcggccgccggcgccaaactgtttgccgccacggctcggagcaccgcccccagctttccggtgtcgtagtctaggaaaccgcctctccaaggctacttccgggtagagccgaagtgaggggctggccgcaggggactgggcagggagctgtcccttcgatccacctccgaccccaggagttgccacctaggaactactagtcccacgcaggcgccttgct

SEQ ID NO: 30665 - DNA, 399 bp, Mus musculus
  source 1..399: mol_type = other DNA
gcaggggaaaggctcagagattgcttgcctaacccagattcttgttggtttactgacagtcatcctcaatgtgagttttttttccccaaaaatgaaactggatatacatgatttaaaataatgcatgaagaaatgtctgagagataaatctaagaaattaatggtgattatttacaagcgacaggacatattcagaggtgtgtgtgtgtgtgtgtgtgtgtgtatacacacacatgacctgaattcttgtattcatgcttctgtttaacaatatgcaagtgcagatacatgcgttatgcacaagtcattttactgctgtgaaccaccttggcagggaacatggcagcaggcaggcaggcaggcatggtgctggaattaaggacttacctcttcaaggct

SEQ ID NO: 30666 - DNA, 532 bp, Mus musculus
  source 1..532: mol_type = other DNA
tccacaaagaactggccctctggccagggacgatctttttcggcctcgccccttctgtccacagaggcttgggagggtggggaaagcagagcagggcatccgcatctttcctcgggtcgcagaagcgtcttcctctttcatcttgcaggcgctgcagctgggagacaaggtggagacgctcagaggtgggtctcccggccttggctgcggctggctcttcccggcggccagggaggggtagggcgaggctgtgcagccttcccgtcccagagctgtcgatctgcctgacagcctggaaggccaggcaggatacagccttcctatctgggtctgtcctccagtttgcacgggtgcgcgcgaaatcacacacacacgctgcccagcccctcttccccgagcgccgcgcccggcggcctccgcaggccccgccccgggggaggagagcgggccgcgcgcgggagccgggcaggggaggggacgggcggcgggggagtgtctggctgcccccgcccctcgagtgagcgcctgggcg

SEQ ID NO: 30667 - DNA, 417 bp, Mus musculus
  source 1..417: mol_type = other DNA
atttccaaaactgtaatcttgaactacagaatacctatttggattttaaaaaaaattttcatttttgagatttgacgatttccatccattaaaaatatggttattcatcaaagttttgtttcaacacaagattctaccaggctggcctcgaacaagattcttaatctactgcgttttgaatcatggctttgtaaccctcatgtttttttctaatcttgaaagatggacttgctttacaactgtgttttaattttaaacttcgacagcaatccttcatttctcaagctgaactaccctacaacctgcccagactggaggtggtgaagaggcggagctcatccgcgctggtgccggtccctagtcagagggcgtggcccggccaactctccgcccagtgtgcgcggcgggaagcggaac

SEQ ID NO: 30668 - DNA, 306 bp, Mus musculus
  source 1..306: mol_type = other DNA
acagtttactctgttatgcttaaacattttgtcaacctagcttactgcaacctttcttgggaagaaaaaaagattcggagctattattttgaggtctaaaattctccaagtcttcaatttttcagaagttgtatgtctatggaatacaagcggtgcattataaagccctggatacatcgcgtcactgtgaagaacttcagactgcggttagaaaaagcagaataaattttcttggggttgtaccgttatgtatacacacacacacacacacacagctctggaggaagccgcagacctcagctgtac

SEQ ID NO: 30669 - DNA, 301 bp, Mus musculus
  source 1..301: mol_type = other DNA
gacatgtgtaaaacatgacattcagactattgtgttaagataaaattcttttcagcattgtcctttgaaaggtgtgtccccacagtgcacaactcacagaggctccttatggcctctgtcacaaactgtcagagccgaccaccttttgtttaaaaaaaagaaaatcgaggggactctgatttaattgctgtaaattccaaatatcccatggcacacatggttctattttgtcacctggtggccaccaggaaaccccgacggcggggaggagtctgctgccgcgggctcccgggctgcctgc

SEQ ID NO: 30670 - DNA, 423 bp, Mus musculus
  source 1..423: mol_type = other DNA
tatgctttactcagcaatgcttgtctcacgtgaacagagccacgcatacaggtagcatgggttccccagggaacttctgagaggaaggaaccctgagacctgagtccagttcccaccacccaggtggtggctcgacacctgcattcatatataaataagcagggcaaaactctcatataaaataaatcttttctttaaatgttaccaaaaatagataggtagatagatagatagatagatagatagatagatagatagatagaagtccctttgtggacttaccttcatctctagctgaagccactttagctcaggtaagcctggattctagtctacatgtgaaagagtgaggttttattctttttatccaggctggaataagtatgcagacatgtatattttcatctttggagtagctacttt

SEQ ID NO: 30671 - DNA, 537 bp, Mus musculus
  source 1..537: mol_type = other DNA
tccaggaactaactacttattttaagatgtgatgatctagaaaattcttttccctccctccagatggagagaatacctgacaggtaagttttgttccgtccttggggacctcccccggggaaggggctctcagctcgggaaggcagcccccggcggcgcacggtccgaatggagggctccgatcactagttccgagctgggcatcactttgcctcatactcctgcagactgcaggggactaggttctgcagccaagcggctggcaccgacagcggcggcggcagcagcactccaggccacgctcccgagggcagaaaagcgtttctatgggaacgtcccgggcatcacgtgatgctccccggcgaccaatcgcgtctccgcgccgcccctttcctgcagcgggcccgcgcgtgcgcggtgcgtcccgcgcgctcccctgccgacgcgcgctcccgggggacgcgggggcggagcggggggaggccgagcccgctagcgcgcaggcccagaagcttgcaagccgcggctgccggcgac

SEQ ID NO: 30672 - DNA, 448 bp, Mus musculus
  source 1..448: mol_type = other DNA
tggatatatgatattttattaaactaatgtattttaggtaattttcattatcaattcagtctacctttttgtcaatccattttaaaatataaagatattgtctctggttctaacagatggaggaaccagtgactctgtttctccttttagggaaatgactgtctgttctgacagtcaagctgccacctacaggtcgtctgattgccagaatgttaatacacagtgtagtttcagtattatactttgttggtaaactgcatcatttggtgacctaataattcttaacacatagtcttaagatttcttgaatactagacaattatctcactggaaagtgtaatctatttgactgatagaactgaggtcaaaacagtctttccagtatttttaccattggttgacatgtcataatgaccatagtaacttttgttactgtgcagaaagtcaa

SEQ ID NO: 30673 - DNA, 369 bp, Mus musculus
  source 1..369: mol_type = other DNA
cagacatagaaatactcatgtatttggaaccttgcttttcctcagaaaagttttgtttaaattaactagtaaagaaatcctaaatctgtgtttacagagactagtgaactcattagtcatcatgaagtaagctcagacctgaatggacactgaagattctccatcctaaaaacaaaacagtcagtgtagtggctgcaccagaaattcaaagtctgaggccggagtactgggagttcagacagtacaggaccaggcccagacctgctgaggtccccctgacctgaggctcccacagagggtgtgggcttagaggaactgaccagcccacggcaggctgctctgagaacgatggggaaacttccaagtcgc

SEQ ID NO: 30674 - DNA, 509 bp, Mus musculus
  source 1..509: mol_type = other DNA
tcggggtctcccccaatttttgctgggagagtaagggaggaagaaatggactttcctactcggataaccatttcgacttctggcttttaaaaaggcagggaatccaagtggggaatcctgggcagtttccagggaacccgtttctgggtcaccctgtccccccccccccaaccttctcccagagtgcccggggaggggcggctgaaacgggggaggcctctgcgtcactctccggcgcgcgaggggacgacccgggcctctgggctcgatgtccgcggtgagccgggggccgcccccgcgcccgggaggaacaggacggagccttaggaggccgccgggcaccagcaccggatcgttcggccggcgcgcgggcaccgcaccgctcgccgatcccaagagggagcgctctgaagtctcgcgagagcctccggagccggagcgtccctgcgccccacaggccagagccgcagccgctgccggagccgctccccctcccccccccccacccc

SEQ ID NO: 30675 - DNA, 238 bp, Mus musculus
  source 1..238: mol_type = other DNA
cccacctgtccaggagcactggaagcttaaatgtcgtctaagccagagaggctttctcagactccgtccaatctgctctgtcagacatgtaggaatttcgtaatacttagccttactccatgtttagaattattgaaaagaaaacctatcatttgtcactttaaatattaaagctcatgaaaaagaaaattcataaaatcaaacatttttgaagtcggatatgctcctttccttgtag

SEQ ID NO: 30676 - DNA, 412 bp, Mus musculus
  source 1..412: mol_type = other DNA
tctctgacagtcacttctgcattattcactgtaggagaaggtgtgggataagccaagatttgcatccctaacaccgttattttctagcggggccagagagaatgtcgtgaaaagctctgagatgttaaaagactaagaaaccttttctcttatgagcagaaggcttctgtgaactagttcgtaacagtttaatgagtttgctagagcaacctttgggtcacccgatcgatcctgttgggcccctcagcaatccctcgccccctccggttttgaggaaggggtgagttctgcccaggaccaccccgggagagaaccacgccctcggcggggccaggtgtgctccccggttgcggaggggggagcccggggccgcagcgagccaggtgagtcacgcccctgtcaggactgagtc

SEQ ID NO: 30677 - DNA, 211 bp, Mus musculus
  source 1..211: mol_type = other DNA
gatgtcagagatccactcagaacgcgtttctgtaacaccaaggtacaggactggctcctgggtgacagaaccaggtctgcaactatttgccatcctgttatccccatggtgactcctgggctccagacaggatcttgctatatagtgcagctgtgtacatccagggcacacagagtctctgagctgagttctgtcacaagactgaagcaga

SEQ ID NO: 30678 - DNA, 347 bp, Mus musculus
  source 1..347: mol_type = other DNA
agccctgtgttccacagggatccagtcccttggacacctcgggatctctcccctcagcgtgggcagggcttgccccgggatacaggaggcaatgcccgggacggctggggagggcgaggtcacgcaggccaccgcaccgttgcgctgtgttcataccctccagggcaagatcctctaaggtacaaccgccctccaggccgcccccgccgccgccgggagtcgctggggaggacgcgtagggcggggagcagctcctggcccgcgtgagctgccgaggaggccggccttgggttttctccaccgccagatcccaccccgcctggggcgcgctctcgagtgcgcgctcg

SEQ ID NO: 30679 - DNA, 243 bp, Mus musculus
  source 1..243: mol_type = other DNA
caacatgaataaaattattttaggccaggaattcaaggccagcttggactattatataaacacgagctatataaataaatgaataaataaataaatgacagtgactggctacaggatagtcatactcagtgcctgtaggcagccgggcgcctaaaagatggcgccggcctcctgtacactgtcgcgcaggtgtctggcgccaacccctcccgaggacacatagctctccccagtgctggggtg

SEQ ID NO: 30680 - DNA, 281 bp, Mus musculus
  source 1..281: mol_type = other DNA
ctcagctcgggggctgtgcgcccagcacagaatgctgccgtgagcaacatttaggaattgataagggttgcagtactgttgagcagctggtaataaccagctggtcccagtcacagcaggtaatgaaccgccccattgagtggaattcaaggtcatccttggctacctagggacttcgtagcttgcctggccctgacgagctcctaggttctgccattaaaggatcaatgggcggggtcagaggcaggaccccgcccctatccccgcctctgccacgcatg

SEQ ID NO: 30681 - DNA, 434 bp, Mus musculus
  source 1..434: mol_type = other DNA
aacaagagcaacaagtgcttttaacttctaaggtttttgtcttaaacatagaccagactgttttgaacttacggaggtctgggtgctgtgactggaggcaagtgccaccatgctacacactgcctgtttgtagaccaggctggcctcgaactcagagcctgcagcattttgatgaagcagaaatacttcagtccttgtattttaacatacagcacccataaataattgctttggcatattttaaagtgctgataaactctgaaaggatttgaaactatcaaaaaggagatccatggtggcatgtctctaaattttgccagcagatctcgcgcgacctcaggtttggcgcccggaagtggttcaagccccgccccctcggggcgtgctggctccggagttggcctaccgcgcaggcgcgagtcgccgactccgcc

SEQ ID NO: 30682 - DNA, 248 bp, Mus musculus
  source 1..248: mol_type = other DNA
aataatatcagatttagaactaatgattcattgaaatctttaaatactgagttagcactgactgctcttccagaggaccagggttcaattcccaggcgggcgtggtggcgcacaccttgaggccagcctggtctaagagaagaaagaaataatgccttctttctaactatattcggagttatatctccagaaccaatatataagtttgctttacagttccaaactgggaatttccttgaagaaagaga

SEQ ID NO: 30683 - DNA, 327 bp, Mus musculus
  source 1..327: mol_type = other DNA
cctgaagtgctgagtcttcatgataaattgactatgccaataaattaatatggatcactctcaaaaaagaaaaatacttgtttcactttcaaaagtctttcttttcctgtcctggaactcactctgtagaccaggctggcctcccaggctggccttctcccttttcctacaaggcaatgggcaggactgagtctagagagccaagtggctgctaggcagccaccaactagtgcagtctcgggattccagccggtgaagcagctccccggcccgacgtggaactacaacccccaggctccccgcgcggccccacgtggtcccgcagcg

SEQ ID NO: 30684 - DNA, 217 bp, Mus musculus
  source 1..217: mol_type = other DNA
cagaccatcatctccctcccaagaaggccgttgtctgtctggccatggttgtaaacagaaccagtgactgtcagcccgtggctggtgccatgaacccatcgaatgaatgggcttagctatgcacagggtgacaaaggacactgattgagaaagtctgccttggtgtgacttcgcagagccaccagccgctccggaggtagcgcttggattcaagaga

SEQ ID NO: 30685 - DNA, 283 bp, Mus musculus
  source 1..283: mol_type = other DNA
tctcataattatacagcagaaacatgatgcttcttagtagcaatctcgaagggagctcccgagggccaagcagttgcttagcctcaggatcacttaccggttacagagctgttgttactgttgctttccagcaggagcaacactataactatagagcattagagattagccccaagtctccgaccttgggggtggggacagccccgtgcgcttgagatgaggccctgggggctaccagtcgtgccccaccggcgacgttcgtccccgccccgccccacgggga

SEQ ID NO: 30686 - DNA, 176 bp, Mus musculus
  source 1..176: mol_type = other DNA
aatgataacgaaggcaggagcgtccttctctgtgatgtagcccagtttccaaagcacagcaagctacaagtgctcagaacagttcctgaagtacactcaagagctatacaaatgtttatctgttcaggtagcataggaatagggactgccagggactacttcataggtgcttgtgg

SEQ ID NO: 30687 - DNA, 190 bp, Mus musculus
  source 1..190: mol_type = other DNA
tcaaagtttaaagattttattataggcacattttgtattataagtggcctcaaatcatttttagaattgggctttggaaatcataaaaaataaatatcaaaacgacccattcggactagctggttcttgttgtggctcaactctaaatatgagggaacggccctggcagctccgctcagcggcggtatga

SEQ ID NO: 30688 - DNA, 217 bp, Mus musculus
  source 1..217: mol_type = other DNA
atggctcagcgactcaccaaatctctctcagcctgggtcggggcaaggatctggcgcagctctgaaccgagacaaatgctttggacaacaactttggtgcttcgtattcagaatatactgcagatgtagatcactcccccgatgaggaaacaaaattgtgagtcagccatttatgaatgagaaactcaaagctgagttcgtactactttcttttttc

SEQ ID NO: 30689 - DNA, 297 bp, Mus musculus
  source 1..297: mol_type = other DNA
tcttccactagcagcctttggatgaagatgtagaactctcagatctgcctgcaccatgcctgcctggtgccagccagccccaattaaatgttgttttattaagacttgccttggtcatccccacagagtggcactattaagccagtcctaattaaatgtccttataagacttgcctgtgttcacagcagaacacaggcgacttgtgataacagagaaggcacaagcctatcatatctgtcctctgaggtcaggggacagcccttgtcttcctccaggaggtgatggctcagcgactc

SEQ ID NO: 30690 - DNA, 583 bp, Mus musculus
  source 1..583: mol_type = other DNA
atcttcaaaatttctagaaacagtaatttatattttcattctttaaaattgtatatatcttccgcgatctgtggaagccagattagacattactatgtaacctcagtttttctagagctgtagaccaagttggcctccaacatccaacaatgccagatccttgacattcttgcaatgtctctcattaagtcattgatgtataaaggccttatggtctttcatcttaatgtccaatccctatcagaataaaacagtgttagaaaaaaaaagtaataaaacaaatttaagacatcagaaattttatggtttaagtcagaggttctcaacccatgggtcgtaactcctttggggagtcaaatgaccctttcatgaaagtatcagatatcctgcatatatgatgtttacattatgattcataacaatatcaaatttacaattatggactagcaacaaaaataattttatggctgggggggggtcaccacaccatgaggaagtattcttaaaggtcacatctgtggactgagtcatagaaggtcttagacagacttgggaagacatttccaatggagttgagtcagat

SEQ ID NO: 30691 - DNA, 546 bp, Mus musculus
  source 1..546: mol_type = other DNA
tcttatatgcacgtatgaagatgttataatgaaacctgctactatttataattaatatgtgctaataaatcattttttcaaaatgattaatatatgttaatatatgttgatatatgatgttaatatatgatgatgtgttaatgtatgatttgaagatgatatgattatattaagtcattgataattagaaaatacaaaattataattttttcacaccagcaatgattaccaaataaaatagactctctctctctctctctcatgcacacacacacagagagtttctctgtgtagctgttctgaagtcataagagcaaaacctttacaaatggtataggaggaaagcatgcctccccagatactggatcttctagcagctccatttcaaacattgaacctctaggaattaaatattttctatttataagccacatggtctaatgactggtattattcaaagtagtttgcaccctgaaacagctgatacccaagcattcaatgggtagctggttatcaatgagccaccctaagtttgggtttcctcca

SEQ ID NO: 30692 - DNA, 338 bp, Mus musculus
  source 1..338: mol_type = other DNA
cacatgcatatgcatggtggtgcatacctgctgctttagcacttaggaggtagattgggatccaaagtttgcatgcatgcagcttgtattactgaccagatgtacatgtctcaagatatctgcatctgcattttacattctgtcacagtgcatctagctaagcaacattgaggggcaggtgagcagctttgctgctggccctcagtttcctgttgcaaaagaaggtacaaacccaactattttctatgagttaaaggctagtcttggcaaacaagaactataaatatttgtcttcagtacagactgagtcacaagagggctcctgtctggaactttcc

SEQ ID NO: 30693 - DNA, 364 bp, Mus musculus
  source 1..364: mol_type = other DNA
aaagccaggggttccccccgagattaaaggcgtgtgccacccccgctttcccatctgctttattttgcagatccaaggaaaatcctctttatagaaacatcacacttgtgtttaaaccgtgaaatcacagtaggaagatagggtcctccagggggttctggattttcagtgacagatctcctcgaaaacctcgactctgaggaagcctcagcctgggtccgagggtccgaacgcaagctgcaaatgcatcctgcaccttcgccctgaggctcccgcacagttcctcggccaatggcctcagggccccggcgcgcagcagctgatgggcgcgggtttcctggcctaggtcagccaatcaaggcga

SEQ ID NO: 30694 - DNA, 212 bp, Mus musculus
  source 1..212: mol_type = other DNA
aactggaggcaggaggtaacctaaatgcctggcaccatactctgtcagtgtgcaccaccaccgcaccgctgcaggttcagaacttaggtctgagaattaccagcagacacttgggaataccaggctttctctgggtatccttcctactcagcaccaggcaggatgagaatgcaccagaggagaatggggcaatgggggcccgtttcccctct

SEQ ID NO: 30695 - DNA, 428 bp, Mus musculus
  source 1..428: mol_type = other DNA
cagccaatgagaatcaaatgcactgataagacgggtgcgatttaatcttaaccctcgacttctcagagtaggcaacgagggactctgaggaccgagaatctccatcttctacggctgggggaggatccccgcttcccgcccccggaggagttggggcaatccactttgaaagcagccttcccaagtcggtgccgcgaccctcgggcccgcgtagatcaaggcctctcccagggggccataccccggcgagggtagaggccggggcgaccgcgggaggcacagcgcgccgctgctgcctccgcttggcgcggcctctccactgcggagcccgccggccactccggggctccggctcgggagtggtgccatcaacgcttaggaccaccagccaacggcgcctgcctcccggggcggcgcctccggccgca

SEQ ID NO: 30696 - DNA, 439 bp, Mus musculus
  source 1..439: mol_type = other DNA
gactctgaggaagcctcagcctgggtccgagggtccgaacgcaagctgcaaatgcatcctgcaccttcgccctgaggctcccgcacagttcctcggccaatggcctcagggccccggcgcgcagcagctgatgggcgcgggtttcctggcctaggtcagccaatcaaggcgagtagagcagagtgtctgaacagcacgccggccggccaccgctctggtaagcgcacggagtgtacggccgcccgggctgtggggtcgcactctacttcccagctccagtcagctgctgtacggagcgggatgcagcgctcgtgcctcccgcgtgtttgcagcgtgcggcccgggccggctctgcggccggaggcgccgccccgggaggcaggcgccgttggctggtggtcctaagcgttgatggcaccactcccgagccggagccccg

SEQ ID NO: 30697 - DNA, 251 bp, Mus musculus
  source 1..251: mol_type = other DNA
aacctgaaaacccagtctcttctagaagactgggctttttaagtgttgtgcaaacacagtctgattgatcaggatggtgagaaagaactctacgtaaaaataatctttaaaatagtgtttattgattttagttcttagtcttgtcaataaaaaaagagcttgaaatggactcactaagaagcttggagacaattttaatgcttaggtcctaaccaatcagaggcgtggtctttctgaccagctgactgaca

SEQ ID NO: 30698 - DNA, 283 bp, Mus musculus
  source 1..283: mol_type = other DNA
aagcccaccatgatggtgatgctatcctaatcctcacttttgagatgaggagctaagggactcagatatttaatagcttgcccaaggtcaacctagtgggtggtaagattcaaacccagaaaattactattttaatgtcctaagcactcactctaataaaagaaatattagttttgagagctcataattcagaactactgagccttactctgttcccgtgagcatttcttgagccaataattgggccaataaatttcctgaaatcccaccacctgcaggagga

SEQ ID NO: 30699 - DNA, 263 bp, Mus musculus
  source 1..263: mol_type = other DNA
caaagacttgaggactactacagtcttgagttctaaactaaaatgcataaaagagctgtttgcttcccagtgtatgagcctcacactgcgccttgcacactggaaagccagcagcccctctggccagagaccttggcctcagcagttgccagaggccaccctaggagctgggatctcaaactgagcatatgtacgggcacgcgagcacacacacacacacacccggtatgcaagccagagccaaggccagccggctgagctgt

SEQ ID NO: 30700 - DNA, 409 bp, Mus musculus
  source 1..409: mol_type = other DNA
gtcataggacacttagcatgaagcaggccaattgtcccattcactttgaaaccttcaaggaaaccttcagaggaccgatcaaggctagagtagagagggacgggtgctatctccctcaccctgctctctgctggagtcagcgcagaggaaggcttgctgactctgggagacattttcaatgttctgagaaagacaggcgagattcaagtctagcaggccttggaaaacccagtttgactcaagacccctagagttctcagcggggcccctggagatcctaggagagggcagtgctgggctcaaggatcaatatagtgagtgctcgagtgctcgtcggatcacttcgatccagtgcttcagtggaaatctaacctggttactacacagatgtgtggataaacccagcctt

SEQ ID NO: 30701 - DNA, 674 bp, Mus musculus
  source 1..674: mol_type = other DNA
actcattcgctaagctaaacattaacttagtttagaagcgtacacagtgttaggacctctgaccaatgtgtgccacccacccagtgcttggtcaggggatggagtcctgcctgaaattccgagggcgattctagctttggcctcgcgctcctctccctcccatcccaggaggaagggcggaggaccccagggaggctcggaaggcgcctggagttcaggaggctgcacagggacctgccctgcgtgggacttcctcctgctcttgctttcctggccgggcagagggggaggggaggcttcctgcgccggcgcccgcggcgggccccggtgcggcccagccaaagcgcaggcccaggctggccagacgccgcgggcgggcgggcgggaggggggaagggggcgggtcctgccgcggtcggagtttgagccgcagccgccgttgccagggttaccggagcgctctggcggagggggaggcggccgcggtgaggggccggcggtgcgcggcgggcggggcgggggcgggagtcgctgcctggtcgccatgggaacggcgcagccaacccccgggccgtgccagtggcgcgctgccagggtgcgagggtattgcaggacagcggcaatctgctgcggccgagggcgtaacaatgcgccccttctggagcgcgggcccc

SEQ ID NO: 30702 - DNA, 529 bp, Mus musculus
  source 1..529: mol_type = other DNA
caccagtacaatcttgtcatggtccttctgacagggacttatttgtatttttagaacttactagatttcccccaaaatagatcagttacttattgtgtgtgtgtgtggggggggggtattaaacaaacagacaataacatcttccatttaaaatatgtgataagttgtacctgaattctgttccttcataaggcagatgtagttaaatgctgagtataacgcaacataatatctcaaatatatcgtgctagttgtcatatattgtcatcgcttccatttctgccaagaatgaccagaaattacagctgaaacagctatgagcagtctgaattttattgtgcagtagattccagcacactaaacgaatgaacagtcagtgtgctaacaaagcggaatcctttaagagcttgctccgcgggactagaacaggccctggggcccctcctctgcctctgattggtcgggggcggagcacgaggcacatctgcccgcccagaacggttagcggcgctttgtgtatataaggtgc

SEQ ID NO: 30703 - DNA, 266 bp, Mus musculus
  source 1..266: mol_type = other DNA
aggggtttcaacagtcctgtggaatacacagatttcttttaaagggccaagtttgaccatgaaatcaagcagcgacccctcagcatagcggggtctattgttctaggtaaaaaaaaaaaataagttatcttagaacccagggtgcaatttcctttgtcccttggttaaaaatctaaactccaagaaagaaccaaaggcaataaattacccatgtcattaatttttgaactaatgacaccagatatatttaccagttcttactggag

SEQ ID NO: 30704 - DNA, 458 bp, Mus musculus
  source 1..458: mol_type = other DNA
tcagactcatagagatccatctgcctctgcccaccaccttacatcttaaagatgacaaggagactagaatttggctaagtcacgtaacctctcggagtcattcataaaatgatgataaataataggaatgtgacagtgagataacttagaatcctgtccaatgctcagtcactgctcagtgattatcaataatcaaaggtttacgcacagtgtgtctaattgtgccatataaagtacaaatgtccgggatctgtattgattgaggatgtttatacagcctttacacactgcatgacctaagaccttaccataatcagatcttttgagaatcctttagtgattagatgggcatgtaaagagccccgcctctcgggcctagtgacgcaagctaggctccgcccctctccggcgcagggcctgggcgatctgggtcacgtgagcctgagtgcggaagtgag

SEQ ID NO: 30705 - DNA, 326 bp, Mus musculus
  source 1..326: mol_type = other DNA
tagagatcaggctggccttgaactcagagatattcccgaaagcatggtttgggggaacaccttgcctggttctttttatgaaagaaactcttccaagctggagctctgcagttaaaacgaataaagtggaaactcctttctaattgttaaaatataatccttaaaagatgagcagctgtcatctggtcatctggaacttaaactttgaatttaagttctgattgggaaaagctatcgcccatctgccttgaacccttcaaagaagccagcaagtggctccaattaggagtagcatcgatctgtgagactcatcggcatgcccatat

SEQ ID NO: 30706 - DNA, 409 bp, Mus musculus
  source 1..409: mol_type = other DNA
tcaaatggtagattatcattgaactttgtacttataactaaattgtttatatataagctcacatgtaatagagttcaggtgccccctggagacaatgagtacttgaattcaacattctgactccctcacgctatagcccaagctctgcaggtgtgaaccaccacatctggctggctgagccgtctttaatcaatgcatttattctttgagttttgagaatcagaattcaaagatctctatatgttgaaagttaaattatgactggaagtagatcctggaagttcatttattaatatttgaaaatctctttaaagtacattttaggattattttaaatcctaacaggctgtgtatttgccacagggttttaataacttgaattgaaagtcttacagatgaggctggggag

SEQ ID NO: 30707 - DNA, 244 bp, Mus musculus
  source 1..244: mol_type = other DNA
ctggctgcacagctgagcaatgtcaggggacacctgccctcgtccagcctggctgtgaagagcgaacgctgaaagtcattggtttgagtccagtttatttctctccaccctgactctatgaggcctgaattgactctggattgagagtgacttggccctgtgtctgagatgggaccaggagacagcaccgtgaatctgtctgggcacaggcccagatgtgcttctgcccagggaggaaaaacag

SEQ ID NO: 30708 - DNA, 387 bp, Mus musculus
  source 1..387: mol_type = other DNA
ttgtcacaggtacaatacttccttagcaaacctttgagtctcatcaaagttgtaagagttaaaatccaaggtgagacctgggctccagacctggatacatacacaaactttctggcactgacattttaaattgaaagcatttatctttaagggttttatgaagaatcaatattaaaatggaaataatatttgcacagttctctgcaaatatcagcggattattgttgctccagtaccaatattaattgcagtagcaacattgttgtttttcccaggcagaccaggggaggtgccttcccacgtccggcccaaaggggcggagcaagaaggaaagcctgaggccacgccccaccccgccccctccgtcggagcggcgtaggcggttac

SEQ ID NO: 30709 - DNA, 319 bp, Mus musculus
  source 1..319: mol_type = other DNA
aggacatccttgccattgactgggataatagccccagaccttggctctgacagacgctcttgcctttttttttttttttaagaaggagagagaaagacatggcctgtggccacattcctccacataatagcaggcatctaacaggttatcatttcttcccttaaagatctcaaaaataaagttagagacccaaattctcaatttggaaaattctctcgtgatgtcagcgctcagagcccggggaggccaaggtgaacctgggccctggcaaagtttggggattctgttttaggaaaacctaaaaataacctggtcaaat

SEQ ID NO: 30710 - DNA, 314 bp, Mus musculus
  source 1..314: mol_type = other DNA
cactcatcttaaagataaataatagtttattctggagtcacttcgagtgactacaaatttaggttaccccaaattccaagttccaatgtggaaacagtttcatatgaagatagttgaattcaaagctactactactactagcaccactactagtactactagtaacaacattgatgtgactgaaaaacgtgcttttcgtaaaaactgatagcaaatgtacacggtctgcgtgtagacgtaatgaactttgtgtatgcatacactttgaaagatctgttcctttccggcagagctattctctcaaagcgctggga

SEQ ID NO: 30711 - DNA, 335 bp, Mus musculus
  source 1..335: mol_type = other DNA
aaagctactactactactagcaccactactagtactactagtaacaacattgatgtgactgaaaaacgtgcttttcgtaaaaactgatagcaaatgtacacggtctgcgtgtagacgtaatgaactttgtgtatgcatacactttgaaagatctgttcctttccggcagagctattctctcaaagcgctgggatgagttccggagtttgtgactccgaagtcccgcaccgcggccgccgcaacccacgctagcggagcaggcggggccccgtatccaccggcgcgtgcccgggtgcgcgtccgacccgccgagctcgcgccccagccgcacgcgc

SEQ ID NO: 30712 - DNA, 251 bp, Mus musculus
  source 1..251: mol_type = other DNA
ctttaagacacccatggtactttagatgagaaataatttcgaggcaaagttagtttttggcagcgagcagccgcaaagctgcggttcgggtcccggtggctcgggggtgacccgctcagccagaagatagactctggctcctcccgagtccctcacccagggttgcattcctgcggaaccgtctccggacagttctcgcgaggtttggcgagtctctcgcctcgcgccgccgccaccgccactgccgccgg

SEQ ID NO: 30713 - DNA, 441 bp, Mus musculus
  source 1..441: mol_type = other DNA
ctggtgcatgactactcagtttcttagccaactgtgggagagggcgtcctgtcccctcgtaggaagccctccagcaatagctccctagacggtggggcctccggaggcgtgcgtgcttcgaattcccaatgtgaaaactgcgagaaggccaacggactccgcttccgtaggatacgggggccgagagcggccaaacgttgccccggccccctcaacgacctcgagtgcggcctgaggtcccgggcggcactcgtttccggacccagctcggaggtctggctcgccgggggatgggaaccgcggagcgcccaccagcaccgggaccccggctctggcagctcacacgctcgcaggggcggtcccgggagtcggccccgcctcggggcggagcctcttagctcctcctcctcctccggggcggaggctgttggtgcgcggcag

SEQ ID NO: 30714 - DNA, 364 bp, Mus musculus
  source 1..364: mol_type = other DNA
cagtctcggctgcgggctcgggagcgcgcgcggcggcgggcacgcggcggcaggcgcgcccccgtggaggccggccccgctccggccccgcctgggtcctgtgggcgcgcactcccggattgagtccacccggaccctcaagagggcggcggctaagccattgtcggagccccactgaaaatcctgtttttaagttaactttttttttcaccaagattgggaaaacgagaacagagtctggtctctgccaaagtagctaaaactactgaaacaaaacaaggttctatttattagtaaagcttatatatgaactatagttttagtactcggatataactgagtcacaggtggttccagtaaccta

SEQ ID NO: 30715 - DNA, 317 bp, Mus musculus
  source 1..317: mol_type = other DNA
taggttactggaaccacctgtgactcagttatatccgagtactaaaactatagttcatatataagctttactaataaatagaaccttgttttgtttcagtagttttagctactttggcagagaccagactctgttctcgttttcccaatcttggtgaaaaaaaaagttaacttaaaaacaggattttcagtggggctccgacaatggcttagccgccgccctcttgagggtccgggtggactcaatccgggagtgcgcgcccacaggacccaggcggggccggagcggggccggcctccacgggggcgcgcctgccg

SEQ ID NO: 30716 - DNA, 644 bp, Mus musculus
  source 1..644: mol_type = other DNA
aaaatcactgttatgtggcttccaaataaaaactcaaaatcgattttttttttttttagggctaggtatagcttattggtataccattcacgtgaaaattcaagaatacaattttaaagggtcaacaggtgaataaaaattttaaactgggtaaaagcaatttcataaaggtccatgaaactataattttgcagaattgcctttctgatcatttctcctcccagggacatttgaaaaggagtggcttcccaaagcctctgggagccaggaccagcgcccccggtggtgggcaactggccatcagcagcttggcacaggccactccaaggccaaggacagagacgtcccccttctcctcctctttggtgccttcagccaggaggcgggagtgacccgcagcagctgacccagctcgggcactgcctctccgacagccctcaggacacaccatgggcctggaggctggttggtggcacacgagcgaggacgcaggcggcggccccggcgactctcaactgccagaaggttgggccatctacgtcacacccagagcccccatccgggagggaaggcggaggctcgaccgcgacagcagtgacgcgcctgcgtacggagctcacccgtcgcgccgcggacgacgggaa

SEQ ID NO: 30717 - DNA, 668 bp, Mus musculus
  source 1..668: mol_type = other DNA
agtgtggtggcccacacccttaatcctagcgtttggccagtctagtctacagttccaggacaggcagagtttaaaaaaagggcagctgtctccttaccttctttgtagttaataaacaatgctaaatgaagctccaaacatgactcttgagtcatctgatagactatttgtgaaaattctagtaactgggaatttgtctaagtttgagtaacaacttaaggtcattatttaaaatactggaaaaaggcaaatacttttaagttttttttcaaaatcactgttatgtggcttccaaataaaaactcaaaatcgattttttttttttttagggctaggtatagcttattggtataccattcacgtgaaaattcaagaatacaattttaaagggtcaacaggtgaataaaaattttaaactgggtaaaagcaatttcataaaggtccatgaaactataattttgcagaattgcctttctgatcatttctcctcccagggacatttgaaaaggagtggcttcccaaagcctctgggagccaggaccagcgcccccggtggtgggcaactggccatcagcagcttggcacaggccactccaaggccaaggacagagacgtcccccttctcctcctctttggtgccttcagccaggaggcgggagtgacccgca

SEQ ID NO: 30718 - DNA, 377 bp, Mus musculus
  source 1..377: mol_type = other DNA
ggcctgttaatcccaggagaatcctgagtttgactctgagacttagaatgagttccaggtagtctaaataaaggaaaacttttaaagatttgtttatgtatatgagtatacactgaagtgtcttcagaagcacctgaagagggaaaacgtatagagatacatctacctctgccttctggatgctgggattaaaggctgtatcaccaaaccccaaaataatagctatttttgcttctaggtgctcataacaacttcatgtgggtatgaagctttgaattctaggagtccattttaaggtcagagtctttgagcctgtttacagccacttccagggactacccagcattccgcgggttcctccctgcggagctcacgtc

SEQ ID NO: 30719 - DNA, 398 bp, Mus musculus
  source 1..398: mol_type = other DNA
cagtctagggactaaaacttctctgcatagaagtaacagtgtttatgctttgactatttggcccatagttttaacattttatagggaaataagaatagtgacagccagggctacacagagtaagtcagactctactctgagtgctgggatattttcaaaaagtgtgaaaaacatgggattttataataaagggaactaactcttctttaaagagagaaaatgttttctttaaatgttagagtttctaggacctgagttcagatctccaggttcagcagcgtaccctgtctcacaggtcatctgtctagttctaataagctccccagaagtgctaatgtgaggtcctgtttttaaaaaagaagttattgtcttaaagtttattaagaagtgcctaatgg

SEQ ID NO: 30720 - DNA, 379 bp, Mus musculus
  source 1..379: mol_type = other DNA
agaaaggaattctggcctgagaagctttggctaggctaggggtacagttcacaggcacctctcagttgtaaagcacttgttgccaagtctgaccacctgagtttaatccctgggacccacagggtgtaagatagtatggacatctacatatacatgcatgcatgcatgcatacatacatacatacatacatacatacatacatacatgtaaaaaaatgaaggtagctgcagcctgagtgaggagcaatcctccttgcgggttggggatccccatcctcggccacctggaggagccaggagattcaaggttgggtacccagccagtgctctcagagccggggcgggcagagcagcctcacgtgggccggcagggccaccg

SEQ ID NO: 30721 - DNA, 503 bp, Mus musculus
  source 1..503: mol_type = other DNA
taaaccgaagatataaatcctttctagttttagttttttagggattcgatctccagctggggcctccacctccagagagctaggctcaacaggtgtatacagttaagggaaaggtattcatatcctgaggactcctgtcaatctagtttacagtaattctcaagaatcagactcgctcttaatttcctggatccgcaggatccgcatgtgcctccgccgcggtccccgccccccgcaggtgcctgggggcggggcggggcggggccgggcggcgccgcagggctcaggtggagggtggtccagcggcacctgcgtcttcccgcggcttcgggaggaggtagatgcggcgggttgtagcgccgtcccagagggggagccggtcctcggcctcacccgtcacaccggccgcgcccgctcgcgtggaacgtggcgcaccggaccggacggcccgcagtgcgcaggcgcgcgagaccctcgccggctcagcttctccgcggccctcc

SEQ ID NO: 30722 - DNA, 505 bp, Mus musculus
  source 1..505: mol_type = other DNA
ttagtggaaataagaagggaccttatcctggctgtcctggactctgtagaccaggctggcctcgaactcagaaatccgctgcctctgcctccagagtgctgggatgttatataaaaactcagatgtgagttttacagcgataaggcttaaagcaataccctaagtgttccaaggctcctgcaagctcagcttgtagggatgagccctccatcgcagctggctgtcccaactggggggacagaccgcctggtcgcctccatggactcgggaagggtgggggtcccggggtccctccctccttcacatgctgaggaccgcggtagcgtatccctctgcggcccgccactacctggctgcggctcgcccgcctcgctccctcgcacccgcgctgccgttgcgcgccgcaggtccgggacgctccgggagggccgcggagaagctgagccggcgagggtctcgcgcgcctgcgcactgcgggccgtccggtccggtgcgccacgttcca

SEQ ID NO: 30723 - DNA, 539 bp, Mus musculus
  source 1..539: mol_type = other DNA
cgtgctgttccaggggacccaagtttgattcccagcatccacatagtctctttggttccaggggatctgatgtcccatggcctctataggcaccagaaaacacccatatataaaagatttttttagaagattaaaacagggtcagaattgtattttcaagttacttgactactaaattgttattgtattcccttggctatctagaacacatgagagaaaactagttctcaagatcgatttagttcaggctctcatcactaaagttttctaaatacagcttttgagaggaaagatcccttggactccaactgttggagtaaaattgtgaactttgctttaaaagttatctagacacacttctgtttcaaacagaaacaaggcagcccctgggtttgcagaaaaccctgaactccagcttttaagaaagcttctagcaaccgggtgcgggtgcactggcaccaatccataggtgtgggtatggccacctcaggccccgccctccgcacctccctccagacagcaaggtccttagggccttg

SEQ ID NO: 30724 - DNA, 268 bp, Mus musculus
  source 1..268: mol_type = other DNA
aaaggcagttgagtgcttccaaatgctatcaccaaactgttgacagaacaactgggcacacctgtgcagagcccagctgctctaaggcgagcagtgtaaagatctcgaagccagtttagctgacactgtagaaataaaggatgctttttaaattacttgattgtcccataatttcaagtgacttgttagggcgttgccggacgccgcaggaccaccaatggcatcccggagctcggggcgatgcgcgtgacgcagccgcgggccttcc

SEQ ID NO: 30725 - DNA, 386 bp, Mus musculus
  source 1..386: mol_type = other DNA
ttgactcagaaacaaggtcaaagtgatttatcttttccttggaggaaagcatgtctgtgagaagagtcgctttactgtcaggcattttatttatttatttattttaaagattcatttatttattatatgttagtaccggcgctcttagcccagggatcaggagcctcagctgtttggtgctgagctgcgcggcgcatgggacgggaaaggccgggcgcccacagtcctccaagtggggcagtgttcgagggccctcgaaagcttcgctgaccctgtgggccccggcttccacccagcggggcgcggcgcggggcggggctccgccgagctccgcccaccgagtagcggaggtgcttgggcgagaggggggcgggagacgctctgtc

SEQ ID NO: 30726 - DNA, 371 bp, Mus musculus
  source 1..371: mol_type = other DNA
cctttttaaatatttatttattatatgtaagtacactgtagctgtcttcaaatacactagatggttgtgagccaccatgttcagaagatcagtgtgctcttatcttctgaggaagaactgttctctgcagcgactgagtcagaatctcacacagcctgcctcttttcaagatttctggcttctgcaggcagcagccctcagctacagacacccagaactacatacatatatctatatacataattatataaaaagaatttttaaaatggtatgttctacgcctctgagttcgaggccagcctggactacaaagtgagttccaggaatagctctgcacacctgtcactcactgcactgttggcagagactgg

SEQ ID NO: 30727 - DNA, 337 bp, Mus musculus
  source 1..337: mol_type = other DNA
ttggtagaacaaaactgcagctgggaaccaagtgatgtagacaaggctagctttgaactcagagagctgtgccaaacctagctataagtacttagcctaacatctgtaattctcacatgatatgagctggcagtggccatttcgtggccacttgaggccacaggcatgccccagaatagcctgcatcccgaggggcagacaggggctcaggattcctgcagtccgggacaccagttttcggatgggtctctggtctgaatcgaaacttgcagcctctgcgagggcggagcggtcaccacggcgacgccaatcctgggccgcgccggctggtgggtgc

SEQ ID NO: 30728 - DNA, 660 bp, Mus musculus
  source 1..660: mol_type = other DNA
tgccgggagagagagagagatcgtttctttccctcttgaaagagaacgtacaccataatattttagggtcaaacagactacatggaagctgtctatatggtgaataaacgtatgcattatacagtagctactgtgtgtggagtggacacacgttagcagctcattgactcttcaggagcctagtggtgagtagtcgcgctggatttgccctcttagggcttacagtccattgcaaggaaaaaaaaaaagctattataataaaataaacaggattttgttaagagctactgaaaaggtacagtaggggagctctgctctgggccaaagctggagcgatttccaaggtgggaagtctgaagaagaaattatctcttcagaataggaagctagtttatgtaaacaggcttggagaaatccgccgacggtgtctgcggagcccagcgctgaagggggcggtccggagctgcccggtagtcccgcctacccgcaacgggggcggagctgcgccgggtgcgcactggggcgttccgctaggaccgtaccaacagccaggcagcgcggaggcgggggtgggtgtggagcggccggctccgcggggagcggcgaccggggaatggccgggccggcggtgggcgggagccgcagtggtggcggcggcgg

SEQ ID NO: 30729 - DNA, 415 bp, Mus musculus
  source 1..415: mol_type = other DNA
caaatcaaccttttcctaagttgtctttggtcatggtgtttcttcacagcaacagcaaccctagctacataattttataggcaagtatattacctatcacagaacttaagatcagaaaaagcatcaattatgtattacagaatttaagatttttttgttttaggtgactacatataaaaacaaggggtgtgtgtgtgtgtgtgagtcaggttctcactagccctgtcttcagtcagattctcactctggagctcactgtgtattccaggctggcctctaaaggtcaagctaataaaagcaattttctcttaaacattacacaattacttacaattttaaaggcagactaaaatgtttattttatagttccttcaacctgcaaaggaggaggttcctacccctaatatgtgggctg

SEQ ID NO: 30730 - DNA, 716 bp, Mus musculus
  source 1..716: mol_type = other DNA
tgcgcctgcggctggggcacgcgcctcggacaccggtacggggcggcagttggcctcggggggcatagcccggcgcccgcagactgcgccgagaccccggcgacccggcgttcccggccgcgcgagcgcgctcggttggtgcgcgcgccgctccgccccgcccgcccggcgcgcgccccctgcgcggccggggtggatccagcgcactcccctcccccgagcgccggcggcaggcgctgaatgagagacgccgggcgagcgattgcctcggagccgcgggcgaagcggaggcgacggccgcggctgcacaggtcggcgtggcgtgcgggtggggaggcgcgggcaatggcggcggcggccgcggtgcgcggcgcgggagggcgggctgcgggtcgctcgcggtcccgcggtggcggaggccccggcgtcgcctcagcctctcaggtgagccggggccgggccccgccgcgccagccacaccccctctcggccggggcgcctgcacccccgtcaccgagccgaggcgggtgacctgttgcggggccgaaccgcccgcggagcgcggggtgagcggcgccgcggcggcggaggccgcgtgcggacacggaggggggtcccgcaccgccgcgctagctgcccgcagcgcgaagggagcccggacctgtgcgctgccgccgcggctccccgcccccctcgaagcgctcgccggggcgttt

SEQ ID NO: 30731 - DNA, 490 bp, Mus musculus
  source 1..490: mol_type = other DNA
agtgtttaactttcttctgcataaaagaatccactgttttgattagttattatagggaaaaaggaaatcaaacttccactaagtcacactgcatcaaatggtgctaagtttaagtaggccacctaggtgcgaaaaactgtggggtgactcttcacatttgcagttaaggacgccgccctcttgtcctctggcccgagcggggagcaacgcccgcgtcccaggcgccaacgagacccgtgcggggagcagccgcggggccccacctgtccgtcctgaaccctgcggctcgtccttgcggccggtgctgcgcctgcggctggggcacgcgcctcggacaccggtacggggcggcagttggcctcggggggcatagcccggcgcccgcagactgcgccgagaccccggcgacccggcgttcccggccgcgcgagcgcgctcggttggtgcgcgcgccgctccgccccgcccgcccggcgcgcgccccctgcgc

SEQ ID NO: 30732 - DNA, 362 bp, Mus musculus
  source 1..362: mol_type = other DNA
tgggaatatggaatcccaaaatcaggttccccaacccagattctgagtcctgtgaggccccaggagatgccatgtgccactctgtgttacattgcagcagcttctactagtcaacgagtgaggcctcctgcattaggaaccaaaacttgactccacccaaggtgtgtgtcttagggtccggtgggagtatggcagcatccaggcaggcatggtacaggcagactacatcttcatctgaaggctgctagtggaagactcacttccaggcagctagggtgagggtcttaagcccacacgctgagagcctcagcattcctaggcttaaggccttttggctttggaaattgtgacctcagctgttc

SEQ ID NO: 30733 - DNA, 651 bp, Mus musculus
  source 1..651: mol_type = other DNA
atgaaatcccattcatagctcaactctataaacttactgtggatatctaaagaggtattggataaacttgtcaaaaagcattttcctctgctgctggcacactgactccagaaggatccgatccagcatgccatgactgggacgaccgcgtccagatcctccgggggcagcggcgagtcggactccaggcgcctccgcggctcctccggacgacggagacagctccatggtgtcccagagggagcaggcggcggcggcggggcgggcttcccggctgcgggaaagggacgacggcgcggccaccagcacccgaacggctgcgggcgcggacaccgctcacctccttccccgccgcccaccgcccgaaggccgggcgccgcagcccacctgcaagcggagggtgggacccgggccgggaggcgggtccagcgtggtccggagcggaggcgggtcccggctcaggtgcgggtccggagcggacgcggagcacccgggagcgcgggctcacctcccgcccccacgcagccctgctcaacccccgcgggcgcgttcgcgggccgcccgggcttgggctgaggatggagctcggccaggcagggctgggctcgggggcgtcgccgccaggggccgccccctctgaccggctcccgc

SEQ ID NO: 30734 - DNA, 364 bp, Mus musculus
  source 1..364: mol_type = other DNA
tattttttagcatcatctaattatgaaaaattcctgattggtttgaagtagccatgttcataaattgttgaaaaacctgatttgtcaacataatttaaattggtaaatttctacccgaaattattattattactattatttatttatttatttatttatttatttacttatgcctaaatctcgcaagatctccatgttcttcgtccgagaaagataagataaaagggaagcgcctttcccatctttttaacaccagcagctcgaggatccccgcaccgagaggcggtcggagcggcgggcctggccacgcggccgtgagctcggccctgggatgccgcctgccgccgccgccagcgccgcggct

SEQ ID NO: 30735 - DNA, 791 bp, Mus musculus
  source 1..791: mol_type = other DNA
tccagcatgtgactgggacgaccgcgtccagatcctccgggggcagcggcgagtcggactccaggcgcctccgcggctcctccggacgacggagacagctccatggtgtcccagagggagcaggcggcggcggcggggcgggcttcccggctgcgggaaagggacgacggcgcggccaccagcacccgaacggctgcgggcgcggacaccgctcacctccttccccgccgcccaccgcccgaaggccgggcgccgcagcccacctgcaagcggagggtgggacccgggccgggaggcgggtccagcgtggtccggagcggaggcgggtcccggctcaggtgcgggtccggagcggacgcggagcacccgggagcgcgggctcacctcccgcccccacgcagccctgctcaacccccgcgggcgcgttcgcgggccgcccgggcttgggctgaggatggagctcggccaggcagggctgggctcgggggcgtcgccgccaggggccgccccctctgaccggctcccgccgccgtcgcctcgggggctcaaagcgccggctccctcagcctgaggggcgcgccccggcccagcttctgtccgcctggcgtcggcttgctcccgcggaacgcgcaggccggcccgctaactctcaggccgccgctccggccgctgcttgggctcctccggctcgcgctcctctgagaaacccacaagcccggcagccgcggcgctggcggcggcggcaggcggcatcccagggccgagctcacggccgcgtggccaggcccgcc

SEQ ID NO: 30736 - DNA, 499 bp, Mus musculus
  source 1..499: mol_type = other DNA
caggacataatagatgctatttcatctgagaaagtaacttctactttgtcaatgctctctttcagactttctcagagaaagggaatattagcagctgcacatcttttatgacctttatcaatgtcgattcaataactaatatataattttgtataatcataaaaaattatgtatatgtataagatggaaaaaggaatgatacaatttttctatactataataactcagatagctcacaaccatctgtaatgagatctgattataataaataaatctttaaaaaaaaaagaaaagaagatgttgtatgttaatggtaacaacatagttgtattaatttactcaatcgattttaagcaaaaaccttttcaatattttgccattctaaattcattactttaaaaaaaaatgagctaccattaatcctgatacagttttgagcactcagagttcgaagtagtgccccttttagtgggactgtcccaaaatggtgatcagatct

SEQ ID NO: 30737 - DNA, 437 bp, Mus musculus
  source 1..437: mol_type = other DNA
cctaaggcttatgtcatcacttttaccaaggggtaaaccttctttttatttatttttttactaactaatattttaagacagagtcctggctggccaggaaggctatgtagactaataaaggcatgtgtcatcatgttaatgggccctgggattacaggcaacaccagactattggtaacagtttagttttttttatcataattagtcctgtgtgagaaaatacatcaaggattcacctgtgcattttggactttcttagaatgacatgttctaggccagcctgtgagaccctgtctcaaagactcttaagatcaagggttgcacacactgtttggtctaaccctagagggtgtggggctgacagtcccctgcacagacagacaagagctccgcctgccggtcaggtcacccggccagagcaggcacgtcctgggacg

SEQ ID NO: 30738 - DNA, 372 bp, Mus musculus
  source 1..372: mol_type = other DNA
ttttccttattctggaagagtctgggaagatcctcctagagaggacccacgccttgctttcaagaaaaggccacctcatcttagatattcttaagatgacctgaaagaaattttaaataaaacaggcagtagttttaactaaaatatagaatatttgccggtttcctggcttccagaaattcagatgctttaatagaaatgatagatttctttaacataattactagtctagctcactaaactatgcacacagttctgcatgcatcccttgctcccaggcctgcctgcagcttactatacagtctaggctggccttcctactttagactcaagtgctgggactataggctaaagtgtccttttgacctggac

SEQ ID NO: 30739 - DNA, 228 bp, Mus musculus
  source 1..228: mol_type = other DNA
gtagtgtgacaaaacaaactcatttgttggaggatttaaaatgtaaaatgtacgtcccaaaggttactttagtagcatgaagaaatgtatttttcaaatgtgagaaatcccttcctcgagagagaaaacttcagtctctcttagcatgcatgcacttgcttgcagctcatgtagtcagctaagtgttagaaaaagaaactgaggctcgcctctggcaggtcagggctg

SEQ ID NO: 30740 - DNA, 356 bp, Mus musculus
  source 1..356: mol_type = other DNA
agctgttcagcgattctctgcctggtcatcttaccacagatccctcccccccccccgcccccggccccggggtgtgtgtgtgtgtgtgtgtgtgtgtgtgtgtgagagagagagagagagaagagagagagagagagagagagctatttctcacttgggggctcactattaagtaattcaatgctggtaccccagcctgccagctagattgccggtaggcctcagaacccgcctcctgccaggcttcacagccaatggtatcttaagacactcatccggtgtctgagtctgcaggtgacactgaagccggagtggggacgcgccgggctgcagctccaggatggaatccgcctgcc

SEQ ID NO: 30741 - DNA, 264 bp, Mus musculus
  source 1..264: mol_type = other DNA
agctgttcagcgattctctgcctggtcatcttaccacagatccctcccccccccccgcccccggccccggggtgtgtgtgtgtgtgtgtgtgtgtgtgtgtgtgagagagagagagagagaagagagagagagagagagagagctatttctcacttgggggctcactattaagtaattcaatgctggtaccccagcctgccagctagattgccggtaggcctcagaacccgcctcctgccaggcttcacagccaatggtatctt

SEQ ID NO: 30742 - DNA, 321 bp, Mus musculus
  source 1..321: mol_type = other DNA
actgaattttctagaattaaatagcatttgtgacagagataaaatgaggcataagttgtaagtgaaagttctacattgcttaacagtatgagtttttcattgctgtatttatatcaatattgcaaatattatctttaatcattctgcagaatccatattggttcaaaatatatacgtgtgcatttatctcaacacatccaatccaactaagaagttgatttttttaaaggcactctttttaaaatgtaaaatacattacaaagacgcaattttaaaaatgcagagcaggtagtatcaaccagctgggggctgacctgattc

SEQ ID NO: 30743 - DNA, 301 bp, Mus musculus
  source 1..301: mol_type = other DNA
tttcattgctgtatttatatcaatattgcaaatattatctttaatcattctgcagaatccatattggttcaaaatatatacgtgtgcatttatctcaacacatccaatccaactaagaagttgatttttttaaaggcactctttttaaaatgtaaaatacattacaaagacgcaattttaaaaatgcagagcaggtagtatcaaccagctgggggctgacctgattcaagcagctccgggaaacaaagagctgggctctccagacctcagcgctgggaccagggctctcgagctccgtgtg

SEQ ID NO: 30744 - DNA, 408 bp, Mus musculus
  source 1..408: mol_type = other DNA
tccaggaattttccaggactccaggcctagattagtactgtagagagattcatgaattaaatgaaagctggtctaataaatgcaatacacatgcctattgttgtacaactccttatatgagaaatatacttcttctcaacatatctctatgtagctgacctataactacacgtaaatgtgtgagacatcaatgtcttctaagtctttgatatttgcaggttatttaccacaatataaccgttgtttttaaatacatttagaccaggctgacctcataaaggcatgccgcctgtcttaaatacgtttttaataaatatatttaaaaattaatgaataggacatgctatgctccttggtgcaggcaggaaatacatcacacagcccagcctggatggaggaagtcatcca

SEQ ID NO: 30745 - DNA, 330 bp, Mus musculus
  source 1..330: mol_type = other DNA
aagataacctgacaagagcgctcttgaataaaaatcctcttgcaatttgcagcaagaccgtctcctgagtcagaacgtggggaagtcctcacgcgccgcatgcgcgctcgctcacacgcatgcgcaacccgggggcttaagcacagcgttcccggttccgtacagcccggcgccggcgccggcgcctgcgcgcgcagctgctccgctgccccgccccttccgccgctcatgcgcaagcccgaccgcctcggcgcgcccgggttggctgccccggcggcctcctcggcagtcattcccccgccccctcgcgtaggacgcggcggcggggcg

SEQ ID NO: 30746 - DNA, 555 bp, Mus musculus
  source 1..555: mol_type = other DNA
cccctgtctttaacacatagagatgtttattaaacagctgtactgagaggatcggcaattttttaagaaattttctgttatgcataaaacaccaaagacatttatttcagagtacatgctaatgcatttttttttaatatataagtgttctaaatgagttattaatgtttttattttttatcacttttaatactttaatagagaaaatacctattatttaatatgtgaaagttccttgatattttttcataataatgttttttgtaaagctgacacttgtacagagcacattaataacgtttgaaaatgacactgtgttcaagcttcacattaaccagagtgtaaccttgaaagatgtacacgtcttgaaatatttttaaagccttaatgttcatattttcccaatcagcaaaattattgtattataaaataattaacagtaattagttagaattacaaatatttaatagttctgggagcattattattgatgtatgtttctccatataatttcatgcaatgtatttcttttaatttggatttcataagtgaaat

SEQ ID NO: 30747 - DNA, 347 bp, Mus musculus
  source 1..347: mol_type = other DNA
ttagaataccaacaatgatcacttgtaggtattatctcatgtttactttaaatgttgtgacttctaaagtgacatagcactagctttgttatcttggacaagaaattttcagtctaaaagatgcaattggagcatttaattagtagcaatgcttagcacttggtacaaatgctgtataaagttagctattattaagacttcctattcagtagggagggggcagcactatccacatcttcctgcaactacaggaaaaggatcagcaaaaggccctttgtcttccactgtttgactctttagaaaagcagtctccaagatctgtccactaaatatgctgctgaaattgt

SEQ ID NO: 30748 - DNA, 479 bp, Mus musculus
  source 1..479: mol_type = other DNA
agtactttaaaggcaagcttctctctatgaggcaggcatgaatccatttttcactggcattcacattataggaaatgcagggctttatatattaacgagtaatttcctttgcccattgcagttcaaaaattcaataagtgcagtttaagtgccttcagacagcagtgtgactgccactagtactcaacatgtcagctgaaatttccagtttcatggttcaaggtggtacctcacacctccaaagactagagttcactgttttggcaaacaaggtcaacatatcatttgaacttgaatttaaggtgttagaggagacaaaggatttgatttctccccttctaaggcccacattgaggaaagttgatgtcttctttgcaggaaataataattcagtaaaatctcaattaaaaccaactcataaatcacatttaatattgccagaccctggaatcccagactccttcttctgagattcggag

SEQ ID NO: 30749 - DNA, 291 bp, Mus musculus
  source 1..291: mol_type = other DNA
gaacaacaacagatctagatcgagttctctctgtgggatttccagagccagctggcttctcttgagtaaaccggaactctctttatcatggcaagatctctcaaggtcattccggggaagcccctagatactctctaccaccccacctttacatttgggggcggagttgagaacttttgaagttagttgtcaaagataccttgtcacgaggcaccggggggagtttacaccccacgtctctgggaacactggcgcgtctgtgagcaaagttggctcgtcctgaaggaggcg

SEQ ID NO: 30750 - DNA, 336 bp, Mus musculus
  source 1..336: mol_type = other DNA
ccagagccagctggcttctcttgagtaaaccggaactctctttatcatggcaagatctctcaaggtcattccggggaagcccctagatactctctaccaccccacctttacatttgggggcggagttgagaacttttgaagttagttgtcaaagataccttgtcacgaggcaccggggggagtttacaccccacgtctctgggaacactggcgcgtctgtgagcaaagttggctcgtcctgaaggaggcgccggaggaaggacacccgcgctgcgtgtgctgttgcgttcctgacctcagtagcagagctgggtgcggtgaaacctcagccaggga

SEQ ID NO: 30751 - DNA, 456 bp, Mus musculus
  source 1..456: mol_type = other DNA
cttccttttcctatgaaagacatggacttcagtggagaaatgccacatttctggtcctcagacctgagattctagccagggaccaggcatctatttcattttcaaaacatttatttaaataaacttttatatgtatttgaattttacagaaaacaaaacactgacaaatactgtacagcttcgatcattcatatgagcgattcatttcttgaaaaagtgacttctttttcctcttcccaagaaatcaaaaaaagtctagacaaccccagagtatgcatcttcttttcaaattttcgaaaaagatttattttatgtgtatgagtggtttgcctgcatgtatacatgtgtaccacatgcatgtctggtacttgggtcttctacagaagcaacaagtgcctggggcctcttaggttcttcatgaacttactgtccccagatggatcaggtaggcacaag

SEQ ID NO: 30752 - DNA, 358 bp, Mus musculus
  source 1..358: mol_type = other DNA
gcagttcatctccagggtgcttctaaacccccgtcaaggttaagagtcacgacggacttcgaaacactccttgctactgaagataactctttctgctctccggaacgtacttcagaagggcactgctcacctcccctggttagagttcccctgtaggcgaggtgtagggtacagtgggtcccatagcccctggcctctcacctgtcaggtgatgagggattcccttctctgacttctttctatttacttaaatggaaacagcccgtggtattaagaaggaaaggggaatgtatactttttttccttctcctagttagagtaagagaatgaattgctctgtcatagccttgatttaaac

SEQ ID NO: 30753 - DNA, 263 bp, Mus musculus
  source 1..263: mol_type = other DNA
tatcttgagatgagtaaagagcccaatgggctgttcctcactgcaccctacaaccttaatacagatatgatataatataataaaataaatataatatatataatataatacatatttaaacccttctgcaggatgagtggctgccaagcttccgccgggtggcgccaacgcgcagaacacaggcgcaggctgggcggggaaataacgcgagagttatttcaaatcccgcctccacagaacctgtttccggtgttgtactgcgg

SEQ ID NO: 30754 - DNA, 349 bp, Mus musculus
  source 1..349: mol_type = other DNA
ccttaatgttacattaatataaagtgtagtgtagcagcattttgacttgctgatgctagtaactcccctaagcatctgtaagctgacagcagagtcataattaagataatttgaaaaacggtttactaatccgggctgctgcaacccaaagtcctaagaattcctccacattttacgtggaagccgctttggcctggcaacccggggctaggtctggccgcggttgcgagctgcgactgcgcagcccggttctgccggcgcggaacgaggacgcctcctgagcattcgatcgctcgctgctaggcaaccagcctgggggcgggctacggggccttgggaggctccggtg

SEQ ID NO: 30755 - DNA, 488 bp, Mus musculus
  source 1..488: mol_type = other DNA
gtcatgcatggaataactggtttgagtaattaaaagaaacttttaactttaaatataaaaggactaagaatatttatcagcagggagaaaaacagtttataaatgaaacccttgtgtttctccagaatcacatcagatatttgtatttttagtgggacaaaggaaaattattatcaactggtattgatgccccaaatgaattgtttcatacttttttttttttaacagaattactcagaagggagagaaattctttttttcccccttccgtcttcgataaattttaactgcaccaagaattctataaattctgagaaataataatggcttatcatctttttattttctaagaataaggaaaaataagcactgattgctttaagaaaaattgctcttcttccaagaagaatcttcatgtgaataataatgaagagattttcatataggctatgttttgacacccagcccctggctctcaagtgggtgtg

SEQ ID NO: 30756 - DNA, 408 bp, Mus musculus
  source 1..408: mol_type = other DNA
ccagtcagtggcatactgtgaggttcaaaactgcagaaactcttgggagatgatccagtgggtttcaggcacccaggtctgtctggtgaaacttgttagcagactgcttcaaaagaaaaatcggtacagcaacaagtttttcctaagatcatcagttttcaaagagcatgcttttttgtttatgtaaagaaaaaaaacttcatttcctagcaagatccagaatgtatattttaaggcgtatttaagaatggcaaaaatacaatcctagtcagtgttcctttgtgtaaagttaaaactatctttacaatcttcagttgtcttataaatatgagcagcataaccaagaagattacaatgtgctctcgctgggcacagaggggactcctgtttgcagagtggcagcactga

SEQ ID NO: 30757 - DNA, 546 bp, Mus musculus
  source 1..546: mol_type = other DNA
cagaccaattgaagtgttatgctttcaactcaagaagctactctagaggtccaatctctggacacattcaattcaaacagtaatatttactgaacggatactttctatcattagaatctctaaaatatttcacagattaagggtacacatatttgtgccataaacctgagaaaaaaatggtcttttctggctgcttgatctagaaaggaaaaaattcacagttcaaaaattagtacaatatttgtggcagaaagtaaatactttagtttatctgtcctccaaaatcctcccccggtggaaaagttagtcctccgaggtgacttactggcctcacggtttgacttagaactcagtcagtgctggggatgattgccaggcaccagcacgcgtgctggaggaggtcctcgcgtgcctagccgagtcaagcgagcctgtggacgcgcgcgcgcgccgccgacttaggcagagaaggcacctccgccctcgggagcgcgcacgccgcgccgaggggccgggcgcgcgcgctcccgccgaccgcctcctcct

SEQ ID NO: 30758 - DNA, 457 bp, Mus musculus
  source 1..457: mol_type = other DNA
ccagcctggtctacagaagaatttctaggatagccaagggtatataatagagagaccctgtctcaactgctttgacagttttaatgtgaaaattagaatataaatttaatactatatagtattagaattccgtttctttcggttctccagaatttggctaaaccgaattatgtcgaagatgtgtgcacacacaccccacaaccacacacacacacacacaagcgcgagtgaggctggggacctcttgcctgccagcaccaaaggcactgtggccacaggccaggcgggtggcccgggaggaggtgggacaagtttctccactcggggcgcgacagcgctcgagacacgggcggggcgcgtcgcccgctcccgacagggcgttggggccggtgactcagagctttcctcccggcccgttggccacgccccatgaggaggagcctcgccttcatctccg

SEQ ID NO: 30759 - DNA, 370 bp, Mus musculus
  source 1..370: mol_type = other DNA
accttgcaatggtggtcgccaagcccccaacacacacacagggcctgtctgactgtgggtgtagattcataagaaactgggtttctctacccctggctgtcctggaactcactctgtagaccagggtggcctcgaactcagcctgcctctgccttccgaatgctgggagcaagaaacttatttctaaataaacttctgtgatactccaatattaaaaaaagaaattgctgctcttgcgcacagtaggcgaaagggcttttccccacagagccctcttgagtcgggaaccccctcgccccccttttcctttcaaagaagagagaagaatgttaccttgtctactaattaaacaacacggagttctgtgctt

SEQ ID NO: 30760 - DNA, 360 bp, Mus musculus
  source 1..360: mol_type = other DNA
ttcctaagaaaaatgttaatctttagtagttctacttccatatccagcagttacatataagttagtgactaaggcctgctggcaatctctagcaaaagccgcgaaagaaagcagcatgccatagcatgaacacgcatgctgagtcgtctttgtctggtgtccagactaagctcaccggctgcgccgggacagaatcttcgtgacgtcaagacgcaaagctgcttgctggccacgcccccgagagcccggagggcggagttgccgcgggcacgataggcccgccctccgcctccctgaggagtacaggctgaggggaggggcttccggcacgtcgctcgctccggaggagggggcgggggg

SEQ ID NO: 30761 - DNA, 442 bp, Mus musculus
  source 1..442: mol_type = other DNA
cagtgaggaggaagcccctggagtaaagtctttctctagcgtcggcactgaagcgccccgcgggcgcgggaccgggaagggggcggcgccccgggatcggtctagggcgggggcgggggtgtgtctgggtgtggccccggcgcgcgcgcggggtcctgagggaggggctcgccaagggggcgggcccgcgagctcgacagcccggagcgcgactgagcgccgcaggagctggctgcaacccagacgcggcccgggagcgtcgggtatgagcgtcccgccccccgccccctcctccggagcgagcgacgtgccggaagcccctcccctcagcctgtactcctcagggaggcggagggcgggcctatcgtgcccgcggcaactccgccctccgggctctcgggggcgtggccagcaagcagctttgcgtcttgacgtcacgaag

SEQ ID NO: 30762 - DNA, 626 bp, Mus musculus
  source 1..626: mol_type = other DNA
caccttgaattccctccagtcatttgcagtatttactgcataacatttagcttttgaacatgcatgtgctacctaaattccttaaatttttttcaggtacaaataatggtttgaataaagaaacattgtaagtttggtatttactatatgaattaaggtactgttagtgatgatcaataaagttaaacagatgggaatctctctgaataagattgaagattgattgttaagctgaaacagtatttaaggacatcagtaaatatactttacaaatacatatttctaaacggagtgtaatttggtaagtctttgaaatgtgcatgtattagttacttatagttcagcagacttaactctgattttaaagagttttccttgaatagtattaggaaatacaagactgacttaacccagtaggacaattttattgtgaaaaatacataagttccctagggtatgacgattgaaactataaatctcaggcctcttggcaagagaattgatgtgaaataaaatgaagataagtaactgcactaattatttttaattttcaaacagattggtcattctgaatttccggtccttcattctgaatttcaaagtaagtctgtcacttgtttttgtac

SEQ ID NO: 30763 - DNA, 418 bp, Mus musculus
  source 1..418: mol_type = other DNA
acacacaactaaaactcagtagtttttcttgtggttagtccatgaagaaagtccctgagttagtcactgcaacgttgacgttagcttccgtttgtacacatgaaaagttttgctccaagactactttttttaagaagcatcaggagtcctggagtgaacctagcttccctcaggctcgagcaagacctgcgacttcccccgggagagacagctcggcttcccaagctgcccggctctatgatcctcgctcttcggaagctggcgccggcccacgctccggagctctccggcggccgactcggaaagcctccgattttaactgaaagcaactgaagtcgtcattttaactgagggcaaggcttggaaggcttccggtgcgaaactacaataaacatggcggaggcgccctcgtcctgat

SEQ ID NO: 30764 - DNA, 340 bp, Mus musculus
  source 1..340: mol_type = other DNA
tactttttttttataatcaagggggggaccttaattataactaatcagctcgtagctgccttcacctggaattctttgtgaactcccgggatccgggacaatcacggtaaaactcggttttcggaatacctgggaaccgctgaacgttctagtatctacaaagtagattgacctgcaaggtctccagagaccttaggtgagtggccccagccggaaggccggccaccaggcgcgcgtcctccccagcctcgtgtttcaactaaacctggcggcccatcctggattttcctgatcaggacgagggcgcctccgccatgtttattgtagtttcgcaccggaa

SEQ ID NO: 30765 - DNA, 334 bp, Mus musculus
  source 1..334: mol_type = other DNA
ccgggatccgggacaatcacggtaaaactcggttttcggaatacctgggaaccgctgaacgttctagtatctacaaagtagattgacctgcaaggtctccagagaccttaggtgagtggccccagccggaaggccggccaccaggcgcgcgtcctccccagcctcgtgtttcaactaaacctggcggcccatcctggattttcctgatcaggacgagggcgcctccgccatgtttattgtagtttcgcaccggaagccttccaagccttgccctcagttaaaatgacgacttcagttgctttcagttaaaatcggaggctttccgagtcggccg

SEQ ID NO: 30766 - DNA, 694 bp, Mus musculus
  source 1..694: mol_type = other DNA
tgagtcactttgaagatgacttttagacaatctaggtgcacatataagatgccatttcaatggatcagaaaaatgtacatctaaactattttatacccatcagattggcaaaaaattaaaacgagaatccttgaacctttctggaggaagatataatataattgtggccagaatctagaaccatccttttgtaagttacataacgctttggtaccgacatgagaaacataatgctaccaccatttggaaaaatggtaataaatcctataaactaatacacaatgttatatgctaagtatttgataataaatggggtatccatagctgttactagtacatatattatttacttatatatcactggtacatatgaagaaaaaacttggccaaatgacaaagtgtatcatagaactagaattagaagttgaatttaaagaccaatcattctacaagtttattaatatgaggtatatttcctatcaaaaacaactgcacagagtctatagatgtcaaataaagttcagctaaagaaattttggttaataatagccttgtatagttttcaatacatcagcaacagacttttagttatatactcaaaaattttatttggcacagctacttccggttccgtgggaaggatttagccatcggaccgcttcctgtttctggatctgggcgggtgcagggaaag

SEQ ID NO: 30767 - DNA, 401 bp, Mus musculus
  source 1..401: mol_type = other DNA
gaaaacatttattttagtttctaatgacatgattgagttcattgagtattgtgcctgcatgtgtacatgtatatttgctaagcaaatgctgagcccatcaggaatatggcctctttgttaacgatttcattctagaaacaatattgctagacaactaagtgttttggactttacatttcgaataaaaaaaaaaaagaatctagcacatataattcctaaggtgacacaaagtttaacatcgcattattttttaaatatagaattcacccttatgctttcaacacaaaaaattttcacagttcatttttcattaaagttttaaagtagttaaattcagacctattacagaaatttttacataataaaacgcccagtcagaacctgagcgctgggtgaggcgc

SEQ ID NO: 30768 - DNA, 387 bp, Mus musculus
  source 1..387: mol_type = other DNA
acgacatggccttcctcaggtagaggatggtgggctgctggaacagggagtcctccgttttgtgctgagctcagagaggctgtctggactcagcacgcttagtgtactcctaggattgtgataggcactctggaaaattgtggattggtcccaaattacattagacatgataaagcactttcctcagcaagaaaaagatcaaagaccttcaacactttgcttggagatgtcatgtatggatggcagggtccaaaacagccagcaaatagttcattttcaagaaacctgggtgattagctgggtacacctgttcatcccagtgcatttttttaatgatgtcactgaaatcacctgagtcactatgactgacgatgtaacaatggccat

SEQ ID NO: 30769 - DNA, 240 bp, Mus musculus
  source 1..240: mol_type = other DNA
gatcaccaggctgagcttctaacagattctggtttctgtgcagaatgtctgaaataggaagtcagtggaaaatgtcccatttgaaacctatatttaaactttaggaataatgtgttgaaaaaaaacggttctttccattgccaggttggctgagtagtcagtcattcagccaactacgcatctttgcagagccgccagatctacaagtccccgcaattctcggtagcactgatctaggtc

SEQ ID NO: 30770 - DNA, 339 bp, Mus musculus
  source 1..339: mol_type = other DNA
acttgcatgcttggtgcctctggagcagcagccctgctcttacaaatgttacttgaattactcatgcaaaagttatgtgtgggttttttgatattctgaaaattaatcatgtatttgctgaatttccctgaaatttaacacagtgtctgacacatcaataaatattagtttatgtggcttaatgtgatgtattatgtaactataagaccccttctcaaatctcttctatggtttaagacatcttgagattttaaaaaaaaaaaaagggtgatctttatctatcattgtgaatgtcatttcgaagtcactcaattcataactggcagagttaaaacgaag

SEQ ID NO: 30771 - DNA, 440 bp, Mus musculus
  source 1..440: mol_type = other DNA
ggaaataactttttaaatgatagttttatttctactcagtgttagaattggaatttggttccaacatggtccaagtttgagaaaattgaccatcatgttatttactaatgtttgctaaattctagtaatatatttgcaggtctttttaaaaaatatatttattttatatttatacatttttgcccacatatatgtatgtgtatcgttaaacaccacactgttttgcaagaggaacgcatatttcagaataaacacattttgtaactgggaattgtttgatttgatgttttaaaactcccacctaggtgcgattgacaaaattgttggacaaaacttagttttagattttatttagtcttataagttgttttcttacttggaaataatttggaatgtgcatgcacacagtacttcctcttgcttgaggaaagacttttttc

SEQ ID NO: 30772 - DNA, 248 bp, Mus musculus
  source 1..248: mol_type = other DNA
aaggcataagatatatacttaaatttgttgtaaatgttgaataatgttttacacacttgctataaaaatgctatttattgcttatctcgcacctcagttttcatctggtgaccagaagcagaggattcaactccctatgcagcgctgacttgctgagttggacctcaggcaggcaagcctggtttaccagccttctcagttattcgaagacttgtcgtcagaaatttctgggcggaaacttcctaaga

SEQ ID NO: 30773 - DNA, 244 bp, Mus musculus
  source 1..244: mol_type = other DNA
aaggcataagatatatacttaaatttgttgtaaatgttgaataatgttttacacacttgctataaaaatgctatttattgcttatctcgcacctcagttttcatctggtgaccagaagcagaggattcaactccctatgcagcgctgacttgctgagttggacctcaggcaggcaagcctggtttaccagccttctcagttattcgaagacttgtcgtcagaaatttctgggcggaaacttcct

SEQ ID NO: 30774 - DNA, 310 bp, Mus musculus
  source 1..310: mol_type = other DNA
tacagattttggggtctccatctgtgaacaccactagtccgtagtgtcttttctgccttgcagcagcaagaattctcacttagggaagacttttaaacccagatacccgtgcgcggaggcggcgcgtgccagggcgtggcccgcgctgtgacttgtggagcgcgagccgagagggacgtgggtgacgcgtctccttccacccagctcagtggagtgcgaggtgcgctggcccggccggggattggctgctgagaggcgagtacgcggcggccgttggtcgccggcagcacggagcgagggcccgggcggg

SEQ ID NO: 30775 - DNA, 404 bp, Mus musculus
  source 1..404: mol_type = other DNA
taaaatacttgaccagtgctggtattacaataagcttcaaataagcgccttctttcttttacagacaaagaattcaaagcccagatagtgtgaatatgaataaatgggttcatgagtctctatattttaaattcttcgagcttccatctatttataaatgctttggagccatccacattggtcaaaaacggatgctatgtgagatctgggatctccgcatggaaagtcccttggctgagagcctgtcaacacatgtcatggtaaccttgcaccctgtgaagtaattcccactgagggatttgcttcccaggcttagcattccactaggagcagattgcggacgctttggccgccgagtgctgcggatccggaagtgctcctccacagtagtccccttccaagcc

SEQ ID NO: 30776 - DNA, 528 bp, Mus musculus
  source 1..528: mol_type = other DNA
aataaatagtccacggttaatttataaccctttgcaaagccaagtgttgccagtgcaagcaagcttttgcttttttcactttgtccaaaattgaaatgtaatttggacattggaattggaattggaattgacctagtgaacagaaagtaaaattccgtgtgttctcttattttatagacagaagaaaaaagcagaaaagcaaatgctatgatgatacactggcctgtggttctccatgtgtgacagaggacttcaagatcgctataattcaggatggacagtcttcaagatcaactataactcaagaggagtcagagattcttttaaaaaccacactattccttgcatagtcatctcattatgtattagatgttgctgggatttataatagtatcttagtcagcagaataagcagttatcacatattgttatgataagagaaaaggtttagctagctgagctcttgaccagcattaatccatttgttccaaccttgacctaatgttctagaaggtagcaattgtgact

SEQ ID NO: 30777 - DNA, 493 bp, Mus musculus
  source 1..493: mol_type = other DNA
gcacacgctgtgtgctcctgagagccatgagctctcaagcagcctaccccggcaaacatgggggcgtggggcatggttcccataggcaccaatacgagtaggcactccactgcgctgaggtctagttattcctcatacatacggtaacctgctaataggtttttacaccctgggccagccggcaaaagtatttctgtaactatttggtatgttttaccaacgtggtttctgttttaaaccaacgtggtttggttacactcacaaaatatccatagacttgtctgttttaaaggagaagttatgttaattaatatcaatctactcctagcaggtttttcttctccagtgagccaaaaagcttactggagtttaagagctatgtagaaagatcaaaatgatgaaatgaaatccatctggcatttctcattgaattaggaccagaacatttttgttaaatattaacagatggctaaattcttaatatcaaactaac

SEQ ID NO: 30778 - DNA, 240 bp, Mus musculus
  source 1..240: mol_type = other DNA
tgtccttaaccgtgtggctctacctttttaacatttccttaggtaaggctattactcatggagaggccatgacaaagagcatttctcccaggaagttgctgtaattactgctcaagtctagagcagcctgcaagctgctgacaggtcaaaagaaaggggggagccccaacttatctgagggccccacttcctgcccagttgagggaaaaaatctggcctttacatctggtaccattttat

SEQ ID NO: 30779 - DNA, 251 bp, Mus musculus
  source 1..251: mol_type = other DNA
ttttcagtagccaaaaagtttgcctggtgtcttggggtttcttttgctgcgataaaacaccatgaccaaaagcaacttgttgaggaaagagtttggttcaaaccaaggccctgcccacaatgggctaggcccaacatcaatcattaattttaaaaaaatgcactactgacttaggcaaatctctgtaataatagcacacacttgtgtggtactcatgcccggacatgttttcttgacagctggcaaacttc

SEQ ID NO: 30780 - DNA, 242 bp, Mus musculus
  source 1..242: mol_type = other DNA
agggcaatagtagtctctagtctttaggttacttaaagccaatattgcgcactaaatcctgagaggtatcagtattcaaggtgaagaaccatggccatttatcttaactacactttagctcttcaaaaggaacaacaattcctgttactcttgactgaagctgggaggcagtccaaccgtaggccagtgtgtgggcgtgaccgtctcaggaccaggccacgcctccttcgcctctctgggct

SEQ ID NO: 30781 - DNA, 420 bp, Mus musculus
  source 1..420: mol_type = other DNA
taatctcactaccatgccctgccagagacacagactaagcttcgggtgaaagaggggtctatcaaataactggcaatatatttccccacagtttaaaaactcttaacaaaggactaataaccattaagcttagaaaagaaatacacatttctacagttttggactaagtctatcaacgccagacttctttaaataaatatgtcaagcaatccctatgtttggatcctgccatttaggctacaagcaaaaggaatgccctcagcaattttgtaaatggtatcagacagatattttatcggatctgaacgtcacaaccccgggggattctcccggggacccgctcagggtctcgcaggactcggagtaccgagcggctcgatctccctcgcctgagcccgccccctctgcccagcgccaggc

SEQ ID NO: 30782 - DNA, 469 bp, Mus musculus
  source 1..469: mol_type = other DNA
cattcaaagtagtgggctctctttgaaaagggagtactattagcttacagcccgtgaatttgaattagtaagtaaactaaatctccattttagctacctaaacctaaagttatgataacaatacctgtattttcatccctatgttacagttgatacaggtttcatgaaatactgtgtatactcaaaagtactttaaaattaagccttatgttgaatagcttatgtaatttaaatattttcatattgctaactaaatatagggtttggggggcacactcatcctaaagcctggtccagagcattggcacaggttcctgagacaagagctgtctaaatctagggcaacatcatgtctagttccttatgctggtccagtgaaacacaaaatactgtcagacaaggtgcgcatatgttcacaagcacacacaataaattcaaaatagcctccggcactttgtttttaaagact

SEQ ID NO: 30783 - DNA, 323 bp, Mus musculus
  source 1..323: mol_type = other DNA
tctttccgttggggaaaaggtagaatattatcattttcaagacagggtttctctgtatagccatggctgtcctggaactcactttgtagaccaggctggcctatcagttgttgtcaatgcacggagacaaaccaagtcgtgattcctcacaaaactccctccttccagtaggaggtagcgttgccctccgccgcagtcgagaagcggcggaggctgtcacgtgaccccgcagcctcaacccctccaccccccccggggcggtcttgcggagatttgccttacgtacgcaacgtcatgacgtagcacgtaggggctggctagcc

SEQ ID NO: 30784 - DNA, 261 bp, Mus musculus
  source 1..261: mol_type = other DNA
gtcactatggtggcttccaagcattgagagaaaatacatacaagccctggctttttgttattgacaaagcattggaaaacaccaagtacatgtttggtttaagaggcgaatcatcaatccagtatgatcatatttgactggatacatataaaaaatctccaaagtttggcgccctctaaaggcacccagccttctgatgcctttggaattctttttgtgttaaactgaagtttgaccaaacactgtttccactcagaagtc

SEQ ID NO: 30785 - DNA, 300 bp, Mus musculus
  source 1..300: mol_type = other DNA
aaacactgggaagaagctacaagattttccccattttcacaatgccccgagaattacataattcagatcacacggttttaactgacagagttggtcatttacccagctgtgcagcacacacggtgttctgaatcgcatcagactgaaggaggagaaacaggccttggcaaaatgccaggacagaacccaggaggcagtgctgtggcacctgtggtgaccctgctccagactgctcccgggttggagcctggaggaggaggctctggccaaggggtgggtacataacccagctcaggggtt

SEQ ID NO: 30786 - DNA, 402 bp, Mus musculus
  source 1..402: mol_type = other DNA
cacccttggctacggagtgagtttgaaaccaacctggctttgtgagaccctgtcgaaacattagcaaacaacatctaatatttagtgtgtgctgaatgtgtatgtgatcagaaattcagaaaaagcttacattattgagcatttactgtgttaccaggacctattctcagatacatggcacagaaacactgggaagaagctacaagattttccccattttcacaatgccccgagaattacataattcagatcacacggttttaactgacagagttggtcatttacccagctgtgcagcacacacggtgttctgaatcgcatcagactgaaggaggagaaacaggccttggcaaaatgccaggacagaacccaggaggcagtgctgtggcacctgtggtgacc

SEQ ID NO: 30787 - DNA, 250 bp, Mus musculus
  source 1..250: mol_type = other DNA
tggccaccgctgatgtttgctaggccccggcataatctcacaagagatagctatctcgagttgatcccagggacccacggtaaaaggagaatctggcctccacctccatgcagaagtgggtgcatggacatatatacacatatataatagatggtgctaatgcacattttctacactgatgataaacgtaattatttagatgcatctcttgcattcaactgatgaagttagctggctgagcgaacaagct

SEQ ID NO: 30788 - DNA, 411 bp, Mus musculus
  source 1..411: mol_type = other DNA
aatgccaacttttttcctagaaatgcaaagaagtctcacaaaaattcattgtctgtgagaggctcaagggttactagatttaatatagccgtatattcctggaaagtatatgagtcgctcaatgagcaacttctgtcattttgatttgctttctgcaaaatgataaatactattctaattattgcacaattacaatagcactatttcaaaacagtttttaaatgtatctactatgtgaaactcgagtgtcattagactgtccaaattagaagagctaatggaccagcattaggctgtgctctgtacagggaagccatttgtttgccactttcttatggaatttacacttaagagtttaataattaactattgtaacttcaccatgcagtttcattaaaatgaacttcttgt

SEQ ID NO: 30789 - DNA, 382 bp, Mus musculus
  source 1..382: mol_type = other DNA
ccatcacctccccagaggaagcttgggagattttacagttctctaacatcctaataaaagctggagctcagtaatttcaaagtactataaaaatccctaaattcctaaacagctacttaaattaaaatgtactttctgaacaggcaggctaattgcttccactctggactcactcctgtctaaagtcttgagaagtttaagctaggttttgtttacattttctgtaatttcaaagcaaggacaaaggaaagaattattggtcatttaatctcccagagtttcactttaccccaatgatcatatcagtcactattgaagaaagggaatttttgctttaagaaaaatagccccgcccccttttacatcaaaagacattaaaagc

SEQ ID NO: 30790 - DNA, 214 bp, Mus musculus
  source 1..214: mol_type = other DNA
aaattggcagcgaaagtctcgaatccattcgaagctgaagacttctggatctgcccaagccgttattttattacattatttaataggctgtctctacagagccaaacgagcgatctcaaatccggaggagttgatactactgcaagggaatgataattagacctttattttaaaaatccatcagactgttttttcggttaagtggagatctgcc

SEQ ID NO: 30791 - DNA, 365 bp, Mus musculus
  source 1..365: mol_type = other DNA
actttttaaaaaggctttggttaaacactttcaagtgcaagtgtcaggcagctttggatgctgacacctatgtctgtctgtagacagagaggttgcagagggagacttccccttggcaagaggcaacaaactctttccattggaattcctttaaaatgcagttgcaagctataactttaaagctgctgaaagacccacaccaccctcagtgtgatgcatctgaataagacagtttttctacctgcttgttctttttcatagaacagaaatgccatctttgctacaatcaaattgtgattaatatacaataggattttgaaggaggcccacagaccagcacatcacaggagctggggcatgtgcgt

SEQ ID NO: 30792 - DNA, 219 bp, Mus musculus
  source 1..219: mol_type = other DNA
gttaccagggtcatagactcctcagtctctgtgtttgccaaattggcagcgaaagtctcgaatccattcgaagctgaagacttctggatctgcccaagccgttattttattacattatttaataggctgtctctacagagccaaacgagcgatctcaaatccggaggagttgatactactgcaagggaatgataattagacctttattttaaaaatcca

SEQ ID NO: 30793 - DNA, 424 bp, Mus musculus
  source 1..424: mol_type = other DNA
atccttgaattttggaaaacctgttacatttcaaagttcaaagattacaagaaagatgtcaaacttttttctgatacttatataactgaactgctcatttcagtatactcctttacttcaacttgattaaaaatattgactctcgagtcgaaaattaatattctttaaaaaaattttcaatgtagccaatgtaatgttttcagttgtttttagtaaaaataatgaaaaaaagaaatggtaattttctaaactctgcttaaaacggagagattaggttcttagactcattcatcatagaaacaagaaatcgaaatctgctagatgttattgtctagaagctccgcccagctagtcaggcagttccgacctgtaggtcggggcagccccacaggtaccgggtccctgaatgcagagggaggggcac

SEQ ID NO: 30794 - DNA, 268 bp, Mus musculus
  source 1..268: mol_type = other DNA
cctggttgaagtggctcaattctactcctccaggaaaagaacaagacaatctatctacattaccaggaaggcagaggctgctgaattatgattccaggttttccatctgaaaccttaagccttaattaagtctcaagcgttatcactaaatacatacatacatacatacatacatacatacatacatacatacatacatacatacatacatatcttccagcaggccaatcctggtggccaggatgctgaggaaaagttctggctcagc

SEQ ID NO: 30795 - DNA, 565 bp, Mus musculus
  source 1..565: mol_type = other DNA
ctaccttaacgataagacagaactttgtgacagtttgttaagaagttccttattgataaattgaaagaatagttacaactttatcagaaataaatttaattggtgtgagttaaaacatctctttaatgtctctctgcatgacattttatgcataaaaatctatcactattaactcttttgaaggaatggctaacaatgtcagagcagacagcttgctttggctaaaaagcggctcttttctctcaattgcagcaattatttgccttagaagaaacaatttctcaagaatcttgagttaaagttaatttgggattttaaatgccactttcaaagtaattcagtgcaatcaatgcagaaccttttacatgttccaaactggttaccttgtctcctttcacgctaaggactttacgttccaattttgcagcttgcaatgccatcctccagggggcagtgaccaggaatagcgtcagatttgtcgcaggagcctcaccctgagcctgcgcagactgtagctgtcgcgtgagcgcatgcgccttgcggagagttcggccctgacggctct

SEQ ID NO: 30796 - DNA, 275 bp, Mus musculus
  source 1..275: mol_type = other DNA
ggtttctctatagccctggctgttctggaacttgtagaccaggctggcctcgcaaaaacagtttaaggttttatttgggtaagtagggtatccattttcaaacacacacaggtgtgtgtgatctggtgtgtgtacatttatgtgtacgtagttctacacctgtcattcctggcctcagcccaggtcacccttgaaactacgcgagtccccccggactgaggatagcaaacctgaggacttctggtctcagcattgggccccgacgcttagctctc

SEQ ID NO: 30797 - DNA, 406 bp, Mus musculus
  source 1..406: mol_type = other DNA
gagaacttaagttatactatgaaacatcattcgtgcaaggtttgaactttcactaaatgtaatggtatttttgtaattttaaatagaaggtatgatcaaaatcataaaattaaaatcaccttttacatgaagggcaaaagcattacataattattctttgcacatttttgtttacagaccatcctttgaagatgtggtaccacggaagaactacaaacttaggcaagtgcgaccgacaatgctaggcgcgccggcggagcaggctcccccgctcagcgccctgatatgaggagccggggcagcaccgaaggcagctcccgacggcacatctcctccgagagacgaacccgccacagcttggaacgccgtcccagcaggctttgagagagctaagcgtcggggccca

SEQ ID NO: 30798 - DNA, 472 bp, Mus musculus
  source 1..472: mol_type = other DNA
ggatttatagatgatatcctagatagatagatagataggtagatagatagatagatagatagatagatagatagatatgaatacatagatgaatgatagatagatagatagatagatagatagatagatagatagatgatagatagataaaacctggtttcttaattctttcacctgtgcaacaaggatagggtacacattttcatataatcagcggtctaggtcactaagtaggtactgtgtcactacagataccatattaccactgttgaaacgagaaatctagtattaggatggcctaaggtagcagtgactgagcagatcatgggtaataaaatactcttagtttgctcatctttgtgaaaccaagttctacacttgattgataatggtaattagactttataacagtatcccatttgataaaactgtaatttgggcagagtctctgactgaaattgataataatgtc

SEQ ID NO: 30799 - DNA, 239 bp, Mus musculus
  source 1..239: mol_type = other DNA
ctttcaaaggtaattaagatgacctgtttgtgtgtctgtgtgtatgttgacacatacatgccattcattattactaactttcttacagtttaaatactattatgtcagtgacttgaatggctgaattcaaactttatatgctctctaagttagagccctgggattttattgttcaagagcaagtgaactagctctttttttttttaatttgggggattataatataattacaatatctc

SEQ ID NO: 30800 - DNA, 258 bp, Mus musculus
  source 1..258: mol_type = other DNA
aggtgagtaagttcgtgactcagtctcgcaattatatacactcagtgtttagaatagagtgtgttgtaggcagtgctagcttgcactcatcacaggcagggtctgctcaaagcaaaccttccaaaccttacaaccttagattggaactcctgtcataatcaaaggaaacctgacccctgggtgcatgggtcctgatcctgccttgctcagtctgggatgtccaggcatgattcacacctgcgcctgtctccagccggt

SEQ ID NO: 30801 - DNA, 562 bp, Mus musculus
  source 1..562: mol_type = other DNA
tgaaaatgcaatctttaagtcatttagatgtgatatttctcactagcatgataccaagacggctgattattcatttatactaaaacattacacattgctttcaagatattacattattttttttgcaattgtaaaagaggaacacatctttcacaatcacttaaactttgatgtcaaaggcttagcatttaaaataaaaacactcgtggtcgcaagtgctacgtagaatctatgacttgggtaactgcaggcaggttagcaaaatatattctgcaactcaaagttaggtttgatattatttaagcctcctcttagttagacatgcctttgaatgactaccttatgtgctcactaacatgggtaataagaaaagtgaaaatacaagtgtgccttcccttcccaacaaaatctccttataatgaagtacatggtgacagctttgacatctttttctttagaagatgaacttgtgtttaacaggaataaatattatataactagaaggtcctttttcttttttttaagcagactgtcaaaaggcttttccaaaatgataaattat

SEQ ID NO: 30802 - DNA, 319 bp, Mus musculus
  source 1..319: mol_type = other DNA
attcaggcataattctcagagctacctaggccctggggactgtccagtgatcaaggaaaactagaattgccattcttattttacagatgtcaaaagtatttctaaagacatagtctggtctcggctacacttgagctggtgacaagcccttaccaagcggtctgtcctaagagattcagactgctaaccacccgcgcaggttaagtgggattgctgctcccacctacgttgaaggcggagacccttgggcactgctccagagccataacatgcctgtggccacaggggggagtcctcaacaagcccctgcctacactag

SEQ ID NO: 30803 - DNA, 368 bp, Mus musculus
  source 1..368: mol_type = other DNA
gcctgtctggaaagacagaaacctccagggcctagtaggatatattagttaattgttctttgtatcctgccaacaaaaagtgacgaaataaagcaaaagcctcttgctgattaactcgtctttctaccacatttaaagacaatgttaaaaaaccagggatgggatcccgctctagggagccttccggacgtgtgatcaccgatccgtgtgtagggtcctcgccacagagtccagaccagagcccgggcgcgcagccccaagcggcctttctgtcttttgagccactggccaatagggaagcatggggcgtggccaggcggaggcgggccagaccgcggggccaggcggggtggcgggccagacccgga

SEQ ID NO: 30804 - DNA, 565 bp, Mus musculus
  source 1..565: mol_type = other DNA
gaaagggaactcacagtttcctaggaatgactgccatgaatatttttgcatggaaatgagacatgacaatgtgcatgtaataacaggcagtggatgtatgcttcaccctatctggtatattttgagtcaacaaaacaagttgactatttttcaaaagtaagctctggagtaaactctttacatatataaagatatatatatatatataatcaaggagaggttaatatattaatatatattagcttatatatgaatctctattttcctattatcccccaaggtattaagggaagttatgggaaactggaactaaagttctattttctttcataactcctttctgtaaatacaattttggctataatttctttaaagcaattaacaactagcaactgttatcttttaatatttacttgaggaactgttatcttttaatatttacttgaggaaaatgaacacagaaatgcacttttattgttaagttttggaaacaaattaaaaatctgactacaggtgtgttcgcggggatccgttctgcgcctgcgcgcgatcctaccccgcctca

SEQ ID NO: 30805 - DNA, 259 bp, Mus musculus
  source 1..259: mol_type = other DNA
gagttaactagaactctgtgcactacataatttatggtggtgttggtgaatgctagaactctccaagcttataaacggtttattcgaaataattctcgtgttccgtaaccagggtctcggagcctttcatatcctccagccactgcttcgaagacgccgcctcgaagctgcttcgtctccattggctgggagtaattaggccccgcccattcacttgcctcatcgcctggggcaacgcgacgccacctacgcgtctggc

SEQ ID NO: 30806 - DNA, 275 bp, Mus musculus
  source 1..275: mol_type = other DNA
gccctgggaatgcatccgcctgtcagcctcattccgtccctgtcaggaggagcctcttcccacgcgtccggcacacgggccggctgcagccggctgacttgtaaacatttccgaggtatggacgcttaaacttccgggtcactaccagccagacgcgtaggtggcgtcgcgttgccccaggcgatgaggcaagtgaatgggcggggcctaattactcccagccaatggagacgaagcagcttcgaggcggcgtcttcgaagcagtggctggagga

SEQ ID NO: 30807 - DNA, 501 bp, Mus musculus
  source 1..501: mol_type = other DNA
gccgcccacaagcacgaaccgaggctgcccgctgggctggcctgcagaagagggacgggccggaactgcaaccgcagtggcagcaccttcccccacctggccatggcctaggggaggtggacctgcagtaagggccagcagagctgcgggagcagtactcacccgccccctttgtgcggggccccgcgcccgccccttcgggggctcaggccccgccttctcggcgctggcgattggcttgccgtgccgccggtaggcggagctacggtagggcgtgcgccctcagccaatttctcggctcctggcctgcgcgcccgtgtgccgagcccgcgctccacagagtggtgcagctacagcttgaagcagcagctgcggggttcgctgagccccccggaaggcgatcggagtgcggggaaagcccgagagcggccgcgcgcccacctctaggtgcggggctcggagccgcccagcccgcgcgcgccctcctccctctgcctaggc

SEQ ID NO: 30808 - DNA, 377 bp, Mus musculus
  source 1..377: mol_type = other DNA
ctatccagtctactctatagcatgatttcagagctgcctgcaggactgtatgctacacagttgaaaagctggcctttattttatacactcaatgtaaagtttgaaagtgccagctgaaaattcagcagctcagttagacattttaacagtagacctgaagacagatcatctgcttctactagaaatctaaaggttgagttcctttaacttactggatttccgtataattctagagagctaagcaggagctaccagatacctggtttatttacatgttccttgcatgttcatagaattccaccttcatttctcagcgtggaaaagcttttgcttgagcaatgacaccacccacatctgggaaccacatgtcagcaaac

SEQ ID NO: 30809 - DNA, 331 bp, Mus musculus
  source 1..331: mol_type = other DNA
acagacctgggccaggagagtctaggtggccgttgttccccggggtctagactggcaggagccgccgcccacaagcacgaaccgaggctgcccgctgggctggcctgcagaagagggacgggccggaactgcaaccgcagtggcagcaccttcccccacctggccatggcctaggggaggtggacctgcagtaagggccagcagagctgcgggagcagtactcacccgccccctttgtgcggggccccgcgcccgccccttcgggggctcaggccccgccttctcggcgctggcgattggcttgccgtgccgccggtaggcggagctacgg

SEQ ID NO: 30810 - DNA, 294 bp, Mus musculus
  source 1..294: mol_type = other DNA
ccaacatcaagatggtcttgtgggggaggctttccaatggcagaccacacctcattagatacaccgctgcatccaggagcagggggactgagaaatggagcctagtagccaggactgcttaggtagctaattgtttagttccacatggaaaaatactatttcccaaatggggttgcctcaggtaacctggtgtcactacctaaaacacaaaattaaaaaaaaatgtgtcttctctttgcagtgtgggtatattagaaacttcattctagtgttcttagcccagactggcatccg

SEQ ID NO: 30811 - DNA, 372 bp, Mus musculus
  source 1..372: mol_type = other DNA
aacaggagcagctatttaactttttagtttgctgaaacagcaattgtcatgatcatgattgtgtacacgaacacccttagaagggatacttacttgtatgtatgtgagtctacctgcacctgtagtcaggtgctcatgggaggctatcagatcccctggagcagggctgattcttttttttctttctaagataagattgtagaacagcaataagcttagcaaccgcaagctctttgctaggcagcaggtgggatggacctcacactgagccatgacacggattcaggatggaagatcctctcatgctcacatttagtttcaatgacaacttgtgtttaaatttaaaaaaaaaaaagtcattgcaaagacttt

SEQ ID NO: 30812 - DNA, 209 bp, Mus musculus
  source 1..209: mol_type = other DNA
ctgagaagagaaccacgtcagtattactttttttttttttttaaaagaaaatccaactcacttcgaggcagaggcagctgcccagaaacatcttggaatcccaaagggactccttcctcactgcgccctctcttccgcctttgggtgagaagggtgggggaaggcagcagcttccttgcggaggtgtcctccctcagtgacgtcagagg

SEQ ID NO: 30813 - DNA, 234 bp, Mus musculus
  source 1..234: mol_type = other DNA
cgggagcgttggccacggctgtcccaaaagattttggaccaacgatcaatgagagtttttcttagaatagttcaggacaaattactttcccccttcctttcactaggactggagataaggggaaagaggtctgtagttcttttcctcctcagctgactactctgccaggacagcttgcccagacagcaagtttggcctggaatcgaggctagcgcgtgtcacactggaagcttt

SEQ ID NO: 30814 - DNA, 377 bp, Mus musculus
  source 1..377: mol_type = other DNA
cctactttccgtaggcaatggaattaatcctgggttcctgggacagacacacacttggcttcaccttctggtatgcaacaacgctgcttagcggttccagcgtcgatgaaacaaacactgagtgacagttttgagatgctcaaacattaaaccatctcattttgaggctgggtgccctgcaagcatggaagaaaagtcttaaaatatcataaggataatttgacgtttctttcggtagtcctcttcaccacgactcataagcacaagaggtgatgacactctctggggtgacgtcacccggagacttcagggcggcgcgccagagcgacacccccgcgctcaagtcccgcccccgtgggaagggcgggcctacggcg

SEQ ID NO: 30815 - DNA, 406 bp, Mus musculus
  source 1..406: mol_type = other DNA
gacgtcttacagagaggtgtaaggaagtccctgcagaggcagcagcagctggtcacaacctcacatgaaaagccttgcatatgctaggcaagcattctcttttgcttcatagcctcagtagtgctgcagactgattgaagtgttgcatacttaacgtgggaaatatatatttttatagatctgcgtccaggccctggcacatggtggtgctgggcgcggaacgaatccgtgaagcccgggcgcgcagccagcttccgggttaggcccgactctctcggccccgccccgggtgaccccaaggagctcgttcagggggcgtggctggcgcggggcatgccgggcgggcaggtgggcaggtgcctgggcggggcgcgccgtggttggcagcgggcggaggggcggcggc

SEQ ID NO: 30816 - DNA, 540 bp, Mus musculus
  source 1..540: mol_type = other DNA
taggtggcccgcaggcctcgggcgccggcagctgccatcgcggcggcctagggatcgacagcagcagggtgggagcgccgctgtgtccgcgttcctggctgacaacgaagggcggcttgcagcgctggggcgtccgcctctgccctagggcgcccttccccggctctggcagccagaggtgaagcacgctcaggggggcggagctcagcaaaagcccgccccggcccgcctcctgcgagcgggttggggagaccgagtcgccgtgctggggccgctagagctaggcgggcgaggcgttgcgcaagctttggccagaaatcatctccttccggccctggaggccatgttggagaggggaaccgcgtcatgcctctccaatccattaaggagtaggctagagcgccctcaagctcctctcccagcggcttctgttgcccgtgtgcatcctctcgcgagaagggccggggaggagagggaggagctcgcggccgcctccgccttcgcctccgcctcccgcgggaggggggtcgagggagggga

SEQ ID NO: 30817 - DNA, 599 bp, Mus musculus
  source 1..599: mol_type = other DNA
agaaaagcaaaagcgccaactttggcgttcaacgtggcatctccgtaaggctcgcggagtcttctccggatgccgcctccccacggcccggctctccgagggaagcccagcttgagccgcgcctggcagggcctaggaggagcgggcgcggatcgccgtcatcccacctgagacctagcctgcggggcgccccggtcggggctcggtccggtcgccaacagccccggcggcgccccctcccccacctctgggcggcgacctcagcgccgccgccccggggcccccgctcacccaggtagcggctcctcagccgggacgggtcctccagcccaagggacctttgggcaggagccactccgagccatggctccgcaggggctggggtggggagcggcaccagcaccatgcgcgcgccccggggcctcgccggcgccgcgactcagagggcggcagccacggccgcgccttctccccgggagcggagaggtacccgggccacggctcgcctctcccctccctcgacccccctcccgcgggaggcggaggcgaaggcggaggcggccgcgagctcctccctctcctccccggcccttctcgcg

SEQ ID NO: 30818 - DNA, 540 bp, Mus musculus
  source 1..540: mol_type = other DNA
ttgtgtcaagttggcataaaactagccacctttaaaacatactttgacagtgtcccactggattgtgaaaacttaaattcttactcataaggcctcagattttaactgacctttgcgtaaatttataagtagacacattaaattcaaaaacagatgtataatttgtcaaaattttacctcacaagtagtaaattcattaaaactggaaaaagtgtggtcactacaatagtgcagatagctcagttttttaatgaagtatagtaagaaattaataacaacagtaataagataagacaattgtagcaaaatgctgacaagtctgccatacaagtcatttagagagacttcattatgctgctgaacactgtaattccaaaaagaaagagtattgctgtaattttccattcatgtttaccatgatcagtggtaacttattaagagacttttcttttgataatagtcacctatcaactgtgacctaatttcagtagacactctctccaactgtctcacatgtccagacatgagaacctgagataa

SEQ ID NO: 30819 - DNA, 474 bp, Mus musculus
  source 1..474: mol_type = other DNA
gagcggcaccagcaccatgcgcgcgccccggggcctcgccggcgccgcgactcagagggcggcagccacggccgcgccttctccccgggagcggagaggtacccgggccacggctcgcctctcccctccctcgacccccctcccgcgggaggcggaggcgaaggcggaggcggccgcgagctcctccctctcctccccggcccttctcgcgagaggatgcacacgggcaacagaagccgctgggagaggagcttgagggcgctctagcctactccttaatggattggagaggcatgacgcggttcccctctccaacatggcctccagggccggaaggagatgatttctggccaaagcttgcgcaacgcctcgcccgcctagctctagcggccccagcacggcgactcggtctccccaacccgctcgcaggaggcgggccggggcgggcttttgctgagctccgcccccctgagc

SEQ ID NO: 30820 - DNA, 202 bp, Mus musculus
  source 1..202: mol_type = other DNA
tctactggactacgctccgcctattattgaagtaaggcaccgcctcattcctattcctttcctgtcctctgaaaagccaaaaaagactggcccctcagagaggagggcagcctctggcggcggtgggccggagggcagccccacgaccagccacgccggctcaagggcggggcccggagggcggggccttgcccgagggggc

SEQ ID NO: 30821 - DNA, 163 bp, Mus musculus
  source 1..163: mol_type = other DNA
gccctttgctatatttaataggaatgggaaaaaggtcagtagcctgctgcatgcggcaggaaacttggggaaacttgtttcctgccgcgagaaagggggcgcggcgctgcccagcccatgtttgggcagatttagatttgtgtctaaatttaaaccctctggc

SEQ ID NO: 30822 - DNA, 359 bp, Mus musculus
  source 1..359: mol_type = other DNA
aatggggtattttattacagtgacagaaatgaaactagaacacaaatgctacatcaggtttgttaatcaattaaaataagtgatcagctcaatttattcagataccctttctcccctaggacctagagttattgacagcctgtgtgtaagggctgcctgcatacagtttagatttttagactgtgtaaatggaaaacccaggggggaactgagacagccactttctcttccctctggtgatcctctacagaggtggacacatactcaggattgctgagcacagctctgggtttctaagaaagacagcctagggaggccctgcctgaggagggaggggcaggagagcagctgcacctcac

SEQ ID NO: 30823 - DNA, 414 bp, Mus musculus
  source 1..414: mol_type = other DNA
cggccatcgaaaggccccttggtcttgcactttatatgccccagtatttgaaatgtaaatgaagaaaatacctaatatttttttaagaaagaaaaaagagtagcggctacttcataactctgagattctaacagtggccacagttttaaaacgacgcaaacacgtttgcatacattttctaactccctagggtagcagaatgatgacttgacaggtcaagactcttctgggccaggaatttttaagttcctgcatgtcggtatttctgtactgtactacatataggcttgcttgctaacagtcagtaaacttaaaaaggaggtgtgtgcgtgcatgcaggcagctttttttgctttcatttatctgaaaacaaatatctctttagggcaaattcgcactcttcacagagcagat

SEQ ID NO: 30824 - DNA, 356 bp, Mus musculus
  source 1..356: mol_type = other DNA
atattgtctttccatttagaaggctggtagactgaaaagtaactgtggacttcttgactttcttttttaaatcaaagaaaccagaggctgttagtccagtgtgacctcaaactcacattttatcgttttcttactgtaaatgaccccaagggtgaaaagttgacaattagagaagaattttgaaaacaatgtaagctatagtatttcacactatttatggtctgaattgaggccaagttcagaactatacctcaaatatcctcctttctttgtgcttcagataaagaagctgacgtctggagatgcttcattagtaaagaattaaaataataaaaaagtacattaaactaagtctc

SEQ ID NO: 30825 - DNA, 439 bp, Mus musculus
  source 1..439: mol_type = other DNA
gaaaaaatagtttctaagtaagaaactgtcttcctcgagcatgttgtataataggcagctcttctgttaatttggtagtataaaaagattcacatataatgaatatctggtgtagaaagccttttgcaaatcctcttattactgaagtcattgttgccagcaggaataagattaacagtggcaaaatctttatcctcctaattattatgctggcactcaggagataatttttcccttcatgcactgccaattaatatgcaaatgtgctgataaatatttatgtattcatttaaattatgcagggagtgctttcagtgtattctgtaaatgaggccctaatcacacgcatactgattaagcttcattatggaaactgccagctgcaatctttgtttctattttattacaaaaagaggaacttttcagactaaaactcctc

SEQ ID NO: 30826 - DNA, 681 bp, Mus musculus
  source 1..681: mol_type = other DNA
aaagaatccctacgcagatggggtctgtttgtttcgggtgggcgcgtgcaagggcgtccgggcgactcggacggccgctcccacagaggctgggccgggcacgcggaggcgactctttgcctggctaattagagccgccaggacacgcccccaggagtccgcccgccggccccgccccgaatctgcggcgtgggctgaggcgcggggcggggattagctcggattcaaatttaaagcgggacgtccgcgcgtggcccagcaggtgcctcgtgcccgttgcccgccgagggcgtttccgcccccacctgcacacagggccggaaattacctcggcggggagcggtcccctccattgtcgcagtcaactgcgagggagtcaaaaagtgcgcggccgtggagcgctcgctagtccctcacgcgtgtcctcgcggcgagacgccgggcatgttcgctcccggggggagggagggggcgaagagacgcgcatgcgcttcctacctctccggcgcgtggagaaaactgcgcgtgcgcacagcggcgcggactgagggggcggggtccctgcagcctggacgcgcgtgcgcaccgcgcgcgcaggggggtggagctcttccaagggggccggcggagagcagcgccggcctcgggcgccccctggcgcgcgcctcgggagaggaagga

SEQ ID NO: 30827 - DNA, 533 bp, Mus musculus
  source 1..533: mol_type = other DNA
cccggtgccccggccccgccgcctgccgtggacccgcttcgggcaccgtgcgaggaggcggcggcggccggcggaggaggagggccggtgccggcgggcgggccggcgcggcagccgcggggtgggccgggggcaggaggagcgcggtggctcacagccccctttgcccctccccctccgctcggcgcccagagggggctgtgttccccggccccccatctcctcgccgttaattataataatcctgagtactaataaattatgctaagtggagcccggcttacctgctgctgctgccgccgcggctgaactcttccttcctctcccgaggcgcgcgccagggggcgcccgaggccggcgctgctctccgccggcccccttggaagagctccacccccctgcgcgcgcggtgcgcacgcgcgtccaggctgcagggaccccgccccctcagtccgcgccgctgtgcgcacgcgcagttttctccacgcgccggagaggtaggaagcgcatgcgcgtctcttcgccccctccct

SEQ ID NO: 30828 - DNA, 200 bp, Mus musculus
  source 1..200: mol_type = other DNA
tcagtgcagcgctctgactcatagctaggaggctatgagtctaactaacttagtcaggtacagtgcccaatagttccccctagttgcaactggccactctcaagccatgacttctctttaatcaaaacatggtgttctccccatgggagccagcctcctgcgggagatggttttctctaggtccttgtgtcacagcaaga

SEQ ID NO: 30829 - DNA, 493 bp, Mus musculus
  source 1..493: mol_type = other DNA
caaacttggaaaaggtaacacgtggtgtgatattattcattacctattaagcagaacatagtagtgctgtatgtatgaatgcaaaaaaactctaaggtattttattaaataaaaatatttaaatgacataatatcatttgtacatattctataatgtagagtatctatggcagagcctgatcagatagctctcccggagagctatttcctatagatagaccaggctacagagatctgcgtttcggttcacctcttacatttattcgaaggtaacaaacatctcagttgttttgggaagaactaagatacattgtcatcttggtttctttgtcctccgagaccacatttctgtcccagtgtgggagtctttgagaggtccacaccttctgagaagcacaggactttgcactcctgctgaaaggggcctcaccccataggtgagctcacctgccagtccgttgactgggtggggcatgtgggcccagtctggccc

SEQ ID NO: 30830 - DNA, 370 bp, Mus musculus
  source 1..370: mol_type = other DNA
aacaaacaaaaaaactaacccttgtttttgcctggattaatctggtctaatctggctgattatctgtcagtgacagagagaaaagatgatcaagttatctgaaaagataaaaattttaaatgaattttcaactctacttatacacaaattaagtaactcgaatacaaaccagtatgagaactcactattactaaatacacaggctcaaccttttataagaaagcctataaaactttattcatggatgttttgtgaaacagaagttttcaagttacgaggtggaatccagggctgttttcacccccacagcagggggcccaatgcggctgcgcgctgcaccctgattggccaagtgccgggctgaagcgcg

SEQ ID NO: 30831 - DNA, 510 bp, Mus musculus
  source 1..510: mol_type = other DNA
atattttttacaatgactatgcattatgcctctgcaggatatggctcctcaagcattctcatcctgtagccttaatgcttagagcctaggagagccttagtatatatttgctaaccctattgtgagtcctttccaatagacaggagacaactccattttaaaagtgggcatagcccatgggtacgctgcaaatggagaatgtataggtgtagtctcctgttaaaaaggccacatacgttttaacagaaaaaagatttttgcctaaagggtttctcttggttcgttgaaccagatgcactggcaagagcctgcttggtggctcaagtagagcttgagtcgcagcccccgccacatggtccgccctctggggtggacttcgctgctaggctctgacctcccagccccgggcgggcggtgttggcgcgggcggcggcgcggcgatcgagctcccccgcgcggcgagctctgctgcggggaggcgctcgccggtgccgcgcagcctgtgcgtgc

SEQ ID NO: 30832 - DNA, 493 bp, Mus musculus
  source 1..493: mol_type = other DNA
atcaggcagctcacagctgccttcaggcataagcacatacccatgcacatattacttaaaataatattttgatttttaaaaacgattcttttcttaaccacttaagcaagaatcctaagtcagtttagttgttatgtctgctttcaaccagaatccagtttagtgggtttagcaagaatccctcaatctttgataattccaactcaatcttttagtattttcaataatggtgtttgtttaaacaaggtccaaacagatctccgactgtagaatctttttctgaaataagaagattttttctccacagagctgtgggcaaacaacacccctccgcgcacagagcatttctggatgcctgagcggaaaggctgcggtgttcctccgagcaaatgcccacctcggcggccgcaagtgagccagccaccgggctaacgcggctcgaagcaccgaggtcgccggaagcgccgccgagacctgctgacgtcaccgcccc

SEQ ID NO: 30833 - DNA, 433 bp, Mus musculus
  source 1..433: mol_type = other DNA
atgcctttagtcccagccagcactagaggcagttggctttaaaagtaggctttaaaaagttttaagctgaactatgtgcatattcgagtgtgaatttggaatttgagagaggacaagctagcttgtgggtccttcttgatctgtcaatagtgaatgttcagaacttgagtaacataaatcctgccttcaggcagctctcgttttagttgcaggaggcagaaaacgagatcgaccctctgagctcttccttctgggaagagctgacctgcagtcagggcggggcctggccggagggcgggcggggcggtcaagttcgcgccccgggggccgccgcgggcgggcaggcgggcgtaggttgggcacgcgcccaccaggggaagcgggtcacgtccctagcggatgggggcggggccgccgagcagagccgagccga

SEQ ID NO: 30834 - DNA, 497 bp, Mus musculus
  source 1..497: mol_type = other DNA
ccatatgtgcatgtgcatgtggcaattactactttttatttctaagtagcaaaagatgtagtgccttcatcaattactagacatgcccatgaaatctaggagtcgtggtcaagaatcactctgatcactaatcaacagtcttatgacattgtggagatctttatcaatgcattaagtttcttctattggtattggattttagccccattcaagatacatatcaacagctaaaatacgagatctcttcattcttgtggacagcagttgttctggcaaagtaattggcataaatgccttcaaatacctctctgcaagctgtgggatatcaatatccatactgtttcttgttcaattcaagagttcatttggtcaataagtctttttgaatacttactttgtacacaggacctttatagttgatgaatatactaataaatatgaatgcaaatcctcagcgaaatgaaataaatagtatcattaatatcagtgagcatatt

SEQ ID NO: 30835 - DNA, 513 bp, Mus musculus
  source 1..513: mol_type = other DNA
ttacttggtaaaaattaaagtgtaagaaaaaaaatcttccgggtatcctggtctttctcttcgcgcagaacttaggacactttcagatactacaaatgtggtgaccggggtctaatcatgagtatccttttagctcagaaaatatttaatttttgtcatatgtgtttcgacacttaataaattgagaacagtgggttttaaatttatttttagcatattgctttactttccaagctgtttggtttttataaaagttaaactataagtattaagaagtgaacattaacttgtggaccacattttcttagtacaaaactatttaaagtgacaaaaagaaacatttggactatggccagttaaataacaacattgcttatatttcccaatttttatgtcagagttgataactataaataccatcattagctaatgtccatgacattttttaatccaaattagaagagtcatgggaagggattatatattagtcaattccatcagctataaaagact

SEQ ID NO: 30836 - DNA, 703 bp, Mus musculus
  source 1..703: mol_type = other DNA
cgcggggcgccacctaccggggtcccggccccgcccaaccccacgtgccgcgccccgcccgggagctagcggcccggacggcagccgaagagggcccccgtagccctagcccgctgggctctccgcccggggctacggtcccctggcgccccccacacgcccccgcagccggatgcgggagtgtgggcgctgtccggctccagggcggggcgggagggaacacggactccgccgccgccgcctgcctccgcctgccgctcgggccgcccgctcgcccgccgctgggtgcgctgcacgcggggggcagccgcggtgcagcagaggttcatgcagcggcggcggcggcggcggctgctgctgctgccgccgcggaaacagacaaaccgggcgctgccgccgccaccctcccgcagctccatgccgccgccgccgcctcctcctcctcctctccggcgaagggcggggggctccggcccggggtgggcaccactcctcgcagcgccgctcccctccctgccctccgccggggcacgggagccggagagagcgcccgccgcctcctaggagcgcacgctccgcgcgcccttgctggagcgaggaggcgggcgtgggcgggcgtcggggcagccgcgacccagcgcgcggaaaggggagggggcttccccggaggatgccccgcggcggcggctcctcgctcttaggc

SEQ ID NO: 30837 - DNA, 385 bp, Mus musculus
  source 1..385: mol_type = other DNA
tctaaaaactttacctatgataattcattttagcccatcaaaaatcctagcgtgtatcattcctaactaagtgacaaattgcctgcctctaataaactaggtcagttaaagtcatcaatgaatggaaatggcattgttatgtttctattagggaggagtaaccgtccccggtgacacactattttggcacacggcccccgctccgtcccagaaagggttaatccggcgggtggggaggggagtggcgctcacacctttcccagagacctcgggcggcggcggggcccgggcggggcggaggctggggccagactcctggcgaatagcagcgcgcagcccgcccggattggagcagcctcatcacgctgacctctgcctgggccca

SEQ ID NO: 30838 - DNA, 481 bp, Mus musculus
  source 1..481: mol_type = other DNA
aggaagacttctgagttttcttgaggaaaaagagcagatctgggaatcgagtgctcttatatcaaggacggtaatttacagtccatcacggaggacatgtatgatctttctctgtatagccctggctgtcctggaactcactctgtagaccaggctggcctcgaactcagaaatcggcctgccccgcagcacgagtgcagcccttcgcccgaggactcctcgactcggctcgcccagcccaggaccggggcgagcccccagaccctgacgctccgcacgcggtggcctaacttttcggccacggaggcgggcccactgccgaggtcgcaacgccgccgccaccacactccaactctcgcgagaccgggcctggcgcgcgccttcggcccccgagacttgcgcgttgccgctctctcccgactatggcggccagacggcgggagtgaagcctgtagttccgggtcggcgccccggaagcgga

SEQ ID NO: 30839 - DNA, 165 bp, Mus musculus
  source 1..165: mol_type = other DNA
acacgcaaattcgtgaagcgttccatatttttgagctaaggatggactatgaggctatgccagtgcctggcaaattttcgtatctctaggcatttgaaatgtatataaagaaaatatctaaatactgtgcttctccaggaactccttcgcgtggcacgaggccac

SEQ ID NO: 30840 - DNA, 191 bp, Mus musculus
  source 1..191: mol_type = other DNA
tgaggctatgccagtgcctggcaaattttcgtatctctaggcatttgaaatgtatataaagaaaatatctaaatactgtgcttctccaggaactccttcgcgtggcacgaggccaccagtgggctctactgggctctccttgagggccccgggtcttcacactgtccacccctgcccagccagggtcgcgg

SEQ ID NO: 30841 - DNA, 328 bp, Mus musculus
  source 1..328: mol_type = other DNA
aacttgacttaggaatttctttggttctgttactagaagtaaattagtatgcactgtctgacctaagatagcttcggtgctttctgcaaattatagaaattagcagtcaaggtctgcttctgcttagtagctctcctggaggccgccgcgaggtggcacgggtccgggaagaaatacctggcgagccaagccataggagcccgcccgcaggcgcgcacgcgcagcaagctgagtacagtgccctgcctagccggaaaagtagatatgcgcagaggcggtctcgggggcggtcccgagggcgtggccgcgcggggcggggcggagtggg

SEQ ID NO: 30842 - DNA, 343 bp, Mus musculus
  source 1..343: mol_type = other DNA
tctactattgacatggctgttctgtggctgagatcctgcacaaagacgcgttctcagagaatatcaaagggtcttacactttccactgtgagttggttggctctaaccaagggaatctcggtgtcagagatgctgggaccatctttgagcagatggcacaatgatgctgttcccccagtgaaacatcagagtgggtaccacacctgtaggtaaggctccctgttgagcttcaccactgttgctggccacccgaaaatgcattttaataaaaccccattgatttttttttgtgaaaaggcacctaaagagctaatagattgtgccacccggtaggaacctctgg

SEQ ID NO: 30843 - DNA, 292 bp, Mus musculus
  source 1..292: mol_type = other DNA
caaggccagcctgggaagctgtagagtaacgcctgcagtaaagtgcttgctgcacgctaatgtgcacacttactaaattaatgaataaatgcaaacagtgctatacgacaccaccccgggtttggggggtataaatgttgctgagcattcaaaacaaataaaatcataattgaaaacaacaatcactgttatctatgaagacataagcagacagcactgtctccccgaggctgcctttagcaatcacagcagagtctcctggccaagtttggctttggaagctatattaagc

SEQ ID NO: 30844 - DNA, 648 bp, Mus musculus
  source 1..648: mol_type = other DNA
acccccttcccgggccgcgcacgcagccagcggccactgtcagaaaccgcccgagccgcctcgaagaaggcagggcggactttgcacccaggaccctgggcctccggttccaccgccgatcttggagcagccgcctgcggctgcagggttggcgggacgtcccgaggaggatcggcggcttgaggccacggcccggccccactccggcgcgccgaggagcggaatcgggggccggcgttcgctcctgctctctcccgggtgcgccggagtccgggcggctgctctggctgcagcctaggggacgcctcctccctccgccaaagctgcccggcgtctcccggccacttcgcgctgctccggacgctgggcgcgagctcgcccatcaggtaaggaaggctgcggggatccttaggctccggaaccgggccagtcgcggctcctagacgttcccggcactggccgaccggcgggaggacctccccgcgcgccccgcacgcctactccaagcagagcgctgcgccaggagtacggaagcaggcgggacagtctccgagtcccttactctgcctctctctattggccctggctctgagagcaggcgtacccccaccccatcacacagagtacttctagtggtgggatccaacg

SEQ ID NO: 30845 - DNA, 287 bp, Mus musculus
  source 1..287: mol_type = other DNA
gttattaatgcttattagactatattaaaaactagaaccagactataatgcaatcccttattaagtgtttccaaataaccaacttccctcagggggaagagaaatgttgaagccacaaaaatgacaatttatattctctttgctggcatagagttgaggatttgcaaattatccactacctttttatttactaactacgtcatataacaaagttttgcttgtggggcggagggatccacaccgtctgttagaagggggcggggctcaagagccctcctccctccttc

SEQ ID NO: 30846 - DNA, 245 bp, Mus musculus
  source 1..245: mol_type = other DNA
ttttatttactaactacgtcatataacaaagttttgcttgtggggcggagggatccacaccgtctgttagaagggggcggggctcaagagccctcctccctccttctggagtcctgagcctgggctaaacaattgcctgccgccacggctgggggtgatcggcagcccaccccctttgagatcactctggcccggagtgggggtggggggtgggggggaaagtttgcattgcaatccccctgcct

SEQ ID NO: 30847 - DNA, 599 bp, Mus musculus
  source 1..599: mol_type = other DNA
ttttgattactggaaagaaatggaatgaaattctcagtaatgttaacatctacttatatgaaactatgttctataatattggctcaagaatataacaattaaaatcttacctatttattaaaaaaatcaagtagtaaaggggatattaaaacacccgtgaatagagagttctgtatattctttgtgtaagccacagaaatggctcaccgatgagatgaactagtggttttgctagaatcatattccagtacgtttatgcttctagatttattatcctatattgagtcctcaaagtgagtaaattaaagatttaaattggacgtccttaagtacaaatatccagtgaggtcaaaatttgaccccatcaatgcttatcaaacagtaagactgttactactacttactctctgagcctaagagaactgtctgcctgctcgctatcaggtacgctgaaggcaaagttccagtctgggaggtctggcggaatcgcggttccggctagaaactatagaagggagcctggctcgctgcgcaactcgtcaagtcccacccaccttctcggcatccgtcgcgaaggaagcgcgctgtgcggaaagggg

SEQ ID NO: 30848 - DNA, 245 bp, Mus musculus
  source 1..245: mol_type = other DNA
tccctctccccaatctccttcagggagaggaaacggctgctggaaatgcacacaggctgtgaccccctaggtccgggcagttgttgctcatctgagtgctcaggagatgagagatcctcagctactctctccaccgtgaaaagaagccgtttggacccttggcagatctgaaatggctcagggtaccttgctttcaaagaaagcccatctcagtttaggctcgctgattggtcctcggagcagct

SEQ ID NO: 30849 - DNA, 318 bp, Mus musculus
  source 1..318: mol_type = other DNA
gaatgtgaaagattcagcctgttaatactcttttttgaataataaagatttagcattacatatcatacaaactcaggtgcaattggaattggtgtcgtctttctagattttgtgctcagtaacatatttaggaatgtctcaaggtcatattgattacagacatactggatttaacttccttgatcttacaagccaatgaatatttttcaggctatatttcctttcctacaaatgcaaaacttgacgcgtaggtagaaacgtcaccctttctgagggctggagaggcagcgcgccgcagcagagcggagcctgcagacc

SEQ ID NO: 30850 - DNA, 513 bp, Mus musculus
  source 1..513: mol_type = other DNA
aaaatttgttaagttactgtcttttaagaacagttgaaatgatcaaccagttttcttaagttttagcagtttgttggtatcattaatcaaaacatatagattaaagcccagaaaagacgttatcatttaggatcacggctatccctagtaattacagctctgaaagaggaatagtttgttcaatcatatgagtattagtcctttcactcaatattaatcatctgtaagtaggaaatgggataacgattataacagctgtatttttatgcgaattgaacttaataaaaaaagggagttttaatgtatgcatgtctgaaggagatgacagtacgcattcctttagtcattcaatgaaatccaggttccttggacttgggttcctgtcagaacaaagcccccgccgcagactgggggcggcgactgctcacctcacccggtctgggcgtggagagaagatcgatcgcgattggcgggcctaacgcgccgagccttgattggtcgaggtgcgcgtgg

SEQ ID NO: 30851 - DNA, 244 bp, Mus musculus
  source 1..244: mol_type = other DNA
tgtatttttgggtgaagctttaatctatacttcagaatctaaatcaaactgactcgaattcggctcttaaatttcaagtctctgagaggctaagcgcctcctctgttgtttgggacccacataaaaaccaagctgtacacctgttatatatgtgcagagtcctggagcgccatccactgcttggctgtgggtggattctcgttccttcctgtgactaggcagtttaagatttaataaaattaga

SEQ ID NO: 30852 - DNA, 408 bp, Mus musculus
  source 1..408: mol_type = other DNA
gattgggtcactgaaacaggcttaagtggcatttaacaaatcctgtattaattgttggttgggtccatcctccacacattcttcatcaacaaatgataagtaggtcgcaggagtgaaatttcctaaagttcatggatgctgacatttaaacaccccgagtgtttaggtttaaagtgaactgtgggcacctacaagacgggtccagcatcactgccaggctgaccagtcactggcggtgggaacggggtctctgcggaccccatcgaagtgaatcaccgacccacgcgcacctcgaccaatcaaggctcggcgcgttaggcccgccaatcgcgatcgatcttctctccacgcccagaccgggtgaggtgagcagtcgccgcccccagtctgcggcgggggctttgttct

SEQ ID NO: 30853 - DNA, 382 bp, Mus musculus
  source 1..382: mol_type = other DNA
ctggacactagaagcatctaggttctctctctctctctctctctctctggcagtgaggggaagagagtaaaaggagggctcagcgctcagctctcatggcctgacgttgtgcttatagcttcagctcgacccaatgggactcgaaaggggagctgcagctttaagtcctccttgtgcaatatattggatgctgggatccttggcgcaggcccaggaatcctcagaatgtgaggtctctctcaaaggcatcttgcatcagcctgtggatgtatgcctacttggggaacctattggatccttctcttcaaacctgggcgtccctggactggaagtaagtttcgttttcttttctaaaaacgaaagctctaagtggacttctctt

SEQ ID NO: 30854 - DNA, 313 bp, Mus musculus
  source 1..313: mol_type = other DNA
gcaggagtgcctcccctgttgttagaagagattttttttttttaaaacaaaatatttagaaagtccttgtgttttcatttactggacactagaagcatctaggttctctctctctctctctctctctctggcagtgaggggaagagagtaaaaggagggctcagcgctcagctctcatggcctgacgttgtgcttatagcttcagctcgacccaatgggactcgaaaggggagctgcagctttaagtcctccttgtgcaatatattggatgctgggatccttggcgcaggcccaggaatcctcagaatgtgag

SEQ ID NO: 30855 - DNA, 506 bp, Mus musculus
  source 1..506: mol_type = other DNA
tatccacctgatggaaaacatcctgatatgttaaatttagttgcttttgacatctcaacaaatttctgcacatgcacatctgctgcctatgctgtaacaggacagttgaattttagcttagtcgccctgccttggagggatctctgcctagaaaccggcgggtctttcccaaccacacccgtgggcgttcggaaatccgtcacctgccagcgccgcgctccctaccaggcgctctgatccgccccgggtgaccgagaggacccgccccttaaggtggcgcctggcctcacctccccgcgaagccgcgcgcgtagccggccccgcccctgctagtgcgtggggggcggtaccatgacgtgtcgggccggcaggcttccgctccgcccctgggccgcagccactcaccgcggcgggaggggccgggtggccggggcccgcgctcccctcggccgctgctcgtggcccgccccgccgccccggcccctcggatgacagtatatattcca

SEQ ID NO: 30856 - DNA, 439 bp, Mus musculus
  source 1..439: mol_type = other DNA
cgtttttatttacaaatgataccccttgttaaatgatatttctaaatgacataaattgatagtaaagtctggattaaaaatgaatcctatccacctgatggaaaacatcctgatatgttaaatttagttgcttttgacatctcaacaaatttctgcacatgcacatctgctgcctatgctgtaacaggacagttgaattttagcttagtcgccctgccttggagggatctctgcctagaaaccggcgggtctttcccaaccacacccgtgggcgttcggaaatccgtcacctgccagcgccgcgctccctaccaggcgctctgatccgccccgggtgaccgagaggacccgccccttaaggtggcgcctggcctcacctccccgcgaagccgcgcgcgtagccggccccgcccctgctagtgcgtggggggcggtacca

SEQ ID NO: 30857 - DNA, 386 bp, Mus musculus
  source 1..386: mol_type = other DNA
aaacaggatgactaatctgttaagatttatttatttctatatacactgaaattctgccggaagagcagtcagtgctcttagctgctagcttattttcttaagcaggagatagagatcttccaataaatccttgttagttattcttttgtgtatattactgttccaaagaaaatcggagtaaaagatattacaccttcttctgacttcaaaaatacacaaatatataaatacaaatataataactctttaaagataaataaaacaaaaaaatcaataatcatatattttgctggagccagggccttccttgcgcattcaaggcaagcactttactactgtgctacaccccatctctaataattaagtttaatatctcagttgttttg

SEQ ID NO: 30858 - DNA, 393 bp, Mus musculus
  source 1..393: mol_type = other DNA
aaaagttgatgctcttattaaacatttttaaaaagtaaagtaattaaaattaaacggtataattggggagtcgcaccgatcagtacaaatgataaatcttgtcagtcagtcaagcctgcagtccagcctaataaagactttctatcagtttaaaaccatatccaagtagtcttctatgatgtctcccaaaacagagattcattcttagctaagaacctacttaaaggacataggactattactttgttaaatgaacatggtattaaacctaagaacttattactatgcttacttttgaatagatggccattaatatggcccctaggaagcacacgtgctgctgctacagccacaaacttagaccacagtggaggaacagaccttccactcctc

SEQ ID NO: 30859 - DNA, 318 bp, Mus musculus
  source 1..318: mol_type = other DNA
agccctggctgtcctggaactcactctgtagaccaggctggcctcgaactcagaaaggcatgcaccaccactgcctggcaatactttcttatccaagtagtcttctatgatggatgcacccaaaaaaagagattcaatcttgacagtattattggagccaagaacccatgtttgttaaatggacatggtattaaaccaactccttaatgacttagcttacttttgaatagatggccattaatgcagagcatagtgctgctgctccagccacaaacagcactgactcatactcacccacttgtgtgagtcatatttgag

SEQ ID NO: 30860 - DNA, 309 bp, Mus musculus
  source 1..309: mol_type = other DNA
aagctactagctccacatagctacttctttacaggtggcagagattttcttatgtagtccctgaggctatttcctgagtccaattccagtatttccagctggtatcaaggggtgaaagacaatgaatcgaattttattctttcacagatttgtcaaaaataaataaggcctcctaactcagaaaacactttgttcaagaattctataatgaccactaattctttgtataccaattaaaatgtttaattaaaaaaaaactgaacaactagttaagtttttaaaaggaaaacagtctttcacacaagaaat

SEQ ID NO: 30861 - DNA, 276 bp, Mus musculus
  source 1..276: mol_type = other DNA
agccccattctgagtaactccctctgggagcagagtccactggggagaattacctttgttgcctcagcaaggttcaaggtccttggtcaataagcccattgggttccccaaggggcactatgtagctccaaattttgggaaaaactttcttttcccgtattagagctaactccttggctaatttgaggttgtatttaaattccgtctgaatttatgcccattggtatttgcattattgaatagtctttagcaaggaaatacatgttaaacattaac

SEQ ID NO: 30862 - DNA, 420 bp, Mus musculus
  source 1..420: mol_type = other DNA
cttcctgaaacttcttggagttgtttaccttccagtttaaagaccttccgctggacagaatgtttcaatttcaaaggaaactgttacacaacctccttcttgcttcaataagaagcctcacagaattcagttaaaaaactttaataaatgacataagaacattctgcaatttcttgttatatatttaaattcttggagacagccctcttatgcggactgcgcctggatcgccacgctcctgcggtctggccagggcgaagttcccgggtctcggctcagcgctgcggggactttcacctgctgggcgcgcgcggggcgcggggcgcggggcggacccggcggcggcgggcggggctctagcgcgcgggaggagtcggtccaggcccgccccgcaggaggagccgcgggctggcagccgat

SEQ ID NO: 30863 - DNA, 452 bp, Mus musculus
  source 1..452: mol_type = other DNA
taaccatgggaaaagttcctctcggcaccgtctgggtttgaatgcagtccctggctacttctcgaaactgttgtttcaaattgctcacattttccagttggaatccgtgatgcatgattcttctctaaaaatatttagaattttggattttagtaataagagattgacagcttattgcgagttatggagaatttatcttatatattttctttgttaagtattatttgtgagaaagtttacctcgttttctttatttaccgtgtacgtggaaaatttttacagcgattgaaaagcatttataaatacagaactatatcgtagtattaagttttagtactatcagcgaattttaacaaagcggtaaaatctgcgtgctcttcgctcaatttaaaaaaaaaaagagagaatatttactcacaagtctattgcggtgagtgcctccgcccggccac

SEQ ID NO: 30864 - DNA, 392 bp, Mus musculus
  source 1..392: mol_type = other DNA
ggagaaggcaaggcctgccagagccatgcctgccatgctcagctctgctagagcccctcagaatcgacctgactctgctgactttccaaaagtgacacattgttaatcttcatagtaggcatattcagggtcactaatatatagagattatctggccaggtagccactctccatattttaaaaatgtatcctctgtcagaggttcaagatgcatgacatgaagattacaattgttcgtaagttcaatctcccccggagcagccggcgcccgcttaagcgcagtggctgaaccctagaggaggcggggtccccgggcgcagcgcccaagtctgtgcgcggctgcatctttctgcccggcacaatagaggctccgccctccctccgcgccagcc

SEQ ID NO: 30865 - DNA, 278 bp, Mus musculus
  source 1..278: mol_type = other DNA
ttcctgctgagatagacatatctatctatctctcttgtggctgctagttgccagaaactgtagtttctggcctcagacttagataagtaaacgctttattataccttacacgtggaactgtttgggtaacatcagttatcacagctaatatccacatataagcttatacatttttttaaaatggctgagtaatactattgtgtgaatgtaccacatttttttcctgaggagctgctctaaatggagcttatttaggcgctgctgagcggctggagcta

SEQ ID NO: 30866 - DNA, 203 bp, Mus musculus
  source 1..203: mol_type = other DNA
gtgtccatgtacctggtaccaacacctgggcggagtgacttctaaccttaaagactccatcttgagagcatcttctgaaagaagccttaaacccagagctatttgtgggaggcccaggttttgtagcaagaactgtgggcatgtcatgtacctttaatctcaggtctaagaagcccgaggcatgaggatgcattataaaatac

SEQ ID NO: 30867 - DNA, 184 bp, Mus musculus
  source 1..184: mol_type = other DNA
gagatgacatggcttctcaaagactggatacttcctgtctccaagtcctcagagtcagtgccagggaacccaatggtttgcagagttccacaaaggctgaacagcctgtatcattctgcaaggctcaacagttctgcaagcctgtgtcgttctgcagagacaaatttgagagcaggacacctcc

SEQ ID NO: 30868 - DNA, 490 bp, Mus musculus
  source 1..490: mol_type = other DNA
agtgggtagcagcaggctgtgttgctaagcattctacagtgcacaggacaagccctcaccagagttatgtgacagccatcctggcactgcatacctgcaatctcagtatcctggagactgagggtggaagagctcaagcctgaggttaccctgggctaccctgggctacacagccggttccaggccagctgcattatacaacaatacacttctttaaaaatgtttttctgctaaaaatgtcattgctgcagaatctgagaaactttgttcgcagatgttctcagaagttctggtgcccacaacttgttcttaatgatcttttatcatgccatagcatattcagtttctggaggagtccagatcccacagactggctgtaccagacgtccaggtcagctacggctccagcctaaaaaattttctgtgatttgagctgaatccagtttattctggtaagtcctgagtcttctaataaacagaccgtttcttt

SEQ ID NO: 30869 - DNA, 502 bp, Mus musculus
  source 1..502: mol_type = other DNA
agtgcctacaggccatgttagcacagcccgggctgatgaactttgataatttggctccaggatggacattaatggttgtcctcacttaggtctgagttcacacactgtccacagagctgaggaaaaactgccttgatagtcgaagacagcagttcccagagaagccatggctacagagctgtcactttgcctcttgtgggcaaaatggatgttcgagagcagagacagcccttgatctcctccatcactctagagagtaagagcacacggggctgctggcctatgtcacattacccagctgtgaactgtcagagcctgtaataagagctgttcttaacccattatctctccatggaggcagcctcaagtagcagcttgctttcttgaaagaaacaatttgtttttaaatcatatgtgtgagttagccagcttggctctactggatgagcagagagcactcccagtcactgcacctatgatctatagaataatgggtttcatt

SEQ ID NO: 30870 - DNA, 415 bp, Mus musculus
  source 1..415: mol_type = other DNA
agcagtatttgggacttagcacccaggactgccagttttttttcccacaaaagaagtgattaccctgctgattcctctcaataatcattggaattacacagaggagcctgtgtgggtttctcttaacaaacaaccaaacacaccgctaagaagttggtaacttcttacatatcccagatttttacaagaaaaacaaattcaatacgttttgaaagaaaatgtagattagtaggttgaaaagtttaaattactattttatatatcagacccttgcctgcatgcagatgggtctgggccagaaccaagggacccctgggacatggcccttgctatgaaggccatcgacagagagtatcctctgatagactctctgtgtgtccccgggtgctcagctctgatctacacagaacaagtg

SEQ ID NO: 30871 - DNA, 333 bp, Mus musculus
  source 1..333: mol_type = other DNA
tattgtatatccttgaagtacttaaaattgagtctgaattgaaatatgttcaaggtaaaacaatatgtgatcccgaggccagcctgatacagccaggaaaacccaaaacctttgcttttgctctggtaaccccagtactcatccagggcagcctggctggtcagacacttgcatatagacttatttcttcagatgataataataatactaatccagtgttttaagctcacctaggtcaaagtttctttgctgaagctgagtaaatagaggctcggggttttccccaagggtaccttgttattgttaagttaagagaagcagagtctctcctga

SEQ ID NO: 30872 - DNA, 303 bp, Mus musculus
  source 1..303: mol_type = other DNA
ctttttttaaaacttaagactttgtaactgacaagccctctttagttctaacaactaataggctcaggataagacatatatttccttttgggaacaaaccagttggttgcttcactgtgaattcattataccacagtgtctcacacactcagcaatagttgaagatgtcatcaaagaaattctgaagcagacttaactatgttggggaaacagctatttacatgacagttatccctgatttgttttgtctatactctaaaatgaaaatgaacctgagtaactcccagaaggctggccttctgc

SEQ ID NO: 30873 - DNA, 276 bp, Mus musculus
  source 1..276: mol_type = other DNA
ccagggtcaggaactttgacatttcacaaaaccgtggatatacagtatatataaatccctaggctcttgtggctgtgggtgtcacccacatatcgctgcagctcaaaccctggaattgccaggcggatggccctctggcagcccacgacacactccagcatttttccttgggtgtctcagccagctaacggcgattttggccaaaactttgacaaacgtccagcctaaaaattctgaggtgccccgccggctccgcccccaaaggcagggccacac

SEQ ID NO: 30874 - DNA, 409 bp, Mus musculus
  source 1..409: mol_type = other DNA
tcctccaactagatcttgagcttgtagaaagaactgaattaccattctaatatgagcattcgcacttgatcatttaaactgctgcattgcataaggtacaatctgggcttcttcctggaagtttcctggtagagaaaatcttctatctgggtagaatctaccagatacatagtctacagtgttgccacagacaccctaatttgggagtgctctgaaagaaacttgcctctaggtcctagggctctcaggcaaggagaccaagaaggattcctcctaccccaacattccaacctagggtagggggaggtcagtatacacaaagccctctgtgtaaggggtggtatgtgtccccccacccctccatgccaggctgcaattggtcactgccctcatgctggggatccagggg

SEQ ID NO: 30875 - DNA, 457 bp, Mus musculus
  source 1..457: mol_type = other DNA
tcctacaaagaaaaaaacatttattatttgattgttacctggaacagcaagaattaaggtttgtttcactaaggacaaccttttcaatgctaattaattgttcattagaaagattcattcctattagaaacagaatcacaggatctcagatggtgtcttccttgaagaccaaaccactgaatggtagtgacaagtcacagttacagttgttaacagtctgtgatggtaccaaccaaagaatatatctatgaaagctgcagtatcgtttgactgactgaagctgtaagagatttttatgaagtcaataagaactgtaggcttgaaaattaaagaatttccttagaataaacagaactaaaaggtctgtgtgtttatattttctttttccttaaacgatatatacaatgtgaggttgagctaaggctcaagagccttagctgttcttcaagaggaccag

SEQ ID NO: 30876 - DNA, 443 bp, Mus musculus
  source 1..443: mol_type = other DNA
ttgagacagtctctcactggactggatttcagcaagaaagctaggcttgccttcttgccatttttaaaaatgtaggtgggaacctaagttcttagttggatactgaagtctttttttaacagatctctggggctcagaaggcaagagctcagttgccagctcacaacgaagatcagacactgtcctctgatctctgtactaggtatatacattattttttttaaaaaaatcaataaaaaataaaaaaaaagaaatagctatttttttttaccatttgcaaactgcacgtgaaaaagctccattgtttcctggcttattcaggatccatgcatttagcctaaagctagtaagcagcagcttttaatgagtcatgaggtcctggcacacccacacccaggtctttgccctgggtccagagtctgggtcctacctacatatggcac

SEQ ID NO: 30877 - DNA, 306 bp, Mus musculus
  source 1..306: mol_type = other DNA
atgcaatccttgcccctggccctggggggaggagcgtaactttatttgtcttttctccatgtaaataataactagagagggtagctgcttcggaagctagttctgcctttctctgtatagccctggctgtcctggaactcactttgtagaccaggctggcctcgaaccgcctgcgccaccacgccgggaaggcaaggcctgtgaattcctccagccggcttaggtcttcaaactatatctagtgtcttgaatgctcaagaggactgaagccctggggcctgcaggcctgccccaagatggaatggt

SEQ ID NO: 30878 - DNA, 244 bp, Mus musculus
  source 1..244: mol_type = other DNA
atgagaacccataaatggacttgtatttcatgattattttaaaggaatttcattcatgagacctatcaaatacaataattccaatgcagcatttattaactcaaaaagggacagaggcagttgtacctgtacagaatctctctgtgccgtcctgagactcactatatagatcgcccggggcgtgcccctgtggttcactgtgacaccaagaggggggtgggggagtatatgtgtatatagcccc

SEQ ID NO: 30879 - DNA, 285 bp, Mus musculus
  source 1..285: mol_type = other DNA
cataggtatgagacctttttattatatagcaagatgtttaaaaaccaaacacgcatagactgtgtcctggcctcggaacacataatgtcctccctctgtgtgtgtaaacaaacgtgcacgtgctcgcacttaactcaaatgacaaatgggtatataaagttctgcctacatagtggttaaatatggcagatatagacaacctttcctggtgcgagtcttagaggccagatcgtccagctccccaaaatggcccttccgggagctgcctggtctgtagtacaggaa

SEQ ID NO: 30880 - DNA, 270 bp, Mus musculus
  source 1..270: mol_type = other DNA
tggcctatgtcccagggaccctgtctggcagagtcctggaattattacatgtctatgttattatccctgagtctgtgacttgggcatcgcagggattgaagagtcactgtcagagcacaagccggacctctggaaatgaacacttttggatttgctggattctgcgcgactcacgcgagggacgcccttactaaagatgacggcagtcgtcgccaagatggggactccgttgtaagggaagcccaccagggggcgcgcgggagcgacttc

SEQ ID NO: 30881 - DNA, 187 bp, Mus musculus
  source 1..187: mol_type = other DNA
gagcctgggggaatctcctgggagctgagccagggataaaaagacaagtagttagctcctccttttctgtctccagacagcttggctctaacagattaacagagtctcatctgtgactgtcttttttaaggaaaaaacagtgaccaagcttctggctgagtggcttacagatctgccactcacacac

SEQ ID NO: 30882 - DNA, 494 bp, Mus musculus
  source 1..494: mol_type = other DNA
gggtttctctgtgtagccctggctgtcctgccaggctggtctctgggattaagtaaaataactttcatgagaacaatttttaaagcgggatatgccgcagacaagtctttcaggtttcccattagacatgactatttctcggtgtacaggtcttattgtttcctcagcaataaatatttgtttctaagaaacagtaagattaaatatatcgttgtagggtctattttagtctaatatctagaaaaacatattagctaacttccatttcaaggtctgtgagatacctttagtgaggaacaactttgatactaagtagcaaacacactggggtaagggctcagctgatccctgggtgctcttagctttactgaaaaacaagggctttgagctgctgggtttttaaaactgagacttctctgctgcacctccgcggtgcgggccacctggcaagcttggaggtgaggggcctctgcgcctgaatctcccaaggctcc

SEQ ID NO: 30883 - DNA, 257 bp, Mus musculus
  source 1..257: mol_type = other DNA
ctcacttttttgtgaataaatttattaagaaaaaagtgatgttcatgtttgtctgggccccaattctgtctctggacaggtgggggcgcctggccccagccttggacccaaacactgagtttagtgaaactagagggtactgcccctcgagggcaaccacctccagggttttcaccacagacctgggaagcttgagctggggaatgctcaaggatttcgctgtcctgtccctggggaaggcagtgccggttactgca

SEQ ID NO: 30884 - DNA, 243 bp, Mus musculus
  source 1..243: mol_type = other DNA
ctgggccccaattctgtctctggacaggtgggggcgcctggccccagccttggacccaaacactgagtttagtgaaactagagggtactgcccctcgagggcaaccacctccagggttttcaccacagacctgggaagcttgagctggggaatgctcaaggatttcgctgtcctgtccctggggaaggcagtgccggttactgcataggggcggggataccagacttgaacctgctcacccct

SEQ ID NO: 30885 - DNA, 242 bp, Mus musculus
  source 1..242: mol_type = other DNA
ggactgagggaccgtggctaggctgagacaacctgtcaataaaagctgcttcccctggtagcctgtggttctcattgatggaaggtgaacaatagaagaaaatctggtttctttcctcagtgaacagcttgaagaatgagttttacaggtccggactccccacccttagcctcagggacttgcagcaatggtttaaagaccaccatcaggcagggcctgaaactggcgcgcaggcgcctaag

SEQ ID NO: 30886 - DNA, 475 bp, Mus musculus
  source 1..475: mol_type = other DNA
acatgtgggccaccaagcttattgaggtttcttggtttcaaacgaatttgtgagtcggaggccagccttagaataggcattcagtgactgttagtcatgaattcatctaagaagaaatcgtttctatatacttaatatatagcacacaaaagatattcagtaactctttggaaaaaaaagttttatctttaggatggttttaaaacctaaacagattaattttgaagctgtggtatataggacccaatgtcctttaaaaaacaaacaagcttacatacttcctaattcagttgtgttaattatttttgaagactagaaaaacctgaaattcaaacaactttgctggtttgggaaggtcttgagtttttcccaagttgcttctgagcatgaacggaagtcgttctctgagcaggctccgtcaattttatttccttacaataaataaataaaaatcgaatgcattcagggtccgctt

SEQ ID NO: 30887 - DNA, 534 bp, Mus musculus
  source 1..534: mol_type = other DNA
taccaggctggctctcaaactcagagatctgccagccctctgtctcctgagggctgagattaaagatgtgtgtgttctctttgtagactcaaactcaccaaggttaaaactctagagacatgtgggccaccaagcttattgaggtttcttggtttcaaacgaatttgtgagtcggaggccagccttagaataggcattcagtgactgttagtcatgaattcatctaagaagaaatcgtttctatatacttaatatatagcacacaaaagatattcagtaactctttggaaaaaaaagttttatctttaggatggttttaaaacctaaacagattaattttgaagctgtggtatataggacccaatgtcctttaaaaaacaaacaagcttacatacttcctaattcagttgtgttaattatttttgaagactagaaaaacctgaaattcaaacaactttgctggtttgggaaggtcttgagtttttcccaagttgcttctgagcatgaacggaagtcgttctctgagcaggctcc

SEQ ID NO: 30888 - DNA, 190 bp, Mus musculus
  source 1..190: mol_type = other DNA
tccgaactttgcaaagaacactaaactgctcagagtctgagtcacgtggctctgcagcgtggtttttgagccatgaactacataagccactcactgactaagaacagcttggaattctcggagagcttctcagagctctagaaaggttcgtcatggagtggcgccccgggtgccttgtgcgctcgcggtc

SEQ ID NO: 30889 - DNA, 192 bp, Mus musculus
  source 1..192: mol_type = other DNA
gtttggagatatctgagtacaaagtactggggttcgaagtaatcggtatccggtatttccaggcctggccattcgaaaatactttttactactagtagctaggaaaagatataacatggtgggtagatgggtacaggaccagatcccaacccgagcccccgggcaagaatctccctaaaccccccggccgga

SEQ ID NO: 30890 - DNA, 344 bp, Mus musculus
  source 1..344: mol_type = other DNA
agagcagggaggggcaggagtccgtgtctctctcctccccatcctaaggttgggcagcttctgcccaggatcttatcaggggaaactccctgcttaatgtgttatattattctaatgagtcaagatgaaataattattcatcctaggactaagtagtgaaaaactgtccaagctggactctccagtggctagagcagagagaaccattttataaataaagttcaacgttagcggctattgggttcgtctaacgaactgccggtcggagcccaaatccttatctaagaggtaacgcttgcgaccagtttgcagcggtcgcactgtagtccctgcagtggttgctg

SEQ ID NO: 30891 - DNA, 406 bp, Mus musculus
  source 1..406: mol_type = other DNA
ggatctctgagttctgagttcgaggccagcctggttctcaaaaaagaaaaaaatatatatattattgttcttgttgtttgaggttcatatagctcaggatagcccaagaatgtagccaaagctatctgagaaatcttgatctccaggtctgcaccagcctgcctggctcctcatgatcatggagggccatgccacagagaaggagtagaagccccctcttccttttaaaaccaagaatccacagaagagacggccaaaggaatgcaatgaagttctttctcagaggtctctgaactggctcagaccagggacatcctcagttctcccctgcttctgagccactaaagctgagcttttcgggagtttgaggaacttgtcaaggacttcaagaaacagctcatatgag

SEQ ID NO: 30892 - DNA, 338 bp, Mus musculus
  source 1..338: mol_type = other DNA
cctcatgatcatggagggccatgccacagagaaggagtagaagccccctcttccttttaaaaccaagaatccacagaagagacggccaaaggaatgcaatgaagttctttctcagaggtctctgaactggctcagaccagggacatcctcagttctcccctgcttctgagccactaaagctgagcttttcgggagtttgaggaacttgtcaaggacttcaagaaacagctcatatgagaccgttcccattagctagcccaggccgtgggggcggtggctgcggagtctcctctctgtgccaggcccggcccccggagacgcacctgttctgacctgct

SEQ ID NO: 30893 - DNA, 461 bp, Mus musculus
  source 1..461: mol_type = other DNA
ttagcctgcccaaacttacgcagtcagaatactgggatggtctaaaggagaaactctcatttccaagcagcccaggacttatggaccccaaggatctggggtcttagtatgtatatttcatgtaaatatatgtatatttgtacataaaatgatattctgtttttaaataaacagataaaacctttttttgtctgattcctccttgaactgggtaagtcacaagtgctatggactgagtctctatgtgattccctcccagggaaatggctttcaaaagacattgtaaccatttctgagagccctggacacaaagaaactgaaactcaaagtcacctggtctgctgaccaagatggcagggtcatcaaagaatcccccaccctgggtatgtgagatttcggtctctagaaatggcagcacctcccccacccgaggcctgtggttgcaaagatgctctaacagg

SEQ ID NO: 30894 - DNA, 424 bp, Mus musculus
  source 1..424: mol_type = other DNA
tacctgtatttacataatgttcatctaatgccaggaattgggccagatttgtgtgcataaaaactttgctcttgaatttatttaatccacttgatgtgaacgttttacaaagaaattggtaaaaatgcccatcaaaaacctcagagttaagaagtgttagtttctaggtgtttaatcctagcacttcatagtttatgtaggactacatagaaacagagtctgaatggcttcagaatctgaattctagctatcgtccccacacgtatttaagagcctgaggacttggattccttttactggaagtaaaagggctcttttttttttcctggttcttactgaaaacaaaggcctcccaaggataccgtctgtttccacatccgctctagcgggcatcagatttgaagcgagtcggggggccgtccgt

SEQ ID NO: 30895 - DNA, 496 bp, Mus musculus
  source 1..496: mol_type = other DNA
agtatgtatatttcatgtaaatatatgtatatttgtacataaaatgatattctgtttttaaataaacagataaaacctttttttgtctgattcctccttgaactgggtaagtcacaagtgctatggactgagtctctatgtgattccctcccagggaaatggctttcaaaagacattgtaaccatttctgagagccctggacacaaagaaactgaaactcaaagtcacctggtctgctgaccaagatggcagggtcatcaaagaatcccccaccctgggtatgtgagatttcggtctctagaaatggcagcacctcccccacccgaggcctgtggttgcaaagatgctctaacaggaagcgggtttgaggagctgcacagcttcctgctccccctcgagctgcacaggacgagaagggctagcgctcagcccgtgtggccccaggggccccccagaggcaagcgctgctgtcccttgctttggagccctgcccccc

SEQ ID NO: 30896 - DNA, 532 bp, Mus musculus
  source 1..532: mol_type = other DNA
tcgtccccacacgtatttaagagcctgaggacttggattccttttactggaagtaaaagggctcttttttttttcctggttcttactgaaaacaaaggcctcccaaggataccgtctgtttccacatccgctctagcgggcatcagatttgaagcgagtcggggggccgtccgtcggctgggcgggtcgagggcacacttccgcccctcaccaacatggccgcaggctgggactgcgcatgagcagctgtctatggagagacctaaatcggcgactgaagcggcctggcccggtgagtgcgtcggagccggccggagtccggacgccggtggatcggcactttgctttggctggcgtttcccaggccaggccacgcctgggcacggaggggccgtgcccgggccgagctcgctccccgccccggtgtgcacacgtcccagccgcctgcggtgggtatccagcttcgagccgcaggcccgggaaggtccccggcgtcctttccccgtctctcctccgcggagcagctggggcg

SEQ ID NO: 30897 - DNA, 364 bp, Mus musculus
  source 1..364: mol_type = other DNA
ggggctttgggccaaggactgcagccggcccaggagtgcctcctctggcatgggactcgggacagtgtgggcgtgcactgacagcccggcctgctccctctgtgcagtccccgggtctggtgcgccttcggcacactgcatgtgctgtctcctggacactggacacactgaagagagagggactgcgggcctagtacttccactgtacctgagtactctgggaagcaggcttactcgatgctagctggctgctatcccaccctacggaaggctctggcagggggggttcactgagagccttccctgctccttttttttttttttttttttttaaagataaaattgtttagagcaacctgggcag

SEQ ID NO: 30898 - DNA, 376 bp, Mus musculus
  source 1..376: mol_type = other DNA
gaggtctactactctctgagatctccgagaatgtcggaagggcaggatagaccttcccagacggacccagaaccatggaccctcccgggtaagggagccagccagtctcccggcccggcggaaaagtggactcccagggcgaggcaggcaggcaggtttctggactcctcccttcccgtcggcgcgggggtcccgacgcgacgggcacagcaactccaatggggccctgggctggactctagcagccaggttaagcccggcccgcctttctctccacgcccggtgggcggcgcccggcttccccgcgttctgactcaccgtacgcagagacctctggttggcccaggagactgtcgcttaaagaaaccaaggcctc

SEQ ID NO: 30899 - DNA, 275 bp, Mus musculus
  source 1..275: mol_type = other DNA
aagggtcttgacatagatcctatgtgtatgtataaaagacatattcccagtcttgagagcaacccagtttgggatagtcaagactctttagagatgactatcgagggcctggcagtccgaaaggctctatctgcatgcctgcgaggccttggtttctttaagcgacagtctcctgggccaaccagaggtctctgcgtacggtgagtcagaacgcggggaagccgggcgccgcccaccgggcgtggagagaaaggcgggccgggcttaacctggct

SEQ ID NO: 30900 - DNA, 407 bp, Mus musculus
  source 1..407: mol_type = other DNA
tcagctacagagctgggttagccatcttgctagaattgccttaagtccataaccaccttgcacttaaataaaatattaaaaataatggtttatacatatgttcacaaaaacttagtatttgcttttaaaggcttatttactttatcggttagacactgataaccaatgagctgtctctttagcctaagctcaagccatttttaccttacagtggttaacaataaagactgttaattctaactttggttaaacaataaagactgttaattctaactttaaacattattaatagccttgctaaagaaaaaattagtgtaagactcagaattgactactttattatatcagataaatctttgaaggttctatcacattaaggaataaagcggagaagccgcgtggcccgc

SEQ ID NO: 30901 - DNA, 426 bp, Mus musculus
  source 1..426: mol_type = other DNA
cacttaaataaaatattaaaaataatggtttatacatatgttcacaaaaacttagtatttgcttttaaaggcttatttactttatcggttagacactgataaccaatgagctgtctctttagcctaagctcaagccatttttaccttacagtggttaacaataaagactgttaattctaactttggttaaacaataaagactgttaattctaactttaaacattattaatagccttgctaaagaaaaaattagtgtaagactcagaattgactactttattatatcagataaatctttgaaggttctatcacattaaggaataaagcggagaagccgcgtggcccgctcggtttccgggctgggcggccaccaggggacagacttccaatttccaagtgtgattttgtctggtctgcaccgcgagg

SEQ ID NO: 30902 - DNA, 448 bp, Mus musculus
  source 1..448: mol_type = other DNA
aaaccattatatttacctgcacagcactgaaatatttccttgtatgatgagaaaggatgtcatttccataaggaagaaacaatagttattgttttcctataagatatctgttgtataggaaatctgaaattacctgcagataatgaacaacagaatatttttgctagctataaagtctatagcagtgcatgcctttctgtgagttcaaggccagcctggtctaccatccagggctacacagagaaaccctgtcttggatccatggcacacccattgtgattgtgctaacaggtatccagacagaatatttccttttcctatgaatgatgatgttaggatttttttaagagaaatatataatttacaggaaagagaatatttgtcttttagggcccactaatctcagaattaccctgtaataagatgctgtatctacatagggcatctt

SEQ ID NO: 30903 - DNA, 262 bp, Mus musculus
  source 1..262: mol_type = other DNA
gcaagttgatgagctggagttcaagtccaggtctttgactccaaattgactgtctgtctggtccagagcatccgttgcttgccaccactggcagccacctgtccgggtggggtggggtgggtaccactgactccacccctccttgcaccacaaagcgtttcacatcctttggtgtttgcatatgttgaacatttgagatcagacttcctgggctcatgagattcactgtgcactctgagtacccacccactcaccagtgcac

SEQ ID NO: 30904 - DNA, 406 bp, Mus musculus
  source 1..406: mol_type = other DNA
ttctgcatcataaatcaaaatccctgtgcatagggcagagatattcagtatacgaacaaaacagcatttttcttcaattataaagaaaatgagacattcaagaaaatcaacagaactagagatcattatattgagggaaatattccaggttcagaaagatattcataatttctttcctatgtagaacctacattatatatatatatatatcatatacatacacacacaaagccacagcctttctcaagtgacatatcactagctctgtcacatctattaatgtgatacttagtagacatctttagattcatttagagctcatctttgatactgaaacaagtgaagcccagcactggtttacctcagtctgagcagatgcgcgtgcactcacatacttcaggaagtt

SEQ ID NO: 30905 - DNA, 527 bp, Mus musculus
  source 1..527: mol_type = other DNA
actactgagttatctttctaaattgttttggagacaatgtctcagtacatagtcctggttggtctgaaattgaccatgtagatcacatggaccatccatcagtagatatgtgttcatatccctcctaggaggtaaacattaccttttattcccataagagtttctttagatttatttttattgttatttatatatacatgtatgtctctgtatgtgtctcaagtgcccccctgagagcagaggaaggtgtcagagcccctgcatcccccccatgtcagtgctgggatcagaactaactggaatagagtagaatttcattcatagagttcatgtgaagaataaataaaacaatgtaaatatatacacttagaaaagcatattaaatattattttctccctttcctgtttctgagtctagaagtaacaggtcctacaaagtgtgtgtgattcttcatctgtaatagaaagtaaaagtcttaaaacgtgagatgactcattgtaacaagtaagactcctcctacttaatc

SEQ ID NO: 30906 - DNA, 354 bp, Mus musculus
  source 1..354: mol_type = other DNA
gctttgctgtctgccatgctgggcagagaaaacctgatttctagaagattctggtgagactcataatcttaacatctttctgctggagaataaatgggaaagttcaccataactgacacatgacttaggacctgactctagtttcaataaggtacaagaattgatacctgctgtagctatctcatgagtgtctcctcctgtagaagcaggctgcatgcggatggctggagatagtcaactcccctctgcgacgctggtggtctctgtgcactgctgaaaaatccattcttttgaaatctcattccattagagaaaaaacagaaaaacctcatacgacttccggttttgggtttt

SEQ ID NO: 30907 - DNA, 252 bp, Mus musculus
  source 1..252: mol_type = other DNA
ggggtcaattaattacttgatcccacatgatggaagaaaaaagctgattcctaggggttgttctttgactggagattctgccccactgtgcctgtcaggaaaatggttatgtaacgaatcataagtaacagtcctgtcatctatctgctcaaagaacttgtgacacccatttcctggaaacagcttaaaaagaggggtggggggggaatcacacttcttccccaagccctgatcataaatgagcaatcctgg

SEQ ID NO: 30908 - DNA, 217 bp, Mus musculus
  source 1..217: mol_type = other DNA
acagtgtttgatcccctgaagttataggtgccaatacaagcatttcactatttccctaaatgtggaactatttttactatggttttgtggaaaatattttttacacctttagcatgcaagtatatcacacattttacacacttatattaaaccagtcactgtctttgacctaatatttttaaagtggagctctcagctcaggtgtcaaggtcagtaa

SEQ ID NO: 30909 - DNA, 327 bp, Mus musculus
  source 1..327: mol_type = other DNA
gaccagctctggaccagaatctgatgttggtgctcagcttagctgcgcttgtctcactaaggggtccatgcgaacagcaatctccagatcacagagactatggcttattcttgtgattcaaaatacacagcatatatcaccatttactgaaatttcctgtataattatcaatccctctataaagaatataaactccacaaagggttcaacatccatgatatgtctggcacatagtaggcacttaataaatatttgttggataattaataatgaatatgcactgctgttgtataatggaaaagtaagtaggtaagaagtaacacatct

SEQ ID NO: 30910 - DNA, 229 bp, Mus musculus
  source 1..229: mol_type = other DNA
taagtctctctaaaaatttctaagttaaaatcattcaaggtatttatatatattaccttttcgctccagaaaagagcctccctcataaggacgaccaagctacataatcattatatatataatatatatatatatatatatatatatatatagcacctaggttagaaccatgcagggtccctagttgccacttcacaagtatagcagcaggagcagtcactgattggcc

SEQ ID NO: 30911 - DNA, 207 bp, Mus musculus
  source 1..207: mol_type = other DNA
ccttttcgctccagaaaagagcctccctcataaggacgaccaagctacataatcattatatatataatatatatatatatatatatatatatatatagcacctaggttagaaccatgcagggtccctagttgccacttcacaagtatagcagcaggagcagtcactgattggcctgtggctgggttggtgtcccagtcccttacaaa

SEQ ID NO: 30912 - DNA, 352 bp, Mus musculus
  source 1..352: mol_type = other DNA
gggagaaggcccccctctcctctggtgccccaagtcgcggggtcccagtctgactaggcggtcttcgctcactacaccgagtaattaaattaatacatgggagaggggcctgtctcttgtcactaattaatacttccccacgtctcagattccactggacgagcacaccttcctggccaggtctggaagccaggagcggattcccagccagagggcgcagggcatggccaggcgcagggctgggggtgccgcgactcggggaagagccgggccggacgcagcagcgggaggggcggcggctgcgggaacagccgggaggcggcacctgggagctctctccccgccccctgcc

SEQ ID NO: 30913 - DNA, 225 bp, Mus musculus
  source 1..225: mol_type = other DNA
ggcctgcacaccccggcaggcagcctggactgcccgtagatccttgtggggggtctccaccccagccgagccttcttcccaggaaaagagccacgctgggactcagaatgaaaccctatttcttgcttatgaaatatgcatggagaacagagggcccagctcccaaggggttcccagatccctctgccaatggcgggggtgtgtgtgtgtatctccatatatata

SEQ ID NO: 30914 - DNA, 396 bp, Mus musculus
  source 1..396: mol_type = other DNA
catgatgatcgattaattataaagctaaaaggtgattgtcaaaagtctttgacttcagatgtgcatcagggctaaacaatttagcttgcctgtacattactaattagttatcaaaagagctctggtctaagaagtcagtaggaaatggctgcatttcagggcttacctagaaagatatatatatatatctttgcttaactcttagttgaacacactataaataattacaggtgtgttactgattgtacttcataatttaaagatcactaaatagacaaaagaaaatattcatatacattaaacgtctaagattccttgaatcattactcttaacagtttaaagcagctaagctaacgttagcctcactttagtaagctaactcattttttcaacgt

SEQ ID NO: 30915 - DNA, 374 bp, Mus musculus
  source 1..374: mol_type = other DNA
cctaagcaagtctgactgactataatgcatatcatgaaatagtccagatatattttttatcagatttccatagacttaatttttctaatatcgacattttcaaagagtgctgtttacctggtattcctggtgggctactggagtagccagtacctggttatcagaaagcatccaataaggcctccgggttcttccaggaggcccgacgcggtcagcgagtcctgcggttagcgggtcccgccgctcccggtggcactactcccgggtcgcggctcccggaagctcctcggacaaggacttccggtctctggagcgctgggccacagagacgatgctagcggaagcctagagaggccgctacgagtctggaaggg

SEQ ID NO: 30916 - DNA, 483 bp, Mus musculus
  source 1..483: mol_type = other DNA
aggaaatggctgcatttcagggcttacctagaaagatatatatatatatctttgcttaactcttagttgaacacactataaataattacaggtgtgttactgattgtacttcataatttaaagatcactaaatagacaaaagaaaatattcatatacattaaacgtctaagattccttgaatcattactcttaacagtttaaagcagctaagctaacgttagcctcactttagtaagctaactcattttttcaacgtgatgggccgttccggacggctcctcttaaagaccagagctccggggtggggtgacctcacctgcctcctgggtcaggcccagagccgcccctagtcgtagccatgcctctccgctgggcggaagcctcaggtcccttccagactcgtagcggcctctctaggcttccgctagcatcgtctctgtggcccagcgctccagagaccggaagtccttgtccgaggagct

SEQ ID NO: 30917 - DNA, 268 bp, Mus musculus
  source 1..268: mol_type = other DNA
gcctgagaaatgattcaaagaaagaatgcttgttttttaatctgcttacttgtagatttcactgtgctcagcacgattgtatacacgctaaaaataaattggatgatctttgtttatctgtttgaggatgaaaccaaggttgcttcaatttggcaatcctgtctcaagcgaaaaattgctcgtttaatagctttctggaccagcttgagcaatctatctagttcagaacctaggtttgagggcatgtggtggcgccagtggttccacc

SEQ ID NO: 30918 - DNA, 393 bp, Mus musculus
  source 1..393: mol_type = other DNA
acatacatatgaaaatgccacatggaaacctattgcgtgtgtgaaggacttattctagccccgtgttagtttgtatgctcatttaaaaaattaaactctgcagcgcctgagaggccactcccacccccaggtgtggggatcaaacttttaaaacttttagacccttaggaatcttttagctttgagcctgaaaggagaaaggggtttttctttaaacaaggaacgccccgcgcacgcgcccctcgcggcttcggttggcccgaggctccgccccttgtgcggccaccgggagggttgggagcccagagctcgcgggaccgctctcgctcagtctccgcaaaccccgccggaaagcgtgacggcgcaggcgcaggcgcggagacccgagacggt

SEQ ID NO: 30919 - DNA, 346 bp, Mus musculus
  source 1..346: mol_type = other DNA
tcctcccagaagaaggggctcatcttaggcttctggaaggtagggtgaaaatcggatgcttctccaattctccctcctccctcctccctctttcagcccggctgagtgagcctctcacactgggcctagggacagagctaggagacagctaagtgtggctttgttgttttttcctccagaaaataaaattacatcgctcaggggtccagctgctattatacacaagagctcatggccccgggccaagtaaaagagaggaaataggatttctaaatacccccctccccggctctgacatcaccggccagtcgggtggggtgaggcggtgctgggctcaagctctgct

SEQ ID NO: 30920 - DNA, 229 bp, Mus musculus
  source 1..229: mol_type = other DNA
ttcatacccactctgagccctacacagagaaagtcctctgtaaatgtgaccttctctctattactgaagttaatttctttagcatcctcagtaatcagaactgggattcaagcttgaactcagtcccttctcgtctgcagtgctttggcctttcctgtactgggaagggaacccagggcctgcatggaattttatttccagctttactaaatgagtgaatgaaaaagta

SEQ ID NO: 30921 - DNA, 251 bp, Mus musculus
  source 1..251: mol_type = other DNA
tcaaagacataggaatgaatagtagctattagctcgggatcgggccagccctgtccttccccctgcattcctgagttgggactaagccaggattctggtcgaatggcttttattgctcatgtctcgtccataagatcaaagaaataggctttacctatagaagactgctggattttaggagttagaaataccacagccaggggctaaggagtcctggggtgccagtttcaaggggcagctccggttccctc

SEQ ID NO: 30922 - DNA, 290 bp, Mus musculus
  source 1..290: mol_type = other DNA
atgtgcatgcatggaacacatacaacagtgccaagtgggcatggcgtttgtttagaaccaaagctatagacatgcttgatttcaaacaaatcttttgttctcacacgagtgtcttgctatttaactcagtattcagacacagagtccatctctagggctatgtagctaggctacacacacacacattacaacctgctccagtcaccctcacccaggtggagggaggtttcatgagcatatgccaggcctaggctgcgccatagcacccagaggacccagggctgggagca

SEQ ID NO: 30923 - DNA, 210 bp, Mus musculus
  source 1..210: mol_type = other DNA
agagagaacgaacgttggtggtggcacaaaggattagccagatctgtagagctgttacaaagcatctcaatgtttgactggtgcagcatctccaggctttggttctgcaaggagcttcaaaagcaagagtcgtctgattctatggagcaggctggcaattagccaggaccatgagctggctgctctcgaggggccacctctcccatggga

SEQ ID NO: 30924 - DNA, 315 bp, Mus musculus
  source 1..315: mol_type = other DNA
catgggctgtggaagtcacctgcatagagcagcggctctgaacctgtgggtcataacccctgtgtggctcacacatcagctatcctgcatatcggagatttacattctgtctcatgacactagcgactttacagttgcgaagtagcattgacaaagggaaatgaggctggttacttcctcagacacctctgaggtgactgttgtgacctctaaggaagccatcttcatggcctcattccacactaacagggcatgtggtgaggaagctggaggctgaagcaggccaccttctttcaagaagattgctttaggaaa

SEQ ID NO: 30925 - DNA, 293 bp, Mus musculus
  source 1..293: mol_type = other DNA
gtgaagatctagacgtgttctaggccacttccccggagacatggctttgggaagaggtttctcttcctcgttggaaccgtgtgcatcccaattggattctgagtgcgtccccattctccctggaaggctggcaggcccaggtgccgccagttcgcccagcctgaggccagaggcggagccaccatcagggtcgaagtctggcccaggcgacggcctggggcggggcgaggcgggggcggggccgggcagcggggcgcggctgggactggtctcccgagctgcggagggcggga

SEQ ID NO: 30926 - DNA, 238 bp, Mus musculus
  source 1..238: mol_type = other DNA
ctttttctgttttcctcatccataaatagaaaaagggataacattgtcacagaaattaagattctaaggaccttttgctatgagcaaagtacatctcaaacctttatttacatcacctaatttgatctgcatcccctatggctcagagaagtgaatcactctgcatcagaggtcagtccctgctggggattgtgaactgcaaactcccagatggcctctgaaatcaaatattttattt

SEQ ID NO: 30927 - DNA, 194 bp, Mus musculus
  source 1..194: mol_type = other DNA
tttgtggggaaccccctcttgcaggagaagttgctgcctgtgccccaggaacccaggccaagtctgccacagtctcggtcccagtcgcagggggcccagtcccgcccccgcggccactgcagagggagggggcggcccggcccggcccaactctgcccccggccggcccgaccccggccccggcccccggacaa

SEQ ID NO: 30928 - DNA, 214 bp, Mus musculus
  source 1..214: mol_type = other DNA
tcaatcctgaatttatattaacacagtaagtaaagatgaataaaagtgggacgtctttattttcttctttagtgtatgccatgcatcagatagagggtactttgtggggaaccccctcttgcaggagaagttgctgcctgtgccccaggaacccaggccaagtctgccacagtctcggtcccagtcgcagggggcccagtcccgcccccgcggc

SEQ ID NO: 30929 - DNA, 355 bp, Mus musculus
  source 1..355: mol_type = other DNA
tctagaagacattgactgtaatacattacaagaaagtacaaagaaataaagaaatactttctactctcacgaacaatttacttgaaactgaaaacattgtaaaataaagtatgaagtctgagttcgaggccagcctggtctagttttaaaaagtcaattataagttcttcttcttatcagggtaaaaagactattttattttaggcttagcaggtagcagctcactgtgttcagcgtcctcctccgtagatctgagctgggaacgcggaagctacactccgggatttccggacagcgggaaatcccgccttcgccggaggaagctgcgtggagcccgcgcggggctggaggccgg

SEQ ID NO: 30930 - DNA, 207 bp, Mus musculus
  source 1..207: mol_type = other DNA
actcacccagtgaatcccacacatgtgacaccatctctggggagcacccattgtcttctgtgcccaaccagaagttcccagtgaagacttgatgttcagactgaatcagatggcagtagcactgagtggttttcttttctaatgccatgaagatgcgtttagcaggagcacgtgcatatcatctgacgaagttggagggagaattat

SEQ ID NO: 30931 - DNA, 258 bp, Mus musculus
  source 1..258: mol_type = other DNA
ctaggttgttggagcaagaagctctggcagccccaccccagacttgggtggatcccccctaggtgcaggcgggaagcggcgatcagcctttccccgcttagttgtacagagctccacgagggggcgaccagagcccacgtgcgaccgcctcccaggcggctcgggggtcccgcccgccttgctcggcctctgtggctccaattggtcgccgcgggagggtctccagggcgacgggaggcgctcggggcatctaaggcg

SEQ ID NO: 30932 - DNA, 283 bp, Mus musculus
  source 1..283: mol_type = other DNA
tttaaggggtagaatgtcaatttattaaatgagagagaactgggtctgaatcccaggtcctttgcccgggcttgaagttaaatggcaagcagaaccacgtgtaggaaggcctgaatttacaaaaggccggcctttttgtaatagtaggcttctcatagaaacaggcctgcgatcctgagctagctagtctaggcagaaagtttcctagcggcgccaaggactccgcacgcggcggcgcctggtccgccccgtctgaggcgggaccccccagaaaactccaagc

SEQ ID NO: 30933 - DNA, 280 bp, Mus musculus
  source 1..280: mol_type = other DNA
tggtggcagaagattgtctcccttcctctactaccttttccacacttaggttggagtaaggttctccaggattcaaggactgctcagccctgtcctgtagatcttactaaggtacctgaaattattcttgtttatttatttagtgaaatacattgctaagctgcccaggttggttttgcgaatcctcccggaacccggtagcggtaaccatggtaacctctcggcttagctcttggcctttaaagtctgaacctggcttgaactgggttaaaattccagc

SEQ ID NO: 30934 - DNA, 294 bp, Mus musculus
  source 1..294: mol_type = other DNA
acatccccgtgagagatgtacgcacatggcgtgggaagaccctgttcttacattgaaagggacagagaaaagctacgttcctgtatctcctgttacctgggctttccttctaggtcccagcacagcagagggatcccttctctgcagggatgcctctttcccacttccccccagggaaggaggcagcgaaaagtcccgctggtccccctgcactactcttgggacagctcaccctgctaattagggctacttgggctcctccccaaggcggggaccaggccccctccctcctat

SEQ ID NO: 30935 - DNA, 382 bp, Mus musculus
  source 1..382: mol_type = other DNA
tgtatgtgtgtgaaacacccagagtcgttagatgttttattggaagaaacaggctatttaaaagccacctgcatgggctgggtttaagccctatctgggtcaagtgaagtgctctagccagaagcaggagagtagatacagagactccggtctctttccatcccagaaagcaagagtatccattggggcccctcctgccactgagtcagagcaggagcccaagatcaggaagcttaggactgaactcctccctcgcaagctctgggcccaaccggggagtgagcccagggctccacccttcaccaagcttgtctatggatggccttttttagtattggatctatatacagacacatattttgcacgctctggtggcttcctg

SEQ ID NO: 30936 - DNA, 367 bp, Mus musculus
  source 1..367: mol_type = other DNA
tttcattctctctctattactgagggaagaggggaagtgaggaggggacagcccatgctctctgcccctctaagttgtccaatcacttaatgactatttattaaacagtgtgtccagcaaagaatacatgggtacaaagtatttctcactctgcttgtaggcagggagccttgaaggacagcctggtgggcaaggtatgcctgccccatgctaagctcagtattttgtctttatctctgtgacaatgatggtgattaggcccatccatgagcagggctggatgcagaaaggcctgactgccatgtgcacagaaccggctcctgagaacccagtgaggctcagctgggcctgcaagacatcttgtttt

SEQ ID NO: 30937 - DNA, 509 bp, Mus musculus
  source 1..509: mol_type = other DNA
ggctcagcagttaagagtactgactgctcttcagcaactacaagttggctcacaaccagctgtaatgggatccgatgccctcttctggtgtgtctaaagacctcatatacataagataaacatttttttaaaagagagagcatctctaaaatggggttactgtgacttatggcgattaattaacatatataaaaagtatttgcacaagtacctaacacaaagcaaaagcttaaatgttgttaacccttatgttgttgatagtggttactatattactaactactgtcggcagtagaaaaataaaactttctattgtctgggacatagtagttccctcttacttcaagaactcaagaagacagcaaccatgactgcttggtcattgatttaaaccccttgtataaaaagggagcagcagagcccagccctgggctgttttgccccgcccccgctgttcagccaaccctgggtggggaggagcgtcacggctgagcggggacggaatccag

SEQ ID NO: 30938 - DNA, 489 bp, Mus musculus
  source 1..489: mol_type = other DNA
acctggattgcacattaatacatgcattttgagtgaatattctagagccagactaatgcaagaaaatactttactctgtcactcagggaggctgagaatcaacctggtcatgagctttgtaaagcaaaagaaaatgcttattagtgatttacctgattctttcatactttgtgttgaataacatcaatttattattgatgatcaatttattctatatatatttatatatgtattaaaattattttaatatctatatttaatttattaatgtttacttagtattatgtattaaatatattgtgtttatatactatacttacatattatatgtaccaaagaggaaataccagtgtgatcttaacaaatttcttccctactttctcacatgaaatttaatgtgacacatgaggggcgtgacaccatgcaacagatctggtgtacctttttacaaactcaccactcctgcagacaagtagaattctctgtcag

SEQ ID NO: 30939 - DNA, 315 bp, Mus musculus
  source 1..315: mol_type = other DNA
gtctcccaaatctcattctgacctatagctgatgctgagaaattgactttaaaaatggaattactgaatgaatggttctctgcttcacactatttttctctaatttctcaattagagggcaactcatgaaactgcttaactgttgctaggcagtgtggagggacttcttagactctgatgtgaccaatggtacatttgggataggacaggcttgttttcttcatttcccaatatggaaaagagcagctcctgtcacacagaagctggtgattcaggggtcacaggagtttgtaataaataacccacattgatttc

SEQ ID NO: 30940 - DNA, 338 bp, Mus musculus
  source 1..338: mol_type = other DNA
tgggaatgagtgtacaaatgtgagcatattgcaacaatgagcaggtgcatatgtgtagaaaactagcattctccggggcaaacagaaggattgtacgttactcagtatttgagtaatcaaaatcaaagagacaactaaatttttttagggtgcttggcagaagatagaactctagaatgatctacacagaaaagaccacttcacttaactttaataggtatgttattcccatatctcatgtgaccaacctgggggttagagctctagcactggctcaatgaataactgttattgatttaatcatttattttctaacaacagctctaattattagcaga

SEQ ID NO: 30941 - DNA, 645 bp, Mus musculus
  source 1..645: mol_type = other DNA
ctggtgatgcaatatcatcaactatatgcactattctatagggataatatgaaaacccaattcatttctagaactgaaatattatagcacttgaattgccactccataattccctggtattatatcctggtaaataccattgctcttatctttttacacttttaagaacttcatatatatgaaaccatgtactatagttcatttaacttattccattataacttattctattataacacatgtttatccattgtattgcagatgtagtattccatttctatatgaatgccatgatttcatttctcatggctaaggatatataagttatttccctagttgctgttcatgcactgagcaacagtgaatgcaagtatatgattccaccacataaaagttttgtttttgattcaagtgactttatgttacaaacctcttatagagatataagaagagttatataaaatgattaaatcagtaggaaaaaaatccttaaaatttaaagacagaattatcaaatgtttcagcaacccaatctctggctatgtggttgaaaactgaaataaagtcactgtcaatttaccttgaatttactcttccaattactcttttgaagatgaggttttgctaggatctaaagccccgcat

SEQ ID NO: 30942 - DNA, 312 bp, Mus musculus
  source 1..312: mol_type = other DNA
tgggaatgagtgtacaaatgtgagcatattgcaacaatgagcaggtgcatatgtgtagaaaactagcattctccggggcaaacagaaggattgtacgttactcagtatttgagtaatcaaaatcaaagagacaactaaatttttttagggtgcttggcagaagatagaactctagaatgatctacacagaaaagaccacttcacttaactttaataggtatgttattcccatatctcatgtgaccaacctgggggttagagctctagcactggctcaatgaataactgttattgatttaatcatttattttc

SEQ ID NO: 30943 - DNA, 719 bp, Mus musculus
  source 1..719: mol_type = other DNA
aaagcttatgcagctttcttattgccttagcatagccaaaactaaatggttctattaaatgtatttctcaaataatactagtaaatgaaaggatatatatgtatgaatattttcacgtgctcaatgtgttttacatataagatattgtattaaatcttagaatgaatgtaaatatcaacaacatgtagttttcaaaagctaaaaactctggaattagtttcaggatatctgtgtgtgtatgtagatatgatcacaataatttatacattttaagcataaatcattctaatatatattatataaacattttaagtctaaatcatttaaaataactataaatttgcaagttttaactaatttttttattttttattttttatgatattcctgagcatattttatttaaatatgtcgtaaaattctgatggaaagcaatactatctgcaataaaaaaatctgacaacaaagctttattattgaaacaacagtatttgattgcttctagcacaaacataaaatggacactaatgttttctgttgaaaacattcatgtttcctctatactctgtgttttaagtctcaaatcaaattcttgtgcattgaatgtcaccttaaggaggaatccacaccttggtccctgcctataaatgggtgactataaaattgcccaatttggcacaaccctacatagcccagatacaacacagaagacatttcct

SEQ ID NO: 30944 - DNA, 486 bp, Mus musculus
  source 1..486: mol_type = other DNA
tttggatattagtcctttataatatccaaatgtggaattcttgaaaataattttccattctgtagccaagtgataagactgtatctatttggataattttacatagtcacaattttccagtatgtatttctggcttcttaataaaaaatccaggtgtatattggtttggaattactatagctctctacaatttgagattggaaatggtaatggcagttgatttgtattttcatatgaaactaaaaatcattctttcaagttctgtgaagaattgtgtttttgataggatgaatatttttactatattaatcctaccagttcatgaacacggaagatctttccatcttctgatattctttaacagacaaatttgcttagtttacccaagaatttttacattatttgaggtgattaatacatcgttttaaaaaccatttattgttcagttaatattaaccttttattactttgtcttttgtgaaaaca

SEQ ID NO: 30945 - DNA, 285 bp, Mus musculus
  source 1..285: mol_type = other DNA
gtatcctgtatttctcctggccagagaaataacaattcgaatagagattacccaataggctatagtctcacattaaagtatacagagcctattttgagtcagaccatgtgttcctcttggtgtgagagatgcattcattgtctttacagagccttgacaggcctccacacacagataaatatgtgcattcctttgaactctttctttggatctcattcaaagaaagagagaacactttgggaaaattcccccctgagtgtgactctgaatatatatatatataca

SEQ ID NO: 30946 - DNA, 313 bp, Mus musculus
  source 1..313: mol_type = other DNA
tccttttttttaaacaagcaagttgcaaaaataccaagtaactttacaggatacttccttgtttagtgtctggaataacgtctttaaagaaggcttgactttggggatcccggttgcctaagggcggggccggaggacctcaggcaagtgggcacgcccttgcccaggcctgcagtggactctgtcgccagctggcccaccccaagcataagaggggtgcgcatggggtcccacacccgagtgatgctggaggagctcccgagggggagtagggaatgcggcatccaggcccccccgccacttgctccgagcg

SEQ ID NO: 30947 - DNA, 320 bp, Mus musculus
  source 1..320: mol_type = other DNA
gactgtattctagaaaagaataaggcccttcagttgactgaggaacagaagttatcttttatactctgatttaagcctgtgatgtaacgttagcttgaaagcatcagagctcaaaattctaagtaaccttaatctaagaagaaaatagtgacatggcatcttttaaaaattatatgtgcttttaatctctatttcctttactttattaggtaatagcaagtttatttaaatccctggaatttgggggacaaggaacttactgcctgtgagaggtgataggcggtctcacttgtacctggtctgagcaagaatcacaacct

SEQ ID NO: 30948 - DNA, 384 bp, Mus musculus
  source 1..384: mol_type = other DNA
cctgtattaaatattcattaatgatatttttagggtatgaaaggatatcaatataaaagttgaacacatttttacagactatttgattctcaaaatgctcaatattattaatatgtttgatgtataaaatacatttaaatattaaaaattgaagaaaaaaaagaaaacagtaactactctttcttaagtatttctaagtatcagaacatagttgttaattatgttgttcaacgcgttagttactgaaggaaatgatttgccatttgttagtggagaactgtcaaattttgtttacaactgttgactttattcaatgaatattaccttgatgactttaacatttaattgttgtatagcaactctaatggcactatttgtcttata

SEQ ID NO: 30949 - DNA, 620 bp, Mus musculus
  source 1..620: mol_type = other DNA
gcacaggtccagtggcttagctctcccaagaaaagctgattaattagtattttatgtagtctaagaaactagtgaaaattcagaaatacttcaaggtaatgcattcccaatgatggaaacatgaaaggatggcatgtttttaaaagttcttaactaaggcaatcaccagttaaagaagtttcctggccagccaagactacacagtgagactctgtctttaaaagtaaataaattaacaatagtagtagtagtagtagtagtagtagtagtagtagtagtagtagtagtaacagaaaataaagccaaaatcctttctgcttacgggagtcctatgtttctaacaacattggtactctggaaagtccaaaccaaaagcaatttcatctcagattattttttcttttttgaaattcattcaagagcagctagcaattgccaatttctcctgctgccatctgcatcctgagcaggaaagaaatctttatttaaaagagagttggttcttgtacctgtaagatttgtaagaaaagcaaaacatctgtctctgactttcttatggtgactaaaaggtactctgaggaaatcgaaagcgctgctgggaggagaacttgctatttctt

SEQ ID NO: 30950 - DNA, 405 bp, Mus musculus
  source 1..405: mol_type = other DNA
gaggttaccttcaggattacagcaatccttaatccttgaactctccatttcagaaaaaatgtaaaagctcggtttccctgaatttacttcaccattgaaggagaagataaagccaaatgcctttctatcttagatcttaaaccaggagctgtttcacttagattttccttgaaactcatttacatgcagcaggactgactctgtcctgagcagaaaagaaagaagaggcttggtgacttggcttttttggtcaccttcattcaaaggaatgaaggttcctagggatccttttatgaggattataaatctaaatcttgtacctatgaagatttgcaagaaacatcctgagtgtaactttgtttacaagaaggaaactcttgagtttccgtctctgaggaaatcgaa

SEQ ID NO: 30951 - DNA, 603 bp, Mus musculus
  source 1..603: mol_type = other DNA
taattagtattttatgtagtctaagaaactagtgaaatttcagaaatacttcatttcccaatgatggaaacatgaaatgatggcacatttttaaaagttcttaattaaggcaaagcgtaaaagatttacctggccagccaagtacagtaaaactgtctttgaaagtaaataaattaataataataatagtagtagtagtagtagtagtagtagtagtagtagtaacagaaaagagctaaagccaaaatcctttctgcttacgtgagattggagtcatatgtttctaacagcatggtactctggaaagtccaccaaaagcaatttcatctcagattttttctttgaaattcattcaagagcagctagcaattgccaatttctcctgctgccatttgcatcctgagcaggaaagaaagagattcaaaagagagcacatcctggtgactcacttggttcttgtacctgtaagatttgtaagaaaagcaaaacattgtctctgactttcttatggtgactaaaaggtatacaggaagaaaactgttgagtttcaatctctgagtaaatcgaaagagatgcactctgccgggaggggaacttcctgtt

SEQ ID NO: 30952 - DNA, 321 bp, Mus musculus
  source 1..321: mol_type = other DNA
catcgactagcagttggaaagaaatttaactcccattgttttcatccagtttccctgtgcttcagtgaataatgtaggatgaatgacttaaaccaggagctgtttcatctcagatttttcctgatactgactctgtcctgagcagaaaagaaagaagaggctgggtgacttggcttttttggtaccttcattcaaaggaatgaaggttcctagggatccttttatgaggattataaatctaaatcttgtacctatgaagatttgcaagaaacatcctgagtgtaactaaactcttgagtttccgtctctgaggaaatcgaa

SEQ ID NO: 30953 - DNA, 389 bp, Mus musculus
  source 1..389: mol_type = other DNA
tactgacaaccactaaggcacctcagtgccaggatcacaaaggcactgtctgtttactgctttcagaagttaattatgaaaacttccaaatgccaggttggcagttgcagagccacaagtctctggcttctgaagagtttggcacttgcaaaccctggggatgactcctatctaagtagagcagaaccctgcttagctagttttaactataggtacaccatgcatgtgagttttgtgtctagtggccagtgtacatccatttgctacaaaagtcaaaaggttaggacgttcttatttagtgagatttgtcagaaaatcatgtgagcctgactaagctgtgatttttttaccacagtaggagtcctggctgtttcagcactgctcaccca

SEQ ID NO: 30954 - DNA, 341 bp, Mus musculus
  source 1..341: mol_type = other DNA
acaggggctgaacagccctttttatggtcttttttggagttcagacctcagctcaactggagagggcttgatacttataaaccctgagcgtattagactcttgagtactttactacaataaaactgtccaggactcctatctaagtagagcagaaccttggtcagctagttttaacaccttgatacaccgtttgctacaaaagttggggctttcttatttagtgagattcatcagaaaagaatgtgagcctgactaagctgtgattttttttttcatagtgaccacagtgtttacaggctgggaggaggcctggctgattcagcacttctcacatgaaaca

SEQ ID NO: 30955 - DNA, 243 bp, Mus musculus
  source 1..243: mol_type = other DNA
aaatcaagcaagtactgttgtggtctgcagatcacagcacaaagcaaacggatctcagttaaacagggctggtttattgaacacacacccctaatttttaaaatgtaatattggctgtgcctacagtcaagctgcttttgtgtcaaacaagctggcaggcatgaattcattcagatgagacttctttctagaaattacattaataacaggaaataaagtgctctattttaagagctgggaaat

SEQ ID NO: 30956 - DNA, 374 bp, Mus musculus
  source 1..374: mol_type = other DNA
cagattttgatgagcagagactctatggttttagagctttattatagaaatgcgaagctgaacagccctttttatggtctttactagttccagcagcataagggaatttggagttcagacctcagctcaactggagacaaagggcttgatacttgtaaaccctgagtgtattagactcttgtccaggactcctatctaagtagagcagaaccctggtcagctagttttaacaccttgatcccgtttgctacaaaagttgtaaggttaggactttcttatttagtgagattcatcagaaaagaatgtgagcctgactaagctgtgatttttttttcatagtgaccacagtatgccagggaaattgaaagctattg

SEQ ID NO: 30957 - DNA, 361 bp, Mus musculus
  source 1..361: mol_type = other DNA
gaagctgaacagccctttttatggtctttactagttccagcagcataagggaatttggagttcagacctcagctcaactggagacaaagggcttgatacttgtaaaccctgagtgtattagactcttgtccaggactcctatctaagtagagcagaaccctggtcagctagttttaacaccttgatcccgtttgctacaaaagttgtaaggttaggactttcttatttagtgagattcatcagaaaagaatgtgagcctgactaagctgtgatttttttttcatagtgaccacagtatgccagggaaattgaaagctattgggagtaggcctgaaacaactctgagagttttgtaatcact

SEQ ID NO: 30958 - DNA, 446 bp, Mus musculus
  source 1..446: mol_type = other DNA
atgatgatgacgactatttaagcctcagaatatggtcaacttgacaaactttttcttttaattttaaaatgttgcctacagtcaagctgcttttgtgtcaaacaagctggcaggcatgagaggagctcccctctgaccactttcatattgctccttgtgattcatcttctttcagatgagagtgattcctagtgacccacttgtaagtctactagacataaaacatgcagtgcttctttctagaaattacattaataacaggaaataaagtgctctattttaagagctgggaaataatactacattttctcagcatttaatgagattgcaatgcattctggtgatttctctttctactcaaaacagagaaatgctgaagatttatcatctgaacattgctgagaaatttcactgaggtaagtctctccccttttatatatagaaga

SEQ ID NO: 30959 - DNA, 379 bp, Mus musculus
  source 1..379: mol_type = other DNA
tactgttgtggtctgcagatcacagcacaaagcaaacggatctcagttaaacagggctggtttattgaacacacactcagctcaatgatgatgacgactatttaagcctcagaatatggtcaacttgacaaactttttcttttaattttaaaatgttgcctacagtcaagctgcttttgtgtcaaacaagctggcaggcatgagaggagctcccctctgaccactttcatattgctccttgtgattcatcttctttcagatgagagtgattcctagtgacccacttgtaagtctactagacataaaacatgcagtgcttctttctagaaattacattaataacaggaaataaagtgctctattttaagagctgggaaat

SEQ ID NO: 30960 - DNA, 284 bp, Mus musculus
  source 1..284: mol_type = other DNA
ctcataacactacactaatgaatgaatggatgctttggatccatcacagatatttccctattcaggaaatgttcaagcaagtactgttgtggtctgcagatcacagcacaaagcaaacggatctcagttaaacagggctggtttattgaacacacactcagctcaatgatgatgacgactatttaagcctcagaatatggtcaacttgacaaactttttcttttaattttaaaatgttgcctacagtcaagctgcttttgtgtcaaacaagctggcaggcatga

SEQ ID NO: 30961 - DNA, 349 bp, Mus musculus
  source 1..349: mol_type = other DNA
cctaacccacaagtgactggagtacccagggagtgctaccagtccttaagggccaagaattctagcacctcagcacttcctgtttgtcacctgctgcttccagaagttgattataaactcccaaattctgagctggcagttgtggttaaataaacctctctaacttctgaagggtttggtgcttgtaagagtactttattgcaatagtggccagtgtatatatgactgctacaaaagtcaaaaggttaggactttcttatttagtgagattcaacagaaaagaatgtgatttttttacagtgaagctaagaggtttcccaggccagggaaattgaaagctatgaaactg

SEQ ID NO: 30962 - DNA, 298 bp, Mus musculus
  source 1..298: mol_type = other DNA
tctgatgccatctcataataattactgttgtggaacaaaattgtgtcttcatcatacaaaagacttaagtgtaatgtaaaatgacataggtcttgcctctgaaagagagaaacatgtctcctctgattccctcagttctccagtgtgaaatcagaagaaagggaaacctggaatttcttcctgatttttaaatttaagctctgtgactgagtaaaacacaaggcacttgcctttcaaattttgcaagtgtgtggaagtcagcagctgcctcaactgaatatgtcccctggagataatg

SEQ ID NO: 30963 - DNA, 409 bp, Mus musculus
  source 1..409: mol_type = other DNA
gcatcacattgtgacatgtttaatattgatgagtttgacctcctgggagttataattcatgcaccccttttaaatacaaatgttgtctaatttatatggtaaacacatagaattttggagattagcatgttaatcagctttaatctcaaaaccactttggaaatggcagttaacgtcctgttcttgaagaggagagtctggggaaggaacctttccctaagtagcatggacagacaggacagtccacccattggagccatacagaagttctcttgaagtttcatcaaactgttccaacattccagttcttgaaaagaggcctgtcagaaagattctaaattcgatctagttgccaggccaaggctgagtcctgttggggagtgcgcgctgaactgagcatgttcgcgcc

SEQ ID NO: 30964 - DNA, 493 bp, Mus musculus
  source 1..493: mol_type = other DNA
gatgtggaattcttaaaaattgttttccattatatgcagagtgataagaatgtatctatttaaataattttacatagacccagccagattaacatcacaatttgttaaagattctgccatttttcagagtgtttttctggcttcttaataaaaaatcaggtgtatattgatggttgacttatgtctgagtcatgctctctataatttgagactgggaatggtaatacctccagcggtattatacagaagtattttttcatatgaagctaaaaatcgttctttcaagttctgtgaagaatatagactgattttgataggatgaacatttttactatactaaccatgaggacagaagatctttccatcttttgcttctaagaatttttacatgatttgaggtgattaccacattagttttaaaaccatgtattgttcagttaatattaactttttataactttgtttcttttgtgaaaacaagggtgttgtccca

SEQ ID NO: 30965 - DNA, 400 bp, Mus musculus
  source 1..400: mol_type = other DNA
cttaggctcaaccataaaactgcttttgttgctaattcataactgtagtttattattgctatgcatcataatgtcaacatctgatatgcaggatatttcaacccctaagggggttatgacacacaggctgagaacctctgaatttacaggcctctcagagcacacagtgtatggtgaaatccctgtctccagagccacccagctggctcctgatggtcccagaaaacatatggtatgtggatcccaggttccatgcacttttgggccacatatctgctcagtaatgggcccagtctgatctccaaaatttctaacagtgatcgagggagatcagtgcctccccagagaggatagctgctcgtaagaggcataaagtcattcgtctatactattgaatgtc

SEQ ID NO: 30966 - DNA, 286 bp, Mus musculus
  source 1..286: mol_type = other DNA
accctggagagttctcaccactctggcttgtcacacctgtaaaaggaagctggaccttcctcttccttgactttcctgtaaaatattttctgaccctttataaacaaaaatataaaataattaatatagtataggaattaaaattattttaggctttcaaattcctttcctttcttataatcagatgagtattttactttcaaaaataccatggacagtgtcaaaaatatatcacactgtactgaagttaagtaaatctaatagttactcctgcacaaattacatt

SEQ ID NO: 30967 - DNA, 347 bp, Mus musculus
  source 1..347: mol_type = other DNA
gctgttttttaaaaaaataaggtgaaatcttattttctttgaaatttcccagctcagtaactaaggtctcaggattttcttaggatttcttcattgatgggatcaaaggtttacctctgtgcatgtatacagatgatgagtttacactcaggtgcctttgtcgttgagactgcgaacattggtcttcaaaaacgttggatactttgcgctgaattcattcaagactttaatcattaattaaactcatttttaggaacctagctttatgtgcatgtgcacacacatgtgtgcttgtacgtgtgtgtgtgtgtgtgttgagtccaccctaaagagaatgctaaacaaaa

SEQ ID NO: 30968 - DNA, 400 bp, Mus musculus
  source 1..400: mol_type = other DNA
tagtccgcctacacaaaatcacactggctaaatcgtctttatcctcagtcctatagaggaggacaaaaacttttttctttaatgtcttcaaattagtgccggaaacctgaagaatttctggggttcggggtatcagcaaccccagaccctttgtgattctgtgaacccaaattcctgttacttaagcataaggattatcaatcatttgcagggtcgccaggagcgcgatgcagacctgccagccgcccaggcctgcggcggcgcgtgggcttgccagcgcgggggacagggcctgtgctcccgaggggttgcggggtcgggaggccggggacacccaggggtgtggcggcggcgaagccgagcccgtccgagccggcaccttcgggcgtctcctcccagt

SEQ ID NO: 30969 - DNA, 297 bp, Mus musculus
  source 1..297: mol_type = other DNA
aaggttattcttgaattcaactcgctgaggctataaattgaagcctctcatttcctgacctctttaactgtcttctgattctgcattagaaaattaaaagaagagacacaattttttttatcagttactcttttggacacattataaatgttatcagaggacatgagcagtgactgctctcccatcacaataagagggatctgatgccctcttagacataaaataaatcttttaaaaaaattttaaaatttgaaggataaatattaacttgataacatgtattagttattattggcc

SEQ ID NO: 30970 - DNA, 290 bp, Mus musculus
  source 1..290: mol_type = other DNA
tctctggacaagagagataggctcctaaagagacagaatcttcattctgtgtgatatatagcatactataatgactccatttgtgttcagaaattggaaaaaccaataaatcttcattgatgctcttattttattttaatcacaatacgatctagaaagtttcaccatcttgcccatggcatcctactccatctccctctgagaaagggaatttcattcaaagccacatttcgaatgatccgagagccaagctgattagactttgagcttctagtgagttaaaaccaaac

SEQ ID NO: 30971 - DNA, 248 bp, Mus musculus
  source 1..248: mol_type = other DNA
ggggctctgagagtggcagctcagaacactgtcataaacgctgggacatatcttccagctctaaggtgagagtatttcattcagcatgcttaactgagttaagcgcaggcgttcataaatatttatgaatgagtgttacctccgggccacagctcagaggcgcggtcctccagggaggtcccgtgtggggctcgggacccacgcctagcaccgaagggcggggcctcgggtgcgcgcgggttgggcgg

SEQ ID NO: 30972 - DNA, 366 bp, Mus musculus
  source 1..366: mol_type = other DNA
tttgttgcacaagggctaggcaactggaatactggtgctcaggatgtgcaaacgtattcacagcggagcatttgtgtgcacatgtgcgggcacacaaacacaggctccttttagtattttaactaaagtaagtgcataaagagaagaaagaaagaaaggctttcattctccacaacttctaaaaatatctttattggtgccaagtaagacaggagatgaaaatatattttcatcctcacaggtgtaaactttactctctgtattccgattaaagtaatgcctggattccttcctgcaggaggtggatcctgtgcactgtgacctaatgaagtccccatgatggccaatgttaacattatgaggtca

SEQ ID NO: 30973 - DNA, 416 bp, Mus musculus
  source 1..416: mol_type = other DNA
cgtgggatgtgaaaagcctcatgtggtgcatcaagcttgctcctctcggagtctttcaagtgtgacttctaaaattagtaagtttttaaaagtccattaagaagagaaactagaggggttttctttccttgataacactaggaaatgtgacccaatacaaccaacaatatacagggtttaataacttgaaccattgggccattttgtttcttagttataaggataacattttcccaatataatcaaactatagcaacatgaaagctttgtacaaaacttcaatttgcatttaaaatacaaaatggatccagtggcttgagagcgcaacttccgggcctagagtttctctcttcctaccttgcaaggaagggctcggctgcggctcaggacgcccagggacgtcatgtccgctgggc

SEQ ID NO: 30974 - DNA, 486 bp, Mus musculus
  source 1..486: mol_type = other DNA
ccaaccctcggggtggtaagttagtaatagttaagtttcatttttctgattaaaacaacaaaccaaaaagatatcaataaggaatttaagattcagttattaactgccactctaatctattagatgtcatgcattgcatcgcggcatcctccgatgaagtacttcacaaaaatatatgtctgttcacgtcccgagggatgagatgcctgggagccccgcccgcaatcgcgcgcggaccgcgctcaccaccagccgctcggtggtttgccggcgagaacccgcgcaggcgagggctagggctagggcagggcgaggcaggcaggctggcggcgcgcgcagagggcggcggccggactatgagctcgcctccgggcggctgctcactgcatcaacctgcgggctcccgctcggccgctgggcccctcccaccgcaccccacccccgctgcccgcccgcctcggggcccgggttccagttggtgcggag

SEQ ID NO: 30975 - DNA, 590 bp, Mus musculus
  source 1..590: mol_type = other DNA
attgatttaattattttctatttcattttttagtaataatgttaccttgtactacataagtatatagtattctaaattatcagtttacacttaaaaagctttacagttaattttacacattaaaatgcaaaacaaagactcacatatgatcccttcatttttaaattctttcaaatatgatcaaattttttttattcacttttgcattgggatctactaaattgaaaaaaagaaagaagtcatttattttaataagctgccttacttaatataccagaaaattatggtttaactggttataaaattatgacaagtcctgtcactttttactattttcaacatggcagcatccaggcaggcatggttctctgaaggctgcaaggagaatacttgcttccaggcagctaggagcatatacaaaatattacatggaatttttttttaatgccttgctaaaagctaagatattttgcgtacaaatttttcacagaaggcattcattttatactgaggatatttttaaacttatgctgttagagacagatctggtgtttccctaagaagtactagttgtacaacttccttggcta

SEQ ID NO: 30976 - DNA, 707 bp, Mus musculus
  source 1..707: mol_type = other DNA
ctccgcccgcagcgttcccaggcagctcaggcggcgggcgcactgaagggaagccggccctgtgcagccggccgcagcccatgggggaggggagggaggggacgggagggcggcggccgcgcggggcgtcccggtggcgcccctcgccctccaggcccgcactccatcccgccgcgggccgcgcccaggccccggccccggccgccggagctatggatgtgcagaatcccgggccatacccctcaccgcagagagggaccggaccgggaggcggggcgcggcgcgtcccgtctgtctctgccaccaccccctcgccgttgtcgtcgtcgtcgtcgccgccgccgtggagctgggggcccctcggttccgctgggcaatgcagctcagtgcgcaggcgcctcgcaaagggcagcgagccaggtcctctgccagggcccagcgatgcctcactgcgcaggcgccgcagagggtctcacccacacgctctcgcagctgcccactgcgcaggcgtgccctcaagacagtcttgattgccagcgggcagcgcgccaactccacgcggagggcggggctctgagcaggctaggagttgcagtgtccgtcacaagatttacacttcattttctagagaaaaacagttttgacagaactcctaactaaaaccgagtttgcagtgaatgcttgacaccggcccgttttgaagagtc

SEQ ID NO: 30977 - DNA, 525 bp, Mus musculus
  source 1..525: mol_type = other DNA
acagaaaaggtgagatattttttgctgcgtctgggtcacttaatataataatttccttaatataataatttccaactatattcattttcttaggaaggatatggttttattttttatggttgaataaaattgcattgtatatatgtaccacattttctttgcattctctgtttggatgcaaaaatgaactgttcccacagtaaagtccaattttaaaactagtctagtaggtttacacctgctagcctctaaatgttggaatgctaaactgttgtgggccagatttactcagaaaggtgaccctagagagttccaggttacctgtaagccaagaattctagtggagttgtcctttattcattaaaaataccctctgcattatattagatttgatctcttacagagagctagactagaacctagagatgaagaaactgtatgaccttctacggcataggtgagatcatctcatgtccccattctagtctggaataagaacagcttcctgagttccctgaggcaaga

SEQ ID NO: 30978 - DNA, 665 bp, Mus musculus
  source 1..665: mol_type = other DNA
cccctcaccgcagagagggaccggaccgggaggcggggcgcggcgcgtcccgtctgtctctgccaccaccccctcgccgttgtcgtcgtcgtcgtcgccgccgccgtggagctgggggcccctcggttccgctgggcaatgcagctcagtgcgcaggcgcctcgcaaagggcagcgagccaggtcctctgccagggcccagcgatgcctcactgcgcaggcgccgcagagggtctcacccacacgctctcgcagctgcccactgcgcaggcgtgccctcaagacagtcttgattgccagcgggcagcgcgccaactccacgcggagggcggggctctgagcaggctaggagttgcagtgtccgtcacaagatttacacttcattttctagagaaaaacagttttgacagaactcctaactaaaaccgagtttgcagtgaatgcttgacaccggcccgttttgaagagtcttaagtccttcaccgggccggttctgtcagcgagtctatccagctggctgagagggaaagggcgcggcgcgccaacccgtctcttggcaacagcctcaggccgctaaactgtcggagtggcgctccgagcgcatagccctctggactctcgaggctgcaggctttaagcctgagaacagagcccctaggagctcgg

SEQ ID NO: 30979 - DNA, 288 bp, Mus musculus
  source 1..288: mol_type = other DNA
gattcatactatgtgtggatccgtagacagccaacctgtgcttgctgaggctagctcactaaagctggtgctgcggtcttaaactctctgtgcctctctattattaacctgtttaacagctgagaacagtgggatcacgagactcacccttctgaggctggtgctgcctgctgcccttggctcaggcagaaccgtcctctcctcttcccactgagttcagtgtcaacacagcagtggagagacatttccataagtgtgacacaagagttcacagtggccctccacttc

SEQ ID NO: 30980 - DNA, 701 bp, Mus musculus
  source 1..701: mol_type = other DNA
aggtctaagactggtctcggggcagtgtctttgctaggcgcctctcacagccgctaggagcttgtagctcgcatgcacctggcgaccgactcggcaggccggaggcggcgcgtccctgaggagaacggggcctgggcgagcaccgcaggagggccagacccagcggccccaggctggccctggccagctgcggccccgcgcgctcggcctccccgggacacctgccccgagaaaaagtatactggccgtcgcggtgcacgcctcgctcgctccacacccccagagcgcgcttgtctccagccgggaagcaggcccctccccgcgcagctgtcgccgccgcctgcgggctcagtcacccagaggggagccactgccgccgctactgccgccgccgccgccgccgcggtccgcgagctccgcccctcgcccacccaacagtcgccgtctgcgattggcgcgcgcaagcggcagctcctgaccctcccggaacaccgcgcttctactgggcgccaccgaggccgggggcgggccagagaccggggcccgccgctttcgctcaatcgctgagcggccggcaaggggcggcccggtcgggcggggccacatctgggccgcgccgccgcgtgcgtgcgtgtgcgtcgtccgccccccgcccgcgccccgcccgccccgccccccggcccggcgccgcgctcgcccgc

SEQ ID NO: 30981 - DNA, 267 bp, Mus musculus
  source 1..267: mol_type = other DNA
atttaaggattatacttccaaacttgaaaatctgaagaagaaaagtcataactgtcctgatggctaatcttcaaccaccctggttgtgagggtggcagatggccagcctagacaacaaacagtcctgaacaattaaaaacctctttcaatggctttatagactagtgtcattttagaccaggcccttctcagttccaacttgcaaagtttaaaaacaaacaggctttctctaagcctgaacagcactgcttaggatgtaaagggatc

SEQ ID NO: 30982 - DNA, 465 bp, Mus musculus
  source 1..465: mol_type = other DNA
tttaattgttttgtagaacgaacgtattttacaaaatattgtaaactttaaggttcccaggtacattcggatatgacataggcaattgactcaaagagttaggatgctatctctagattttaaatttacattttgtaagggtatttcattctttaacagaaaaccaaattggctttttgccatgccttggccatctcactgaaagggtgggcgggcacagagggcggaactctccgttagccccgccccctggcctccgctctcgcgcggttctccccggagcagcgcgccaagccggggatggggtgtggcctccgccctggggtggcggcagttgaggccgtggcgcctgcgggccgcgcagaggcttcggcctgcgccaagtgtggtcccgccctgagcgggcgggcggcggagcgcggggcggggcctggagagagggtggcggccctcggggcgggggcg

SEQ ID NO: 30983 - DNA, 461 bp, Mus musculus
  source 1..461: mol_type = other DNA
aaatttttctacaaaatgtctaccatattacatggcatacactaggaacacaaaatatatttgttgaatgctgtgtcctaggactgagggttaacttgcctcacttctttattttcaaaaattaaaaaagaaaaaaagcagaagggtggaaaacttagtcatcacttcttcggctgagactcatacactacgcagtggtaggttgacatcccctgcatgacatcctgggaactgtagtctcccagggagacgtgagtgcctacaatgctgggacatgtagtcagactgcttacacgcccaataggaaggtttcccaccagggtgagccattttaggtctccagctgcagagcctgagaacctcaagacgcaggcgggctcatccctggatcctgcccggccccgcctccagggtgcctaaagcccgcccctcgcccaggccccgccttcccccacgtgtct

SEQ ID NO: 30984 - DNA, 469 bp, Mus musculus
  source 1..469: mol_type = other DNA
ctaaactttagttgcgaattaaattgactcatatggctaggtgataaatgagtttgttctcaaaagcctttgacagcaaaaacgctatccctggtattggcttttaattgcaagaacagccatgactattcatttctgttcattcttccccatgaaagcaagaaaagtaatttcgtgctatcttttacattagatataatattttattaattacttgagcgtttcataacttgacaatctcagctgatgtgagagggcccagctcactgtggctggtgccattcctggccaggtggtccaaacaaaacgataatcatttgtaatcaatataattgttataattattatctcttataggttcatgcgttcacccagtagctaactttccccgcgcgcgcatgagcagttaagctcttgttccctgcgcgtgcccagcatgcccagtgcagggcaacggaagcctgggagc

SEQ ID NO: 30985 - DNA, 548 bp, Mus musculus
  source 1..548: mol_type = other DNA
tttctcagtctctttcactctttcacacacagagacacacaaacataaatctaaaatgtaaaatagatattcaatctcagctaactgaaatcaggatgtcttctgaccagttaactgcctgcagagaacttttattttgttccttaagtacaaaaaacatgtcttatgtctatcattcacgaaatgtgaattccgttttgagggttaaaggagacttttgcctcacttctatattttcaaaaattaaaaaaaaagcagaagggcttaaaacttagtcatcacttcttcacaaactcttcgcaggactttctgggaactgtagtctcccagggagacgtgagtgcctacaataatgctgggatatgtagtcagactgcttacacgccgccaccagggtgagccattttaggtctccagctgcagagcctgagagcctcaacgcgcaggcgggctcatccctggatcctggccggccccgcctccagggtgcctaaagcccgcccctcgcccaggccccgccttcccccacgtgtctgcggccgagggga

SEQ ID NO: 30986 - DNA, 385 bp, Mus musculus
  source 1..385: mol_type = other DNA
tgtgattcccatgaataagcatgagagtgactttcggatctgatggaagaatttaaacttccctattaccagaataattgagtactctttcaagtgctttgcaagggcccttctgtcctgttatagggtatctgaagtagccctggctgtcctggaaactctcctatttttatttattatttttttaaagatttatttatttattatatgtaagtacacagagcttcggaagagcagtcaggtgctcttactttttaagggggaaaaaatgcaattgtgacatatacagaaatcaggtaacatttagctcacagccccattatacaggaatttgggactagtccagagaccagttttatccaagataatttagcacttaaaagta

SEQ ID NO: 30987 - DNA, 396 bp, Mus musculus
  source 1..396: mol_type = other DNA
acgtacaggccgggacattttccggggaagcctccctcccgaaggaaggcacttgccgcctgacgcatgccccctaggtagcggccgccgtgggcctggcgggcgctggaaggccgccgcgagggaccgaggaacagcgccaggcgacttccggcagtgcgggggccgtcaaacccggactcccgcaagaggacaaagcggcgcgcgacgcgcggccccggctccgccctcagcgcccagcacggggacgcgagggaagcgagtttctcggtgctccttgactcgggacaggaagagtgtgccagggcgggcttccggacagccccaggaacgctccctaagatggccgccgccgcgcggggatggggtgggcggagcccgtgttgctcccgtcgc

SEQ ID NO: 30988 - DNA, 614 bp, Mus musculus
  source 1..614: mol_type = other DNA
tgtgaaacaatttagttattggactttgctttttcaggtcattaataacaaatagccaaccattgcttgagagctcttaacagatttttttttttttaaactttcatagaacttcagaggtaagtagtttcttaaatgcttacataaattatgtgttatgtttacaagattacctaggaattggagttttatactttaataggacaaggtgtctataaattgttactgtgttattgttactgtaaccatggatatggattttaacattactttagataaagtaatatttaatacatatggttgttttactacatggtcatttttaatagttttaattacataaactaaccctaagtcttgtgtttattggtaaattaaaattaagtctctgatctgatgtagaaattaagtgtgataaatttgtttccagcaattactctgaattagatcattgtcatttcctaaaaacaatttgagtggcttattgatgtttttttctttaaaaacaaaattttctcttacagcaattctggggtcagaagccatggagtcaaggatattattgagactgttttctttagtaggctaactttttaaacattccacaagaggaa

SEQ ID NO: 30989 - DNA, 363 bp, Mus musculus
  source 1..363: mol_type = other DNA
aaaggcctctacatttagttacttttacaaaaatatttaaataagtacacatataccatgaaattatcattaaagattaaaactagatattaatttgagtcacattgttagacatttcaaaatcttagtattctgagcttatccatacaaaatgtgtagaaattgcagccttgatcccggggaaaggctgggccgcgccaggaccgtgtaaggggccgccaggtctgcgcccggttctggggcgcacctgagacgcccctaggcccaaagaacgcgggcctcggttctggtgggggcggggatcggggggccaccgtgcatccaggggctttctccgcccgcggggtcccgcagggttcgtgc

SEQ ID NO: 30990 - DNA, 442 bp, Mus musculus
  source 1..442: mol_type = other DNA
ttttttatttgttactaccagtttgtagacaagtcagcaggtatacaaacatgtttactacttccgctgttaggcatggtggagtacagcaagcctctttcccaaaccttgcaccactggttggggaagagacaaaaaggctctggcctcgcccttgaataagtccgactggcaaggcaggacttgtaaaatttaaaaattttttttaaaccggtggaggagagcctccgccaggacgccggtggagcgcggcggctcaagagccggaaaggccggcggccactgcggcgggtccgtttaaccgaaaggtggcttctagagcctccatttgcgcggtccggcccagcgcggaggtcgcgcagtgggggcggggcggggcctgcgcgcgcagccgctctagcgggcctcgcctcggcagggggcggggcgcctatattacgtg

SEQ ID NO: 30991 - DNA, 692 bp, Mus musculus
  source 1..692: mol_type = other DNA
ggcgacagctgggtgctctggagatcccacaggtccgggtgctggcaggcaacaaaggggcaaggggacgatcccagtccccgaggtcgtccaggcccgcgcagtccttccgcgcgcgttcggcgcgacccctggcagctacaggctggggcccgtgggcgggcgcgggaaggggggctcaaggctcccggggggtccaggggaggagggtcccctggcccgctggggctaggaggtttgccaggcagcggcttttcaaaggcagacctgcacgccttgccaggaagagaccagctctcggggaggggggcggggaggcctgggtgctgcgtttcagcgcagctcggccgactccgagctacaggctcgcgcgctggatagcaccggagcccggggctgtgggcccctcgccagcaacttccccgcccgccacccccgccccggctgcgcctggcgatgccaggcccaagcgccgcgccgtaaatggatcgcggcaggcgaggcggcggcggcggcccggcgggctccgaggcggcggggctgaggttccctaggctccgcgctgctcccggacggacacacgcgtcctgaccgcgggctgctctccggccgcgtacagccgccctctccttgccctgcgcgcacgggacggcgcatattggctcggcgacacgccgtggctcctccccgag

SEQ ID NO: 30992 - DNA, 510 bp, Mus musculus
  source 1..510: mol_type = other DNA
tcctttgcttgtatatccataatccaagaactcaggacataactctaaaacggtttataaaaaaatataggcatatagatagatatacagaaggctcagtggttaagagcactgactgctcttcaccacatgattgctcaccacagatctgtaatgagatctgatgccctttctgggcacttacatataacagtaaataaatcttaaaaaaaaaccctgcagatgttaagaatttttcgatctagatgctgaatatacagataaccacctataaaccacgctggctttaaactcagagagtttttttttcactatgcattaaaatttgcataatacacaccttgaattccagaactggagaggttccttggtctatcaagagagctccagatcagtctttgctacacatagtgagactccgtctcaaacccatcccgagctgtagtaggtcctcctgcgcatgctcacaggacctgcgcgctcgtctccgccccctggtgtacgcaagcg

SEQ ID NO: 30993 - DNA, 544 bp, Mus musculus
  source 1..544: mol_type = other DNA
ttctacggtacaatgtgcttaactaagtttacacagagaataaggaagcttcctaaggctttaatccttttaaacatgggaaggaattttaagctttcaaatattaaaatttttcagcctgaaatttcagtcttgcaaacatgcatattaactgccgggtccccggggaggggagcgcgcgcggagaaattggcgcgacgcgcgacaaccgccccgctgcaactccggggaggacagcgcccggggaggagccagcgactccccacagctcggcggtcgccgccagccggctgatcccctgcagccgggctgctggtcttacctgggcatccgaggcaatgcaagggctaccgccgggcgccgggtctgtttccagccccgcgcgctgacatggcggccgacgagctgtcacaccgccggctcgggtctcccgcggcactggaggatcggctctgcgcaaccctcccggctggcggccggaccgaggagacacccggagagtccacgcacaggagcctgggggcggagcctaggcggactgagg

SEQ ID NO: 30994 - DNA, 337 bp, Mus musculus
  source 1..337: mol_type = other DNA
atgtttagccataaaaattactgtcaagtctaaacgaaatgactgtcagtaaaatcattgagatccacctggattgcactctagttggtgctccagcaggtcccgtaccaggttcgtaggctcctggatgtccacggggaaagtcagagaagccgcggcggttcctctaagatgggccgcgggccaacgctgacagcgcgatccgcgggggaagccgcatcgccggtatgcgaacgacctagcctcagtccgcctaggctccgcccccaggctcctgtgcgtggactctccgggtgtctcctcggtccggccgccagccgggagggttgcgcagagc

SEQ ID NO: 30995 - DNA, 460 bp, Mus musculus
  source 1..460: mol_type = other DNA
gagactgacactggaggacccagattctgaggccacagagaagctaccagagctgggtctaagagtcccctggctcctgtggcacgggcgtgtgcaataaacaaacttaaaaataatttaaaaaatttttttaaaggaagcctagaaagcaatggtctctgacaccatcagaaaggctggatgacagacagtcagtccagcgtgggcgaccccccggccgtctctttccccagagaagcgggaagaaccggcccgccctggttctgcttcaggggaaccaagagagattgatgcgggtagccgggcggcgggcagcaatgggccgtcggccgctcctgtcagccaccgaagcggacgtgcagcccgagccggatgtggcggcgcggcaccggccggtggcccgggatgcggcgcagcagcttggtcgcgagggggcgtggctgtgggcgtggcccgcgcg

SEQ ID NO: 30996 - DNA, 529 bp, Mus musculus
  source 1..529: mol_type = other DNA
accagagctgggtctaagagtcccctggctcctgtggcacgggcgtgtgcaataaacaaacttaaaaataatttaaaaaatttttttaaaggaagcctagaaagcaatggtctctgacaccatcagaaaggctggatgacagacagtcagtccagcgtgggcgaccccccggccgtctctttccccagagaagcgggaagaaccggcccgccctggttctgcttcaggggaaccaagagagattgatgcgggtagccgggcggcgggcagcaatgggccgtcggccgctcctgtcagccaccgaagcggacgtgcagcccgagccggatgtggcggcgcggcaccggccggtggcccgggatgcggcgcagcagcttggtcgcgagggggcgtggctgtgggcgtggcccgcgcgtgggccgaagggagccgggcgctgtagccgcgccgacggcggccaggacagcggcggttgctgcgcccggtactggggtcccggcctgaggcgcaggcgcggtggactcagccc

SEQ ID NO: 30997 - DNA, 457 bp, Mus musculus
  source 1..457: mol_type = other DNA
ttatgggatttgagaagctgaaaaatccaggcctgggggttgtaaaacctctaaaacctccctgacctactttagtgccatcaggctttgaacttattgaaccagtccatcagcaggtgacctgcaggtagatgataaaagcttgccaggtttttgtctcaaatcaggagaaaaagctggccatcttggaaattcgccatggctgcttcgtgcatgccaagcagaactctctgctttttgagaaaaaaaaaaaaatgagagtaagagtttctcagtaagtctggtaggccggcccttgctccgcaagcgcacaaagccctatgggacttgtagtgcctatctgctcctaggaggcggagagacaggcctagtagggaaagtttgaaaattcccgcggagtcggcgccagaggccggaaccctcgcgagaagtccgagccccgcagcgcgatctgcga

SEQ ID NO: 30998 - DNA, 391 bp, Mus musculus
  source 1..391: mol_type = other DNA
cagtaaaatcctgttttcaaaggtgaaactttgaattgcagatgagaatattgatcgcttataatcttccatgtgtatttacccacattagttacaaagcattcatctttccaaaatgtatttactgagtacttgttgacgcctaagcactgatcatatattaaaagcattgtacatggttatactatgtgttgtgtatatatattgtgctaaataattataagaaataagggatgtagtgacattccagtctcctctttctaactttaggaaatcacagaagtttggatcaaaagaatgatgtcacttgaactacatcttaacattgcattcagaggtaggctggatttctgaatttcatacagaaatgcagaactgcttggatattgaa

SEQ ID NO: 30999 - DNA, 532 bp, Mus musculus
  source 1..532: mol_type = other DNA
ctaggtctagtagatttggcatccaataagggcccatcaatcatgcagtccacagcagggcccatttgtagatcagcctgactttagcctttgaaggctcctcgtataggcaaggcttcctgagcctcatcaagatgggtcagctctcagagccctggggagggcagcactgtctctcccctccccttcagcatagacctggctgtactgtagtactgcctcttagcaactcagtaccctgaaggggtgtgtgtgtgtgtgcgcgtgtgcgtgcacatgcatgcctatgcaagcatgtgtgcatacccttgtgtgcatgcattgcagagattgctagagatcaggggagctgttataataatagaagcaacatcaagcatatatatgtgtgtgtgtgtgtgtgtgtacgtgcgcgcgtacgtgcatgtatgtatcgtgcgtgcgtgtatgtatgtatatatatatatgcatatatatatgtatgtatatatgtgtgtatatatatgtgtgtgtgttacttactccctccgag

SEQ ID NO: 31000 - DNA, 331 bp, Mus musculus
  source 1..331: mol_type = other DNA
agtaggcacaaattatgaagatgtggaaccaccataggatggttcttcaacggtgagcaagctactgtgtctgcagggagtgtctggctgcacaccacacgtatacatgcacacacatgcaggtgtttccgtgcagtgtctgcacacacgcagtttgcagaatgcatttgttgttgattagcaccagaaaccatgtacattttgctttctgtggaacctagaatttagtattaagtcctaaaaagaaaaatatccgaagcctttgcagtgaatttgtatttggaagtcacttccttgccacggaccctgaacagtaacattcctgttaaca

SEQ ID NO: 31001 - DNA, 430 bp, Mus musculus
  source 1..430: mol_type = other DNA
tagagaatactttcagagtttttgttttgttttgtttgaaacatggtccaaatcatatcaatctagcgagcgattgtcctgcatttggtttgtttttttattggcgctcataataagcaagcacagccaccaacccgggcctagtctaggtcctggggcgggggcctggggggttcctctgtggtcccatcaaaacttctgaggtcttcccggcccgacccctaggaagctgagctagcgtcggtacccaggcgaccctcacgtggctgccaggtgaacgcttggaacaactgcaggcttttttccctgcccgggagaaaagaccgcggccttcaagggcggcctctgtgagctgcgcacgcggtaagcacgctcccactgcgtcctgtggcctcagccggaggcggggcaagcggagcgcggcgtgcgc

SEQ ID NO: 31002 - DNA, 304 bp, Mus musculus
  source 1..304: mol_type = other DNA
aggactgaatttttaaaaacttgttttgaaaagatttgccctgcaatttaaagacaatctaggttctagctgcagtggccttcaaccggtcagtggagacaggtttgtctcctagaatagacgacaaagattatttcttacttgaaatggtgccacaagagctatttcatcatgtttttgtaataaactgaagcctgaaaaataagacacgtttttaaaagccgctcactgagcaccattattgcgatcagccaagcctgagcacagcctcgggacagaggtgctctgcaggctttctggggac

SEQ ID NO: 31003 - DNA, 301 bp, Mus musculus
  source 1..301: mol_type = other DNA
aaagctcaactctgaggtgagtagtggcagtgtctgtccagatgtgggcacagtcagatcctcccaaaggttgtgcctgaacccaaaatgtggggcctgtgtcagggggcaggtgtccctgccccccaaccctcagtgtgagtacttccagggatcacgtctgtggggtctagcctgggctaaccttgtctagcctggcctagcttggctaggatcttgagctgacacggggaagcatggaatttcagcttctgaggacaagtccggaaacatgttgacagttcagagtgaccctgactgt

SEQ ID NO: 31004 - DNA, 474 bp, Mus musculus
  source 1..474: mol_type = other DNA
acatggtctctatatagcctggctgtcctggaactcactctgtaaaccaggctggccttgaactcagagatcttttaaataggaatgaccttggacttctagtgacaggattactcagccatgcatacaccagaattgagtattaaactcagggtttctgcatgctaggcaggcacttagtgacaattttatgttatacgaatttcacagtaattaaaggagaaatataatgacaactgtggcaaattgttgacaatttcaaatcaggagaaggctcccgatgttagcttactttagactccattttaaagtgcatgagtggcgctgccaggccgtcagtatgatgctgcggtttcctaccgcccaagggacgggacaggggcggagccaggaagtgggcgtgtcccccaccgggggcgtgtctgaggcgctggcgaaccggggcagtgggcggggccggcgctagcccaggag

SEQ ID NO: 31005 - DNA, 374 bp, Mus musculus
  source 1..374: mol_type = other DNA
tgagacaaagaaccctcctttggtccctagtggcaagaagtcaaccttccctagtgagaaatgaaggcttggccagtcagctgctgtcagacaggacatacggattggaagtcagcacagcaggctttatatcctaccatagttaacacttcgacgtagtgtttgctatttccagacactggtttaggcacattttgaatatgtatacaggtggtcctcagcaccgcacaagccaggcttgttggcctagttcaaagtcactattagctacatcaagagtttgaaagcatcttaggctatctgagatcctcatattgtcaaccttataacaacactgtcaggtaggcgttgttacaggcttcatttacactaga

SEQ ID NO: 31006 - DNA, 397 bp, Mus musculus
  source 1..397: mol_type = other DNA
cactaaacgctagagtttaagatttagggaatgggggcagggagtgtcccccgccctccagtgttgcctggtgcccccccccctttatttgagggtagttttcttaaaataactttttgagagaaagcacagcctctgtgtgcgtttatagataactgcttaatgcagcaatatatgcaatataccttgtaaaaagtagcacactcaaaattttattaaaaacagttttcaaacgtagcttcataaaaaataaatcgtatatctttaacccgcagaagttaaagtcttttttgttagctaacaatggaaactttttttttaagtgtttccctccctcggtttgccaagcaatagaaaaattttttttttttttaaatcttacattgaacaaacactg

SEQ ID NO: 31007 - DNA, 437 bp, Mus musculus
  source 1..437: mol_type = other DNA
caaggagggagtggcccctctttaccaggttagggacgaggtaccccggccagtccccgctgtggctgctactaaagtggcagcttcagccgcatccgctggaccacactgccctcatggagacaggctgtgagctcgggggcatgcgcccctgggagcagtttctgggcaaggagaccggctcaaccccagagcctgtccggtgggcagggctcctggacacctgaagtcatcaaagagagggctgtgactgcccaaagctcagagccctcagaggaccccagatggtctagactgcctgtgatcccagggatgcgagggccccagcagaccctggacagtgagagagaaggctctccagcactgggcttgcttgggggcagccaggcagcacagccagctccctgggactcccctgatctggacacgtgacacgg

SEQ ID NO: 31008 - DNA, 293 bp, Mus musculus
  source 1..293: mol_type = other DNA
gcctcctacgcacgtgccccgtagagggtcattgaaaagactgaattaggctcttggtgttaacaccagggggcgctgtgggcgcaccgcatcttcacctctcttgcagacatgcatgggtttataaagctgtaagctatatttctcgcttccaggaaaccttgagggagtgtccattgctggtgaaccagagggagcgctgtcacagagtgtcacgctgcccctcccgccctccgcccggagtgggggcgtggagcgcgggagggcgggcttctccgccagcctcgcagcac

SEQ ID NO: 31009 - DNA, 553 bp, Mus musculus
  source 1..553: mol_type = other DNA
ttcatacctgctcaatcaggaatgattcatgctgccagacatgcagtttactgaagccgacttcatcttcatggccagccagggctttatagtgagaccctgcatcacgctcatataattattaaaaaaaaaaaaagaccaataatgttaaagattgtagtgctacattaaataacaagatctaaagtttaacaatacctataactttaattgtcgataacctaaaatattttgggatctccccaggaaaatatctgttgccggagatagcaaaggcacatggatccctgtgagtgccagggcaacactgagacaccctgtcctgtgttagcgcggagatgggggatgagaacacacgacatctgttgtaactactaccaaaatttatagttatgcatttaagtttactaagaatgaaaaatcaggctttgttttctgggctgcaaaggggtggcgcctgtcagattccccgggtccccgccctggccccttcccagaggcagagaccccgccctatgagctgaggccccgccctccgcgcgcgagcttgggg

SEQ ID NO: 31010 - DNA, 363 bp, Mus musculus
  source 1..363: mol_type = other DNA
cttgctccttcaggcccgtggagactcctccgctgtaaaggtggaggttctgcttctgagcactaggccagctgcacctagtttctctacagagccttaagagaaatacagggtcaccagcctgacattaaggctggccaccctttgcctagaacaacttagctcagtgtggccatgctaaccaaaccttttagctttgtcagcaacaagtctgatttgcaaataagaactgtgctttcttactcaggagttaggagaggagagtgtgaagcactcagagctctccacccactccccgggtagccagcctgggtcacctagaactcatgggttagaaaagagtgaagaccaaggctggccagg

SEQ ID NO: 31011 - DNA, 440 bp, Mus musculus
  source 1..440: mol_type = other DNA
ggtcctattctcaggaccagatatgaataaatgaatgcatgtgtgcactttctcgggttctgagcactgtcaggagcagcgtcactgttcctgtttaaccaacctgagcccccaagagattcaggcgctcttgagaggtcttctgggttctgtccaagtccggcctgcacttggggcgaccccaccggagggacggagcggcccggactcaagttcgcgcctccctcattccgtccccgggtcagcggaagcgattattcccgcggcgtctggcggggctggggcgggctcgcaccccgaggagacgagacgcggcttccctgcacccacgcctttgatggcgccgccgccccctccccggctccgggccgctataactgcaggcgcgcgggggtacagggaagcgtccgggagtcatggccgcagcagggtcccagcag

SEQ ID NO: 31012 - DNA, 475 bp, Mus musculus
  source 1..475: mol_type = other DNA
gtatgcatgaaaatcttacaatttttcacttttaatgaattggaagactaggctagtctggtctgaccttcatagtgacaggacagccagggctaaaaggagagtgctatgtactctggcttcaaagtcacctgatttctactttaaaatgaagacggcagttgctctgaccgtctggcagttgcaagagactccgtagactctgcacagatgtctctgcagttgtcccctgcagggtcggacgcgaccagcagccacccccaacaccgctgcttggggttcacccggaccgccacgaaccccacgggacgtcccggctccctgggacggccacggcggtggggtgagcctctctccgagaggggcgtgaggtccccagcaagccgagggcacgggagggcgtggcccacacgctcgggggcggggcacccggcgctttcaaaccccagccgccttggcggcggaagttccggtg

SEQ ID NO: 31013 - DNA, 773 bp, Mus musculus
  source 1..773: mol_type = other DNA
aagcgggaaacagcttttccttctcagcctcctgtgtctgacattagactcttatgtaggggtggaaaggcctactctgccttagactgctacagctgtgttgcacattgtctcctaggaagagggcgagccctgtccctcggccccggtgccaccacctgcgacgcgctgacagtctccgcactgccccgcaggctgccccggggctagagtctgcgaccgacttgtcctcaggcgacttggcccgagcctccggaccggcccgcgctcggcggggagcgaaggcgggaagaggcccgcgggtcccccgcccctggcgcgccgcgcggtccgaaagtgggcgcgggactggggcgccagcggggcgcggcgaccgtacggtcccggccttctccccgcccccacacgggccgggaacctcgggggcgcgcgcgggggcgatgcccctccccccgcaggccgggcgctggtccgcagcccgcgccgccctccccgcccccacaccccccgctgtgcaccccaaagctgggcttcgggggctcacttaacgcctgcgtccgacggggagggagtgtgggccggggacggactagggcagacggcccctcggcgggcccctcggcgtgtcttttgtgtttgtacacaccgcgaggcggcgcgcgggggaggagcgagcgcgcgccagcgaacgagcgcgcggggggaggggaggggcggggcgcgcgggggccctgggcggggccgagccttccctccgagcgcggcgcggggcg

SEQ ID NO: 31014 - DNA, 371 bp, Mus musculus
  source 1..371: mol_type = other DNA
atatggctctgcgggccagtgttcaggagactgatgctagcagcttttaaattgtttagtatttcagagacaacatcatctcagcattaaatattaagtaaatttaggactgggaggcctcgcgggtagaggaagccgtttttctccccgcagcaccgggaagcagtggctgcctgggacacagaccggagtggcgcgctggcctgcggcgctgggcggagccacgggcagcttatcacccccgcgctgtagcgccgcgcttgagcccccccacgccagctcgcgtgacgccgggccacgtgaccgccttccggaaagggctggaagacgaggccttccgtcatcgagatgcgaccggatggctgtgtcgc

SEQ ID NO: 31015 - DNA, 492 bp, Mus musculus
  source 1..492: mol_type = other DNA
gcctgcagctgtggactggacatgtttccaggcagactgtggtatgagcaagacacaagcctgagcgcttgcctagtgggcgagccctcccagaaggggcacattctgtggcactctgagagcagagagacatgcgcagtcttcatgtttcctgagactatgctagcaaaatctcgtgacgaacctggacagacccgtgggggtactgaacgttttgactccggggtatctgtggaattgaccagagacagctggaggacaaatagacctccactggcccatggagaatcttccagagtctagaattcagcccagccatggctatgcaggtaatatagtacttcaacaactggtgaaagagtctctctgttttttgattatcagatacagaaatctcagtccgtgtgtcttccagacagctctctgtgtagacagcccctcctcagggcgcaggggcttgtctcatgctgagttcccaggaggtcccagggg

SEQ ID NO: 31016 - DNA, 431 bp, Mus musculus
  source 1..431: mol_type = other DNA
cagaaaaaaaaaatcgttccactttaactgtttggttcgtccattaatggaataaatacacgttagaatctattggtatactatagaaatgtatgtactacacgcctatccgacatgtttcgagaaatctttcaagagaagtcatgcttggccaacaggccgtgcaagcagtgctttaaggaaatcactaaataaatcaacaaatcatgatctagtaattcgtcttttctacctagttctacttcggaaggagcatgccgaagctgggaggggtacatctctaataggcgttttggagatctcactcctgaaccagagttagaaaccaactctgttccacccgctgcgcgatcaggaggcgggcgcacggcctgacggcgatgccgattggtccgccccagacccgagcctcggattggttgccttggaca

SEQ ID NO: 31017 - DNA, 229 bp, Mus musculus
  source 1..229: mol_type = other DNA
gattactggctttgcaatagaaaagtcttttgcacacctggggttgacatctggttctctccagggttagaagcagtgatggagacctccgcgttcccaccttccatcctaggggtgcagggccggtgctgctctaccactgagctgtccagttgtgtcctttctagacagcccctcctcaggactcaggggcttgtttcatgctgagctcccaggaggtcccaggggt

SEQ ID NO: 31018 - DNA, 367 bp, Mus musculus
  source 1..367: mol_type = other DNA
cctgtgagccagaacacaccagacgctcagcgtgtttggtcccagttggcaacgctggtgacccggggcagtttgtaactttcaaggtcccggctctctgactgggaacagggtaggtccactgcgccctggtgttcccccgccctgaaatccaactgggccagcttagaatttcctggggacattccacggcccagtgccctctcagtggggatgtgctagggcacaaaggaaaggcagttcggagacgtcctctcccagccttgtgggctggtctggtcccgcccctagacctccgtgaggacggccacgcgtggacgttcactgcccggcgcacagagctcgaggtcctgctggggccggcgcg

SEQ ID NO: 31019 - DNA, 275 bp, Mus musculus
  source 1..275: mol_type = other DNA
gcagtacctggaaatcccaaaaccggctctccgcctacgcttcacatgtgtgtaggaggcaggcactgctaggccctcacagcttcagatcagccagccgtgcacttaacgacaaacttcaggtttgtgtgttcattccacactcttgtgtgtagagtccacagactgcagagtttaaactgccaataccctgtcttagctagatgctcagctagccttggccaaccagccaactcgggggtggggccaaggcctgggcggacaggcagctggtg

SEQ ID NO: 31020 - DNA, 412 bp, Mus musculus
  source 1..412: mol_type = other DNA
ggcattcactgtcagtaactgagggtccaacagggatggtttattgaatgcatattctaagactgatccatcagttattttttatatcagtttataaaggataaaaccacagggtagtcagtcctgactcaagaactttgtgattttttttttcttttaagattaacaaaccttgactggcaggcagagaaaccctgtctacaacccggctctgagtcaagttatttttctgtgccaataactgacaggcattttacaagtacaaaaatggctgcagccgtgctagggcagaggcctggcctttccctggaggcacagcctgcagagtcagctgaccaggccgggctggtgactgggtggtgtttagcacctcctcaaaggtattactcagcctgtgaaggggataagagat

SEQ ID NO: 31021 - DNA, 398 bp, Mus musculus
  source 1..398: mol_type = other DNA
ggacttaaggtgtgcgctactgcaccttgtaaattactctgaataattttccttaaaaaattagccactgtgctcaagagtgctaaaattatcttttaataaatcccaattctgcttcatattggtttgtcatgaagttgttttctacaaaaccatgaatcttgctttttcctgaaaagacgtttttaaggggaaaacgtcttaggctgcagactgagtcctgggtacagcgcgctgcggtcctggttcccagactggaaccaaacgtaggcttggcatttgcttgtgagagtctgcgcagccgcgagggaaccaataaagttgaacgccttcaaagggggcctagcctcttaggcaggcagactggagcgcgcggccacgcgtgggcggggtttccg

SEQ ID NO: 31022 - DNA, 295 bp, Mus musculus
  source 1..295: mol_type = other DNA
acactacctgctttaaatttaaatttaaaatgaaagttaaataaatggatggaatggctgctggaattggcttccaaaggcaacagaacccactgttcatctctgcacttgaagtgtacagtagctcctatagtaagggtgtagtaaaaattatttgcctccctctttaaaaaaaggttgataactggattctgtaaaattcttcaaattcagaggtgagaaagcttgctgttatcaaacttcatggaggtggcgtttttggaccacaactcccggcatgccgcctatcccagcg

SEQ ID NO: 31023 - DNA, 471 bp, Mus musculus
  source 1..471: mol_type = other DNA
ccatggaccatttgccacagagtaacatagttactcagttctctgctgctgtgtttctccccgtaccctcggtcagaggtacaggctcccagagggaaggcagtttacggccgacttcgccttcccagggtgggaagccggtggccaggggcctagcacacccttgtgccaggccgccggcggccccaccctggcccgtgccagtgcgtctgcggccccctccctcagggtgcagggcgaggacgtgatctccgcctcccaccctgcagggccccggagcgaggctgcgaggccgagctcgcacgcctgacccggggagccagggcggcctcgcacaggcgggccaggtcgtgctgagtcgcgcctccccgccggggccggacccccacccccggccgccctcaccccggccgccggacacacacgtgccgggtgacagccgttccatacctgctgccggaagtgagcgag

SEQ ID NO: 31024 - DNA, 454 bp, Mus musculus
  source 1..454: mol_type = other DNA
attcttttctgtacataatccgatgttctgaggtgcacctcagattcccgggggactttttttattgagcaattatgatacaattttttaagatgcttaacctctgtgacagaggcggaactgggtaccaattgctcccttttcaacagtaagctcttagtaagattacagtttgggaaatctgcctaagctccaaagggctggaagcctaggggcggccgacgcgttgtcgccatagcccgggcgcacgtgctcaaagagtccctgcccctcccgcctccgcgcgcgcggggccgcaagtttcctacgagaggcgggcgagcaccgcatcttctctccgccgcctccctggcccccgccgctgccgctgcagtctccgcccgcggggagggcgcgctctggagccggcgagggtggggcgccgcgagggaggggtcccagcgccgcattcctc

SEQ ID NO: 31025 - DNA, 412 bp, Mus musculus
  source 1..412: mol_type = other DNA
gttagggaatcactctctgggagagtataacagtcttgcctggacgaagatgttacttcttagagcttccacatcctttcatgaactctaagagatcttatctgtattcaaggtctgcagtctctcatggacattccatgcacagtcgattgccagaggctgggtagcacttaggctcagagctttctgtctctggacagaaatcttgagtgatgattgtcctaaatcaccttagatgttctaacaggcctgcactgcgtggtggacttgccagcctcgttatgaagggaggacatactgacacctgtctggacttcctggcactgtttggacaacaaacagtgtgactgtttaactcagaaaagccctggacagcctctgacctgctctgacttcctggcaggatttgctc

SEQ ID NO: 31026 - DNA, 495 bp, Mus musculus
  source 1..495: mol_type = other DNA
gtggcaaacagttgcttgttacccagagatgttgtgctgtctgctgagaccacagcccatggaaacagaaggaaaggctgtgtcctgccgccagtcgccaaggactcggccacagccactgagtggaatcttacgatcaattgagtctcacaggcactttcatgccaggacattgagcggcatgctgccaaatctagttttgaatgaaattaatagttatcttaatcatagaaagaaatcatactctgagtttctgtaagttactaaaggcatctctctctctctctctctcacacacacacacacacaacacacacgagttggtgttgggcatagggcagaagggctctgtgggtccctgcgccctggaagagccctgctggtggcagacagcagtctcttgacaagctttaaatggaatttccaatatagtatctctctcaaagtagggaattacattttaattcctcaatttcagagagtatctaaaaatct

SEQ ID NO: 31027 - DNA, 480 bp, Mus musculus
  source 1..480: mol_type = other DNA
atctcaaacaagagctgaagcttaagggatttgccaaactttacgtttagaggttagcactctttcttaggaagggcttgcggatgaaaagacttatttcatttaataagggatgttggaaatacctttaaaaacaggctttaacgaactgcttccggcctgggcctgctggggtcgggtccaggcgggacgcgaagcccgcgggcttcggccgtggccggactaagcgcgcggcccgctggctcccgaggttacacacggaccgagagccgggtgacagcagcggacgcttttgcctggcgtcgcgcgagcctcctcccagaccgccggcctagatcgctccgcaggagggcgcgagccaaagcgcggcttggtgcctgacgccggacgctcacgagcgggcgggctggacgcgccactggccctcgaccaatcgccagcgccggcgatgaggggcgggacctcgggggcgcgagagcg

SEQ ID NO: 31028 - DNA, 638 bp, Mus musculus
  source 1..638: mol_type = other DNA
tcagtttttaaaaaattttattagatcattggaaaggaaaagacagagcatttaaaattatcctcagtttccatcccgcccccggccgggattccctttcagctggtgacgacagaaagggggctctcgcggctgcacagggttccgcgtgcctcgggccaccgcgtttccccgcgtgcgcgcgtcggccggatccccaggtccagcacgctcgggggtcctcgggaatccgggggacgacgacatcccgcctacatcccacgggtgggggtgggtgggaggggcggcggggacgcgcagagggggatgccggcccgcgcgccctggtcctctccgcgatcgcgcccggccctcacctcagcctccgggctgcgggaaggccgcggcaggagagcgcggtcaagggcagagcgggcgccgagcccccctccgaccgcggggggcgcggagccgggtgggcggcaacaaagggccgtggccgcaccgccgcctcgcctcggccgccgccccgcagccccctcgtgcgcaacgcccctcgccccgggagggagggggaggggagcggcgggggcggcgggaggagggcggcgcctgcgtgctcctccgccgccccgcccccggcgccccgcggcgagccc

SEQ ID NO: 31029 - DNA, 322 bp, Mus musculus
  source 1..322: mol_type = other DNA
tggtaatacccccatatattgattatgacattaggcaaagaatccatgatcgtatattaaaataaaatttcttttaaacctgtgtcacactctgcctgagggaaagactcaataagtacacgtacactgcagatcttaaatgaaagaccacagaaagtttttggttcttgggtaccaggtcacagactatcccctccagccctgcaggcggcgctgtggcagccgccctctcctctcccgacctctcagagcggaggccccgccccccgacatcacgcctcctgcccattggacaggcgcgcggccgaggctggccaatggc

SEQ ID NO: 31030 - DNA, 284 bp, Mus musculus
  source 1..284: mol_type = other DNA
tactcatgaccacttgctccacggagaagccagggctctagaaatgataggcattttgaaatcaaatctcccctgcctcccacagtcagacaaaaagagaaaaaaaaaacttttttaaaaattagattttagttgccacacactccaaatctctggaggttttagttttgctattaaaagttaagcctacaaggttcttggctgccgacccaggtcccgcccatcgcctcccacgaggggcgtggtcattgcggggcgtggcctgaggccccgcctctgcccgc

SEQ ID NO: 31031 - DNA, 257 bp, Mus musculus
  source 1..257: mol_type = other DNA
tggacatctaaggtggacatcacagttatctatgaactccacagcgtaatcaaaagatggctgctatcctgatatcacctgcaggtaggatgtgagcacatctgtccgtgtgatcagtaggcaaaggagcctgctctctctgtctctctctctctctcatacacacagacacacacacacacagggaatgttgtaaaatctccgtcataatcgacactgtccctgggttggaaggcctcctcctcagtaggagacag

SEQ ID NO: 31032 - DNA, 406 bp, Mus musculus
  source 1..406: mol_type = other DNA
tcaacactgaagggcttttcccttcttacattatagaagtaacagttctgtcaggaacgtgctccggcccggcggactcgcaggtctccatcttgtggggcgctcggatccctcagggcgccctgagtcaggtgtgtgaggcggcgccgcccaggcccctcggcgtccggcgccttgtggctggtcctaaggcaaagggctcaactctcttgagcaagccaaggaggtgagggacacagccctgggctccatccccgcggccgccccgtgccttggctccgcctggaggcgcgttcaggagcagctccgccgcccgcatgcgctcgcccgctccgctcccccttacctcaagccttggggcgcgccgcgggcggggcttcgtggggggcggggccagcgcgcctcg

SEQ ID NO: 31033 - DNA, 288 bp, Mus musculus
  source 1..288: mol_type = other DNA
cacctaaattgattcacagagaataaaagtcttttttttttttttttttttaaggtgagaaacaatgcacccattaactgtaaaccaaactcgggtctttcacataaaagtagataaatacaaatttccgtctaaacttatgaaggtgatatggtttttatttggcgagttgcttttaaagaaaactgctccattgtcgttccttttatcagatgaaagggacttccactctaacaaggcagtctccgattttataagctcccccccccccaggaggaggaagtgacg

SEQ ID NO: 31034 - DNA, 421 bp, Mus musculus
  source 1..421: mol_type = other DNA
caaggcttggcttggaaatgtttaccattacccaaagttatgttgaggagccaccctgaggtcttcagtgctgtcaggtctcctggctctagcccttagcttgaagggagagggccttgccaaggctgcccctctggcgcagttgaggcaggtgagagctgcagcctgcaggtccccggggagcacacccatccaggccaaagacttggctggtctctgaccattaggagccgtaagcttcacaatacgtcttggtgtgctctagaatatgctgggccaaccagaatctcgtgggagccccaggaagggccagaaggtccctggggacaaacagctagctgtacagacctcgggtcagctactgctaagtctggctctgggagaagggagggcaaggcggagccccacccatcctctgccg

SEQ ID NO: 31035 - DNA, 369 bp, Mus musculus
  source 1..369: mol_type = other DNA
tagcacaagcccgccaggggctctgtggtaaatctgagttttagataagcatcacattattattctaacgggctacgtattttcttgaaatttagatttaacaagcatggatttgtcaaattgtacagccctacttatgcacaaataagtatagtagccatttctcacaaatcctgagcccgagtggccctccccaccgggccgcgccatcccgagagccgtccgaaggtggcagcatcggccccacggtcgggctggcactgtgcaggtcgccggcgagccgcgtccggagcccggcgccgagcaggcctggggaggcggaggccacaccccgcgcacggcccaggcgcttcccgccggtgaatcatc

SEQ ID NO: 31036 - DNA, 399 bp, Mus musculus
  source 1..399: mol_type = other DNA
acccgctttagaatcatctgcaggtgaatggtctaaagactctgatatcttagctcaggaatcagtgacctcagactccttattctctggtctagcccccagaacactctttgatcttgtcacactgtactgcctgtgtcttctgtaacaaacgaagcactggctgttcttgcaaagatcaccagtttggtgccctcttctggcctccaaggacagatcacttatgtagtgcacaggtgtacgagcagagggttagtctctttctgttctgggcacccacagacctctccttacagagtctctggatccaacttggagactcctgatagcctccattgtggtgaggagaaggtggggcagagttgcctgcaccttaccttgggagctgccttaaagggc

SEQ ID NO: 31037 - DNA, 341 bp, Mus musculus
  source 1..341: mol_type = other DNA
gaacttttaaatacagttaagtgttaaaagctttaactggaagtagcccagctttccagaacttgggctcatgggcagtcacttgccctttggcaatatttgaaaacagtgcagacaaaattcatattttgatttctaaaaaaaaaaaaaaaagctgtaatttacacattagaggaaaaccagaattgcttgttgctgttctaaagttcacaaaggtaactgtgaaagctgcacagaaggctagtgaggttggtgagctgcttagccagttaagttggagcccttggcaaggccaggtgcactgaggcctttaaagaccagttgtgaagtacaggccacat

SEQ ID NO: 31038 - DNA, 543 bp, Mus musculus
  source 1..543: mol_type = other DNA
cgccgaggcgcgtgcaggcccgcgcgcccctgcccttcccgcgcgcgcccgggcctcctccgcgccgccgccgcgcgctcccgagctcaggtagcgggcgcgcgcagcccggcagccgtggccctcgtcacccccgcccccggccactcgggggagcccggggagggagcgcgcggcgggacgggcgggggcggtgtagcccggcagccgccgaggcttccgtctcgctccgctcgcttgcttgctcgcgcagaggcggcagcagaggtcgccggagcccggaaggggcttgcctgccccggggaggcgtgcgcaggccgggctgggcgagttggctcctggctcagctcccctaagggaggaatttttaaaataaaaataacagcggagcctccggaaaagtgttttctcagctttgatcagagccgctgaatcccggggaccagcacagagccagtgaccctgcatgggggagcccaggcaccgggcccccagggtggaggagggagagcttggccccagagcccgggcaaccccggggta

SEQ ID NO: 31039 - DNA, 308 bp, Mus musculus
  source 1..308: mol_type = other DNA
gctcacaggccggaaagctcttgcgttctctgagggaaatcacaacttccttcaggggtgatggtacctgcctgtaaccccatctcaataactcaataaacaagatagacagaatgatgtgcatgtgtgggcgtgtacacacacacacacacacacacacacaatcttcaagatttggcacagatccaggacttgctgcgctggccgtgttacagtgcatcacctcagttacaaggtcattgcagcagagatagaggtctcctccctggcaagaaagaggtacctagggcggggctccagcagcgggc

SEQ ID NO: 31040 - DNA, 433 bp, Mus musculus
  source 1..433: mol_type = other DNA
ataatttgaaatataaataaagaaaatatctaataaaaaaaaaagagaaaaaccgtttcctttgttctcagagaactaataaaaatatatttaagtatcatggcaaaataaataaagatttatataaaattttacattggcataattgtggccatctgtttataaaaagcaaatccatttagctaacagctatttttgtttgggaaatttgggagaaaaatcttcttaaaagaagaaggaggagaaagactgcctctcttaaaacagtgaactttctcctttgaaagcaggatgtcaagaaaataaacaggcatcggtgtttatttgcgtaaatttttaatagtaactttaaatcctaaaggctagaaatgacatgtcaccttcacctcaaggggttaagtagttgagaaactctcccgacttgcccattcag

SEQ ID NO: 31041 - DNA, 559 bp, Mus musculus
  source 1..559: mol_type = other DNA
gatcataactccttagggggcctaaactggtatatctaagtcttaatttactgcttaatggcataatgactttgtaactttgaaatttaatgcttctatgatgataaaattaccaagtcattgagtttttttttttttttacgatctaagaagctattataagaactttcactttggccaactgatcataagatatatagaaagctttttatcatcactagcaaatattttgtatttcataagctattttaggtgatagtagaatatgaagccccaggctcaatttttagcatttccccacaaaaacccttttcagttgagatttttaaaaatgcagaatactttttagttaatttaatttcttgtggatactgcttaatttagttttaagttaaaaataagagactataatttagattatatttttttattttaaattgagccatattaaatttaaaatccacagactgcccctctgcccagtcattgtctgaatactaaggttggcattctgagcaagtaaacacttattgttgtttcgcaaccagaaaaggtttag

SEQ ID NO: 31042 - DNA, 486 bp, Mus musculus
  source 1..486: mol_type = other DNA
caacatctggtcttgccttttaattcagtctcaactgaaattgttcactgctgtgttacaacaaattgtcttgtagggttacagcctgtgctagaattattcaaaattgctacatacttcaatgcctcttagttatccttagagtcctgacgataactagacagtgtgtcaaggtgtggttctccgtctaccattttcttgtttcatgagtgatggagaaaagaaacagtctgaatgaattaaataaaacatagtccttcgcggtgtctgattaggtgggctcagaggtcggtctcagagtcatctagtggacacctggcccagctaggagatgcatgtgcctctgcaccccagcccagctgcagcggctttgagtagcaggaggcctgggcccatagccggaggcgggacttccggtcccgctggcgaccgcggcccgcgccaggcggaagcgcggctccgggccaggatccgcgagctccggct

SEQ ID NO: 31043 - DNA, 592 bp, Mus musculus
  source 1..592: mol_type = other DNA
cgggaaggaaaggagacttgccttcagtagggccccagctacctgttgaatgggcccggccctgtgcggggccccagccctggtgcttgcgggagccccaccccaagaagcctgcgctgcgaaacaaggggaggcgacccgcctggccagctcccgcgtttcaagagtcgaagtcggcgcctctcctaagactggcgccccagcgctgcagcagactccgggtcacctccgacatggccggtccccgccccggccccctcccgccctaccccagcaaggccaggctctagggcgccatcctccccgggcttggccctgacattaacagggccaggaggagcagctccaaggcggccgccccgccgaggccacgcccccaagccacgccccagttaggttgaggccgccccaatcctcgggggccgccatagctacagtggcattcggccttggtttggggaccccaggctacatctctagggcccagaggggccgcgacagcgggaccgaacccgcccctcagagacacgctcggccgcctccgcagctggtgcggtctccagtcacgtgacgcctgctctgggccggcccc

SEQ ID NO: 31044 - DNA, 222 bp, Mus musculus
  source 1..222: mol_type = other DNA
gctcagcactgtcggtgagcacgcccagccacaatagctcctatagagttattacttggaaatacggttagctattggcaacaatgactttatgttcttatgtcctttatggactgaagatcgtgggcagaggatcactgtccaccacccctctaccccatggacgccaaggcctcctccaagtcaccgctgggcgcctcccccccccgcccccgacaccgc

SEQ ID NO: 31045 - DNA, 543 bp, Mus musculus
  source 1..543: mol_type = other DNA
gaagccagactgatttctgggttgaggccatcctggtctacagactaagttctaggacagctagaaagaactgtataaataacttttctctagtgcctatgagcactgcatactgtttacatagaaaacaaaaaaacaactcttcatacaaagtctttttatagacccttaggttgattctgttctcgagcagtaaattcaaagttccaataactttaacagtctgttcatttaacggatcagcccttgaaaagtgaattctcatgaaaagattcttgctcaaactggaggcaggaagtcacttaaatcagatgctagcagcaactgggatcggctataaggctcaggctaaattgtcaatctgggccaaaccaatggggaggcggaagtcaacatccacttccgggcctcgtccggaagcctcttcagagctggataggctctgcatctttcccacaggtaacgctcctgtgggggcgtggccacgcatgcgcactacctgaatgcccaccaggctggttctgcgcaagctcccaggaagcg

SEQ ID NO: 31046 - DNA, 442 bp, Mus musculus
  source 1..442: mol_type = other DNA
cagggacccttctcttggcaggagagggatccctggcccttcccggggtcctacacgtggagacgggaaggaaaggagacttgccttcagtagggccccagctacctgttgaatgggcccggccctgtgcggggccccagccctggtgcttgcgggagccccaccccaagaagcctgcgctgcgaaacaaggggaggcgacccgcctggccagctcccgcgtttcaagagtcgaagtcggcgcctctcctaagactggcgccccagcgctgcagcagactccgggtcacctccgacatggccggtccccgccccggccccctcccgccctaccccagcaaggccaggctctagggcgccatcctccccgggcttggccctgacattaacagggccaggaggagcagctccaaggcggccgccccgccgaggccacgccccca

SEQ ID NO: 31047 - DNA, 296 bp, Mus musculus
  source 1..296: mol_type = other DNA
tcagagggtgattctgttctgactctcactgtggggacacagtcatttcccagtctctaaactgagagataagtttctactatctataagttaacaagtctacagtatttttgttttcagtcaaggatgtctctacttcccaagggcagttgaacacagcacagctttgtgatgcatgctaggcaagcgaagggattgaggcgccctcctttcgcctgcaggagcctggtgctgtcagacatctgtttttcctgcatggcggaggaacttcactgatgaaccacctcattgaactg

SEQ ID NO: 31048 - DNA, 307 bp, Mus musculus
  source 1..307: mol_type = other DNA
tgaaaagaatgctccttccccactcctggggcacgtagttgggcttagagccaaaagactaaaccttaggatcttccttactgtctctgtctctctctctctcactcacacacacacacacacaccgctccagctatgcgctcgcgcagtgcacacagagttactttctcttttgctacagcgtaaatggctccgcccgctacatcacagtggtctgcattggcaaccaataagtgctagcccgggcccagcggctctctatttacatgtaaacctaggcagcaggacgcggttaacccttcctggg

SEQ ID NO: 31049 - DNA, 457 bp, Mus musculus
  source 1..457: mol_type = other DNA
ccgggggcggcccagcaccggggggcggatggactgcggtgtggggcgttcggagggcccggccacgcccagctctgcgggacggcgcccacgctgcccttcaacaccggcccccaggcgtcctcctccgagtagctctccggagtgccgccttcgggatcggagtcgggggcgcgcagccgccgcgcgggagatgcgggccgggccaagcggggctgcggggaggccggccctgtgcacgctcacgtcccgcgcggcgcagccacagccatggagggacccggcttcgagtcgtctccggcctgggggatggacactccacctggagtcaacccaggaagggttaaccgcgtcctgctgcctaggtttacatgtaaatagagagccgctgggcccgggctagcacttattggttgccaatgcagaccactgtgatgtagcgggcggagccatttac

SEQ ID NO: 31050 - DNA, 604 bp, Mus musculus
  source 1..604: mol_type = other DNA
agcctgcggaccgccagcgtggtctgctggggtggaggtggggagcctcagtgatccccctcctccgcagctccaggaaaattccggagaccggctccgaggctctgccgctggcgggtccccgagctgcaggggacagaggagagccagaggcccgaggagtctcgacccccaagcggctcccagagacgctcagtactcagctactttggcgtggccagggcgtggccgagctcggccacgcccccctctgcattggtcagtcctacccggggtctgactcgaaagctcctgccaaaactttgggagtttttatttaaactaacggatcattattgttttaaaccccggcttctgcggagtagcagagcgaggccgcgctcgccttgtcgccccagcgcctggcgatcgcctccatccacccggcggggagcgcgcccgccgcgccgcctttcaagccaagccaggggcccaggccgtggcgggcggcgatcgggccctcgcctcgtccctcggtggcgctagggctccccggttggccctccgcttcagggcgggcgaagaaccgaaaggggctcggctgggacaccgcctctgcccgagc

SEQ ID NO: 31051 - DNA, 460 bp, Mus musculus
  source 1..460: mol_type = other DNA
ctcacgtgaccaggggatgtggtggcgggacacgcgtgccgctctgttgtcactctttcaagttgtcactggaatgacagctccgaataaaactaatttgtggtctgccctcctcctggcttcttggagcagctctggtgagctgagcctgcggaccgccagcgtggtctgctggggtggaggtggggagcctcagtgatccccctcctccgcagctccaggaaaattccggagaccggctccgaggctctgccgctggcgggtccccgagctgcaggggacagaggagagccagaggcccgaggagtctcgacccccaagcggctcccagagacgctcagtactcagctactttggcgtggccagggcgtggccgagctcggccacgcccccctctgcattggtcagtcctacccggggtctgactcgaaagctcctgccaaaactttgggagttttta

SEQ ID NO: 31052 - DNA, 430 bp, Mus musculus
  source 1..430: mol_type = other DNA
tctccctctgggaggcaggctctccctccgattgattgatggctcccagccatctccttctctcaccttgagacttggggcacaagcttctcttcagagaaatctttatcgtctctgccttaacttagtagagaaaatgctctggttacaggtgcctaaggcgcccaaggtaccttgatgattggccctgtagatcctcaaggctccagctggttggaagcaccctggctgctgccaaactgctccccacagaccccagaggggcggctgcccgcagcctggtttctaatttcaaaatcacgccacgttctgcaaacgttgtgtgttttaggtcaaataaacaactctgggcaggcggtgagattccacagctgagccaccacctcccgcccaggccgaatgaagatgcacaatctgctgacctttgggc

SEQ ID NO: 31053 - DNA, 328 bp, Mus musculus
  source 1..328: mol_type = other DNA
acagatacgatctgcgctcccagggactgaatcagtgttggcacaactgatgagttaatcattgatttggggctatctcttagccaaaggagaaaagtcgaccagagtcctctattcggacctcagcaagtggtaagctctggcagcgtacctgtaacctcaggtcacgctgccagagatcttcgggagacctatcccaaagttgtccccagcagcttcttgcacaattgagtgtgctccttttagaagcaaaaggacgctgtcacccgcgatgggcgtgggccaggctccgccgacactgcagtgcggctgcgccaaccctggctcc

SEQ ID NO: 31054 - DNA, 308 bp, Mus musculus
  source 1..308: mol_type = other DNA
aaagaaaccacttacttgatttctataaagcatcaatgttgggaagacatttttaacgttttgattcagagcatcatgtagcccaggctggacctcagagcatgcctaggtagcattctcccaaaggtctgaatataatattttcatgaccctgtctaacgcagggattaaggtgtgtgccaccacaccgcagggttctccggaaagccttttacggggtgtgctgcgacctctggttcccggagcgcacagggccggggcggtccgcaggggcaggagccgggcggagcgtggagcaaaggttgcct

SEQ ID NO: 31055 - DNA, 572 bp, Mus musculus
  source 1..572: mol_type = other DNA
agacagccttcttactctctctgaaagtgactccagggatgctgtggggtgcggggagcccatggatggtacccatgctcccgacgcccgccggaggttctgaggggacaggctgatccgcgggtggggcaatccggcccggcgggcggaggcggccccgcatccctaatgagggaatgaatggagaggcccctcggctggcgcccgcccacccggcggcggccgccaagagcctcggggcgctgcgtgccgtgccgcgcccgccgctccgcgcgcaccggctccggccgccgagggctccggctgatcgcggcggggacggcgcggagcggcgcgcgggctcggggccgcggggcccggcgcggatgcggcagcggcggcggcgacggcggcggcggcggcggcgctcacctgaggcggcgtgcgggaggcgctgtcagggccgcgctcgccgggcgccgcgctgaggcagctccggggcgcccgctctccactcagcccgccgcggccctccgcgcccgaccggcgtccccgcggctcggtccccgcgtcctcgcccgccttcccgcccc

SEQ ID NO: 31056 - DNA, 295 bp, Mus musculus
  source 1..295: mol_type = other DNA
tggtgctttccttatccaaaacccagctgagtaagtaatagcaccattcaatactgcgctggtccagtatttatttaatacgagcccttaaggagctcagactgagatctaggtcgtgtccgtagaagcacaccaacaagattgtttgggtgactcaatggcccccgcaaagtcgcgagtcacgtgtccgaagctgcaccctccctcggctcccgctcggcccgcgcacgcgcagcttcggggcgtcccgcgcatgcgtagcaccctcccctcgcgaggagtgctgacagcttcc

SEQ ID NO: 31057 - DNA, 313 bp, Mus musculus
  source 1..313: mol_type = other DNA
acaaaacaaaacttgttttcattaaacctaaattattattaacattaaacatgtcagagtttgagtccagagtttaattctgtcagtctttaaactcggaatcgcagagctcaccgggaatctcagctccctggaagctgtctcctgtagagttgcctgggatgcaccaggctccaggttcaatcctcaagactcctccacaccgttcggattccagtggagcatcatttgattcagaaaaagaatgatgatcttcattctgtttcctaactaacaaatacttaagaatgtaaatgttctcaagttcaagtgc

SEQ ID NO: 31058 - DNA, 344 bp, Mus musculus
  source 1..344: mol_type = other DNA
gctgtgagatgacagctgtcagtcaggttctcaaatgggaaactacagttcagagaacggtattgtaaatgctgtcataggtgcgggggaaggcccgcatcccccgaaccatatgcatgcacacatagatgcatgcccacacatgcaaatatgcaactttctatacatttttgttaaagtgtggcacaaaaatggcaaaattggctgagctcattctgtagaccaggctagcctcgaacttggagacccgactggtttatgaccctggacaagttaattaaatgtatcggaagagtgatagtaaacacctctctctacccctactagacctcaccccttccgcc

SEQ ID NO: 31059 - DNA, 411 bp, Mus musculus
  source 1..411: mol_type = other DNA
tgtagacatttttaccacacctgaaaggtatgtctagctgttaagagcaggtggatgccctcttctggtctgtctgaagatagctgcagtgtactcatatacataaaataaataaattaaagtgtgtttatatgaatgtatatgaatatatgcatgtatatgaacaaatatatattaacaaatatatatgaacaaataagttatggtttgcctctattaactaaggtttgagagtcgcagaaaacacataaaaacaaaatctttttattattatcctcataaaataacggcatgagaaattttttaagggaaaaaaaaaaagtgttgcttttatcaaaagaatcgggttcccccgacagccgggagcgcgcggggacctgtgtgcgcctgcgccgacctcgcgcacgcgca

SEQ ID NO: 31060 - DNA, 357 bp, Mus musculus
  source 1..357: mol_type = other DNA
tcatggtcttagcaagaacactgaagttattatttttaaaggttattaattgtttccactgtgaacacaagttaactgttgtgaggttcgcaggtttctctgtatagcctgaattattattaaccctctcatttgaagatgcttctctctaaaacagacattgtcaatattggcaggcttcactacagatagtaacatctggaaatcttgattctcagggccaggaggcccagcaagctgaagggaagctccctgaatggactagtcggagtggcacctcacgggtgcccagtcctgtcgccaccgcgggccggggcctctctgcagtcgtggcgcagtggcgtgcgcaccgactcc

SEQ ID NO: 31061 - DNA, 317 bp, Mus musculus
  source 1..317: mol_type = other DNA
ccctccaccccccacgatgcagggtctgtgggagcaacactcctgcctggtcaccacagcctcgggtttgaggaggcaatgatctgtgtccggaggttgctcaagcacgaggaagccacacagagaggttatctatggcaggctgtctggtcagcagtcctgaacatcagaaccagtgactataggccgcccccagcctctgagcgcccccaggtgagacctcagacaccgtgtccagcacaggctgttcacactgtctgaggtgtttgttagacagtaactgggtcacgtagccactcaagcacggatcagagcac

SEQ ID NO: 31062 - DNA, 353 bp, Mus musculus
  source 1..353: mol_type = other DNA
attttttcatagtctatgaaggtccctatcaatagtattaaaatatccctgatcaaagcctatcttgttactagatctttcagccaggcccatacactgagaatctaaggaaattcttttttaaaaattaataaattataaataatatagaagaactactaagatgtccctttctcgtattaaacaaattaatgtgtaaagtgctccaaacagtacttcgaatacagtaagcacccaataaatgctgtagttatggtgtggacatgtagtacattgacatattaattgtatttctcagtcattcacagcagaagaaaaaccagaaatcagcagaagcatatcacttgtgcctc

SEQ ID NO: 31063 - DNA, 404 bp, Mus musculus
  source 1..404: mol_type = other DNA
ggtgaaggggctgcagtgtagactctcaagtccaggacatgttccctttgagtgattgtcacttggaacagggtctatttggaaaaaaaaattggtcaattgtagaaattctttctgacagactaggaaaggagaccaaacctggcttctttgatggccaagggacacaaagaatcccagccttggagtgctatactaatgctaatagcagtggcagccatgcaccctgggctgcctgcctactgggcacgtaggcagcggtgcgcacaaggagcgggaccatcccgtgcatctctctctcagagagggtggaggtggagattctccagcccagacctagaaggagacacaggctggtggccaccagccaaatcaaggcaggggccccgggaggtggcctttgc

SEQ ID NO: 31064 - DNA, 495 bp, Mus musculus
  source 1..495: mol_type = other DNA
ctgttctatacaggggaaaggactaacatattgttatagctctttatctttttatgattacaacacaagctagtctattttgtcatccgcgtggataaccgaaattgaagttgtgggtcatttaatcccacacttattgctcattaaattagatctatctgttaactattagaaaaaagacaaagacacacacacatacaaaagaaattattatatggctgggtcaccatataaaatatggttatatctgtaaaaatttaaagacagtaatatttcccatcctgagctttagaactgcagtttaaaacctgcagcaaattctcgggactaaagtttattctcagtcattacaatggaggaacctgacctaaggaaagcattcctcagcagaatccagagctgagcactccttcgtgggcggggcgccaggcacggcgcatgcgcacacccatgctggtgctgcttgcctgcgcgcgcggccccgtgacgctaggg

SEQ ID NO: 31065 - DNA, 489 bp, Mus musculus
  source 1..489: mol_type = other DNA
agcaaccacaattttatccaaattttatgccctaatttgttattagagctaaactattttgatctaaattgggaattaacgtaaccgttggctttaaatctgttatttcagaatacaaaaataaattcaggcttcttctcagaaccttagctactgaattagtaagttgttgtaatacaatttaaaagttaaccaatttcattcatcagcaaggcacaaagttgaagccccttaatatgagtataaagaaactcagcgacatttgtcaatcctcaaagtcagagttctggcagaacaaaaatatattaaaaacactctagcctgttcttttcagtttttccttttccacagaaaagtataactcgggacctctcactcctccagggtcagtgtgtccactaaattgccgtcctgttttttaggttaaagaattctggcaggtcattctttcttttccaaatagcgccacattgctgacaagaaatagcc

SEQ ID NO: 31066 - DNA, 486 bp, Mus musculus
  source 1..486: mol_type = other DNA
tcgtggtcttagtaaactctgctccgggcagaatcgtgatgttatctgctggcagcaggtttgctcggagcagagctgctgagagagctgagctctgggaagtacctacttaccctaagcgagaaagtagtcccggggcagcccgcagccaacgcgcccaggaggcggaaggaggtggccgatcgctgtcgcccttggccgcctgggccctctttgcaggcagcagcggcggctgcaacgtggagcgacccagccgggtgtaggccacagcgcggccggcaggagcgggatcctcgccgcctgctccggcctctgtggatctccggggcggacagtatcccaccgagtctccgagtgagccgctccggggcgcatctgcctccccgcggctcgccaggctcgccctcggcgcgcgcgcacgcacgcgcgcacacgcgcacacatccacacgcacacccacacacgtgtggaaggcagggccgagcc

SEQ ID NO: 31067 - DNA, 326 bp, Mus musculus
  source 1..326: mol_type = other DNA
acacatacacatgtatgcatccctaaaggtttgatcctttttaacctgggggaattctcaacagtttccagctttaacaacctgtgtagtcatcgtggccacagagtcatcactaagattgaaatgttgactttgatccaaccagttaaaatgtcttaaagaaggcaacagttcctttattcaaagcagtgatggttcacaggcaaacaggggattgtaaacagaacaacctgtggaatcccggagaactcaagaggtgtgtgtgtgtgtgtgtgtacacgcctgtacatgcatgggcacgcactctcgtggtcttagtaaactct

SEQ ID NO: 31068 - DNA, 230 bp, Mus musculus
  source 1..230: mol_type = other DNA
ttttctttttcttttaagacaaatctggagtactaaaaaccaatatatcaaaaccaaggggattccttacatttgtagtccttcgaaggagggtaatcctatccgtgcttgaacatgttaaatgcggtttctaactcggaacccagcttcaaccgactctgccggaccacagcggaacttcaggcgggacaactgttccggaacaggaggaagttccgtgtgttgcaaca

SEQ ID NO: 31069 - DNA, 234 bp, Mus musculus
  source 1..234: mol_type = other DNA
ttctgaaactgtatcaaacgttacctttctatgatctgctaacaaactgactggctgtaagtaaaaagagtcaaatcctcccaaagatgcgaacattttgcaaggttcaggacctgcaaaaggcctgggtcagtaacagctgaggaagctcagccgccgaagctccgccaggccctgggctcacacgtgagtcctgattccgtcgtgttgcaacacacggaacttcctcctgtt

SEQ ID NO: 31070 - DNA, 240 bp, Mus musculus
  source 1..240: mol_type = other DNA
gctcttaaggagtcatctttcttgcccatactaagcaagatggccaaggtgtttatgcagagcaggagcccctcctctggggtgaattccactcaggtttgatctgtagatgcaaggcagctggtttccgtgtgtaagggggtctgggcaattgtggggtggccccctccacctggtcaacacacgggacacctgtggccacgtgacccagagttctcgcgagatcttgaggacttccaa

SEQ ID NO: 31071 - DNA, 251 bp, Mus musculus
  source 1..251: mol_type = other DNA
tctggggtgaattccactcaggtttgatctgtagatgcaaggcagctggtttccgtgtgtaagggggtctgggcaattgtggggtggccccctccacctggtcaacacacgggacacctgtggccacgtgacccagagttctcgcgagatcttgaggacttccaagttgatcgacgttccgggggctccggaagtctgacagggcggcgggccctgtgaccgcatcgcgggcgatggcgcgctaggcctga

SEQ ID NO: 31072 - DNA, 328 bp, Mus musculus
  source 1..328: mol_type = other DNA
tgctttttcaagtgaatttgctgttctcatcaatattatgcattaaagcatttcctgtgaaatgtgggttagaagaaagtaacttaaatacaatattccctaattaaaatcaatgactctcagtctctgaggcaaaattctcacaatttgtcctaaggctacatagaactttgtagggacatcaatctggccactgtggcacaaggatattaccaaaatgttgagaatttgagttgaatttggccataatttttcaatatatctcctttaaaagataagttaactaggctgacctctgactcccaaatatgtcataaatgtgagaatt

SEQ ID NO: 31073 - DNA, 610 bp, Mus musculus
  source 1..610: mol_type = other DNA
aattatcttgtcacaatggtatagaaacttcacttggacaaatgaatcacagatgaattgaattctgtgatgtttgtgagattaagtgaagctcaaattcccatttggacattgatattctgaatacctggttaacgttaattaggccactagacctacattgtataaaataggtttcaccaaaccaaatttctcagtgattattttaaaatgtcgaaaaaaaaaaagcttgcccagggcagccttgaattttctgtgttgcccaggctggactggacaattctctaggatcttccttagagaatattaacttattaatgacttgtcaatgtatatataatccacttgtgattgattatatatatatatatatataaacttctgatcatgtttgaatccccatggggagaagaagaatttagaattatttcctgaattaagtaatttgttaacagtaaacatctagaaagggtgccccagcagctaaaattgttactattagtctccatggcaactgggctgaacctttcactctgtttcagtttcaagcaactggacagagaaaagacttgagtcgactcgcccctttctcggtttccggtttccgcct

SEQ ID NO: 31074 - DNA, 333 bp, Mus musculus
  source 1..333: mol_type = other DNA
gccaggctaggcagaattttagcttcatctcagcctgccaagatgatctgtagtgctgtatattctattaccccataatatacaatgcaccttatttatgttagtcatcttttacactgaactgtcacagagcacgtctccaggaaaaactgcctgctggtaccagcaccttctcttttagctgcatggggtggctttttacaatagcccttggaggtggaaattcgaatagtacacacattttagaaactactatttaaggcttactcagtccacagtaaagcacaggaggtactgtgctataaacttttaagagcctgaagtctatggaga

SEQ ID NO: 31075 - DNA, 423 bp, Mus musculus
  source 1..423: mol_type = other DNA
cagtgcagcctgaatctgtgcctcatatatcagagagagagacagaagcacaggccctctctccagaggggtcgagcagcaataatataataataataataataataataataataataataataataataataataaataagtaatcttcggccaaatctatcgaatagttctttgcaaaaaatctcttcagagtattatttctttcgttcccttaaaaaaaaaagctggggcttttgcagccggctgcagctttgcccaccgtgctccgggcaggcgttcgccctgcctacctgcaggctgcggctcgggcggctcgcgtcgcctccctcctgattgggcagcggccccccaatcagaggcgctcctgggccggtggggccctacttcatattaataagctccaatcggggctttaagtcc

SEQ ID NO: 31076 - DNA, 395 bp, Mus musculus
  source 1..395: mol_type = other DNA
ttactctctatagcagcactaaatgtgttatttttaaaacttaatttccaaaatccacataggaaattatccattttctagttgccttttaatgagaaacaccttagaagcatctccttcttctcaagagtaacaaaactcttggctttccagaccatcttacacttttttaaaagatgaggctgacaggttacaaagactgttgaaatcttagaatattttaatgtaggatgactttggatgtatgtgcatacagacaccacacatgagctggcagtcaggtgactacaatttggcagccatcttgccttaagtaatcaaacacagttagagcagcctcatgctggctccttcctcccaaagagggaacatgcagactgctactttaaaaatta

SEQ ID NO: 31077 - DNA, 356 bp, Mus musculus
  source 1..356: mol_type = other DNA
tgagttcgaggccagcctggtctacaaagtgagttccaggacagccagggctatacagagcatatttggcagcaaaattaagcaatgtttaatgaggataagatgttttctatcctcttatagttcatcagttttaaattttatgagaaaactattagacatttaatgcttacagtttagcttgttgaattagatatctttgaattgccatagtactctttaaaagtatgatttagaggtgtatgtacaatctagaaacatgttgctggataccgctcactccagaaagtttcttttttacctaaggccatcggtggcagaagacccttcgtcgtgaagcgccggcgctacagctc

SEQ ID NO: 31078 - DNA, 492 bp, Mus musculus
  source 1..492: mol_type = other DNA
ctcagtcatacagttcctttcggattcaggaacgcagccctgagagtgctgtgactagcctggcagcacgggatggtatctctgtgccaccctggtggaggggcgctagtctctcttgacacccggtcgggaagcccgccggggaggcgagcccgggcggggacaccggagagtggtgctacgggccaggcgggccaccccgggccacacccccaccttgcgggcgcccggcggggctcgagccaggcggggcgcctcgagaggggctgcacagggccgcggcacaaagacacccgggtgctcggccgcacgggctgcagtgatcaccccctcgctgagccccggggcagagcccagccgccggccgagcgcacggagccaagggccgagcgcacccagggcccgcgcgggaccccaggcggccacgcaatcggggtgacccatcgcgcgcgggggcgtcgtcgtccgatcccaacttggcctcggcctcgc

SEQ ID NO: 31079 - DNA, 409 bp, Mus musculus
  source 1..409: mol_type = other DNA
caagagcagcaactgctgagccaccctacaattccaaggatatttacttctttttttaaaattattttattttaaatttattttcctatggatatttacttttaaagaaaaatatttaggccttgtgaatatttgaatctgatgaagtgggcgcatatccagattttgaaaatagttttgcatgcatgtctacaaggactcttgtctatagccaggctgtcctccaaacgccctccgcagggctgctatggcaggtgcgcgccaacttttaaagtaataatcaacttcgcagctaacttttataataataatccggttggggcgtgcggagcgccagtgcatccgacgtctgcgcaggctccgccgccggctctgctaaagcctctcgccatggccaatgggcgtggag

SEQ ID NO: 31080 - DNA, 424 bp, Mus musculus
  source 1..424: mol_type = other DNA
tgcctacccaggcggggtggggccccctccgtggcatggaactcactactcagagatcctaggattctgaggagagcttctagattgccttctcaaggaggcggtggcggcatgggggcatcctgcttggaaagtgcacgacttctgcccggccggccgaaggagctcccgcagcctggcattcctcggattccagcgctgtgacgtccctggggaccgtgcgcccgcagcgggggagcccgggctcctcttttcagcgcagggcgcgcgtccccgaggctggcgcgcgccctccccggacgcattcctggcccgcccagcgagcgccccgcgcgctccccgcctcctggcccccagcactgcggagcagagcccggggcgggggagcgcggccagcggcgcctgctcgtcccctcccacccgg

SEQ ID NO: 31081 - DNA, 245 bp, Mus musculus
  source 1..245: mol_type = other DNA
ccagagccacattgacatggcacttacatgtgcaaggacttcttcggatatcaccgggctgtttgacaacagctcagaaatttggacaccacgtggcatgacctagaatggttcaccttggagtgactgtcagggtcaccatgatacagctggggctcctttatgagaccctaggaggggtgggaaggctcacagaccctcacctgggagcctgtcgtaggcaagtctgccctgtcagcagaagg

SEQ ID NO: 31082 - DNA, 357 bp, Mus musculus
  source 1..357: mol_type = other DNA
ggcccaagcacaacccgaccccgggccggccctcttcggtgcggcgtccaggtcgccccactagcgacccctgaggctactcagtgcttcccagcgcggcgcaagcagactgggtggactggcaccgcgctcagagctgggtgcaagctcccggcgctgagcacaccggccctctgccccggcctggagtttcaactcccggaaggtcacttactcggaggagcggagctcggagttccactgagcctcctgcttagaaaactgtttttagaggctatttgatcaacaccattttcccccttggaaaaagaatgtttacacgggtgtgagctctctttcccattcaagaacgtacgc

SEQ ID NO: 31083 - DNA, 449 bp, Mus musculus
  source 1..449: mol_type = other DNA
ttggaggaaggcttattcatattatcactaaagaaattttatcttcaacctttgcggagaggctgcaatgtctggagagtgcagtcagattgcatctgaggccctccctgcagccagcctacctgggggtggaattttttttaatcaaattgttacaacgttggaacgtagactttggggtaacccactgggaggtgagaactgtgttttttagcacgcacagccaggggtggtggcctgggtggcttgggactccagccttcctcaccgggcagcgcagcctggcgggtgcaggcggactcccgtgcgcgcgccctgcgcaccgccctcccgccccgcgctccggggcgcggccagggcacagcacccgccccgagcagagcgccgagttccttgaaggccggcggccgcggcagacctgccttcgctccctccctccctcccgtgac

SEQ ID NO: 31084 - DNA, 433 bp, Mus musculus
  source 1..433: mol_type = other DNA
attagagtctgagatgtcttgcccaataaacttttaagtttgtcattcagacttcgaaatcatgtgaatcctatatcgaactagatgtttatagcatatgtggtcactatgcctacaattgaaataatacttttaaaggtaatcgggggcgaattcctataaattctgaggtctgattgactgggactcagccaaattttttaaaatctttaaaatcctattgatactatctatgatcattgtgagccgggcgccgcggtgcacaacgcccgcagatggctcgcggcggccggggcgcggcgatccaggcgccccaagcagtggcagggcggggtgggggccggggctggtggcccgggcgggggagcgctgggcccccctctcctcctctctccatatatatgtatgaatccgaaggcgcctcgcgattggg

SEQ ID NO: 31085 - DNA, 281 bp, Mus musculus
  source 1..281: mol_type = other DNA
agaaactggagactctttgtagtgactttgagagtctcagtctagggactgttgaaaaaacaacaaacttctttgttgttgttgttgttctcaagcaatctccctgagagagtgggagggactgcgatgttgctgtgggcaccgcaccaggagcacagggcgggaggcccaaccttagtagggacgcctccggtatccatggcgactgcggagaggatccagagccgcaccttcttatcccgaacgtcgaccgggatgacccggaagtctgtgtggtgatc

SEQ ID NO: 31086 - DNA, 378 bp, Mus musculus
  source 1..378: mol_type = other DNA
aatgatgtaatatagagaaaatatgtgtactaaattatcttcaattaggtatgttttaacgttaatgaagtgacaatataaattaaatgacttcatattggttgaccacagtgctcagacaggcatgtgagataagtttgacgaatgcctaagacttttgtctaaggacactcacgagtgtgcgtgtgcaatcagagactagtaattcagcattcctgacatgtttacacaaccctggttacaagtgggttctctgagatttgcacaaaatcaattataaagttctcagaatagtatttcctcaacgtggaaatctaccttttggatcttagagcgctagcggctgtccgcgcacgctctgcgcatgcccggagtcgc

SEQ ID NO: 31087 - DNA, 408 bp, Mus musculus
  source 1..408: mol_type = other DNA
ctcagacaggcatgtgagataagtttgacgaatgcctaagacttttgtctaaggacactcacgagtgtgcgtgtgcaatcagagactagtaattcagcattcctgacatgtttacacaaccctggttacaagtgggttctctgagatttgcacaaaatcaattataaagttctcagaatagtatttcctcaacgtggaaatctaccttttggatcttagagcgctagcggctgtccgcgcacgctctgcgcatgcccggagtcgcccgggcctgcggcgagacgctcctcccagcatgcctagcggccggccgggagccgagtgatggggatccggtaggacccggcgagcggccgaagctgaggtgcagccgcgggcccgggcgttgggcgctcagccggtcagtgg

SEQ ID NO: 31088 - DNA, 245 bp, Mus musculus
  source 1..245: mol_type = other DNA
acacacacacacacacacgggctgggggggagggaggggaaggccactcccttggcttacatctactggagaatttaaataagtattaaagttagctccggagcttagctgctgcgcctctgcccgagggaaactggatcagtccctggacagtcgctccagctccgcggggctcccaggatactgcagcatcgacgcagagctccgggttgtagagtcccaagctcgggacccgcggaactgtc

SEQ ID NO: 31089 - DNA, 360 bp, Mus musculus
  source 1..360: mol_type = other DNA
gaaggccactcccttggcttacatctactggagaatttaaataagtattaaagttagctccggagcttagctgctgcgcctctgcccgagggaaactggatcagtccctggacagtcgctccagctccgcggggctcccaggatactgcagcatcgacgcagagctccgggttgtagagtcccaagctcgggacccgcggaactgtcacagaaatgaggccggcccgaggtgggtccccgggccccgcgcgcgtcgtggcggcccgcagctgccactcgcggtgcccgcgcgggacccgcgggaagggggcggcgctgcgcttgcccgggaaccccggctggagccgcccctctcgcgcc

SEQ ID NO: 31090 - DNA, 362 bp, Mus musculus
  source 1..362: mol_type = other DNA
cttttcctaaagaaatgaattaatttacaaaatactttgtggagctattcacagcatggggaactccccagcattagcgccccatgaattcgggtcaacctgcctacagtcccgggtgacaccctgtctggcaccccgtgtttgcacgcacagcttcccaaagggtagcaggctgactttgtctaaggcccagtaggaccctgatgcttccggagctctgccctcatccggtcccgggatacaggaggcaggcaggggctgcacctgtccattacctccttcagtcctctgcgtggatggagccgctcagctcaatcaacgcaaaggcctgcttctgaggaagcctctttccgactgccggc

SEQ ID NO: 31091 - DNA, 357 bp, Mus musculus
  source 1..357: mol_type = other DNA
acacttgggtgactcgtctttcctctatcactaattcctgcaagaggcaaaagaaattcttttatatttctgagatttgtttctttggattttcttaaaaagcaaaagatcttcttctgaaaaaagttatctgagctggcctttacccatctctgcgagtttgaagccagcctggtttaaacaccagagctacagaatgagactcttggttttttgaatagtcctctgtataaaatatgaaggtaatttttttccctttggagatgagatcatgtgatgttacttaaattggttccaaatttctggaaattagcactccagttttacatatatacctgtctttatctaaagacaaag

SEQ ID NO: 31092 - DNA, 261 bp, Mus musculus
  source 1..261: mol_type = other DNA
tggtattctcatgataaatttcagaatattcgctctctatatatatttaaaatgggtttgtttttaaacttttaagggttaagactgtgctgccgggccagaactagaaagacacggccctcccgactctcctgcaggcttctcgactgcaagccaggcggcggaactctggggccgcggaacccgaggcggaaccttgcggcggcggcggatcgggtttcccgcgtgcaggagcgttccagggagggaagcatccttccg

SEQ ID NO: 31093 - DNA, 215 bp, Mus musculus
  source 1..215: mol_type = other DNA
cagggtcctttcatgcatgcataaatttgggaccacactggctatgccgtgacctactagcacacaccacgagaaaggccactcttgtcacaaaccacaaacctgcaaccgctagggttttttcttttattttaaaaaatattttagccgggaccttagcatggcctgcccagaccttgtgtgaggatggacttcaagcgtggtttcgactcacc

SEQ ID NO: 31094 - DNA, 604 bp, Mus musculus
  source 1..604: mol_type = other DNA
gccttccgagtacttggaatttaaaagacagcttcttcatctattttcaacttaaaaagaaaatgttttctgcgctggcccacaggagagtttaaccaaaagaaatgttttgtaaaacacaagatttgaaagcttgctatgaaagcaaaatgtcttgtttatacgtatagcgctgtacatgttcaagaatatgggtacacttactgtatgttcctgacaggaagcagcacccaggcgccaagccagtcttaaggcctgacatgggccccgagccagagccaggatgcgctgggtgaggaggaggggtccgtacccactgtgcgtcccgcagcgcgagctcgcggacgtcctccggcagcacggccccgagctcctgcacgaggcactcggaagtcctctaggggagagtctgctgccgtggcctgagggtctgaggcggcctgggcatcgtggtcctgcggggcggagacgagcactgtttcagagacagccgccatcttcccggtttaaactaaggcgggaatcgctgagaccggaaggatgcttccctccctggaacgctcctgcacgcgggaaacccgatccgccgccgccgcaaggttcc

SEQ ID NO: 31095 - DNA, 455 bp, Mus musculus
  source 1..455: mol_type = other DNA
cacaaaccacaaacctgcaaccgctagggttttttcttttattttaaaaaatattttagccgggaccttagcatggcctgcccagaccttgtgtgaggatggacttcaagcgtggtttcgactcacccgccgcagtggaaaagccctgaggctcccgctgtccccatagcgcggacggtctctgctgcggtccctgcccactggcgccaccggtccaggtgccgcctcgcccggaagatccccatcggcggtgaccggcgctggggcgctaagggaggctgcgaagggtgaagccaccgagccacaggagcggccggaggaccgtccacggcggcgctgcgccagcaccccgtctccacccactcggggtcttctccgtgggtgggctcgtgacttccacgaagagggggcggggccgggccgggccgggactggacacggggtggcgggcacct

SEQ ID NO: 31096 - DNA, 303 bp, Mus musculus
  source 1..303: mol_type = other DNA
atgtgatgaatgcacacacatgcagacacacatatgcacacacaaatgtagtaaaaacaaatcagtctagtttgaaaacatttgactgacccaagtttctgatttaaaataaggattttagaatgagcaagacttggattcgaacattactagtacacatccatggatccttccaccggtatgtgaaatatcacacatagtacagagctgtcctgaaaggttacatttggaagtacttatatacaatgttcccatctgatgccaccctcctggtcctgtcctcctggagggcagctgggggat

SEQ ID NO: 31097 - DNA, 433 bp, Mus musculus
  source 1..433: mol_type = other DNA
tttaaaaacgttttgtggttgttattaaaaataaaaacaacaaccgaactgaccgcgtccggtcactagcactcacgaggctgccgaatgtacccacagctgctagctgggtccccggcagaggaggtcacacccctccttaggctaggcacattttcctgaagttttagaaaaatgaccacacattttagggccacccccccttccccaacctagcggagggagagatgccagggcggtggagtcatgccgctggcttgggcaccattggctcatgcctggaacacgcagcggcgaatacgcacatctggcggtgcgcccgggcggctcccagcctgataaggggtgtgtcccgggcgtgcgaggaacgcaggacgcgccgtgaccgccccttcgctattaatagcattacgtcagccacgcgagggcttta

SEQ ID NO: 31098 - DNA, 369 bp, Mus musculus
  source 1..369: mol_type = other DNA
caagagtgagcctcaaggtaaatatggacacagagctatcagttgacctttctgccagatactctctgatttatttttacagaaaaataaaagtgtaaacttctctacaaattaaatctagcaacgtggcagtgcctctctgtagacctcagtgctctgtggagttgctcagaggtggactgatatctgagccccaataacagtggaaagtcacttaccctcctgtgcacaggacgttttgaaattaagtgcaaattttcataaagagtctatcaacactcagcctaggctccctggactgaagctgtctgctgccactcaatagagtaacagctgttagttgctgcctcagacaaccaatcctgcctt

SEQ ID NO: 31099 - DNA, 326 bp, Mus musculus
  source 1..326: mol_type = other DNA
gtgaatagtgcagcaataaaaatttgtatgtgtgcgcgtgcatgtgcttgtgcacgcgaactggatctcaggcaggtgatctcccctgactggtgcctgcaccaagaagtggctgccgccaacggactgtgaccacctgccattgtcccactgggccccaagcaaggcctgcctcgggcagctctggccctaatgggccagcccaggggtaggctccacagggctgggccctaaatgattaagagcttgacgatggtcagctctgtgacctggacaaccgaagcagtgcgagagcgcgcttacgtcacagcgttctccgtgaaggg

SEQ ID NO: 31100 - DNA, 72 bp, Mus musculus
  source 1..72: mol_type = other DNA
ggctgtgatatttcaccagaagggcctctgggtcctgtcttacagggcccctccctaggagccgactgtgct

SEQ ID NO: 31101 - DNA, 502 bp, Mus musculus
  source 1..502: mol_type = other DNA
aggttttgaccatgtatggacacaagactagctcctagctggcattattctaggagtgccacctgtgaatctggcctatatctgtgtcactgagagagagaaaatgtctatcaaccaagagcagattagactcagatagccagctgactacctcatggcggtaccagccacagggggcaacctgagccagggttgtttcacacagtccatacgactgctggctgtcacaagccttgttgaacctcattacctcagtgtactaatctgtaaaattcctttgcaggattccttgaaggatcaagacgtaagcgtacggagagcttggtacacaaagggctctttggacatttattgtcattataaaccgcaaggctcaggcactccatttttctgcctgtaacaaagagaggaagtgcgaggctgcttcctctccagcgtcgcccgcggcggcagcaaaagatgcgcatgcgttgagcgccgccacgcctggtcttgggcggta

SEQ ID NO: 31102 - DNA, 331 bp, Mus musculus
  source 1..331: mol_type = other DNA
agttcttggctttaaatataaaacttagacggaatctcttaggaagagattccccaaatcagctaatctgaacttgactacgcagagctctctgaagtggtcagggcgcaaagagagggaggacgctcttctgctttgcggcgctcttgatagacagccgggaggccacgcccccacccccgtctgccgcttagccctgcgattggccgagggcactggcatgctttcccgccccggccccctccggagactccggaggctagtgggaccccgcggaagcttcctccaccccccgcgaggacctcccccgggccgcgggagcgcgcacgca

SEQ ID NO: 31103 - DNA, 356 bp, Mus musculus
  source 1..356: mol_type = other DNA
gaactggaatttaactcctaaccctaaaattttttctcttagctacctgtatgagatttggctctcttaatgaaggcttcacctgcactgaacgttttaaaaaataatctcaaaattcagcactttatcttatttggcaaccctgcatgcgcctaagcgctggctccaagactagcaggagcctctgtagctgccgccactaggtggcgccactccccagctcctgttcgccatagccggcatcggccagcggttcgccagttcctctctgggcccccccgcgcaggcgctcagggagcctgtgaaccttgggttcccgcggcggcgagccttcgaggcgccaggacgctgcgacg

SEQ ID NO: 31104 - DNA, 298 bp, Mus musculus
  source 1..298: mol_type = other DNA
gagtttaatcccatttctgccatgcgcgctggtgcacaacgcaagcgtgcactctctagttaacgcgcgatagccaggggcccgggacgccactgtccgatgttcttcggcgtcctcgctcgcccggattcgctccggccgcgggagacctggaggcccacagtcggcagcgatccaaggtggagcgcctggggggaggtggttcccgccacggccagcggccgttggggccgttactcaccgttcctcaggacgccgagctgcggctggcggagtaccgcaacgcggcgcggtttcg

SEQ ID NO: 31105 - DNA, 308 bp, Mus musculus
  source 1..308: mol_type = other DNA
tcaagtcagcaaactgcatgcagctcccggattggctattcacccatactacaggtctctcagtttaatgttcagagatctagactatgctaactgtgctcagaaaacacatgtcaactctgcgttattactatgaatatcctctggatgtcctcaagctcacagagatctgcctgagcgcgccaccaagccgggctggaacaggataaagtgctcggtgcactcaccgcaagggcttaggttcaggacccgagtcaacaggctttgcgatcccaaatcccaggggttttcggcgcggttgcctagcg

SEQ ID NO: 31106 - DNA, 661 bp, Mus musculus
  source 1..661: mol_type = other DNA
ctatttctgtgcagaccactggattctcactgatctgcccccaaaacaattgatttaaaacacttggggcggccaaaggagccgcaacaatgcagcgcagcggcccttttggctgaaaggggtccaggagggcccgaaaggtccgcgcgcgctggcagagctggccttcgcagcgttctgccccgcccgactcggagctcggcgacgtccggggcctaggccgggcggcccggggcgccctcgaccgcgcactagggggtccgtggggcgggccgcgccgcgccttcgttagagggcgctcaggggcgccgccgcttcctcccgccaacccgccccgccggccggggcgcacgcagccaccgggccctggggagcgagcgagtctccacgccgcccgggacctggagccgggagggccgcgccgccgctgccgccgccgccgcctccttccgccggccggctcccgcagcccgggctgggtcccggcctgcccaaggtaaacctggggcgcggcgggccgggcccgggaggcgctgggggcgggaggaggcggcggcggcccgagggccgagggcgcggtaggcccggggaggaggcggaggcgggggcgcggggcatcgcccgcctccccgggacccgccccggtgacaggtccggcctc

SEQ ID NO: 31107 - DNA, 902 bp, Mus musculus
  source 1..902: mol_type = other DNA
aggtccgcgcgcgctggcagagctggccgcagcgttctgccccgcccgactcggagctcggcgacgtccggggcctaggccgggcggcccggggcgccctcgaccgcgcactagggggtccgtggggcgggccgcgccgcgccttcgttagagggcgctcaggggcgccgccgcttcctcccgccaacccgccccgccggccggggcgcacgcagccaccgggccctggggagcgagcgagtctccacgccgcccgggacctggagccgggagggccgcgccgccgctgccgccgccgccgcctccttccgccggccggctcccgcagcccgggctgggtcccggcctgcccaaggtaaacctggggcgcggcgggccgggcccgggaggcgctgggggcgggaggaggcggcggcggcccgagggccgagggcgcggtaggcccggggaggaggcggaggcgggggcgcggggcatcgcccgcctccccgggacccgccccggtgacaggtccggcctctgagtccccaccgcgcctctgtccgcaggcagccgcgaggggactagggcgcccgcgcgcccgctcgcgccgcgcctcgggccgcctgggccgccgcagccgcgtccatgaccgcgacccccgggccagggactcccgccgccgccgccgccgccggccctcggccctgtcgccgctcgccgctcgcgcccactgaggtgagcccgccgaggaggatacctggccgaggggagccctctgtggagagcccgctgaggggacccggcggaggagagcccgccgcggcgacccggaggccgtccggctcctcacctgaggaaaccgctgcccgagcctcctcagccgggcgtcgcgggctccacgggctccgcatccctcgccc

SEQ ID NO: 31108 - DNA, 567 bp, Mus musculus
  source 1..567: mol_type = other DNA
agggttcggaggtttaaaaacctataaatagtgtgaaatcatgacttgcccaagtcacgcagcactgctagcaaccagtcctcactcggccgcggccgcgcccccgccgccgtccgcacactgggcgccgacctgtcacccagccgcccccacgtctggggcggccgggccggcaaaggggaaccgcggcccggaacccgcaccgcgggaagcggcaactgctcactgcgccccagggctcggcgccaccgccctgccgcctgcccaccgctgcacgcggcccgcgcccaccctcccccgtaccgcccgccgctgcacccggccgcggcccccggcccacgcccggctccccagtgcacaggccccgcccccagctcccgcggccgcgccccgccccctcccgcccctccgccgcgctagccaatagaggccgaggaagggcgaggcagctctggccaatggggaggcgagccgggcctggggggcggggcaccggggccttgtcacgctcgggtccgtgtgaaaacgtgcaaagcaaagtttttttgtaaacgggggcgaagacgg

SEQ ID NO: 31109 - DNA, 276 bp, Mus musculus
  source 1..276: mol_type = other DNA
catcactgaagggatgtcctctgacagggagggtctctgtcagtggcactagacagactgattgctgggggtgcaggccttgaccccagagagaggccggcctgtcctacagagtgagttccaggacagccagacatgttcctatgcattggagaaggtaagctgcctccgtaagtaacctaattaacattcagtgggcacgaaaccaccgcgcacctgggcgcggggcgtggcacccaccgcggtcgccagggggcgcctgtcccgaacactgtg

SEQ ID NO: 31110 - DNA, 383 bp, Mus musculus
  source 1..383: mol_type = other DNA
tcctgacaggagaccctgcagcctctgccaggggcaggatcgcagctgagtagactgtcctgtgcttataattgaatgagatgtgtctcccttccctggtgctggtccagtgtacagaccctgggatctgactcacttctgtgagacacaaatgggattactgttggcttgcaaacagcaggaagcctgtgtcagctcctgagtgcctgtgcttggtgcaagggaatgggctcctggtgccctgaataatgccctcctggaggaaagactgtatttcctgatgaggttagtagcatcaaaccagatggtactgagagagtaagggttcagttgccttctgggaccgatgctggcctgcctccaggttctgcagggagctgtgt

SEQ ID NO: 31111 - DNA, 348 bp, Mus musculus
  source 1..348: mol_type = other DNA
cagttgccttctgccgatgctggcctgcctccaggttctgcagggagctgtgtctcagctctggggccgaggatggagctcactcttcattccctagaaaagatcaaggctctcttctcctatccccagaagtggcagcttcctgcacttacagctggacccaggacccaggcggccatgggaggcccctcaatcctcactggtcaaagatgagcagactcgggcctgatcctgagggtgcacaacctggtttgtaaacttagagtcccccttgtgctgtgcaggggacaagcacctctaaggtgcatggaactgagctgtggtcccctccacaatggcacatcatta

SEQ ID NO: 31112 - DNA, 392 bp, Mus musculus
  source 1..392: mol_type = other DNA
acatacaactaaaatatttttttaaagtattcaaaatgtgctatttattcccttggaattcttgaattctagaagatacatttgtttatgaaattgaaaaacatgaagtttaaaataactgaaatttttttagaaagcagatgaatgcaatttcttttctttttttcgctggcacaataagccactggggaaggtgggagcttccatagtccccattaaggaagtgtccccaccttatcctttcctgtataggaacactgtacatacatgctgcattttaaatgtgcccctgatttcctgccagccacctagctgagacgcctcagggacccctagtgcctacgcagcttcactggcaaatcactgctggcacttgccagcttcaggtgaat

SEQ ID NO: 31113 - DNA, 228 bp, Mus musculus
  source 1..228: mol_type = other DNA
ctgtgtccactgcaagggcacgtagagcgaaattctctctagacgttacgaagaagtgatttgagccagatctctgatcttgagcaaacgtgtctaatgtttctagaaagagaagcctaggcttctagggtccaggtgagtttctggccgctgtcagaagcctcacgccccgccgcttgggcgccatgagcccctcccggagcccgccgctggagctggcctaacccg

SEQ ID NO: 31114 - DNA, 321 bp, Mus musculus
  source 1..321: mol_type = other DNA
aatgctccttcaacagctgtgtcgctttgacggttacccctttcagagaggggatactacctacttggtaagtccagcgtcggactcgggccccacccagtggcaagtctggctgggttagagcagccgagcactccaggcccagaggctccagcaagggcgcctccagcccgcaagctgcgctggcggagggcgctggaactggctgccggagaaaatgtctccttggcagctgctgccgcccccgggctgggtcggcgcgcgggtgggggcgaccggggcggtgtcgggcacgggcgtttccccgcccaggtccacacc

SEQ ID NO: 31115 - DNA, 723 bp, Mus musculus
  source 1..723: mol_type = other DNA
gtctcattccggagtgaaccgatcctgcctccaaccggaggacccagctcctaccccggggcgcacctcgcgggagcagctcctgtctgaggccgccaacccctgcccgcgtcaccggagctgctccggtccaaggccgccgccgctcctcaccggagcagctcctgagaccgccatcccgggttcccggtcacgggagcagctcccgccccgcggccccgcctcagcaggagctgagacagggcagaggccgcctccccgccctccatgccgcctccggggcctccacatcgtctcccggccctcgagcgcccgggaaccggccggctggggacgcgcggggtcccggccctctggtctctccgccccgcggccggaacctccctagggcggagtgatcgcggccgcccagtgaggagcgcgcggccacgaggggcgctcggccgggtggcacggcgcggggcggcggcggcgggggggccggggcgggccggtgtggggcgactgcgctacggctcgaccggggcggtgatggcggctcccggccaacggcggcgccaagagcccggcgggaggcggcggctcctcggccaacggcgggctgcacttctcggagcccgagagcggctgcagcagcgacgacgagcacgggggtacctcgccgcgctccccgcccccgcccgtcgccctcctccccctcggagccgagccgcggccgccgga

SEQ ID NO: 31116 - DNA, 677 bp, Mus musculus
  source 1..677: mol_type = other DNA
caatcttcaactgggtgcaaactgccagaaggcagctggcctgcagagcaaccccaggcagtgtcgacccagatagcactggcccggggtagacagcaaaagggaaagagccaagtggaaatactgccctttcagtccctctcggacctcacagcagagaggagctgcagggccggtctcattccggagtgaaccgatcctgcctccaaccggaggacccagctcctaccccggggcgcacctcgcgggagcagctcctgtctgaggccgccaacccctgcccgcgtcaccggagctgctccggtccaaggccgccgccgctcctcaccggagcagctcctgagaccgccatcccgggttcccggtcacgggagcagctcccgccccgcggccccgcctcagcaggagctgagacagggcagaggccgcctccccgccctccatgccgcctccggggcctccacatcgtctcccggccctcgagcgcccgggaaccggccggctggggacgcgcggggtcccggccctctggtctctccgccccgcggccggaacctccctagggcggagtgatcgcggccgcccagtgaggagcgcgcggccacgaggggcgctcggccgggtggcacggcgcggggcggcggcggcgggggggccggggcgggccggtgtggggc

SEQ ID NO: 31117 - DNA, 403 bp, Mus musculus
  source 1..403: mol_type = other DNA
ggtgagccccggcgtcacgggctttggaaactaaccattctgtgggcattgtctcaacgcaaggtacacattatgtgcagttggatttccttcagtgaacaatccaagccacagctatggctgtttaattaaaatcatttactttgggaagctttcagaaaccttacacacaaatcttaagactgggagcttagacatgcagctcatgctgtttgcagagcctgaaggttctgactccgatctgacaccgcgtaaagaaagagtcttcgctgcacccagagggtgccgctccggttccagcctcaccccgtggctcttggttacggctgtgtccccgagggatgcgcgcacggtagggggcgccctggaccggctggctccctccgcccacgggaggcggccg

SEQ ID NO: 31118 - DNA, 276 bp, Mus musculus
  source 1..276: mol_type = other DNA
ttacattttgagacagtttgtcaaaatcactctgcagatgtttctgatttacattagcaattttatgtcttcaaatgagcactgtgcacatgtagaaagaggaccacctcttctgactgtcccagagcagagctaacactttggcaccttctgggccaaaccctgcagacttttattacaaatatacaagacatatatgttgtatgcatgttgggtgctctgaagaggccagagcaaggcttgagtctctccagccatgaaagtattaacttttta

SEQ ID NO: 31119 - DNA, 430 bp, Mus musculus
  source 1..430: mol_type = other DNA
cttggcttcaagcgacagccatcacatgtctgaggctaagacccagctgttcctctggaatggcctggatggaacccagtctagcctgggcagcaccagccaaagggtgctcctttggtcctgccctaggacacccctgctcttcacagctgtcacctgtaacagttctagttctgtcgctttaaatcttgcaaatagttgaaaagaataggttcattcatcttcagaatgagtggtttgcattttcaaaattaacaaattggatctataaaagctgcagccactctcagagaggttttcggcaggctattttaaacagcatgttttattaaactcacttgctacagagagatttttctgtaatatgaagaaaatactcccagaaagcaacagctggctttgtaagatggtgaggtcacaaacgcatctg

SEQ ID NO: 31120 - DNA, 393 bp, Mus musculus
  source 1..393: mol_type = other DNA
aagtgtgagagttttcactgagttgaagccattctgagcacgacagaaggagtatccttcttcctcctgaattttatataaggtgcctctaagctgagacagagtccaaccctggactgcatggggtgaccgctgcaatccagagaactgcagtgttctgtcctggagagccaacagtttggctggttcaaccacaaaacccttcaacgctccaaacctgacaggtgtcgggttttgtggtgccccgggaagtgcaatggccagctgcagtcccaggctcagtccaggccctaggtttctggaccgagggcaccgtccggctagccgctggccgcagaagttgtcttttgtgggattccaaatgactcacagcggctggcggggccacactcc

SEQ ID NO: 31121 - DNA, 368 bp, Mus musculus
  source 1..368: mol_type = other DNA
cctggatcttgcaggcgggaggatcactgctaaaagaactgtgtcacattcatcggtttgtttgttttgcttttaaagaaaaacccagccatgcttgcctggtctacacagtgagacccagtatttataaaataaaatgacttgagctcctgtccacggggatccgcacccagtagctgccagttcacgtggccgcagccatgggcaggttgcgatgaacgcttcgtgcgttgcagcccctgcctcccgcgggctgcgcgcgtggggtccgggctgcgggcgggagcggcccgcgcggccccgagggcggaggcggagcgggggcggaggcagggcgggcgggggcgcggcgccccgcgatctggcag

SEQ ID NO: 31122 - DNA, 361 bp, Mus musculus
  source 1..361: mol_type = other DNA
gttcacatgctcaagggcttgcaaacttaaaaatgggtacatgacatgcatttcaggcccttaatgtgtcagaactcgttcctccaaggaggcatcaggctcctgtggagtgagggagagacagagactatcctcacgatccctctttggtcctgaccgcttgtccagccgctctggaagcctggtgaaggctgctgagaccctgcactggtgtcacgtgccgacggtgcgcgaccgtggaaggttccgcttcctgcgccgcctgctccggagcttcgaccccaccccgccgccccgccccagctcctggaggcccagctgcctggccccggggcgttcccgcccctctggcccgaggcct

SEQ ID NO: 31123 - DNA, 484 bp, Mus musculus
  source 1..484: mol_type = other DNA
cggcctcccggggactgagatcacaggtgtgagtgttttgctcagtgttaaagatcaaaccccaggatttgaaaagtaccttggctaaatacacatcaactttaaatgtacagtttcactcgtttgggtgataacacatacaagatcctactttatcttgtgtgtttctgcttttgttaaagaagcaatgtcaggagacagagactaatgaatgatcttttcaacagactgactcgctagatccgtctggacagtgtagcatatgacatatcaaagcgaacggttgtggatttcgcaaaccagtgcaaggtcctgggttcagttcttagctcctgggagacagccagtccctgcagtaggagctggtgttccgatcacgcatgcgtagacacgcctatgtgctagaggcgctccggcagggggcagtatagcgaccagagggtgtaacgcctgtcgtactctctgggcgtaaagcagctttgct

SEQ ID NO: 31124 - DNA, 346 bp, Mus musculus
  source 1..346: mol_type = other DNA
aaggttgctgagaaaactttcttaggtctctagggtttgaacgccacaactcaactagcacttcatggagaacacggggtccacgggcagtcctggaaggtgcattgacaagtcctggagtagcttctcaaagccaagtccagtcctcgtgctagttctggggcccagtctcagaaccctcacttgtgcagggtcactacgggaggggcgacgctcttctattggacacccgcagggtgaggcccacacagggaccgctccctcggtggcaggggcccggcggcctcctgaactccgggggatgtggccacacctggagggcgtgaccagaccgtgcaggggctgt

SEQ ID NO: 31125 - DNA, 384 bp, Mus musculus
  source 1..384: mol_type = other DNA
attagggtagactctaacctcagaacttccgaggctcatgtttgaatccccaccacaacagtgtggctgtagagaggcagctcacaatatttttaacttaaatcaatcttttaaaataagatgactgagagtgaatactcaggctgcagacttggcacgcgtgaattctgctcagcaggctggcttcttacaaggtggaagcgagagggcgccattgtgcacgcccacacaataaggcgatttttaaaaaaggagtgaatatgcatggccttggcatacctgtcaagttcagaatttaggtacattaaaaaaatacgcggactgacagcggtccgcctcgcaaggcccgcccgcaggggctctaccggaaggggcgggtctctc

SEQ ID NO: 31126 - DNA, 393 bp, Mus musculus
  source 1..393: mol_type = other DNA
atgttaacaaaacttatcctagctacttgaatatgtctcacacctgcctcacacctgtctcacacccacacatttcgaactgtatagtctccatactgagtggtccttgaacttgtacaaacttaatttttcccaaaatttcttagttcaattaatccaggatgatggtatgaaacatccctcctgggtcttaccacagaagtggcaaggtatagatatggcccagaacatccctgtgtagtcctagaaaaacatttttttttaaacagggtttcatgtagcgaatgccggggtttcaggtcgcttgctaggcaagtaagcactctacctaccgagctggacttcctcaccagccctggaggccccaagagtgcaggggccctctcaaattgc

SEQ ID NO: 31127 - DNA, 489 bp, Mus musculus
  source 1..489: mol_type = other DNA
aattgaactaagaaattttgggaaaaattaagtttgtacaagttcaaggaccactcagtatggagactatacagttcgaaatgtgtgggtgtgagacaggtgtgaggcaggtgtgagacatattcaagtagctaggataagttttgttaacatggagaacttatctgctatttcctcattctcttaagagaaaaagtcaagactgaattgccatagatccttttggactttattaaaaactatatagaaatgtatacagagatcaaattcttatctatggctgcaattcgcatgggttcatgagtacatgggtacatgagtgcatgagtgcatgggtgcatgaatacatgagtgcattaccagcccaagtaatttattctagaataaagctccaggtacttttattagtctactagtggtatctatctatctatctatctatctatctatctatctatctatatgctgctcagcactgctggaaggtgc

SEQ ID NO: 31128 - DNA, 410 bp, Mus musculus
  source 1..410: mol_type = other DNA
atgtactttataaaaattaatttttagttactttataaagaaatgggtctcattatgacacacacaggtagatagatgataggtgtgtgtgtgtgtattttacttgatataatgtttaaaggtatccataacagataaaaagagcattttaaagtgaaagattcataagcataagcctcttactccataggatgatgacaaaagataaaatgtattttttaaagttcatctaacacaactcaattatttatttatttatttatttatttatttatttatttatttattttagacagggtttctctgtgtagccatggctgtcctggaactcacactgtagaccaggctggcctcgaactcagaaatctgcctgccaaatatttgcatagggaaaaaaagatttcttttct

SEQ ID NO: 31129 - DNA, 363 bp, Mus musculus
  source 1..363: mol_type = other DNA
gggaagttggctagtgctgcctgagactactccagcctcccagaggctgctgcctgcgacagggcgccctgagccaggtccctgtttgatgcaggtgagtaccactgtgtctcatttggagaaacagtgctggaatgttcctctcactgattcatccagccacagactgtgggcaggaggccttacagccaaggaggtcatgctttgctggacctacagcatatagctgtgttcacacattttgtgatttttaaattccctttcaagttagcaaaattagattatgacaaaagggttgaacttgggtactttcaccggctcggctctggacatccaggccaaagtgttagagataaaatgatc

SEQ ID NO: 31130 - DNA, 154 bp, Mus musculus
  source 1..154: mol_type = other DNA
acaggtgctatagccaaagatggtctagatcttccattctctgttaaagtaataagggtgaatttccccaaagccccacatgctcagggctcaatgaaatggagtaaacattgtccagggaagttggctagtgctgcctgagactactccagcc

SEQ ID NO: 31131 - DNA, 408 bp, Mus musculus
  source 1..408: mol_type = other DNA
atgtgtgcatatatatgtgtgtgtatgtttctgtatgtgtacatgtgtatgcgcacattatgtattgatgtgtgtacatgtatatatgtgtgcctatatatgtgtgtcttgcatgtgtgtatgtgcatgtatgtatatctgtacatgtgtgtctgcattattttaaacacacctaaagtgtgggtaggaaaatctgtccaaatatggttcttgtttccactgagtggaaagtttccagcagactgccgcggggtccccctgtcctttggggagcccaatggattggctacccctggcaggcgtctccctgctgcaggctgggtcctcagaaaaggcatcttcctagtcctagggtatcaggtggcagaccagctggtttcagtcttgaatcaggtcttttggctcctc

SEQ ID NO: 31132 - DNA, 304 bp, Mus musculus
  source 1..304: mol_type = other DNA
ttttgatttctgacacaaaatctcagtttattcaggttatatgtgctttgggtttaataactattccctgtaatacagaaataactatggaagcactgaggctaatttatctctctctctctctctctcacacacacacacacacacaagaaaatctttctattatgttctcatgtcttagcaaaacctaacagccaagaaagtgagaggtgacctttctgaacgacacagcaggggcgtgcactactcgtggtcacctcccctctttctgcagtcagggctcaggccagtgagccaggaggcc

SEQ ID NO: 31133 - DNA, 302 bp, Mus musculus
  source 1..302: mol_type = other DNA
aacctgaaggggaagtattctttcctcctggcctgggcctggctggtgccaggggaagcctgccttggctttagtagcctagctggccctgcaggctggcattcctgcccaggagggtggggctcaggagcagctgggacagtgactcacaggcagttacctgtcctggggctccttgccagcagtgccaagggagcgtgaggctactagacttgggaaggtgccaaatttccctggcgtggcagctgccagattcctgaggccgccagcagtggggctacacccagccagggagtctccag

SEQ ID NO: 31134 - DNA, 228 bp, Mus musculus
  source 1..228: mol_type = other DNA
ctgaccttcagtagaatatggccacattcaggttctagaggtctagtggtctcctgcagtctcccgagttatgactggggacctgctcagcgaggatctgggggaaggggcttttagaccacctaacccagcaactgcagtggaaactgagtcaggcagtcccagacagcttccacaacttctcacgttgttttctgttattcacacatcaacacagtgtgaaagaaa

SEQ ID NO: 31135 - DNA, 490 bp, Mus musculus
  source 1..490: mol_type = other DNA
agccttatgaggctagaaagtccacaggtattacatggcctctcagtgtagctcagtctctgaaagccagttatatgtactaattctgtgcagatctggggaaagatatatagtcattaaagactgactttcggggagaggatcaagaattcttccccacccataaacaggcctgttcctgtttatgcagacgagcagagtcactgtccccagcatccaggcctgaactgggctgttcatgctgcttgtattccaccttttggtacaaaatgaaagaaagtgtgctttctctagatatcaccaacatacctagctcgcatcctaactaggtatacagaatggagactccacttgtcgagtactctgaggtcatgaatgcttgagggtttgagtattcaggtcctcaccaggtcctgaatgaatgaatacaggtattcaggtcctgtaagagtggggttgcaggatcctgaaggtctccttcaggccatgg

SEQ ID NO: 31136 - DNA, 267 bp, Mus musculus
  source 1..267: mol_type = other DNA
gtactttcttcgtggaggtagatcttcagagaaataaatacagaaatttatgtgacgagtcagaatccttaaatctaaaaaccatgtactatggagtatctatattatctctatggtattgacaattgctatgaccatcacaggaaagttaatacaaattctgttgattttgctggaaaatttgtgtcctgctcaattttaacatgcagcatcaggcgtacacagtagggaggggataagccagcatcccccacccactccggacag

SEQ ID NO: 31137 - DNA, 331 bp, Mus musculus
  source 1..331: mol_type = other DNA
aactcggtgtgttcaatctccatcggggaattcgaagaccctgaaggccctcgcgggaaagccgtagccgcagttgcagattctgaaaaatcctcttttctcgaggcgggctcgcgggtctggataccaatggaacaggaatctttaaaatgtagaaataattatcaacaacttcaaaccgtgacgccacgcgaggggatggggtgctctcatcctagccagctggcttaccaggccccaagacatgagtccctagaccctggtactctgggagcagaacgcctgcagagccgtagctctgccggtctgcgcgggcggggcgcgtggaggc

SEQ ID NO: 31138 - DNA, 283 bp, Mus musculus
  source 1..283: mol_type = other DNA
gtgacgagtcagaatccttaaatctaaaaaccatgtactatggagtatctatattatctctatggtattgacaattgctatgaccatcacaggaaagttaatacaaattctgttgattttgctggaaaatttgtgtcctgctcaattttaacatgcagcatcaggcgtacacagtagggaggggataagccagcatcccccacccactccggacagggagcaggggaggagagccaatatcccccacccctgcgcagggcggaggagcgcgtcccgcgccggg

SEQ ID NO: 31139 - DNA, 304 bp, Mus musculus
  source 1..304: mol_type = other DNA
tgtcagaaaaataatgtctgggcaccatgattataattttggacttgagctgccattcaaaagccaagaaaacagaatgtaggtccaacttttttttttccctctgcctctccagagggaaagctgcagttctgcttctgcaacacaagagcgctccagcatgagcatacaagctgtcgataggtctgctagcagcagccgtgctgcagctgggcaccaggttctgccaagcgttcagaaatctgtgtccagaggcctctgggtagcctaggctaagatgtcacgcacaggcagttcccatggg

SEQ ID NO: 31140 - DNA, 267 bp, Mus musculus
  source 1..267: mol_type = other DNA
agtgtcatctatttaagtctgaccaggatagaggagaggagtgaactaacatttagagattaaatgtcatcctgctgcatcattaactaagtgactgagctggccttccattggccaggggagggctcttattcctctcatttttgattggctaaggacagagtatcaaatctgaatttgtgagtctgcctgcttcagactgcccaactgattcctttacctttttttaaatttcaggaactatgaggaagagcttaaaatgcctca

SEQ ID NO: 31141 - DNA, 434 bp, Mus musculus
  source 1..434: mol_type = other DNA
caattgaatattgtgactctggggatactcacattatatttgctataaaaaaatatgcttgtatctggaagccaaaaagtttttctggggaacctgaaaaatacagctctactctttgtctcctttcaaagatgacagttgtgacatcagagtacaatgtgaaacatagcttgtgaatcttatttttaggtacatttttaaaacataccttgttttgtgttagagggttatctgtataatacagtgttaagataccagcttttaaaaagaactatgcatcttgggaaattacataaattcaagacattacaaatgtacatatgttgaatggatttgtcattgtgtatgatgatttctaatgactaatgtgaagtcacacaggaaacaagctttgcattgtttttgtctatctgcgtctgacaggcaaaatgatt

SEQ ID NO: 31142 - DNA, 353 bp, Mus musculus
  source 1..353: mol_type = other DNA
ttcccatgaactggaaaaaacgaatcctctccttcatccaaaggtttgacatttgtcaggatcctgggatgttcacagtcaacactgtcactgaaatgcttgccacagagaagtgttctgtgcaataatttacagctataagtacttgtcctaatcagctgaatgccaaatacaagtctgaggcagcctcctgatagtgcttttcaagttcaaccagccttctggatagaacagctatagagccgctgaagaggagcgcaacctcatggcccagccgcttgaactgaccagccgattggcctagctagcgctaccagtcaccagcctgccaggagcggcctggccacgcccac

SEQ ID NO: 31143 - DNA, 307 bp, Mus musculus
  source 1..307: mol_type = other DNA
actatgcatcttgggaaattacataaattcaagacattacaaatgtacatatgttgaatggatttgtcattgtgtatgatgatttctaatgactaatgtgaagtcacacaggaaacaagctttgcattgtttttgtctatctgcgtctgacaggcaaaatgattgctgtacatctctgtatgtggaggactgcttcattcacatcagtatggctcgtctgaacctggaagatccatggagcactcattcagtcctggttgcagcacagctgaaatcagactgtcacctgccttgagattccaggctg

SEQ ID NO: 31144 - DNA, 422 bp, Mus musculus
  source 1..422: mol_type = other DNA
aaggaaattcctgaaagttgtttctgcaaagactattggctgattagaatttcagtactctggagagattgcaattttgctggtccagagaccaataattaccttatcttgggctaagtcactaacatcacaaaaactttatgaaactgcttccatgaaatttggggtgaccatatcattgttccagggtcatgatcactcaaaatggcttcagaataaactcctaatccttttaagatgagagctatggtttttaattcatcataaggaaataggttcttactgtatactagacaggcaactgtccttttaaaaggagtaaggccgggctatatactgcaagtggaaaacttcctggagctgacctactaggtattgaaccagtttctgcattgctgaatcaatctcccaaggccaggggc

SEQ ID NO: 31145 - DNA, 448 bp, Mus musculus
  source 1..448: mol_type = other DNA
aagtctctcattagtattaagaaaggaattaaaattcagtgcaaatcctgtttattccatttctgaaaacttattaattgttcatctgccatcaaatctggatgatggcaaggaaggaaattcctgaaagttgtttctgcaaagactattggctgattagaatttcagtactctggagagattgcaattttgctggtccagagaccaataattaccttatcttgggctaagtcactaacatcacaaaaactttatgaaactgcttccatgaaatttggggtgaccatatcattgttccagggtcatgatcactcaaaatggcttcagaataaactcctaatccttttaagatgagagctatggtttttaattcatcataaggaaataggttcttactgtatactagacaggcaactgtccttttaaaaggagtaaggccgggctatat

SEQ ID NO: 31146 - DNA, 579 bp, Mus musculus
  source 1..579: mol_type = other DNA
cagccattggctgatcagcttttattgagaaagagattgaaataagattacaatgccatgtccaaattgcaatcaaggataacctttacgcagtgcataatatcattatgcctacactgtaccctgcaggttacaagttgaacactattggtttatatgctcaaaatataaaagaaaagtaatctgaaacatttaatattgtacattcatcccttagtatttctccaagaaggtagtagaattatttaaatactattagcatagacatacaagtagaaaacaacccagtttaatttgctcggtagttgtaaaatggttgacaataattgctctattgccttctgcaattcagtgaagctttgcttacgataatgaaataagttgattaactttcctagtaaggacattttctattttcttggtaaaattacaaatcatgactcaaacattagtaagatttctttttcaattgcagaggtaaactgtagcttccctgaagatacaaatggaatccagaagggatttcaactgacagccaatggaaccctcccttggctctttgcaaataccgtaggtgca

SEQ ID NO: 31147 - DNA, 300 bp, Mus musculus
  source 1..300: mol_type = other DNA
gtttgtctaggaaagaaacactctgttaaggttcacctcatctatttaactaattattttgagacagacgggattaaaagcacatacaaccatatctagtttttttaatggatgaaaaaggagtttagaaagtttaggtacacttaatctaacctgacagtgctcctaagtagttagctatttgttagcagctcatgattaagcttaggctcagaaaccttgaaacacagttggaaagtcaaggtctcatcttgctgtcttttggcaccagtctcaaaaactgaaatattggcaaacaca

SEQ ID NO: 31148 - DNA, 619 bp, Mus musculus
  source 1..619: mol_type = other DNA
tctttttcaaattaaagactaaatatataacactgaagtgtggatagttttgttattcttatcatgccgtaacaaagattattgagatattcatcaaaacttgaagacagtaaaaaattatgaaaaactaccttaccaatattagtgtcttgtaattgatcattttactatagttatattgtccttatttttaggaaatacacattaaaatacttaaagaagagataaatgtctgtaatttatttaaaaagtcagaaataacaattacataacacaattgtatagtcaaaatatatacttttatatatctttataattatatagagataacatttctaaaatattaacatttagaaaacccctttacagttatacagaaatttgaaatttcactgtttacactagagtaaaaagattgtaatgccaggcagtgttatttctgaatttccactttaagtaaaataagctgttttctcaaactgagagttgattacattaatggggtttgaaactgaattaactaaagaatacaatactgtaaattagcatatcatacgaatgtacttggctgctcaatcaactcagtacccagcgccaccgcgcggagccgatgctattt

SEQ ID NO: 31149 - DNA, 403 bp, Mus musculus
  source 1..403: mol_type = other DNA
caaaccatgtaggttgtgacaaagtttctctcagatactagatagcaagcctgcttgtccatcctggatatctaaacacgttagatatctggccagagttaggtaactttagctaggtttgtctcccattgcaatgctcctgcatagttttttctttaataaatccttaggtattgttacacttgacctataagtcctgcggacccttaggtaacccagcgtgacgtcgaaggccaggggtttggaggcgcctgggactcccgcagagcggcggccgccaggtggcaccacggacccagggcccgtgcgctcccgcgggcgtggggcggggcaggaagaggcgccggcggagcggccgcggcggtctggggaagccgggcgcggggctcggaggagggagcgg

SEQ ID NO: 31150 - DNA, 476 bp, Mus musculus
  source 1..476: mol_type = other DNA
tttacacctttgtcaaaagttatctatataaccattgaatatctgaaataccgtgcattaaatatgtatatcaattttggtaatgtagctattccataatattaattttgacaagccataaacaggattcataggtattaattggcatattcattattgatacataaaaattaattttgtcaattttgtatcatactatttagctgaaagtatttatcagttctgagagctttctgatcttgccctaagactttgaacaatgtcttcatcacactttaggtttaaaaaaaatacacagtatttctgcatttaggctgcctagaggtaaatttgctgtaggttcatcatctatagcctttattatatttatatatacctaatccaaagatgtggaactttgacaacgttcttttctgtcaagatgatttctgtcattaactaactttttaatgcattcctgaaatcagttttcagga

SEQ ID NO: 31151 - DNA, 357 bp, Mus musculus
  source 1..357: mol_type = other DNA
tggaaaatttgcaaaggctgccgcgcagccctgcaatccagcctgcactttagactgaggaagggccggcctcgtgctttcgcccttctgctggctgaggtgggcggggccgtgcccgctgaggaggcccgagcgggcgagcgaggcctccgagaggagccggtcttcacccgctgcgaggtaggcggggcctcgactgcctagcaatgtgggcggggcccgccctgactgaggcgggcgggactgcatacggggccgggccggctggcggggccgcagactcgagactcggtgcccgagggtgggcggcactagagggagctgcggccgcgcccgccctgtcgcgccttgcttgct

SEQ ID NO: 31152 - DNA, 342 bp, Mus musculus
  source 1..342: mol_type = other DNA
ctgaaagagcagtcagtgctcttatcctggatgtcctggaactcactttgtagaccaggctggcctcgaactcagaaatccgcctgcctcccgagtactgggaattgccggagtactctggagtactgctgtggaactattacgtcactcccagtcaggggcgtcaggcgtggtgtggactaaacctggcacagcactgcgcaggcgtgtagtctcgcgagagtctgtaccagcctctcccagggacgcgtactctcgcgagactacacgcctgcgcagtgctgtgccaggtttagtccaccacgcctgacgtccctgactgggagtgacgtaatgccggag

SEQ ID NO: 31153 - DNA, 417 bp, Mus musculus
  source 1..417: mol_type = other DNA
ttaattcttgaactgctggatttaaaggatacaacaatatgagtcagaaatcgtagtacagtctgtcaacaaaatgttcaagaattgaacactagattcttcttgcttgcatggaattctgacagctggagtctacaaacatactgttaataacgattatttttagttttttaattagtgtatagtaattgtccaaaattaaaagtcacttaactgggaatggactttagtaacgagataccaagtcaaagcacaggcttcgagtctgtgccattggagtgtctatagccacatctgtgtctcgggccaccccaggcaacagtgggtagcagtgccacttcccgagagacgtgaagaacttcagcacgcggaggcatgcgtgcacctgcaaggaggagcactgctctttaagcagcg

SEQ ID NO: 31154 - DNA, 509 bp, Mus musculus
  source 1..509: mol_type = other DNA
ttgtttactgtgaataaaatagatcttacttagatttttaaagccaacaaaatgtgtaagtagagtttcctttgtttggatatggaatataaactgtttagataggtctaaagttcagagataggaaattagagagttatagatccgttttttttttttaaacttaaaacctctttagtgttaaatgacacttttaactaggacctgtggcttgtgtttaacaactagttcacagaatccctgcactgttaagtactggttccggtagacaatcatcgtgactctcgactcaaaatacggatcgttaatcacttttcaccgaaataggtgatatattaactatccgtttagatactaatgggaaaaaaatctatagatggtaacgttttcatttagtgatccaagcacacacttctatcaggattctgaaaaccctctgcggcgtcgctcacgtggaccggccgagcggcgtcacggcgttgctaggagacgcgccggttacaccggcc

SEQ ID NO: 31155 - DNA, 214 bp, Mus musculus
  source 1..214: mol_type = other DNA
aggagaacttaagagaatatttgttgattataaaaataaataaataaataaataaataaataaataaataaataaataaataaataaataaaagttttcttggaagaagtaaacatatttttctgcatttcattttgtatcattatctaagaagcaaaaccttgctgtcagtgaccggaggcacaggatggctccgagccactgattgaacaga

SEQ ID NO: 31156 - DNA, 209 bp, Mus musculus
  source 1..209: mol_type = other DNA
ctagaactagctcaagataggcttgccaaagtgttctgcatgccactgacaaagtctttggtggatcttagtcaaagtacaacttaaatgattactctgaattgtagccttcaaaatatagttagcttatataataatacaaattgggataagatttttaaaaaagtgaaaagaactcgatcttcactagatctagctggtcaaggggc

SEQ ID NO: 31157 - DNA, 283 bp, Mus musculus
  source 1..283: mol_type = other DNA
gaacatgcttctcagacaaagcaagtctgaggcttgttcttgtgaatagcattgacactcttacaagttttcagatttacagtggtaaaactctctttgagtggtttaaacagggcagggccagtttccacggaaggccccgccccttcccgcccccaccgtgcggcgcaggcgcggtagctaccaccgcaggggtcggtctccgctgacgtcagaacgcctcgctcctctcagcctccccgctccggagtccctggcgggccggggcggggcgtgtggccag

SEQ ID NO: 31158 - DNA, 469 bp, Mus musculus
  source 1..469: mol_type = other DNA
aatacactgtttttttgttttgttttgtttttacaaaacctaggtactataacaccctcaaaaccaggtgggatggtggaattgaagaaaacaggcgtctattttatcgctcctttgtaaagcagcttgtctataaagtccctaggaatggcaattagtttgaacctcaaaacatgtcttctgagcagagaagcaagtctcctcaaatctaatacgaatcctattagctgcttaggcaattgctaggctgagcgcggtgtcgccgccatgcaagcaccaggccctgcgccagcacagggtttggactgatgcaccgcatgctgagcctgggacccggaactacccacaccttccttactgtagtgggggctgcctcggaacggcgctcaggagagggaggagctaatgaccctcttccgggcctttccggcgagcttgagcagaccggcgtttacgccgggctgcagac

SEQ ID NO: 31159 - DNA, 430 bp, Mus musculus
  source 1..430: mol_type = other DNA
cccgaaccagtgacgtcaccgtgacctcttagggactctgcggtccgccccgaggactccaggcatcctggagccctgacgtctttaggccaggataccctggagtatatccaccctccacacagcgtgcttggccttggagggagagcccttgcacgcacggttcccgggccgatgacccggagcccagaaaacagggtggccgccacggaacccggagacagcttcccaggctcaggctgatgtgcagcccaggtgcacgccgatcgccgccataaggcggcggagaccacggcagctcaacgaaggacccttcagcagcttcagctagcttcctcgtctgcagcccggcgtaaacgccggtctgctcaagctcgccggaaaggcccggaagagggtcattagctcctccctctcctgagcgccgttc

SEQ ID NO: 31160 - DNA, 263 bp, Mus musculus
  source 1..263: mol_type = other DNA
gctagagaatgaaattagattttttttttttaaagatcagatcagtccttccttgatctaaattccactttatgtaattataacaaactccttttttgattttcttccaaaaaaaatatttggcagaattttaaattaacttgcagctgacaccttccattagacagtcctttcctgggcacccaagcaaaggaagagctctgacttagtgatgactcagcggccccgccccgtccccggcccgccccgccacttaattctga

SEQ ID NO: 31161 - DNA, 269 bp, Mus musculus
  source 1..269: mol_type = other DNA
agtgggccacctctgatgccttctaccctgcagcccacatagcagcggccagcactgtgagagctagcccacaggacagggcaaggatagcattttaaaggtctaatgtttacagtatctagtgtatacactttcttggtaaaggattgaagacttgacggactgcccgggtgccaaaggcattgtcagtggttttgccagggcactcccattagtaaatataccagtgctaagtattatatgacttgtacctgatggaataggcccta

SEQ ID NO: 31162 - DNA, 490 bp, Mus musculus
  source 1..490: mol_type = other DNA
accatcactacaatacttgtcttgcacttgtgaggacctgaattggatcccatatcctgcagatgcaagtctgggcaaggtggcacacacttatgacttccatgttgcggctagccaggaattggggctccctagatagtatctagtctagcttagttagaaaaacgtgaggttaccgctggcctccacatgcatatgcatacatctgcacatagatttgtgaatacacatgcacacacaagtgcatgcgagtttatgcacacacccacaccataggaacatgtaaaaactatctatttcttccttttctgagagtctataagagtctatgatttggagaaagacttaagcgacactgaatatatagtatatatggtataaaacaaaaccggtgggcagcctcctgctttttgttttccattgacatcttcaagggaaagtatcccagcgactagggaggatccttcaaaattcctaacaggcagccctg

SEQ ID NO: 31163 - DNA, 218 bp, Mus musculus
  source 1..218: mol_type = other DNA
ctttccgcagagatagctcctagctagagtagcctatatagtgagctctgggttcaggctttcacatgtctctgagactctgagatctgtcctgcatttgtctaactccgttgaagaatcctgttggagaaataggtagctctctacaagagaagtgataatcagttgagacaattcttatatcggtatctatggcaattctatagagtcacctacct

SEQ ID NO: 31164 - DNA, 331 bp, Mus musculus
  source 1..331: mol_type = other DNA
gctggcaatactaaatgatacctagttttggcagtataataccatttatacatatatacacagacaggcatgtacacattctggaatagaatccatacatttgattttgaaagttttctggagaaggtgtgtccaaacatctgatcaaactaacaaatggttattttgaaatatgtaagtgacacgatttttttttctgctttctgcatatggaccagaaaaccatctgaataatggtttccctctctcactcctgagagagcacgctgcctagtgaagccgagaggctgggagcgccaggcagcagcagtcatttgtcaagtgagcacgg

SEQ ID NO: 31165 - DNA, 356 bp, Mus musculus
  source 1..356: mol_type = other DNA
tcagcaggtgagggcacttgccaccaaacctgaagatttgtgtttggattcccgggtattgtcctctactggggagtacaactttggtctgattcatctgaaccatgcaattcatataattaatttgatgcgtacatttatttatgttcagtttcatagaggtaatttatgaatccaaagagaccctagtcttcaaatattttttaatgtttagaagagaatgaaatcagaatgcaggattttgaattaatctctgctgcagatgtaggagattccactgaagcactcctggggcagcaggtcacgctgagccagagctgcagggacgcagaaaacgctttcagcgtttagatatt

SEQ ID NO: 31166 - DNA, 187 bp, Mus musculus
  source 1..187: mol_type = other DNA
tccagagagacaggaaagtctctagtctctggcttcagagtagatgaagaggtagctcctgagtcagagaaccctgctttactctggagcaaagggtgacggtgtgtccctccagcgagtgaggatgtctgaggctcttacaggaatttgaacgccttcccatttcagcactcgaggggaggaagcg

SEQ ID NO: 31167 - DNA, 245 bp, Mus musculus
  source 1..245: mol_type = other DNA
agaaccctgctttactctggagcaaagggtgacggtgtgtccctccagcgagtgaggatgtctgaggctcttacaggaatttgaacgccttcccatttcagcactcgaggggaggaagcgctgctcagccctccgcgtgcacagatggctaccgctccctcctgagcactgtgttccgaattcttttgtgtctgctgaaaaaatccacacctattggtgtgtgtgtttcactagtagtaggccta

SEQ ID NO: 31168 - DNA, 524 bp, Mus musculus
  source 1..524: mol_type = other DNA
agcagtcagtgctcttaacaaactttctaatgactacacttgagtttgaattgaatgttatttcactacttctagaatagaaaaatgtaacataaaatattgttgaattatgacaactaaaaacaaagatgctttcatggcatggaaccaagaatagatatgttataaatggttctaagattaaaaaaataaaaacaaatcaaagtagaatttcaacatattttttcttgggctaggttataagaaagaatgattatattcccaatcatcattgaaaatcttcattgctgattgcataaccagaaaacacaataaatttacagggtgttgaataggcaattaataaacactgccattttaaaacttgtattatttatgtatttctcattctctagtatgaggagtatacaagctggttcaaataaccatttaaagagacaaacagttgttttttttttttttttgagacaactcagaaatgggattaaaggcctgtgctatggccgcgttcgcgccgaggggcg

SEQ ID NO: 31169 - DNA, 420 bp, Mus musculus
  source 1..420: mol_type = other DNA
tttccagagaagtccttcgaagggattacttcaagtgaaaccgcattaccaatgtcaattcaagcacagccatgtttacttggaagattcaagaaacttcacagagcatttgcatatttcactggcactctgcacattgttcccatgggcacagtctcactgcaactgttcccttctcgcgggtctcgggcctctgcacagcgcccccgccgggccgcacgctgccaccgccaccagcaacccggaggcgctccggccaccggcccgccgccttaaagggaggtggccgctcttaaagggaccctcacgcgcccggccggcgggagcgcggcggcccggttcccggagggccgcgcccagcctaggccgagctccacgcggcgtccgagcgcccggcggtgccgccgccaccgggagcag

SEQ ID NO: 31170 - DNA, 450 bp, Mus musculus
  source 1..450: mol_type = other DNA
aggtgatgtaaaaaatcttttctattcccacttaaaacatgtggtaagccaatggccattggcggacggcaatcccagggtggggataagaattgatgttcgcccatccctggccctggcaccgcccgcctctcagacagagcgagggctggccgccaaggagccacgatccctgggttcgcctccgggagccgcagagggaggccgggcagagcgcggcgtccgtccgggggggcagctccacgggcccgggccgctccggacgctgaaccgcgcggcctccggcccatgccgggtcgccgcacggccgagtccagcagtggcggcggcccccgggggatggcggcggccgggctccgccagcaggtggtcccggggtcccggcggcgccgcccccttcgacggcgcggcccctactcccgcgggggaggtcagcgccccggccgccgc

SEQ ID NO: 31171 - DNA, 601 bp, Mus musculus
  source 1..601: mol_type = other DNA
ctgttcccttctcgcgggtctcgggcctctgcacagcgcccccgccgggccgcacgctgccaccgccaccagcaacccggaggcgctccggccaccggcccgccgccttaaagggaggtggccgctcttaaagggaccctcacgcgcccggccggcgggagcgcggcggcccggttcccggagggccgcgcccagcctaggccgagctccacgcggcgtccgagcgcccggcggtgccgccgccaccgggagcagaagggagcccagcgcgcccggtgcattgtgggagcgccgcggcccgttttccggagggcgcaacgagccggtaagcggcgggcctgagcgggccgcaggcccggcgcggccgttgcaaatccccctccgggccgcccgggaccgccggggagccgtgcaccggggcccttcgcgcgccctgcctggagagggggccgagcccaggctttggtggggccgctttaaaaaagaagcgccgcccgcgccgctgcctcctccgccgtcgccgccgcggcacgcggggccggggttgggagggaggcggcggccactttcgcccgccgacatttttgtgtggcggcgcgga

SEQ ID NO: 31172 - DNA, 490 bp, Mus musculus
  source 1..490: mol_type = other DNA
agaagtaactctcttaagagatttcaaagactttaggaaaacagttttgttttagggtttctctgtgtagccctggtggtccaggaactcactttgtagaccaggctggagaaaacagtttttagctacataagaaattttacatgttgctgaacaaacctgaccatcagagttcgatccccaaaactcaggtggtggaaagagactcaacttccctgaagattatcttaaaaactaacagccaaactttctaatattttaggatgaattcacgctaaatttaatgtctcttctgaataacacagatgattttaatttttagtgggagaactagtcacatagattagttgttcatagattaaaactaccaagttgactccagacagcctaggctcgctcagctccccaacccccagcctgggggaggtggcgctgtgtcctgcccttggacagaactccaccctctactaggaggcggggccttgccgta

SEQ ID NO: 31173 - DNA, 448 bp, Mus musculus
  source 1..448: mol_type = other DNA
ctacagctggagacagtagccttaggactacaaagtaactgaagttaggagttgtgaaaattctattactgattaaaggttatgaacacagtgtgcaaaaattaagcacgtggcaccaaggagcactgtgacacctggctcaaagttttctactcttgaaaatgatttaaatatggaaattcaacataatggcttgtttacagcaagcaaagacatttaatatttccctgctgttattcctcagcatggaagtatcaaaagtaaaagtctctgaaatgtattgttagaacatttgattttaaaagttgctaaatgaatttttggatagactttccaaaaatttccaaaagtgccctaaacatagtgcatgcacatgccacccatgtggtcggcagacacttgcaggagcacacagggccgtctcacagcccaatttctgttagagaac

SEQ ID NO: 31174 - DNA, 430 bp, Mus musculus
  source 1..430: mol_type = other DNA
aaggatgttctcttccagtcctctgcgagagcaaaagaagtataagcagctaaacatagtttcgtgttttaaagatgcttataactagtcattaatattaatatagttcattaaataatacaaggcaggcggatttctgagttcgaggccagcctggtctacaaagtgagttccaggacagccagggccctaggggggaggctcagtgaattcagatatcaggagccattcttgtctgacatttggatgcaaataatctctgagaaattcctttggactcaggctgagtatttctcagagcatctccttgggcacggacgttggcaaggacagtttaaaactgcccctgccagggccttctgtggagatttttccaggggccaaaaacatctccagtgttctggcctggagcagccaatggaaaccacag

SEQ ID NO: 31175 - DNA, 386 bp, Mus musculus
  source 1..386: mol_type = other DNA
gcaggcaggcaggcaggcagcaggcaatttttaattacaagatgacagcgaatcactatgaagcagaatacttcatctccctaccctgggtggggaatctactcctagatctggtggcacaactctgttacagatgggctgctctgtggtcatccctctaagctcagaaggattcgttgcctagcaaccactgggccctatgacttcaagtgacaggatgccctgcccaggcacctgaggacagtccttatctcagcctgtgttcctgccaggtagacctgcctgagaagccaaggtcattgagactgtccccctccacttatcaccactggtggcaggatgaagaaaggggagccagcctgtctttttttactaggaaatcagtg

SEQ ID NO: 31176 - DNA, 435 bp, Mus musculus
  source 1..435: mol_type = other DNA
tgggcaggtttcaagaatcctaggccaggggtgtgaatccagctccatggcagtggcacagggcatgcttagaatccaggacactctggatcctgctgtcttgagttcaaggctcacctgaaaggtcaaggccagagcttcttggagagaccctgttctgcatttggaaaatggttttagacctatgtataaatacttgtaaagaaaagtttgaattttactgaagaatgatctgataaattattctcaactctgacataatctagttccctgaattattctagggatattgttttctgcgtccaaaaataatctgaatggtattctaggtcagacagagtgaaaagtagaaactttcatctctctctctattcaactggttgggacttcaataagtttacttccagcagggaaacctgtcgctgatggccaatc

SEQ ID NO: 31177 - DNA, 337 bp, Mus musculus
  source 1..337: mol_type = other DNA
gtcttctgtgttagttgtggagacttctgtccagctttagggttaacatttgagaccaagtcttggactgtgtgcaggtgcacatgcagtcacacaactatcttctgagcgagctagatgcaaactagaaggtttctctactattttctacatcctcggcacagttaagactgctgagtgtaatctcacctgggccatctgatgcagctaacaagagctcaaacacattttgcattgtctttcttttcttctttggtttttaattaaagcctccaagagaggctagaccctggggctccgggcgctgcggtcagctgagcggcgcctggcgggtcgc

SEQ ID NO: 31178 - DNA, 671 bp, Mus musculus
  source 1..671: mol_type = other DNA
agaggcgtctttccattgaaagtcagtccagagttctgggccaggccgccgccaaataacccctggagttttactccggaagggaccaccaggcggtgattggctcgtcttgggcgtgccgctccaaaactgacgtgaagcagattttggtgcaatgcgaattagctccagcagcggagtccggaggtgactgccgagctccgggagcgcctgctggggcaaagctgcggccaggagtcaacgcccgcctgccgatggctccatccaggccgcccctcctgcacagcaggcttgggttgggtatgcgaaggcgccccgccctgggcgccccgcaaccgtgagccgcgcaacccctgccgagagcttccgagcgccaagcagaggcgccccctcctgctcgaagagggaaagcccgggcgcccccagcaaaggctagggctcccccgcgcgttccggcgccctgcacctgctgggttctcccacccgccctcgcccggggacccagggtgcgcggacggcctgggagcgtgcgtggctccgtggtcaagtgctgcatcccggcgcccaagcacggagctcctggggaggggagggggagcgggacatccccgaaggccgcctcgcgggaggcggggaggctgccgggtgcactgggagggcggggagcccgc

SEQ ID NO: 31179 - DNA, 411 bp, Mus musculus
  source 1..411: mol_type = other DNA
agactcaggtctacaggcatgtaatccttcagaggatgcactgtgtctgctccaagacttactcagcaagactttgggacaagagcactaagtccttgctagtagaattttcctggagtcatctttgaaacttacaaggttcctagacttaaagttttagatcctacggctgcaaacagcagtgtcaaggggagaaaagaacccctggcctctgctggggaaacattttttaaagtgtgcctgcatgccttttaaattaataaattgctaaaaaatgcttagttgggaggccccacagacagctagctcttgattcaccggaacctgttccatgagccttggatgaaggaatttccaagtgcgttgccattaaatattgggacctcattagcatctgctagagaaagggct

SEQ ID NO: 31180 - DNA, 390 bp, Mus musculus
  source 1..390: mol_type = other DNA
tccagggggtgatggatgccagccagcacaactaactagtgaaaagcttttttgaatttatggggcagttaagcttaaataaataaataaataaataagccgtgaacaatggattttcaaatctttatagggattcttttgacattattattacagaaaactcaatattattctaagttctgggaagataaactcagatttgatttctatgtgctttgattctaagtcacttgcattgaaaacttggcaagctctgacctagcccatagttgggtgctacaaaccaggtcaccctggagtcccagggcgcaggggttcgtcccttcctcccgggagttctgcacgggccggttgcggggttgacggactccccgcccctgccgcggtcgt

SEQ ID NO: 31181 - DNA, 459 bp, Mus musculus
  source 1..459: mol_type = other DNA
atgatatcacaagttgtcgtatacaaactcttccaattttttcatcattgcagagacattgataaaaatatgtgctttttccacactggtaactttttcggaattggactaaactttaagcttaaaagacacaacccaggctggtccgcctggatcccgggttctcgtctcgcgctcaggcgcagacgcggagacacgcgcgcgcggcgggctgtactctgggcgcccacttacctacactaagcagaagctgcagtctccgtagaatcaggcgccaccgctagagacaccggcgcctctcgtggtgcaaggaggatgtgcacacgtcctcctccaggcaccgctcagctagggcacgctaagcatacagtctaccatggctctagagtctagcgccagcggacttttacggaccggaagagtcctttctttaagacggctcggtcggcacttccggaa

SEQ ID NO: 31182 - DNA, 179 bp, Mus musculus
  source 1..179: mol_type = other DNA
gggaagagaataggatcccaccttctcagccaggcggtaggccagcctggtctacaaagtccttcatccagacttggaggtaccgtgggatttacccaaaccccccggtgggtaccacactgacagtgaccggaaccctgcgcagcacttccggaagtgccgaccgagccgtcttaaag

SEQ ID NO: 31183 - DNA, 207 bp, Mus musculus
  source 1..207: mol_type = other DNA
tccttcatccagacttggaggtaccgtgggatttacccaaaccccccggtgggtaccacactgacagtgaccggaaccctgcgcagcacttccggaagtgccgaccgagccgtcttaaagaaaggactcttccggtccgtaaaagtccgctggcgctagactctagagccatggtagactgtatgcttagcgtgccctagctgagcg

SEQ ID NO: 31184 - DNA, 371 bp, Mus musculus
  source 1..371: mol_type = other DNA
ggaaaacaggttgagcagctgataatgcacttcacagtcacatccctttaaaaacggggcgatttcattccactgtgaaagttataatacttacaatagagggctttctatattttccaaatgggaaaagccttgattttcatgtccaacaccttaaaccggttctggaaattcggcagaatcgcttgcgcctgcgcatcccctctgctggggccctgattggagtgcctgtacataaaaatttacagataggagaatttcaactcgagattaggtatagattgatcacttcttaacccacgccccgcccccctagcagcccggccgcgttggtgagtggcgggcgggcgggccgacgggccctcgtctgc

SEQ ID NO: 31185 - DNA, 316 bp, Mus musculus
  source 1..316: mol_type = other DNA
ttgatcaaagtacatatacatgtgtgaaaaatgttaagaggagaacatcagtttcacaaatcatatatgctaatacatttaaggtctaagtaactacatggcctagtaaggttgcctacctacttctatatgttggttgatagggcacagcaccaatataaaggccttagtagggtggtgggcaggcagacctctgagtacacagagaaaccctgtctcagggtgagtgcaggctaactttaaaacaaggtgaaattgagtggggtccaaatccaggaggccacctgagaggcccgcctcttgaccaatgaggcct

SEQ ID NO: 31186 - DNA, 541 bp, Mus musculus
  source 1..541: mol_type = other DNA
ataattatgcatgtttaatgttcagtgagaactagagcttcagttatgtaattagtaagttgaaatattaaaaataatgaattttgcttaaaatgacacattattctttttttttaattattattcttagcaaaataaaaattaccaccttgaaagaaccattttactcaaatttcttatgttttccatatatttcctatttgggaaaaatagtctgaaattaacttctctaatttacctatattaccttggaagtacagggtttctctgtgtatccctggctgtcctggaactcactctgtagaccaggctggcctcgaggtttctttctgaaaaagagagacagataaaagagtttatacctcttgatgccagttttcacaaatgtctaagagctctaggccttggggtacctggaccaggaaaccttatctagaaaaaggccgccgcccccgccgccgcgccaacggtgaccatagcaacgcggtggacgtccgccaacggccaggctaggtgtgcggggacggccagagcgtgtccc

SEQ ID NO: 31187 - DNA, 620 bp, Mus musculus
  source 1..620: mol_type = other DNA
tcacacacacacacacacgaatgaaggaatggatgagtggatgaattcaaaaaaaagcaagaaggattttgacatttttcatgacaagcaaatgataaatattctgttcagtgtgcacacatatgggaacatcacataagtaactcacatatggacaatgcttacaagttcattttggaggccagcctagtctacatagtaaacattgtctaaatgaattaaacaaaataatgtatgttatgtgtcttgtttgaaagtatacgtatttcataaataacagtcattattattaaatgaaaataatctcttcaggatattgttgttggtctaatctcagaagtcaggaggaggatcatgaacttacaacaacaacaacgaaactctcaaagttagtggtggagttgctggagaagtcccttcttattcaggacttcaaaagcacattggtattacgattgctcatgctcaggcacagccaagggctttgggcgctggcccgcgcagactacctctggccgactggagtccggccgccaggaacgcgcggcagaggtgcagagcgctgggcggcggagcgcgcacggccgccgagagcgcgcggcggggaggtgctggacgcc

SEQ ID NO: 31188 - DNA, 369 bp, Mus musculus
  source 1..369: mol_type = other DNA
actcacagaggctgcatccctgatgccccttcaatgccttgcactttctgagatttaatgaatgtattgtatatactgtatatcttgtatatactgttatagatcttaagagctaagattatttattctatttacttaaaagcctttcactgtaggatatgcctctcatctagccactgggatcctgaaacggattccaggcttcccctgggcgaatgtggaaagatccaggatcacccacaaggcataggagagtttcctgtggtgtcggggcagggccccgagccgccccgctccactagtttcgcagcccgggtttgggggcgtggtttgggggtggggccctgaaggcggggctctgagtgacca

SEQ ID NO: 31189 - DNA, 611 bp, Mus musculus
  source 1..611: mol_type = other DNA
ccagcctgggaaagagttgccagctatagtaattctagttcctggaaatgaataaatcatttaatcatcccctttttacatcagttcttaatggaactacttaattgtgtcagtaacagagccactctgttgacagattcactgtgcacacactaccaagcatttgtttgcgcggggaattccctctcacttcacgggtgactgaaggctggcgagcggacgggcctcatccgcgaaaggcgccgtgctctgccggctgccctcaggtgtcagacacagcactggtcccagcccgtgagtagctctggagcgatcgctgggcgccgccgggtcggcggaccccctcttcatgcagaggggctcgggccgtcggcctccgcccgcagcccatcgagcgcgcgcccggcgggagcgcgggaacagcgcacgtgccgccgggaaggcaggggctgtccgcccgcgccaagatggcggcggccgcggccgcaacggcgactgttggcggccggtgaggcgggcggggccggcggcgcggaggcggggtcccgggagagccgccctggggaaggcgggggccgtttccatagcggcggcggctggaggtgtcgcgc

SEQ ID NO: 31190 - DNA, 379 bp, Mus musculus
  source 1..379: mol_type = other DNA
ggagatcagggagctgcctcacactaaatattactattgacttaaaaacaaatacagaagtgtgtttggcttattagacatccttgcttaatgcccaaagccaggaagcagacgcctgcctgcttcctgccctgccaccatccccaggctcataggggagagggaggggtgctggctggacccatctcaggcagcaggaacattctggcagcctcctctctcagagctgggagaaggtgcgatcacttctccactcccctgggtgtgcagaatgggcctccccagggcccctgctctgccggctcccagtgagagtgggggaaagccggcagcctcctctcaaagtgatgacggggtgactgatgtccttttaaaaaga

SEQ ID NO: 31191 - DNA, 436 bp, Mus musculus
  source 1..436: mol_type = other DNA
agttatttatggaatgattcctactcaaagaaacatctggtccactttatgttcaaaggctcaagaatatagtgaagcagagtagcaaattttcttgttttggggaaaaaaagccgcgaccaaacaatctttgtggctggtgaatgaagctcttaatttataagaactctggcatacagagagttaaaacactttcttagagggtcttgaccttgtcactctttctaaggacaccttttgagcacactgacctgttcaaatctgtgagattggttttgctaacatacacacacacaccacacacacacacacatatatatatatatgaaatcacatgtcactgagttgcttaaaatcttcccagtttttaagatggtaattaggcttgagtgcatgcaaacacttgtcggagaggattatttctttctgtactatt

SEQ ID NO: 31192 - DNA, 402 bp, Mus musculus
  source 1..402: mol_type = other DNA
ctgaagctaggggaagaaaagcagacctttttcttctctttcccatttgaaatattcaggcaggcaagaattaagtgtgcttgggtcccataaacaatgtgctttttaaaggggaagccaatcagctgcactgagctgcatagctggagcgcttgagcagcaacaacgtactaatttgatgcacactctcttccaaaacctctgaaaaagggggtgagaaatccagctcagcctttctttctcagggataaccagctgcacttaacttgcagctgcctcccaagcctgggttctgagatgcccatgccctgggtgacaggcggccagtcactgccctgctgaacagcagcagttgcagtgaaagcatcgcgctgctgctcagaagcaacctaatggtgcctc

SEQ ID NO: 31193 - DNA, 337 bp, Mus musculus
  source 1..337: mol_type = other DNA
tgtgctacaaactagaaacatgctgttttgagcatcaagttttgctactgtaaattttcagtatgcatcaagcttagctccatgatcttgagttgcttacccactttataaacactaagataagcatctttaatttgataatggaaagttgttcccataagttagaaactttagtaaagatatagttgcaataaataacgttataaagctgcagaacaccttcccggtggtggtggtggtgcaaacagcagacagaatggtcccagcatgctggctgcctttttactgagagcaaatttaaattactgagttttttttttttcaaactgaaaagatt

SEQ ID NO: 31194 - DNA, 303 bp, Mus musculus
  source 1..303: mol_type = other DNA
ttaagtcatattatagtatgaaacaggctatgatagtgtcaatcacaaagtagtgtttaactccctgatcatgatctgtgctacaaactagaaacatgctgttttgagcatcaagttttgctactgtaaattttcagtatgcatcaagcttagctccatgatcttgagttgcttacccactttataaacactaagataagcatctttaatttgataatggaaagttgttcccataagttagaaactttagtaaagatatagttgcaataaataacgttataaagctgcagaacaccttcccgg

SEQ ID NO: 31195 - DNA, 399 bp, Mus musculus
  source 1..399: mol_type = other DNA
caagatctgggtgttacatggaaacaatgtaagattgtctgtgaccccatggttacatgagtgaaacccaattagggcagaattgaatgattctgcccaacctttcttccatgaaggaatgtcaacaatcaacaatctctgctgtgatgatcccagctaatctcagggagaaagagatacaaagttagtttctctttggcaagttactggaattaaccaaagctgtgcttaaaagatggtcaaactctttaaactatgcataacatacaacttatggttttattaaagtagcaaatcaactacacctatgtatttgatcatagaagatctgaattaagaattcttagccatgagaaatgttgccaaactctaccgattctttcttagaagagttaacct

SEQ ID NO: 31196 - DNA, 277 bp, Mus musculus
  source 1..277: mol_type = other DNA
cggtgacaatctgagtcagtaactggcagtgtcaatgcttccagagccaaacacagaagctgaattttctgatgctgccttatctgtaagtaatctgcagaacaggcaaggatctaagaacagaatattcctaaattgaacttttcctgtactggaattccagcaactctgagatgttctgattattagaagtgcttaaaatttgtttccaacacaatgttggcaagcctagtccccatgcataaaccatttggttttgcaattaaaaacaggtttg

SEQ ID NO: 31197 - DNA, 383 bp, Mus musculus
  source 1..383: mol_type = other DNA
atgtccagggaagttgcggctgggtccaccccggaggtcagtttcctcgggacattgatgatatcattagatccgaaaaagacagctgcaacagctgacgctgttcgttccgcgcgattcagcagcctcccggaaagctggttcggctaagctgatataaactgaaaaacttgaatcctaatttaaaagtttgctcatttttaaaaaagtatcgaaaagtctgcttgagcccgaatgaatcgctgccccaagcccgggcgggcctcgcccaccctgcccgcggcccctctgccctaggcggcccttggcggcgcccctttccggtcagtagaggggcgggaggagggccagcgccaggctcctccccctcggcgcggatgtgc

SEQ ID NO: 31198 - DNA, 358 bp, Mus musculus
  source 1..358: mol_type = other DNA
ccaagcccgggcgggcctcgcccaccctgcccgcggcccctctgccctaggcggcccttggcggcgcccctttccggtcagtagaggggcgggaggagggccagcgccaggctcctccccctcggcgcggatgtgcgtcgcgccacagctgtctgcgaacactgagctgcctggcgccgtcttgatagtttcagaaagaatgcattcccgcaatctgaccgggcaggtcacacttttttgtaaactaaaagctcagctccagggaggacttgtccccaagtgcgagcctggtccagaatttcaggtgttaaaagttcttacacctcccttgcaggtgatcggaagagagtgtggtcac

SEQ ID NO: 31199 - DNA, 379 bp, Mus musculus
  source 1..379: mol_type = other DNA
tttagtaaaagggaaaaatactattgctgtatcactcatgagttgtataaggcatcagtcatctctttggtcccgggcaccgagatgtagatgataataataataatttttttaatgcgcaaaagaaatccttctggagacaagaaagcatgttagtctatacggcttagaacgtatttttaaagactgaaaaagaatatacttctgaaaaggatggcttccctagtaggggcgcctctctaatagatgtgtagggggcctgaggctaggcgccccgggcactggatccagccgcccctgttcccggactgacagtgggtcccgcgccggccagtctcgccgacgccacactgggtttgacgtcacgggccggccccag

SEQ ID NO: 31200 - DNA, 143 bp, Mus musculus
  source 1..143: mol_type = other DNA
ttttagagcactatccttgtactgtgctcaggctctcagtcctgctttgtacaccaggctgcctctgcctccggagtgctgaggactttcaaattggagccagaagtgagatctagataccgctgcacgtgggcacatgcgtg

SEQ ID NO: 31201 - DNA, 405 bp, Mus musculus
  source 1..405: mol_type = other DNA
tcctggaactctggcctcgaactcagagacctatgctctgttcagaactcacccaaaatgtaaatttcttctttttaactaaagaaggcattcattttcctatcacaaatatcatttgaattttatctttgttaagattccaacgttaaccagatttgccacaaattgaggtttcggctaataaaaagaatattaaaaataattactcttagcatagaaaaattactccctttttgagatcacagtaaaatctgtgtgtatgtgtgtgtgtggaggcatacacaaagaaagagctattgtaattcagtttgcttttggattctcagagaaaactctccacatcccagaggggctgggctcagcccttcctccgtcccaggcagtaaatagcatggaaaccaggtt

SEQ ID NO: 31202 - DNA, 402 bp, Mus musculus
  source 1..402: mol_type = other DNA
cagtttctgttaccgtcaggcaaaatggatagactacgtattgtgactagtaagacgcaaactagaactagctatattgctggaagaggggggcagttcccactaattatattatgaagagcattgaacgacacaatgaacaacatgagtttattagctcatttcactcaaactgaatttaatttcgtttttacttttttagatttaagtaaaggaaaacaatcgaatttgaatcatcaacattatcgatgttaacttttccatcagcggggatgttgtcagggaggcgcagactccacctgcgcccagtcactcggcttccggccggcgtccaggctctagagtcgaccgagctcccactgggcggagcctgggccgctcgtactgcctcgccccggcggc

SEQ ID NO: 31203 - DNA, 499 bp, Mus musculus
  source 1..499: mol_type = other DNA
ctgagatactgtctctaaaacaaaaatatgtatcagataatgtacaagaatttttattagttctgttatattggtggcattttggcattaattgaaaagataatacgattacttgttatgttgattacacaattaagtcttcaagggtgaaggtatactgatattcatatatttatataatttactatatgatgtaagcaaatatggaaaaacagcggtcactcctaggtgcgttatgtcatggagagttcttctctccatgaaaaaactcggcgacaatcttgccggtgggtaattacctctactttaccagtagtggccaaagttcctcgtcttggattgtaagcgatcagtgagtgcttgtctgcgaccacttctcgtggagctggagggcttcgcgccgagctggggaagactgcgccggagagggctccaagccggcagtacggcttcggcgctcacgagggacgcaggcggagcgggccggggcgcctgagct

SEQ ID NO: 31204 - DNA, 327 bp, Mus musculus
  source 1..327: mol_type = other DNA
atggagggcatgatgacaatggcaatgtctttctcttccgctgctcccccgtgcagtgtttcaacccgaatcccgtccgggtcccgaggtcccggatggccgttccagtctcaggggatcagaccgcggcctgagctggggccttcttccgccaggagtgagcatgcagctccatccctcctgccttgcggctgcacggcgcaggccgacagcccgacaacgctcgcccgcgagaacatggtggagccgacgggactcagtgcgcgtgcgcgggagctcaggcgccccggcccgctccgcctgcgtccctcgtgagcgccgaagccg

SEQ ID NO: 31205 - DNA, 280 bp, Mus musculus
  source 1..280: mol_type = other DNA
aagttaggacatggtgttgtaataacatagtaacaattttacaattcatagtttgtattctcaccgtatcatgaatgaattctcttttcagagaatgggtcctgcaagaacagccatatttaaacaatttttttttttatctatttacagagggtgataattatcttcaagtctctctgattttgagatcaattaaaatcaacaaaatcacatgctcacagcccaggagtttgagttccagaacaaatatttgtcctgaatttgagcaaagttagtgctc

SEQ ID NO: 31206 - DNA, 381 bp, Mus musculus
  source 1..381: mol_type = other DNA
tttctcaccctatctagatagatggaattgccagagacagagtatgtctttgagacaactgccttttgcactaaacacatagctacattatttgtgcacagggcaaccaataccagagttcatcaattaaatgggacaatgcactgtcaactttagacttcaggtgagctctaaaagctgatctggtacaggcagaggaaacaagttccactgaagtttgttgactgcatgcaggacaaagttcgcttcgctgtgcactcaactagtgggaacccagtagctcctcaagctggaggatggtggtgggaaagctggcctgcggtcaaccttggagcccaggggtgagttgtgggcggagccaaggatgccctctaaactccc

SEQ ID NO: 31207 - DNA, 379 bp, Mus musculus
  source 1..379: mol_type = other DNA
tgtaaacagtgcggccactacgtgcagtgacagcgcaatgttttttatttcttaatcatgacaggtagatagataaatacacaaatgaatgaatgaatgaatgggtgattacataatgtgggtctgaatatcaaccatatagagattgcttaattactttgtcgaatcaggtaagatattaaaaattttgatggaacaacgttcactcaagcctcgtggctggtggactgaaggggagctgcccggaagtcctgggtctaggacgcacaaaggagttctgctgcctaaggcgtccaacgcaaccacaacctgaggctttggggaagggggaaggacaggaccctgaccactcccctggaggtctaagcctctaaaggtg

SEQ ID NO: 31208 - DNA, 45 bp, Mus musculus
  source 1..45: mol_type = other DNA
aggaggcttcgggctttagagctaaagaattctctaatggcgggt

SEQ ID NO: 31209 - DNA, 334 bp, Mus musculus
  source 1..334: mol_type = other DNA
ggtagaccccgcagatcagattgggcggatcttccgacctggtttttcttcccaccctacgggaacctgtcctggccaggtgtcccaccagaagcccagcgagcttcgtcgaatttttgggtgtggtacgggcccaaagaaaacctcttcttctctcccccaagaacagatttttttttttttgagagtcttcatataaaagcacaattaaagtacagacgggacccttggacgggtaaagcacgagattatgctctaggtagaggaaccgccccaggggtcctcgtggcgaggtccgtgctcggctcgagacattttgcgagcattggaaaaa

SEQ ID NO: 31210 - DNA, 336 bp, Mus musculus
  source 1..336: mol_type = other DNA
gtccagggattaaatcatgtatacatatgtgtttgtaacatgtatgtgcatatgtgtgtgatatgtatgtatgtgcgagcgtgtgcacacatgtgtgttgaggaggtgatattcttggacactcaccaatatgtgagccacaatatacataccatattaattcttttgacttttgttttttatctacatgtgaaataaagaacacattgaattatatatgtgcatagaaataaaaattctgtgtatcttaacaatttatatgtgatacaatgtgtaattacgtatagattaaaaagtttttttagagaggttagtgctagtaattacctctagaaa

SEQ ID NO: 31211 - DNA, 656 bp, Mus musculus
  source 1..656: mol_type = other DNA
tgggccactgaaacttttgagttcaaaatcatgcttaacttcataatgagttaaagatcagcctgggattgtgcatgttcatttgtgtatatgaatatgaatatacacacacttacacactcatgcacacacacacacatccatttgaatgatatgtgtcttaccagggagagatctcactcacttaggagatgaaattcatgcttaatttcatgatgagttagacatcagcctagaattcacccatgaatgtatgtgcatgtgtatatagttttgtgtgcatgtgcatgtgtgtctattaatgtacatatacatacacacaaacatatacacgcatcatcgatccatttgtataatatgtaaatttactgggccagtgagacatctcactcaccaggcaaaaacatcaggagttcaaattcataataacttcatgatgagttagagatcagcctctatgtatgtgcatgtgtgtatatttatgtgtgcatgaaaatgtatgtatatatgaatatacatatacatacatacccacacaaacaatgcagagattgagtattcctttgcccaaaagagctctctctctctcaccaggtgaaaatgcttagagtaaggaagaacagcagtaaaaatttatgcttaatttcatgatgagt

SEQ ID NO: 31212 - DNA, 521 bp, Mus musculus
  source 1..521: mol_type = other DNA
ttcatgcttaacttcatgtagagttagagatcaccggtgtgtacatgtgcatataattgtgtgtgcacgtacatgtgtgtatatgatcatccctataaatacacacacatacaaatgataagaatgacactcattgatccatttgaatgatatatgtcttagaaaagtagagggacagtgaatattctctctcaccaggtgagttcaatttcatgcttaacttcatgagcagttagagatcatccttgcctgcatgtatatgcgtgtatattttatgcatatacatacacacacctgatccatcatcctggcattcattgatgtgtgtgtacatgtacatgtgtgaatatgatatacatatacatacacgcacacatacactcatcaatccatttgagtgataagtgacttagagtgaaaatgcttgctagagttaagagtatcaggagttcaaattcatacttatcctcatgagtgtgtatagttgtgtgtgcatgttcatgtctatatttgaatataca

SEQ ID NO: 31213 - DNA, 696 bp, Mus musculus
  source 1..696: mol_type = other DNA
tgttcaagtttatgtttaacttcatgatgcattagagatcagcatgtgtttcattgatgcacaccaaaatgtgcatgtgtgtgtagttgtgtgcatattcacttctctatgtgaatatgcatatacacacatgcagacacaggaatggcactcatatatcctttggaatggtatgtgactcagagctttagagcttatgcagtgctgggccagagctatgtctcattcaaattcatgtttaacttcctgatgagttacagatcagcctgttattgtgtatagataagtttgtctgtacatgcggatatatgaaaagacatatattgacacatattcacacatgcatgcatacagaaacacatggcagtcatccataagttttatatgtgcttagaatttcatagagtgtatataagtcttggagttcagaatcatgcttaacttaatgatcagttagtgatcaaggtatgtacatgcacacataattttgtgtgcatgtacatgtgtgtatatgattatacataacacacacacacacacacaaggtatggcattcatcgatccatttgaatgatatatgtcttagaatgagttcaatttcatgcttaacttcatgagcagttagagatcatcctgcctatgtatgtgcctgtgtgcataagtgcgcgcatgtatatgcgtgtatattttatgcat

SEQ ID NO: 31214 - DNA, 399 bp, Mus musculus
  source 1..399: mol_type = other DNA
aaaactctgtgcattggttttgatggttcaagaagctgaagtatttaaatagtgttactatttaaattctcatactaatctgttcctgtactgcacaacaaaaatgtaattttattaagtgatgctgtacagtttacagcagttcatgtggccctttgtaatgcaaaatggattaaataaaacacttcagcaagaagagaggcactcaggcggctgaggctctggcgtccgcgcttcgcgctgcctgcggcgtcgctccccgcccggtgactgcctgcagcctccgggtcccagtcgcggcagagcgacaaggagagcgctcgcggaacgcaaccaggcgcgcgtccctgagccggcgtggcgagcgccctctggccggtgccgccaccggagtaccct

SEQ ID NO: 31215 - DNA, 173 bp, Mus musculus
  source 1..173: mol_type = other DNA
tgactcagaaaaaaagctccccttgggtcctctagaagggctcattcataaggtcctatggctgaattatttcacagctaggaaaatgaaataaagctcagacagaaaagctttcgctttctgttctttcctgggaaaggaaccacagtcgttggaaattcctcaggtctttg

SEQ ID NO: 31216 - DNA, 309 bp, Mus musculus
  source 1..309: mol_type = other DNA
aggtaaggatggtatagttagcataagtatttattttcattccttcccaacttaagtccctgggacctacacagtgtcgctatgggtctggaactaatagaactatatcattggtacaggcaggaagccacacttcctgatgaagaagtgagttctagggctgtcactgcagagtctacctccagtcaaagccaggtacacagcgctgcttgctgcactcccacgccgtgcagactttccaccacagaggcctggagcggaataggcttagtcagagaagtccactccaaccatccaggctaatggcca

SEQ ID NO: 31217 - DNA, 402 bp, Mus musculus
  source 1..402: mol_type = other DNA
cagctactgctgctgcagtcccagccctgtggtctccacatcagaggctcaggtagatctctgagtcctaggctagcctggcctccatagcccaaggatatcctggcctccaagtttctttaccgacattgtgataaatgtttcttccaaaactggaagtgcccatcagtttaaagacattactgtatttgcaaatgagcttacagagttccaagggatagtctgaccagctatcaaaaaattatcttaaaaagtatttactcattattatagctgtttagaggacagctctatggagttgactctctatctacaataacatgggaataagatgccagttcatcttggattatgattatggaatttaaaggcttacaaagttctaacctgcctatgcccagc

SEQ ID NO: 31218 - DNA, 294 bp, Mus musculus
  source 1..294: mol_type = other DNA
ggaatatggcccaagcactgagtgatgtttcccggggattcagggttaccaggaggcagctctgacctgcgtcaggtgcatggtgttggggctttacatagctctagctcacttgcgcccttagggaataaacttagggactgggttgcaggaacagagcgtgctgctctcgtccacccgcagggggcggcagcaggctgtctcttggccttgcccacccttctctccacgtgaaagggggctgggacgtgcggcccgccccgaggctgacgcgccgcgctaccggtcagatcg

SEQ ID NO: 31219 - DNA, 317 bp, Mus musculus
  source 1..317: mol_type = other DNA
ccatttaacagaaattaactttctgaattgggctcaagcggctggcctagacagtttggttagttagtgaaagccttaattaagttaaaagagagattatcaaactgtgggtgaggatctgttccagtctctggagaaacaaatcattcattcataaagtaatttaccactctaggctcggggcgggaccaggtcgcccaccccggcctccgggtcgccgcccgcaagctcccagagctcacgggtgacgcgactcccgcgcttcctgctccgcggcggagcctcctccgcgccgtgaccccatcgcccgcaggccg

SEQ ID NO: 31220 - DNA, 428 bp, Mus musculus
  source 1..428: mol_type = other DNA
attgactcactctcttgcaactactagattctgagtgtaaatcattgcaataaattcatttaatatatatagacagtctataggtcctctgactatagagaacccaattcaccaccaccaccaccctttgcgggggggggggggggttgttgtctctgtctctgcctctcaagggctgagattccagctatagcttgaaataatttttacatgcaaccaaaaatatggggaaaacatatttacacaaagccctggtttctccaccatttagtatatacctagtaggggattcggctcctactccaaggttctcgaaaccttgtgccaatggcgccatctcttggccggcagagagcccgtcagcagggtgcagtgcagccagtgcagctttgcttccgcgagtcacacgcaggcgcagacgtggactc

SEQ ID NO: 31221 - DNA, 522 bp, Mus musculus
  source 1..522: mol_type = other DNA
gcttatttcaaaaatatattggatgttttatcctaagatcctcagactcttatgagttcaaagtgcctgtgacactctgtaacactcctgtctataaatatactgattatatgctggcgtgcatttttccctcaagggaggaaattaagatttcaccagatcttatttgcaaaacaaaacaaagggttctttctgaaaggcctcctgggagaagctagacttaaaatcttccattgcagctgtaaacacatctggacaatagtctgttttctgcatttgtgaatcccacatggaactatgaatcgtgcatcagagttatttaaaaccaccgtgcatggagtgaaccaataccgaggtgtttgcttcctttgagcacacagcacagccttgaactcagtgacactcctaagagggctctagggtcgttagatgctaaagtcttctgggggagaatccccctagaggactgtgcttcctcctgccgcggcagggaatccccgcatcctgctgagcagatcagcc

SEQ ID NO: 31222 - DNA, 395 bp, Mus musculus
  source 1..395: mol_type = other DNA
tctccaggtttttcattgactataagagactggaataagactctttagggaagagggtcaagtatagagctcactgttgtccaccatgcatgggtgacttcaatccattatggtgccagattgtatttagggacctatagactgaaaggcaggcgtgtctgacttaaaattccagtaaagttttttttgtttgtttgttttttgtttttaattaatccacacacttagaagggatgtctttcttagactctgaagagttgtgtattgactaaagaaattatatgtgaggtacaaagatgaataatgtaccttccttctttcttcctctttcttgagttgtccaaggcctggccactgccagcaccactgcaggcaggcagccaggagcagctgtg

SEQ ID NO: 31223 - DNA, 363 bp, Mus musculus
  source 1..363: mol_type = other DNA
gacttaaaattccagtaaagttttttttgtttgtttgttttttgtttttaattaatccacacacttagaagggatgtctttcttagactctgaagagttgtgtattgactaaagaaattatatgtgaggtacaaagatgaataatgtaccttccttctttcttcctctttcttgagttgtccaaggcctggccactgccagcaccactgcaggcaggcagccaggagcagctgtgctggggcgatagagggaaactctgaaagttgaaattctacgggtgagggcccccgcgcgcgcttcgggggacaggagcagcccactggggactgcaggctgccctgagtcacagatctgtcaccactt

SEQ ID NO: 31224 - DNA, 354 bp, Mus musculus
  source 1..354: mol_type = other DNA
cgcatcacacacgcgtactcgtcagtggggcctcgggctcccaggggcaccgcccagtgtaccgcgaagtcctgcacgcgggacttctggcctcgcatcccagatgtggtctgctctccaccggacagcttcaatgtttgctgggctgctccggtggtagctgcacaggcagtcgagagcccctgaggatgtctgccggactgacagccgcatccttcggctgaccaccgcccgctgctgtctcctgggcccccgcggggacccagggagctctaaggaactctgggaaagtttccttcgcctcctccgcggtggcgaaagcacagacggggcgtggccagagtccgtcttggc

SEQ ID NO: 31225 - DNA, 192 bp, Mus musculus
  source 1..192: mol_type = other DNA
agtcagtgagtgctcttaaccactgcactcttaagagcacaggagcccttgcctatggactgtcatacagaaatactgcatgtcaataggtatcccaaaggaacttactgtaattctgagaatcagcaacgctggaagcttcccgggtggttgtcagacattcctctctgagacaaacatgtacaatcagac

SEQ ID NO: 31226 - DNA, 368 bp, Mus musculus
  source 1..368: mol_type = other DNA
gactctggccacgccccgtctgtgctttcgccaccgcggaggaggcgaaggaaactttcccagagttccttagagctccctgggtccccgcgggggcccaggagacagcagcgggcggtggtcagccgaaggatgcggctgtcagtccggcagacatcctcaggggctctcgactgcctgtgcagctaccaccggagcagcccagcaaacattgaagctgtccggtggagagcagaccacatctgggatgcgaggccagaagtcccgcgtgcaggacttcgcggtacactgggcggtgcccctgggagcccgaggccccactgacgagtacgcgtgtgtgatgcgagcacagatctgctctaagactg

SEQ ID NO: 31227 - DNA, 346 bp, Mus musculus
  source 1..346: mol_type = other DNA
tagacaaaaagaaattgttttaaacccttaaccaccatcacctgttcaggtgagggggtgggagggcttgccagcggcagaggatctgtcttctcaggtgctgccccttccggagcctcagggagcggccaagggatgcgggtctgcagagagcatccgacctccttctgcaggcaccgcgggcgcggccagcgctagggccccacccccgaggccaagacccctgcgcgggagaccccacaaggaagttttcctatggcggcccggcccaggaccccggcggcgacaccacccaggcgatgccgcgccaagacggactctggccacgccccgtctgtgctttcgc

SEQ ID NO: 31228 - DNA, 505 bp, Mus musculus
  source 1..505: mol_type = other DNA
tctctctcacacacacacacacgtgtgtgtgtgtatatatatatatatatatatatatatatatatatatatatatatttaacacagccttctcttgaacttgttaggttagcccaggctgtccaacaaaagataaacagtgttgggatttcaggtatgtgtctgtcccacacttcttttacacttaaattctgtgtgacctcatatgtcctgaaaagtttgtatttataaaaaaccatttatacacacagtggcccaagccctgcttttgaaaactgttaactgcagcatttctgactttgcagactacaggatttttagagggttcttacattccattatcaaatcccatttactgagatttaccctcaaaggtagaggtccataaaatttagatggtgcccggtcctagaccgcaagctccgtcctgcagcctgagaactagccgctagagggcgcgaagagcgcgccggccccagccaggggctggagagggtcgagcgcg

SEQ ID NO: 31229 - DNA, 448 bp, Mus musculus
  source 1..448: mol_type = other DNA
agatccttttacacattttttttcttttatacctcacaatatgtgtaatggtgataagtgtatggcaattactaatttagtttcatgactcagagtccgaaagtatgaaatactgcattcatttgccctttccattcctaattgtcaaagccaaccaatgaaaattcttttttaaatgccacaaatagttttcatactaagtataatggaatgttaatccttgaataaaacctgggtctttaatccatacctgtagaggtattttaaatacacaaatgcatttacaggtgtaactagctaatgacttttataattctagcttacataatattctagagaaatcaattttttaaaaaaggttaagaaaaaaagcgtttagagactctctctccattttttctcccagccctccgcgggggcggggctaaaggaagccggaagtcaggcc

SEQ ID NO: 31230 - DNA, 226 bp, Mus musculus
  source 1..226: mol_type = other DNA
tacctttaaacaagtaaaactctatttttaaacgttaagcagaaacagtttaactgtcttccttagaaatgactgtcttcctcggatttcagattaaaatgaaatgggagttcaatttccctgtgttaattccttggggatttcacatcagctgagcgagcagtttagctgcaaacttccagctggtgggagttcagcctggacttaaaatcctccctgtcagagc

SEQ ID NO: 31231 - DNA, 456 bp, Mus musculus
  source 1..456: mol_type = other DNA
tcagagtaatgccaaactctgtgtaagcggctcccagccgcggacctgcgaattgccattgctccgcgcatctcaggggcctcccgaccccaagcaaccgcagccctctagggttggggggtgcgttttgtgagctgctccggacgagcgcagcaggcggcagctggctttgccctccgggtggccgctccggcacccgccgcagccacaggtgcgaaggggctggcaggaggcgagagggcgccctgagcacccctccccccaacccggacttcagttcaagtcacttggcgccccagctccctccctagccgcagcctcagcgggggggagcaggagccggtcaagagcgaccggcgcgcgcccgcccagggttcggctctgaagactcggcccgcgctgagccggctcgtgggcagcaggaggcgcctgatcgccgccggggcgctgggggtg

SEQ ID NO: 31232 - DNA, 369 bp, Mus musculus
  source 1..369: mol_type = other DNA
tgtacctaatgccagaggaataattctggaatgatttcctatttaatagtgtgaaattgtcactaagattaagttttttactgggtcgtttatctatctatctatctatctatctatctatctatctatccatccattctatttgaagaaagtgggagagtcacggttcatgggtgtaaacaccaactcagacttctgacatagtcgtggtttactgttagcatctaaccctaagggagaaagtttcgggaggtctgcgacagacttgtggatttctcaggacggaactccatcagctagcttactgagcatgcgcagaatctagatcacatgcacttgctgccacagctgggagttctcctaatttgg

SEQ ID NO: 31233 - DNA, 349 bp, Mus musculus
  source 1..349: mol_type = other DNA
ctttgagttactttaaaaatacaactatttttttctttgacagtttcatatatgtatgtcatatattttgattatattcataacaaaacaaaaaagttcgtactcttttcatggttgcctagagataaagaaatcacttcttttgcagaaattctatttctagcctcctaagcaaggattccttcagtggatgattccgtactgtttcaaaggttaagcaaataatgattaagttgtgcataacttaaggtagattttgttgaacagtactagagatctaagatcattgacattcttcaggaaggagcaaaataacttaagccttcttggaggctgcaagcagccctca

SEQ ID NO: 31234 - DNA, 212 bp, Mus musculus
  source 1..212: mol_type = other DNA
ttatagaagcccatttgttttctaatgagagacaaggatatattatgtgaagaagaaaatctgttttcaataaaaagaaacagcattaaataggatgagtcctattttcatttatagcaggcatcctccctattatgcatatagatatggaattgcttgatcaggtcaactgtgttctaatcagtaatttatctctcactcccccgggctcc

SEQ ID NO: 31235 - DNA, 260 bp, Mus musculus
  source 1..260: mol_type = other DNA
ttctaaggagaaacggttattctcaaagttggtttaaaacttgagcttagcgcatgagtccagaggcaggttgaactgagtccgttagatcagggatgaccacgtcaaaagccctctgcaaaggtcttgagccagatatcttgggcagtcccacttggcccagacccaaggagagagtcgggaaaggcctagtaacaggcctacagccctggaggaaggctcgaggggagctccctcccccaccccccttacagtgtagc

SEQ ID NO: 31236 - DNA, 705 bp, Mus musculus
  source 1..705: mol_type = other DNA
aaatctgtttttctgaaaaacatttggtaaacaatggtaaacacttcaggttttgagagctatagactcgcagtcaccactaatacaaattactggacacaaagatgtccaataaaacagttgttttaaattgcccttgaagatctcttggtaatttggtgtcaactgtccacggaacgtcgtgggaaggtgccatgcaatgctaccaagttcctggcagctttcaggcacgtgggaggatccaactgagcaacccagtttgcaaactttttgatcagggcctcagctacatagcagagtcgcaggggccaagcgcgcatcagcgcggagttgagcgctcataccccaaccttcaggtgaccccgcgtggcggcggcggcagcagtaggcagaggcagcggcggctgcagcgaccagagcccgcagcggctccgagcgcctccgggaggacaagcgacgagcttggagaatcgtcatccgctagctgtccgccagcttcgccagcttcggcggccggggctggcttggaagaagcgagcgagcccgaacgcggcttcttcggctcggtgcccagcaacactgttgcaggctgggctctgggcagcccccagagtgcgggcccgcgccaccgcctttgaacgctgggggtgtgcgtggcagcggccgcggtggcggcggcggcgaaggcggtgaccggagcggcga

SEQ ID NO: 31237 - DNA, 574 bp, Mus musculus
  source 1..574: mol_type = other DNA
tcattataagcaagatgcctgaaaagtactaatatgcatacttcagttgacaaacagtatcaagtcagtacttgatagaaatgtaggcatacacaaacttctaaattcccagactggtggagtcaggaatttgggggttgaatttcagtaaactgactctaggcttgttaacaccatggctggatttcctgtcagtaccggagttgcttctccagaaactcgggagagcgagccacctcgggtgcactcgctctatctggaggctctccagcggggcacccactgccagggcgcccagtgcggacagctctcccgcgggagcgcgccgcgtgacactgcctggaagccatgaccccggctggcccaccccggggctagggccctgagcgcgcgctcccgagaggcggcgccggggcggggcgcgcggccgggggcgcgctcctccccctcgcgggaggccgggcaggcggcgccgaccccccgcgcgtcgcacatggagcgctggaccgaggcggcggccgcgggcagcggcacttcagtggcgcgctcagccggcccctcccgctcctgtgcg

SEQ ID NO: 31238 - DNA, 464 bp, Mus musculus
  source 1..464: mol_type = other DNA
gaccgttatagggctatttaaaaaaccctttaagtaaccttacctaaaacattctgccacaatctttggcgatagagcatataatcaatctgcttacccagcggcagatggcttcgtcgtctgttggagtcggcgcgggctcgcagtctcggggggcacccacggcaacatcctggtcgctgcgtgccgaggtgtccccggggactgcccctcgaccccgcggcactctaggggtgacgacacagcaagggcgcctgcctgccagtgcagggtcccttcacccaccccagcaacagaggcggcggcggcggcaacagccgagaagcggaacaggcccccgcgcggggcgtgtcaacactgcccgctccgggtctggccagagcccgccgcctccgccgaggcccacgcgatgagccgccgctccatgtccccgggcgtctcgggaggacgaggtccttcaggcg

SEQ ID NO: 31239 - DNA, 474 bp, Mus musculus
  source 1..474: mol_type = other DNA
ttctctcattataagcaagatgcctgaaaagtactaatatgcatacttcagttgacaaacagtatcaagtcagtacttgatagaaatgtaggcatacacaaacttctaaattcccagactggtggagtcaggaatttgggggttgaatttcagtaaactgactctaggcttgttaacaccatggctggatttcctgtcagtaccggagttgcttctccagaaactcgggagagcgagccacctcgggtgcactcgctctatctggaggctctccagcggggcacccactgccagggcgcccagtgcggacagctctcccgcgggagcgcgccgcgtgacactgcctggaagccatgaccccggctggcccaccccggggctagggccctgagcgcgcgctcccgagaggcggcgccggggcggggcgcgcggccgggggcgcgctcctccccctcgcgggaggccgggcaggcg

SEQ ID NO: 31240 - DNA, 381 bp, Mus musculus
  source 1..381: mol_type = other DNA
tgttatacaaatcttgttgacatgtttataagctttaagggtccctatttctaactttacgtaatatttccaagagatgattctttagattctcagggactcagtgactgcacgtttagtcagtcggagcccacacccaggaaggctccctctgatctcaggctggggaatgagccagcgttacctcagcctctcgagaggctgtgcgcctcgacacgggtaaattaagggtttggctggacccagaggctcttagtcggcctcggtgcgcctgaaggacctcgtcctcccgagacgcccggggacatggagcggcggctcatcgcgtgggcctcggcggaggcggcgggctctggccagacccggagcgggcagtgttga

SEQ ID NO: 31241 - DNA, 431 bp, Mus musculus
  source 1..431: mol_type = other DNA
ccattgaagaaagttctgccttcatgagattttaggaagatagacattattaatattttagtaaaacatgtggtcattaattctttggaaaagtgttgattaaacacttgacgcctaagggcctcttttggggaaaagagtagaatgatgcaagctttgtttacttttgaaagataatgcatcagatctgcacttcttctaacattctgaaggaaataaacaatattaaacatttctcattgaaaataaataataccctgtttgatttgctctgatatttgattctgtatgaaggtttacatataaacattacacgtgtgatttgacaaactgaaacattttttaggttcttatttatgagaacagcaacaaaagagaaactctgctgtattgttaggaatccatgcgagacctataatctataaaagctt

SEQ ID NO: 31242 - DNA, 324 bp, Mus musculus
  source 1..324: mol_type = other DNA
tcctttctcaaggcaaatgcaatgtaatttttataaaggaagtgtcttccatggatacatatgcatcttgtgtatttcatgtgacttgtaaacttcttttctcagaacttggatctctgcatgagtttacttacatgtaaaaacgggaatgtacaggtgtagtataataaataaatcttttaaaactctaggataacattattctagtggttctatatcataaggactatctattttataaattactcatgaaaatgtaccagtagtcacttctgtttctttaagagaactatgactgttaactcagatcattgaaccatattg

SEQ ID NO: 31243 - DNA, 358 bp, Mus musculus
  source 1..358: mol_type = other DNA
ttacaaatatccatttctaaatattcttaattcttgttgaacgtctggaaaaaaaaaagactcaagccaggctttcttttgcaagagagagagagaggtcttccctttttcaaactctgaggactgtaatggttgaggcctgctggctttctaaggaaagctaaattaacttctgtcattttcaaaactaccatacctttgatcctttcctcgggctctaagcctgagcaggaagagcttctgacccagcacctgtggagagctcagcagggctgcctctccctggaagcaaagttgtgacaggatatctctcaattggagggttttcctaaattcaggagtcctttaaaagggacag

SEQ ID NO: 31244 - DNA, 562 bp, Mus musculus
  source 1..562: mol_type = other DNA
ttctcgaagaaccagtcctggactaattagctatattgcataagtagtgaactattatttctttaatggccttttaacctactggagggaccaccacaggtgatgggcacatgcctttagggagtttggtccaacatcctgtagtctaaagcccaaagcctcttggagtttgacccaccatgagaaaaagaaaaggtcaagtccctttctttattgaaccctggttatctcatgggttgtacccagtttccacacacaatgggtgacaggttagaagtgcgttctttcatcaagtacttttagtttaaaccattatttataaaatccttgcatcttttaaatatttgcaagctgtgaaacagttttaaagggtcaatctttctgtcaactcttggtttaagcctaggttaaacaatgatctctttcactttgcaaggtagaattttattttagattctgtccaaggcaaatgactgtagataatttttaaaatactgtgctaaatgttgatataaaagaataattcctcaaccacatttatttgattatagaaatgtctctg

SEQ ID NO: 31245 - DNA, 301 bp, Mus musculus
  source 1..301: mol_type = other DNA
aatactagaacggaaaataattccttctccttgtttttaattgaaagctcacaccaagaatttcggggtccttaaaaacctgcttatttttttttcctcctctggactccaggaagaggaggtgaactgagcagctgggccagttacctccctagggagctgcgactggctggctttcgtggcttcgaaaaggcgacgggccgcagctgagtcggagcccacgcggcccgcgcctcccgcgaagaacttttcggagtggcggcgtgctcccggagcgccctcctcctggcggggaccttcc

SEQ ID NO: 31246 - DNA, 309 bp, Mus musculus
  source 1..309: mol_type = other DNA
gattgtggaaagttattacaactcttggaacttacataaagacttggtgtgtcagttatatatattttaaagccagtgtgaaaacttaaaagattatgttcaagcataaaacatcccactgactttggttagttacatcaagactcttgttctctaaagcacgttaacagaagcttctgagtacccacggtcttgacataaataagtctttaaaaaagaaaaaaaagtgctacttgcaataaatggaaatctcccttatttcagaaaaagctccaccctcaggggaggaggaagcgactttctgttccg

SEQ ID NO: 31247 - DNA, 374 bp, Mus musculus
  source 1..374: mol_type = other DNA
tcagccctggctgtcctggactctgtagaacaggctggccttgaattcaagaaatccgcgtggacatttaccttgttacaagcggcccgccaggtggcccagtttcaactggtaaggattttgagattaaccttcagaattaagaatcacctccgcttcagtcagaggaccgcgccagctgaggttcctcaggcggtcagcagcgagggacgcggtggccaggcctcggggatgaccgccgcgcgcagtgtacagggaggacccgccacgtcccaggcgcccgctgacgtcagcgcgccgacgtcacgtgccgaccttccggcgatgggtggtcccgaggcggggcgggggcggggctcgtggccagcccaggc

SEQ ID NO: 31248 - DNA, 441 bp, Mus musculus
  source 1..441: mol_type = other DNA
ccttttaagtgctaaaattaaaggcatgtgctactaccacgccatgtcacatgctttatttgtaaaagttaattaaggtgtatgggctatgtgaattcaaattactatactcttagagtttgggcaagcctagtctaggaaatacacatattcatggtagaaatgtgtttagtatgtttgcaacctgggaggaacataattttattcagtggttctagtccatatattgccccagtacaggggaatatgtaattgaagaaaatacatttaaaaaaaaaagaaagtccatatattagttacaactttattattttgactttttctttcagtagataacaaggtcataaaactatacacagcgttataaacagccatgttcagctagctgcaattactcaagttaaatattttctaaagtccttcctctgaaagattaagtta

SEQ ID NO: 31249 - DNA, 432 bp, Mus musculus
  source 1..432: mol_type = other DNA
agtactagcccaggcagtgctccagaacatgtattcaaggatgcattgtctttgctttctatttagccccattaaaagatggctaagtgtatgcaaattaaattaaattaaatgtaagcggataccctataggaaattcaatggcggtggcggcctcaggaccctgcagcccagagccacctccacctccctctgtgcgggtctggggtaggactcccccgccacccaacggttgccagaccagccctcagtgagggaagatagtgggcgctccctggggggcctcatccctctctacccgcaggctgacacccaaaagccacggaagcctggagggtgcaggcggcatcggttcctctcacccccactcgcaccagtcctcgggtgtttggggccgcaagccgccttccctccccaaagtgtagagctgga

SEQ ID NO: 31250 - DNA, 384 bp, Mus musculus
  source 1..384: mol_type = other DNA
tatgatttgaaaggaaatacactttatttaatcatatctttgctataaaattacctgaaattaagtttgattaatgaaatttatgatggaaataatttcaacccaaattgggcacaatcattcaaattcttgttaaaccaatgctcctcagttacctaggaacaatgaacttggagacactggctaatgacagctgcatgtcatcaaatccagtgcttatgcaataatgatgtctatttgtagaactaattgaacaacgatgtcaattatatcataacttagacccttgtaatagtcttacctacaaatataatattctctgaggtgagccgctgtgacagactctttcctgacacctgtcactttaacggctgtgtcaaaagt

SEQ ID NO: 31251 - DNA, 399 bp, Mus musculus
  source 1..399: mol_type = other DNA
cacaacttatatacagtgtttggccctgcctaatgaggtcactcagaaggacttcctgaaggtggagaagtcaacctccttagtgtactgtcagcatctttacaagaatttcttatctagattttctgtatagacaatactatttgtaccagcatcattcagaatgcaagtgcacacacagagggaaggccccagtgagccctgccccaatgagccctgcacctcctaggcaacttcactagacactagcaaaattagaaaccaatacttaccatcttagctagatttttattgctatgaaggactatcttacagttttgctgggcctagaattctacaccttgatcagaaggcagcctgtagaaaactgaattagtttcacactgggcatttatggcc

SEQ ID NO: 31252 - DNA, 242 bp, Mus musculus
  source 1..242: mol_type = other DNA
taaccccgatgttattattaaaacggagaaccttgctgatttcgcagatctttgtggtacttaattgcaaaagaatattctgaatggctcttcgcaatcttgaccagtgtgcttgacgcccacctgggagccccggactgctgtggccgtgggtgtcggctccccaggcctcttggcctgcgcggcgacggcggcggcggcggcggcggcgggggagcgaggcgagtgcttgtgagtcaccg

SEQ ID NO: 31253 - DNA, 343 bp, Mus musculus
  source 1..343: mol_type = other DNA
aataataatgcttaaatctgtatttttgcccagagctaaaaatctcttttctcaagtgtgaaactgtcatccagtctaattcatagaacaaattcaagttttaatacactattagattctaaaatctagaaaaatttcatcatatcaagaagaaaccatgaacacatatatcttgtcagattgtaaaagcttggtggcctgcctacaattccagttgtgggagagatctcatcttagtaaataagatagattcaacttcaggcctttatgtttgtggccacacaggaacacatgactgtttaccagtgatatcataaagtatgttgtaacaaagtcctctcaa

SEQ ID NO: 31254 - DNA, 503 bp, Mus musculus
  source 1..503: mol_type = other DNA
tttggtctgctgaagatacagtaagtccctggaaagggactcctctggttccgttctaaaaaaaaaaaaaaatcacaagtttgatttttatggatgtgtatcatttcatattcatgacatcagcaaatcacatcatgatcagatttaaacgtggtcaggaagagaaaatttggcttttaattttgtgattatagagtaaaaataaagtctgctaacttaggaaaccttagttttcaaatccagataccataaatgctttggctaaagttgttctacaacatttcgattgttttgtttgtttttaaaaacacgtggcaaaggacatattatggaaaatgcacacttggactaagtaatgatttgctgagacaacaatataatatactttccttgaagaaagattttgtttttatttcaaagcaaactatttggtgaggtggtacaaaaatcaaaaaaaccaaaaaaacccccttcagggtatttctaagttttcttgaaaagaa

SEQ ID NO: 31255 - DNA, 622 bp, Mus musculus
  source 1..622: mol_type = other DNA
acatttttttggtagcttaaaaactactcaatatctagctaattaatctgctaacattggtctaatctaatctatattttatttgtgtatctcatatttctccaatttaaatgacatcacatttgaaaaggtaaatttggagaatcgagctaagattagaggaatcctcaatctaaactgggacgttaacctttggttagcccaaacacaggctttttgcctgtctgtagcgcggccaactgcaggaagccatgcttcattacacccttcatggaagctggcacccgcgggccagttctcgaggcacaggccttcaggtaggttcccggcgccacgagacgcccccgggggcgcctctcagcgaccccggcccccccgccccgccgcggcctcttcctcatgcgcgcccggggcccgcgaggcgacggccgcccaacgtcccggccctcgtgcgccccagagccctccggtagactcactccggccgcgctgagcagccgactccgctcgtcccccacctccgcacacctcggcgccgccgagcggtgcgggggaggggaggggccaggggacgcggcggcgcgcacgcaggcctcgcctctctgggccgcctccctcacgc

SEQ ID NO: 31256 - DNA, 325 bp, Mus musculus
  source 1..325: mol_type = other DNA
cgccgccccaacccttccgcagaatccgggggaggaaacggggtggctcctctccccgcctccctgacgagggtgaggccgacctgcaaactcctcggcagccccagccttccgcgcgggcccgccggcctctggcggcccgactcgcggccgccggcccgagggcctgcgccgccgcccggccgcccgctcgcctcccccaggaggcttaagataaaaaaggcattcgttcacggcacagtgtagttatagttaaacaagggggaagtctttttttccccccggaaggagacaccctggggccgaggctcctgggtgctcccac

SEQ ID NO: 31257 - DNA, 263 bp, Mus musculus
  source 1..263: mol_type = other DNA
attggagtcagtgaaatagatatattattgtagtacagcactcatctaggtgctatgtcagttttttacattttattttgatttaataaaagtttttattattaatttattttgtaccatgagatacacaggcactgtttgtttgtttgtttgtttatttatttatttacgcatacacattgggcgtcttttaaaatagttacagtgtagcccaggctcatggatttctcaaatgctgaaatgctggggtatagatctggctt

SEQ ID NO: 31258 - DNA, 473 bp, Mus musculus
  source 1..473: mol_type = other DNA
aataaaaatagaattcctataggctactttatttactatagcagcagaactggagtcaatctagttgtccatcaacagatgatggataatatttggtatatgatatatatgtaccataattgagatattcatctctgaagaaaactgaaatcacaaatttttcaggaaaatggatggacttaaaatgcatatgaaagaaaacctatgttctctctgtggaatctatgtattcacatatgtaaacacatgtgcgcgtaaaatataaaatgtgactcttctattttgaatggctactcttaagtatatagaagttaattgagttagtcattttttgctgttttgaaaatgatagtttttaaaaattcctgaaatatagtcaagtctttgtagaccaggctggcctcgaactcagaaatccgcctgcctctgcttcctgagttctgggatcaaaggcgtcggctgttaacaggttt

SEQ ID NO: 31259 - DNA, 419 bp, Mus musculus
  source 1..419: mol_type = other DNA
cattgggtaaacaaaatttgttgttgccatattttctgacagtttcactcattgaataaacaaacatttgctttaatgtttgtatgtacatgtatgtgcctgcctatgtgtatgtgcacatgcacaggtgcctgtggaaaagtcaatactaggtccaagattagttttactttaaggaaataaacttcagacttaaaagaatattttaaattttatttatatgtatgtgcagatctcctggaaattagaggctgcttatttgcatggactatatccgcaaatcttaattcatatttagaagtataatttttttcttgggattctttcttggcgctgaacgtgcagctgctcgccacggaaagctgttctctgaggccagaatccagagcgcctggcgttcgaggcctgggataggctga

SEQ ID NO: 31260 - DNA, 631 bp, Mus musculus
  source 1..631: mol_type = other DNA
aaatgcctaatgtgtcttacttatggggttttcttaactagaaagttaaactttatacaggatttgtctttgaagttatgagtcgctaaagaagtaattcatttatactaaagatcgtatttatttacgaagactctattgagtaattaaagccacgaaaggtatttattcgcagtagcatataaaattttttaataatcctgtcaaatatgttcatgaataatttattaatctcccaattgttaactaccgggcgtgcacacacccgcctgtgtcccaaggtaaaactggtatattcagcgctgcccagcttctggccacactcgcggcggcggggttcccgcgcctccctgcaccaggcccagtggggacagagctggtgcggtcccaggtgagcgccaagcgggaccaatgggcgtccgcgctcgccgcggccgaggccagcgcctcccagaccgtgcgagaggccggcgcgtcccgcccgaggcccgcagggcggctgagacgagaggcccagccgccgcccgagccgaaccgtcccgagccgtcgccgaacctccccgagccgccccgccgcgggtgcgcgcgcccgatcagctgggcgcgcgccccgagtcacgtggtgtgcgtg

SEQ ID NO: 31261 - DNA, 551 bp, Mus musculus
  source 1..551: mol_type = other DNA
ttttgaagtgattcaattttgacactttttttacacatgtgaaatggttaagagggagactcttaagcatctggattttccaagcacatctgccctgcgtgggctcggacgcctgccttgcccgggaaaggtgtgcggccgggccgtgctcgctgcccggcccgcccgttacctgcgcccggcccgcccgaccccgcgagcggagccagcccggccgctgcccgcgcgcgcctcttcccggccgccagcgggcggggcggccgctgttgtttccgcgggcccgatccggcgcaggttcggcagggccgagccggggcagcggccgggcgcccccggcggcgggccccgcggacgtgtgcgccagaaggggggcggggcggcgtgcggggccgagcgggccgcgccgggagagcggcgtgtggcgctgtggagaaatgcctccgtcgcggccccggcgcgctgcgcggggaggggagggggctgggcgcgcggctcgcggcgcgctgcgaggggagggggcggccacgggcccgactacacccgcccttaag

SEQ ID NO: 31262 - DNA, 636 bp, Mus musculus
  source 1..636: mol_type = other DNA
cccgcgcgcgcctcttcccggccgccagcgggcggggcggccgctgttgtttccgcgggcccgatccggcgcaggttcggcagggccgagccggggcagcggccgggcgcccccggcggcgggccccgcggacgtgtgcgccagaaggggggcggggcggcgtgcggggccgagcgggccgcgccgggagagcggcgtgtggcgctgtggagaaatgcctccgtcgcggccccggcgcgctgcgcggggaggggagggggctgggcgcgcggctcgcggcgcgctgcgaggggagggggcggccacgggcccgactacacccgcccttaagtggcgagggagccccgcgcaggcttagcaacacctcccggcccccggctcggcccctctgcgcgccctcccccgagcgcggccgggaggcggcggctgcgccgaggaggaggagaggccccgaggaggcggcggcggaggccgcgcggaggcggaggaggccgcgcgggaggaggaggccgcagcgcgcgagcaggaggccggcgggggagcggcatgagcggagcgcggcggccgtggctgctctcggccgcgctcggtgcccattgacagcggcggcggcggctcgctccaagatggccgctt

SEQ ID NO: 31263 - DNA, 417 bp, Mus musculus
  source 1..417: mol_type = other DNA
gtgatgctagttgtccatttgacacctggtgaaatggtagtttcagagagagaaatatttaaaattgacacctgtcactgaaacatttgacggtaaactgtagtgcttaaatttgagagctccatttatgtgagctggtcttttcagataaaaagaaatgtctcttttggaacccgaatttaaaagaaattattttttagaagtcatattgaaatatagcattagaaaaacctgcaagatggatatttatcatattattttctttcgtaattcagtgtattctccaggaattcggaaatcagagatccggggacacgccgggccaacgcgtctatcttagcccgctcgcgctgcagtcgcgctgagtcctcccgggagactctggacaggacggctgcgttccgattccgactggtt

SEQ ID NO: 31264 - DNA, 715 bp, Mus musculus
  source 1..715: mol_type = other DNA
caggttcacctgcccacccgctcagggcaggagggcccatcggtcccagacaagtggagcgatcgctcggactgggccctgagcggttccccgccaggactgatagctgagacggtcggacagcgagcaccgaccgggcaccctccctgggttccaaagggagcgcaagcgccgtcgtggggttaggggtaccccaagagcgagggcccgggaccgaccgagctagccggctagaggtccccgccctgccaccgctgcagcaggaggagcagagccggacgctgagcagcgggtcgctggcccggaacagcttcactttctgcgccaggacggaggaccccagtgccaggggtcgccatggtcgcagtctcggtcccctccaccgccgcgccgccgaggccggggacccgccctccctacacgccagcccggggaggcagctgcatcccccggggcggccgccgctgcgcgcctgctccagccccgctccgcccgcgctcagtcctgggcgctcgctccgcccgctccgcgcgctcggccgcttaggctgcagctgcgctcgcctcgcgcccccgccggctcccgcccgtcgcggctcggcgcacagccctcggctggtccaggcggcgggcggcttccgcgttgggcgctagcgtcatgacgcagaggcgggcggggcagcggcgccgacgggcggggcgggtgcggatgcgga

SEQ ID NO: 31265 - DNA, 516 bp, Mus musculus
  source 1..516: mol_type = other DNA
agactttcaggaatgacattctagtatccgatagcgcggggactccctggcagacagtccaaggtcctttccctagatgctggggaagcccggggccccgaagaagcgctctgggtcccacgaactcgccagcccttggcacgggaagcggaggttcccggacattcctggctgccccatgcatctgggggctcttgctcctccccaggagcgagaaaggcatgctcacgcgagtctccacaccccagacggatcgcggccgccagggcgcacagaacagcttaacggtccggcatccgcatccgcacccgccccgcccgtcggcgccgctgccccgcccgcctctgcgtcatgacgctagcgcccaacgcggaagccgcccgccgcctggaccagccgagggctgtgcgccgagccgcgacgggcgggagccggcgggggcgcgaggcgagcgcagctgcagcctaagcggccgagcgcgcggagcgggcggagcgagcgcccaggactgagcgc

SEQ ID NO: 31266 - DNA, 280 bp, Mus musculus
  source 1..280: mol_type = other DNA
ggctttgaatgggcaaaaccatgtatgatttagcaatggctaattgtcagttactgaaagataacacaagagaagcctattactgtaagaagtttaagtctaactttgtaaaaaaaaggcatgtacaggaacgctcctggcagctttgtttttgatgtgcaaaaattagaacagcctaaactaatgagtaacagtttagtataatggaatattattcagagtgcataatatactgaaacaccaagttttagactagtcatgattgtcccgggatattcca

SEQ ID NO: 31267 - DNA, 202 bp, Mus musculus
  source 1..202: mol_type = other DNA
cacgtgatatatttgcccacaaatactttgatagaaatagttgttaaacatgtaaaaatctgcttgttaacgggctctttctggtgactgcagtttggggacaatgccttttcctaagggaaggagccaattaactgatggcttctttcaggattgattgatcgatcactttggagccgggcagagcacgcatgcgcagccc

SEQ ID NO: 31268 - DNA, 700 bp, Mus musculus
  source 1..700: mol_type = other DNA
attcatgaagtttttttatagtaacacaacaaaagaaagtcataactcaagacatttttcatgaattaggtacttaccgaaaagtgggacatttctgctataggcttcaaatgctataggtttcaaatggtatctgctgagcctcatggcttctgaatcagtcacattctaaaatgatttacctaatagttacaggatgttttcagaacaggcaaaaaaattgactatttagggactccaatcacagtagtctgttgtaactaattaatcatttctgtaaaaaaggtcaatggagattgtaggtttttttctgagaaacttggttaaaacacacactccattcatggattatttacagacatattttagtcaagctacaggctctgcagttgcaagatctgggctcagaggtgagtcacttcacctctgtgacagagataaaatgttagaggttacatccaaatacaggaagagcttgcaaaatattacccattcttgttggactgacatatttttaaatggaaaacaaaaaccaaccttttccattatctcaaagttttacataatcagtaataaaatgtgatgaacagctgggagtcattactaccaggcccacctctgctgacgtcaaaatgaggccttgtttgccaggaggatggatgttcatggtcaaggcaagttgtgactttaaagtgacaac

SEQ ID NO: 31269 - DNA, 364 bp, Mus musculus
  source 1..364: mol_type = other DNA
tatgcatcatacacacacattcatatatatatatatacataaatataaatatatccttacagacaatatagtgataaatggtagttttaccgcttaaaatagcttctcttaataatggtagatagtgaattgaattccactacacgatattgtgtaaaatgccatgccttacattctgtcctttatgttaaataaggatgtagaaaatcttcactcagcaacactcctgtgtgtgtgtgtgtgtgtgcaggccacctgagtttccatctccgcagagagtgagtaggaaacttcagtttcccaaatgcagagtcctgagctcctggcgagacagaggaggttctctgggagtcgccatggcaac

SEQ ID NO: 31270 - DNA, 428 bp, Mus musculus
  source 1..428: mol_type = other DNA
cgggctttgagaattgtttacactgtcctttagtggacaattcaattgactccttagaaacacaccccacagcgctgctccggagcctgaggttggagagggcacggagagcaagttgggaaccccaaacctagtccagactagagcagcggttgtatgtctccaatcggtctctgagtgcgtgatgttccagcccaggggaggaaacgcagcgctattctacgcagcgcagcactgaggaccagatccgaccctactggaggccggcttggcgggctgtaggggcgggaggagttgcacctcattctgccgcactggctgggaactgaggacagcgtccctgcggctgccagtcctgcgggtcccctccctgcccgcgccccgcgctctgattggctggcgcgccgggtccctggcacgcgcctgtg

SEQ ID NO: 31271 - DNA, 523 bp, Mus musculus
  source 1..523: mol_type = other DNA
cttttattaaaatatcgtattgccatagcagagaaagcattttgaagtttgctttaaataagtcaaatgtaaggaatgagttcatggcgacataggtgcgacccacccttgggtcactgcttcttttgggcagagaatgaaagggcttctcatctacttaagagcagctgtctgcacgtagggcactaggcagaagcctaggcccagagagcctcagcttgcagcccaggcctcaagtaggacgcgaggcgggcggccctccctccccctcggcgggcgtactgtacagcagacacctgcagcacaggcggccgcccgggctccccgacacaaggcgctggtacctgagcccttgactggtaatgtaccataaagagctcctttcaggccctttcagagtcagagcgcggaggtgtcctgcacgtctccggggccccgggcacccgggcctccagccgcagagcacgcgcggggcgggggtggggagtggggaccacccggccctccctgagctgggcctctc

SEQ ID NO: 31272 - DNA, 653 bp, Mus musculus
  source 1..653: mol_type = other DNA
aagcacagttcagtctgttatttcattttgctgtgctgattccaaggaaggctgttgaaaagccttcctttcgcccttgcatttcctaggtgacttaagttagcagtgctgaatccatgttttagaaaaacgttattccaacctatttgtttgccccagcaacgctggtctgcttcccaggtaccaggcagccagcaaccgtcgccctccccggccacgcccatgaggtctccgctggagggcggggccgccccgcttgaatggggcgcgcattcctgtgggaccacgtgacgcggccgcgcggcctgaggtaaacaagcgcggccccgcctcctaccatccgcgcgctgcactcctgcttgcgggcgggcggcgctcgtctgagcgggcagctcctccaaccgtccccagcggccggcgcggggcacagctgcgccagcgtcctacgcccgagtccccggccgagcgcgcgccctccggtgccctcggaccgcccgcgcgctgtggcgcagcacgaattgggtcgcggcccgggcgctattcgcggctcctgacgcggcggcccgcggcgctgagctcagcgctattctcgggctccggggcactgcgcccgagggtgtgtctccaagccgggctcgcagctataaggggcc

SEQ ID NO: 31273 - DNA, 366 bp, Mus musculus
  source 1..366: mol_type = other DNA
ggagcgcagcagcgcattgcacactcagcctgcagtcagctcctagctggccatgggatctggtgctccaggaataacctttctcttgctcagaatcctcacgctagtcgggcagactttgacctaggacctagaggatgaccctcacggtagggaactagcagccagagccaaggctgagagctcccaactcttgtcccatggtggttaaccccctttgcctcctgcgcactttaagaaggagtccctttgcgaaagcttagaccagtcctcagccctgcggggcacacgctcgcgtgcccaccctctgctgccgccgctcctccgtggggcgggagggagggcaggtgacgtcaggactgcagt

SEQ ID NO: 31274 - DNA, 319 bp, Mus musculus
  source 1..319: mol_type = other DNA
ctaagaggaaaactcatagctctgagctagtagtttgacagcacatctaaaagctctaggctggttctttgattttcattaaatcaggattagattttaaaatctaaacagtttttcagactaatttcccttatgaatattgatgaaaaataataaatttctccaatcattcatcatgatcaagtaggcttcatcccggggatgaagggatggttcaacatatggcaacctatcaatataatccactatataaataaactcaaagaaaactactatatgatcatctcattggattctgaaaaagcatttaacaaaacca

SEQ ID NO: 31275 - DNA, 360 bp, Mus musculus
  source 1..360: mol_type = other DNA
taagaagcaagtatgcctgcttaccttcttgactggaatatgacaatggtcatttcccctggagtggctttctcagatgcagcaagtgatggtgagaaatgcacacaggagttgactcaccttcattagaaagtaagctagctctccatattgctgtgtgcataattcccacacaaaatttgcctttaaacatggttttacactggacagtaaataaaacagatgttataaccaccgcttccagacctggtcggagacacgaggtcaacatctgttgctcagtgagctcatatgcaggagggctacatgcacatcaaagaggttatgacaacatgagccatattgtatttataaacatca

SEQ ID NO: 31276 - DNA, 465 bp, Mus musculus
  source 1..465: mol_type = other DNA
tcaggcattcctggctattgccaggtaactggaatgatgaatgtacagaatctcagatttcttcacctgtgtatcaaatgttttgaccattatttaactattaatcatttctccctccattcaagccaatgtgactagaatcatttgaaagatttctttattttatttcatatgtaaatgtaaggtgcatgttatgcccacagaggccagagtttaactattttagacatttcatataagtggaatgatagaatccagtttcttcaaagatgacatattattacacattacaggtactgtttcgtgagactttgagttgcatgtttttaatgattagtaacattaagcatcatttcacatatagaagttctttataattttagagttaactccttattaaatacatagtttatgggttacttcttattgctgttacacaaacaccttaaggaagtatgttacata

SEQ ID NO: 31277 - DNA, 332 bp, Mus musculus
  source 1..332: mol_type = other DNA
ccctggaggcacagagagcctctgtgagtcaagggaagccttggcttagtcccttccacaggggaggcccctggagaaccctgggctctctcttccgcagccaggagctgcttgtatttctcaaacctcttgcagccgctgcagctgcagcttgtcgagctagctcagcctggttacagaactggctggttaattagtaaactagctcttttccctttcccccctcaggtatcacaaacatggggaagagaagagtttcctttacttgccaatatatgctttaagcagaatctatttgctaatatagtgaaggagaaattggcttatcattg

SEQ ID NO: 31278 - DNA, 559 bp, Mus musculus
  source 1..559: mol_type = other DNA
gccgcgcccgcgtgtgtgcagcgagggaggccggggcacaaaggcgagcggcgggcgccggggtccggcgggctgcggaggaggggcggcgcctcatgaatattaaccgagccgcggcctagcgcgccccgccgcgggccgagctgccgagcggagcccttgcttcccgcacgcgccccggccgcgcttcccgggagcccgcgccggcgacccgcctcaggaagggccctctgcttcaggtggccggcggggagggcgagccgggctcgggggtagccgggagctgagagttgccggggccgcggctcttccgaagcatgctagggatccggagcgggagcgggagcggcgccgcgtcccacccgcggccgcacgcctccccacgccgcgggccaaggaaaacagccgtctccttgggggcgcgggccggggcgcagggcaggctgccacggccggccggagtcacccgcggcccgggcggccgccgccacagacgccgccgagcccacgcccgccctggtccgagctggagcccactgcctcggcgttgcccaggaaa

SEQ ID NO: 31279 - DNA, 332 bp, Mus musculus
  source 1..332: mol_type = other DNA
cttccctggcagggcaactgccaatcctcccaaatcccagggccaaagatgttttcaaatgagagtgcaatcacaagtgcatatgcatggcgccgggtagcgctcgcgcacgcaccgtggagacagagcaccgcagggcccgccgcagggtccggtgcgacacaccgcctggcaacctcagccggcaagcccgccccaagctgctgcttctgcgcctgcgctgactgcgcgctgcgccactaggcccgctccacctccgcaggggcgcgaaaccacaaagaaggaacgtctttttccttacgtttttctcagacagaagaggttacaaaaaa

SEQ ID NO: 31280 - DNA, 318 bp, Mus musculus
  source 1..318: mol_type = other DNA
ttcctaaaacggacggataaaacagatttttccccctcttttcataaaaccaaattaataattgcatattagtggggggctatttttttttctctgtgaaatatgaaagagtccatggccaccaaggaattcctcttttcttactttcttatcaaagaactaaaatttctcttaggaagaaaataattctgtgaccacgtggttgctaaggaaacagttttttttgtaacctcttctgtctgagaaaaacgtaaggaaaaagacgttccttctttgtggtttcgcgcccctgcggaggtggagcgggcctagtggcgc

SEQ ID NO: 31281 - DNA, 395 bp, Mus musculus
  source 1..395: mol_type = other DNA
tgcatgtgtcttcttgaggaattcaaaagtggaggcacatttagaaagtgagctttgagagcttaggggctctcccaattctgagatgtttttcatgaattccagcaactcactgacagtgacgaataagagaatctttaaatatgacatttatttttaagactatccttggcaagccaggtttaatcattaatttgataatgagcagatgctaagaaggacacatttccatctctcttctccctcttttccaggcaaaagaaagggctgatccacccctgaaggtttccgagtcatcagggaacacgagtgggtgaaaacagcgccgccgcctcctcctccgcccccaacaaatggcagtcagctgattgacagaggacgacttgaagccgcca

SEQ ID NO: 31282 - DNA, 461 bp, Mus musculus
  source 1..461: mol_type = other DNA
ttgaacccatgatgcaacgactagatttgtgttaaagtatattcatggtgatctttttctttaaaatgatataacttaaaatgtttgagctgtttatgttaatctttgatttgatgttctgcaaaataaaaatccacagttcagttactctatagaaaaccatcttatggggagggttttgaatgtctattcaaatactcatttttatatttataaaggtagctaagggttgatatgaacaggacattttgaccttgcccattctggtatcccagtctgtgaggcgtgtgggacggactggacagcactggtgcagccctgtggtttctgggcagggccaggaggcttggccaggactcagtctgggcgacctgggtccgccctgggaggtgccacggggcccgccccgctccgctccgcccggcctcgccccgcccctctgtaggggacccggcggcgcg

SEQ ID NO: 31283 - DNA, 333 bp, Mus musculus
  source 1..333: mol_type = other DNA
tttgggaaaagggaaacagaaaggattttttcattcctttattagaaaacacaaacgaaactacttcaagtgttcctaggcacctgctgatggcaagaagatgggtctggggacccaggcagctcagctcagcaggcagagaggccaggtggcctgggctcttgaggtcacagcgacctctgttgccctcggccaccattccaatcttgccaaggtctccctgtccctggggtcacctaggccagcgtgctgagggctgtggtagcaccctggacagcgcgttccggcagaagccctggagcgcctgtggctgggtcagcactacgcaggcac

SEQ ID NO: 31284 - DNA, 325 bp, Mus musculus
  source 1..325: mol_type = other DNA
atgggtctggggacccaggcagctcagctcagcaggcagagaggccaggtggcctgggctcttgaggtcacagcgacctctgttgccctcggccaccattccaatcttgccaaggtctccctgtccctggggtcacctaggccagcgtgctgagggctgtggtagcaccctggacagcgcgttccggcagaagccctggagcgcctgtggctgggtcagcactacgcaggcacatttaacctcggcggcgcagagcacagcagcgcgtccctgcgccctacgtttcctgtccctgtgtgacctgccgctccagcccggtcgaggc

SEQ ID NO: 31285 - DNA, 398 bp, Mus musculus
  source 1..398: mol_type = other DNA
ccagtgtgacaattacactctgactttaaaaaataaagacatcatcagagtagtctccactgagaacagactggaacgtccccttctgggctggtccaggaagttccttttattaggggcagaaaagggaacttacatctgttccgctcaagtctcaaaattgtaaccaacgtaggttgatatttagatctccttgggaactaactgcctgcaggagtatctgggcgttagtctcagactcttacaagagaaggctttctctgaccttagggcaggaagtgttttcttcctttggaaaaaacgctttgctagctagcacctccgtgcaaagccgagagtctgcgccgccgggtgggcagggctcaaagcacttcctcctccctgagcccacgtcctcg

SEQ ID NO: 31286 - DNA, 376 bp, Mus musculus
  source 1..376: mol_type = other DNA
ccctctttaagtgtgttgcaaacaagaaaaaaaattatgattcagaaaattacagctggtttatttcttcctataagattatggcgtaagattattacgagcatgtataatcatttgatgaaagtgttataaaaatgctgtttcaacttcggaataattttcttactgtatgcattagcaaatagaggccaatctgggataagataacgaaaaaaaattaattttgcgtagttcattacaaactatgcatgtatacatctctaaggcttgataagcaggtaccggaaccagatttctgctcccgactagagcgcggcttcgcgcttccggtgcccagcttccggctccgggtttgggcttggggcagaggcggagc

SEQ ID NO: 31287 - DNA, 385 bp, Mus musculus
  source 1..385: mol_type = other DNA
agggtttctctgtgtagccctggctgtcctggtactcactttgtagaccaggctggcctcttttttttttaaagatttatttatttattatatgtaagtacaagtcactgctcttaaccactgagccatctttcatttgtttctgcaatatcaagcactactgcatgatgtacatctgagaataattgaggaagtcaggattcagatttctatttttaatcgttatttactgactttcctaagtaagttctgccaattttcaatgttctcataggaaaaatccatcttctggggccttaagaagactctcaagatttaaaactgtattggtttttttaaagtcttcctagtttttggaagttcctggaatgattctcgcgagaaa

SEQ ID NO: 31288 - DNA, 468 bp, Mus musculus
  source 1..468: mol_type = other DNA
ctgagttcgaggccagcctggtctacagagtgagttccaggacagccagggctatacagaaattataataaataaattcagtgcaatcactggcaaaatatgctgtcattagtctgtcattagtaactaatgatctacagaaccagtagggagctcattacataagctttttcagaatatatataagcgttctcatgttgagaaggttagaaaacttgtgtttcccttttacatgattaggacaagtcacatattcatagcaggttttatgatttgactgttgctaaatcattaaattttaggaaccttacagtgcttttgaaacagatcatacgtttgccaaacatcgttctctagtgagattaaacgatcagtgagtccggccgcatgagccctgaaagtcagaggattcctttctgctcgaagcttaagaagtacttcggaccggaagcgccgggggactacagt

SEQ ID NO: 31289 - DNA, 348 bp, Mus musculus
  source 1..348: mol_type = other DNA
ccggaagcgccgggggactacagttcccataagcccgcggggacggacaggccttgccagtcatttggctatatcaaggtaaatggggcgtccttgagatttccagcactctacgcctgcggggagcttcctaatgcctacaacgccatctccatccctagcctccggcggagctggacgtggctgggtagtggaggtgttgcgcagcaggccgccaccgctcacccggccacccttggggccagacggtgaaagctgtcccagacttgggggccagggctaagcccttccatcctcaaaagaagttttgttaaccccgaggctagaacgcgcagcccgtgcacgtca

SEQ ID NO: 31290 - DNA, 346 bp, Mus musculus
  source 1..346: mol_type = other DNA
catctccatccctagcctccggcggagctggacgtggctgggtagtggaggtgttgcgcagcaggccgccaccgctcacccggccacccttggggccagacggtgaaagctgtcccagacttgggggccagggctaagcccttccatcctcaaaagaagttttgttaaccccgaggctagaacgcgcagcccgtgcacgtcaccgcggcggagcgggtgggtggggtttgctgcacggcggccgcggcggcggaggctagtgggtcctccggtgactctggggcggggctgtggggcggctgcccaccgacggcagaacatcacgggcggctcaacctccagttga

SEQ ID NO: 31291 - DNA, 271 bp, Mus musculus
  source 1..271: mol_type = other DNA
tgtcaacagaaattctgtgtgatgttcatgtcattgcttcagaaacaccgattctacagggagaacatctccgggccctcgagatcttaccggccagccgaaactgcttcttagcttcagctccgaggaaaggggctgagcccttccggtttttcgaggttcctatcaccacctccacaataaaacattctgtggcttcgctaggcctggcttctagctcacgtgtatccgcggctgagccccgcccagcgccccttccggcagcgccgcc

SEQ ID NO: 31292 - DNA, 392 bp, Mus musculus
  source 1..392: mol_type = other DNA
gcaggactgtgcaggcttctgtaagccgggcattccaggctagtggtacagcagctccagagtttgttcaacaactcaagggaggtccgcgagggaggaccatttacttcactatggtgaactcaatggagggctgcacagcgccggacgcctcccgtgacgtcaccgcgcgtctgcgctctgccggctccctgtaagcaggcatcgacgggtgggggccggcggcactgctgggcgcagtctgcggagcgctaggcggagccggcggcgctgccggaaggggcgctgggcggggctcagccgcggatacacgtgagctagaagccaggcctagcgaagccacagaatgttttattgtggaggtggtgataggaacctcgaaaaaccggaag

SEQ ID NO: 31293 - DNA, 300 bp, Mus musculus
  source 1..300: mol_type = other DNA
tgcagcaatgcagcaatgtgaatatacatatacagccgattaaaaaatttaaatatgttgctctctaaaaaaacaccttggaattattgtaggttttataagagaaaataaaataaattcccataccgcactggatgagcattctgttaagagccatggctgtaaaacaaacgaccaaaggtcatctagccctcttttgacttttgacatttaaaaagttcgtaattttaaaatttcgttcatatgcagcctgcaagcagtacttgatttttgaaacaacacaagttgactttgcgcatt

SEQ ID NO: 31294 - DNA, 289 bp, Mus musculus
  source 1..289: mol_type = other DNA
ctcaaaaggtgactttttaaacacagaggttgtggctgacttcttgggatattaaaaatagaataatcccccaagactttcaaattaacaatggtcaagattccctggggtaggtattacagtggaatttcctctgagtaaccttccttacaaattttctgagtttgcattcatcaagggagaacccttccagactctccgtgcgccctgcgctaggcacacctaacagcgcctatgctgggcggagcgctctgtctgtgcagaactctgcgcccagctccaacaagag

SEQ ID NO: 31295 - DNA, 473 bp, Mus musculus
  source 1..473: mol_type = other DNA
catttctataaactccaaatggctaaagaaaggaagcagtaaccttaatattaccatttttagtttaaactctacagactcctttcttgtatgaaatgtaacagagtcactatctatctatctatctatctatctatctatctatctatctatctatctatctatctatctatcgctatgtatctatctaatctacctatcgctacctacctattatctacatatctacctacctacctacctacctacctacctacctacttacctacctaatctatctatctatctatctatctatctatctatcatctatctatcaatcatctatctattgcatctatctatctatctatctatctatctatctatctatctatctatctatctatctatctatctatctatctatctatctatcatctatctatcaatcatctatctattgctcgcaaagccgccgccggaagttccgg

SEQ ID NO: 31296 - DNA, 460 bp, Mus musculus
  source 1..460: mol_type = other DNA
agcaagtccctgcattgttactgggagtagaaattggaatcaaaataataatttggattaagagtcttaacaatgttcaaagcatccttgaaaggtaatgtttggaaatcattgtttagtttagacaaattgccaaggaaatggatttgaattcaatgtaaaggtttttatgaaagcatgctagggcttaaaacatccttaaaatcatgttttgaacagagtactgtctcgactacattttgaaagtgttgcactatttctggcatgcaagccctcaacagaaacatttcatgcataagtaaccatttaaagaaggttatgtgcaattgttcaggagaacaagtacgctttaggaggctcagaaatgagacgtgcctgtgttaatccctttatgagactaggaagatctcatgttactttaaatgtcttttttttttctgatttgttcaaacaaatcgat

SEQ ID NO: 31297 - DNA, 445 bp, Mus musculus
  source 1..445: mol_type = other DNA
atgcataagtaaccatttaaagaaggttatgtgcaattgttcaggagaacaagtacgctttaggaggctcagaaatgagacgtgcctgtgttaatccctttatgagactaggaagatctcatgttactttaaatgtcttttttttttctgatttgttcaaacaaatcgatcaacatttgaagaattcagcagttgagcttaagagtcaaaaactccagctgctggtaggttaatagattttagctgctgcaggtttctgaaagttatatgcataactttgtatcagtctaaaaactaactgaccttttgctttaaaagcaaagcaaaacaaaaaatcctttctttaactgggaagcgattggaatgcttttatagctctgcaaggtgtaaagtacggaaagttctgtacaaacaaatacaaagcagatttaagtgctgtcgttta

SEQ ID NO: 31298 - DNA, 279 bp, Mus musculus
  source 1..279: mol_type = other DNA
gatggtgtgtgtcagagaatctgaccatgaccttggaacagaacaagtttctttcagcgtttagcactgatccgcaggctgtgtctgacttgacctgcagagttaggaattcacaaacctgaaatggttcatgcacacagagtgcattccaaggcctcctctgtgtttctgttagttgcggcatattaaatatgtaaaatgtctgagatcagaactgggctctgccacagatgagtcatgctgcattcattgtactgccttgctaataattaaaaggtg

SEQ ID NO: 31299 - DNA, 396 bp, Mus musculus
  source 1..396: mol_type = other DNA
atcaattgatatgctttttgcatgccatcagttggtgcacctgtaccaccttaggattaactgctactatctgtagttctttatagatagaatccatgtttcatttggtccaaattggattctgactgaaacagagtaccaccaagttccctataatttgtgttccggaaatttgggggtctaacatcaaactgacagttcaggttagctaatctctttgggaaattccacaatctctacattttgagaaacctacagtttgtcattaggtctgtttcctgttcttaaggagctcagacaagtcatgcagactcatgctgactctgagatttcttcacctgaacttcccagaagcacagttctggcaggaggaactggatgtcttccatgctgtac

SEQ ID NO: 31300 - DNA, 152 bp, Mus musculus
  source 1..152: mol_type = other DNA
atccagctatcaaattttcctattttgctacattgagatacagccaccttgtgtctctgaattgtatcagtttaaaaataatataggacttagagaacctgtaggttcctactaatagaagcaatattctagtactaaaatatgtgacctat

SEQ ID NO: 31301 - DNA, 417 bp, Mus musculus
  source 1..417: mol_type = other DNA
aagattcaaaacttgaacatttttgttatgctagtttgtagaggtattaaaaacatattaattattttatataattacatattgttttactaaccaattatttaagacaggcaaagtatagaattgtagcagtttgccacacataatgttatatatatgattatactctctagaagactatagagctatgcacatttacaatgtcattatcatgtttggtataggaaaagactctgctcagttcctgcattttttaaatgcatccaaaggcaggtaagcatgcatatttttctttacaactgttgcctaaacagctgctctggctttccagatctacttcctgaagcagctccagaggcagtcctttcaaatccttggaaggaggctgactgccgaagcttccatgtacttaaagga

SEQ ID NO: 31302 - DNA, 486 bp, Mus musculus
  source 1..486: mol_type = other DNA
cttgtctgcaaacataacagagtatcattaatgatgtcaggtctcaagttgggccaattattggtttagttgttctgcatttttaggggagacaaattttgaaccaaaagttttatagttttgtgtgcatttggaatgtaaataaataagataattaattttacaaaagaaacttcaactttccagatgcagaattgggaaaagatggccaattttaacacagaggtcagcaaacttctacactacgggtgacctttcctgttttgtaaacaaggcatgttggagcagatctggcttacaaattgttatgttagattggatagttcacaaaataccaaatatttaccatccggttctggacagaatgtttatgtcgtgacatgacactgtcctttgttcaaatgaaaaggggacatttctattcaggttttcattgtgctcttcttcccaggaacaccatgaaggggcagcgacagcagtaaaggt

SEQ ID NO: 31303 - DNA, 490 bp, Mus musculus
  source 1..490: mol_type = other DNA
ccacttcctacttaaaagttgtggagtagatgtgttaacacacgtacgcgcaatttgtcaactgtgtttcagacaattagttttttcaaactgtgtgttttttagggcagctaaaatgtcactgaatacaaagtatctgagttcgaggccagcctggtctacaaagtgagttccaggacagccagggttatacagagaaaccctgtccctatagtgaactctggatgaatacagaacttcttacaaaatgtcagtctatgtctaagattaagtttggcgggtcaacagttattctttagtgtctactaagtgagtaagaaataatggatccggtttacttgtttgacaaaatcaaccaaatgtggcagagcgagtgttgtgcccggcccaagccctcccgcccagcccagcgctctagtcggaccagtcggacggcttcgctctatcctggcccgcccaggccgccgatcgccgccctcccggaaacccg

SEQ ID NO: 31304 - DNA, 143 bp, Mus musculus
  source 1..143: mol_type = other DNA
cccgtccccgggacttgtgtctagaactgttggctacagacattgaacttaatatgccaggtgtcatcatcataacctcccattgctaaccctcggggtggggaaggggggccgttcacagcccaggcctcccagtcttcccc

SEQ ID NO: 31305 - DNA, 233 bp, Mus musculus
  source 1..233: mol_type = other DNA
gtggggaaagggggcatgcctcactggcctgggtgattcggaatagaagtggcagccagtgcttcctcttactaagtgaaatctaagcagtaaggcttcctttaaactcattaatctgctctagagagggtcacatcagcaagtaaacgaaaagaaaaggtccctttcccatgagcaggggaagagtccgaggcctgagagcctcgccagacacatctcccagggcctcggcg

SEQ ID NO: 31306 - DNA, 329 bp, Mus musculus
  source 1..329: mol_type = other DNA
aagagtgaagaggaccctttcttctcctccggtgcccactatcactcatttgctatatattgaaatgtcagaactgagatgttggagcatctcagagtcttagatgaacagctgcatcatgtaagaattatatatatatatataaataaatataaatggaggggcctcggcttccgatggcgcagccaaagctttgggcggcgccctgggggcacgcagaggctcacgctgcctgcaactcggcgttccctgaggaccgccgcggactccggcgggggcggccgcgggggcggggtctgcttggccgcgtgaccgaccccttatagggc

SEQ ID NO: 31307 - DNA, 331 bp, Mus musculus
  source 1..331: mol_type = other DNA
agttcaacagcagaacagcatagatttcttttacaatttcattcaaggccagcctggatacagagaaaccctgtctcaaaacaaaacaaaaaaaccttgtttattgaaatcttctgcctttgaaacgtagggataccttatttctgaaactttccaagcagagcagctccttttggtgacctcagcgcgcaggcgccacctggcctcgcctccagacgcaggcgccgcacgggtgggtcccggtgcgcagccgcgggtgctcacgcaggcgcaggagtggccggccagccccgccccggacctaggccgcgaggcgcgggcggggcgatgg

SEQ ID NO: 31308 - DNA, 365 bp, Mus musculus
  source 1..365: mol_type = other DNA
agtttcaggatagtcagggctacttatcccagcagagctcgtctggtcaacagagcgcgttccaggtgaggagttcaccggtgttctggaccactactgcgtaccacacctcaggaagcttggtggaggtgcagtgctagctggggatccacaccgcctgagtgccgataacccctgagcaccagaggtctcaaggattccgtgagggtcttaaccaccccactgatctgggcggcccctcaggctatggcaggagcaggcaggactggcctgttgtgaacagcgtgtcctctggtcgaagaccagccctggagaaggccggccttggatcagcgggtcctgcggcctgggcgcggggaggggaa

SEQ ID NO: 31309 - DNA, 419 bp, Mus musculus
  source 1..419: mol_type = other DNA
tgatctaacaataagacaaatgaaaaagctttctcttaatcatcacctggggataatattatgcaccaagggctgagagaagttctagcttcttgctcctggtaatttcaaaatggaacaatgagaggttgatgcctgggattggagcctagccctgagttcgaactctaggccttgacggttgattctcagcatcctgctaagtctcaggaagaagctgcgacctactgcgctcactcccgcgcctcagcggtctctgcagcgcgcacaaagcttcccgcgaaattgacgttgcgccggccgccgcgcaggcgccgcccccggctcgcccctcccccacttggccgcggcgcgccacgaccggcgaagggcgcgtctcgcgattggtcggcccccgccggtggggggtgtgtcccggt

SEQ ID NO: 31310 - DNA, 377 bp, Mus musculus
  source 1..377: mol_type = other DNA
ctggcctgcaagctaggctatatagccatattcctgcttcattccagggctggatacccaggtgtctttgcttcctggagctgctgtaacgaagtgccaaaaactattgtagcacttatgcattcagtgtcttagacttcaaaggtacacattaagtcctctgcatgtttccaaaatttcctttacatgaaggctatattgtggctcagcagttatgagcactgactgcacttctggtggctcacaaccagttctgatgcactcttctggtgtgtgtctgaagacagctacagtgaactcataaataaaaagtgatttttaaaattatttttagtttttcgagacatagctggaaggcttggcggcgcagcgtctct

SEQ ID NO: 31311 - DNA, 338 bp, Mus musculus
  source 1..338: mol_type = other DNA
ccagcgggcagcgtgtggacgacatcacaggctcggtgcgcacgcgccagactgtggggtagaccgccggtcgctggccggtcctcgatgtccctagggcgcacggatgatgctcgcaccagtcccacggccggactaaggcgctgcggttgtgagccttctgtcgtggggctgacgacagcgacagagcagagcggcgcgcgcccgatccacatccggctctgcgcgactgcgcggattggcttagcctccagggccgcaccccctccgctcggctgaggctgggcattgggcgccctggtgaccagtcggcgaggtgtctgaccccgcctacggtc

SEQ ID NO: 31312 - DNA, 315 bp, Mus musculus
  source 1..315: mol_type = other DNA
gcccagcctcagccgagcggagggggtgcggccctggaggctaagccaatccgcgcagtcgcgcagagccggatgtggatcgggcgcgcgccgctctgctctgtcgctgtcgtcagccccacgacagaaggctcacaaccgcagcgccttagtccggccgtgggactggtgcgagcatcatccgtgcgccctagggacatcgaggaccggccagcgaccggcggtctaccccacagtctggcgcgtgcgcaccgagcctgtgatgtcgtccacacgctgcccgctggcaccccaaccccgggcagcagttgtggg

SEQ ID NO: 31313 - DNA, 377 bp, Mus musculus
  source 1..377: mol_type = other DNA
tttttctcagttgatccaagtgactctagcttgtatcaagttggcatttggatagccaacaccttgagacagtatctcactatgtagtcctggctggcttggaactcactctgtagaccaggctggtcttgagctcacgggtttctgaaatccccaagtgggccagtctgacttgtcagtgagcaccagatatttaacattttcaattactattctctgtgtgtgccatggtgtgcacatgtaaaggccagagaaaagcttttaaaaatgtgttctcttctttcggttcaaggccagcctggtctacacaggacagccagggtaaaggttacttttaaagagactagaacttgttctgcagagttgataatatactg

SEQ ID NO: 31314 - DNA, 310 bp, Mus musculus
  source 1..310: mol_type = other DNA
tccagagcactgggattgagctagactctgactcggtgagctgaggtccccaaacagggcctgcccctggtccctgactctgggctacagtctggggtcgggcaagccctccctaatcaagatgaccaggggcccttagactgaggctggacaagatcaaactggatgatatagccatctccacagcagtactgaggagcacggacgcctctgtgaaaggaaactagggtttccccctaaatcaagggtttctttgggcatacacaggccctggcctaatgggggtggtgccaactcaggctcagcgtca

SEQ ID NO: 31315 - DNA, 377 bp, Mus musculus
  source 1..377: mol_type = other DNA
ccccaaacagggcctgcccctggtccctgactctgggctacagtctggggtcgggcaagccctccctaatcaagatgaccaggggcccttagactgaggctggacaagatcaaactggatgatatagccatctccacagcagtactgaggagcacggacgcctctgtgaaaggaaactagggtttccccctaaatcaagggtttctttgggcatacacaggccctggcctaatgggggtggtgccaactcaggctcagcgtcaggaggcggagcaccgcccccgggtccagccgcgctctcctacagtggctggacgcgctgggcgctgggtgcggccatgcggggcctgggcctaagtctgaccctgaccctgagg

SEQ ID NO: 31316 - DNA, 372 bp, Mus musculus
  source 1..372: mol_type = other DNA
atttttggttatgatgttttatcacagcaatagaaaccctaaaagaacaatctatctatctatctatctatctatctatctatctatctctatttcctatatatctattatctatctatcatatatttatcttgtctctattatatattatctatcactgcagtttagctagactggttagccaggaagatgtcgaaattcaccagcttaacataggacttcctgcatgctaggtaaacaattctacctataaagaaaagtgactttctctgacctacatttgcagctctgcagctctgcagcactacttgactccatctggcctggcccaagtaagaaggtccacagtaagcgggagggtgtccctagtcc

SEQ ID NO: 31317 - DNA, 319 bp, Mus musculus
  source 1..319: mol_type = other DNA
atctatcatatatttatcttgtctctattatatattatctatcactgcagtttagctagactggttagccaggaagatgtcgaaattcaccagcttaacataggacttcctgcatgctaggtaaacaattctacctataaagaaaagtgactttctctgacctacatttgcagctctgcagctctgcagcactacttgactccatctggcctggcccaagtaagaaggtccacagtaagcgggagggtgtccctagtccttccctcgcagcctgctcctcccaccacagccccaggttcaagtaggtggagacggggtg

SEQ ID NO: 31318 - DNA, 192 bp, Mus musculus
  source 1..192: mol_type = other DNA
aaggcacatgactcccatactgtggatgggccttattcgaaggtggacatcaacttcttggcccactagtggagaaagccctcgcgggctgccccggccggtcacttctgaagaggcgggtctggaggtcgaaggggcgtgctcacacctgcttcctggcaagaactgtggctatgtgatcatagaccctct

SEQ ID NO: 31319 - DNA, 381 bp, Mus musculus
  source 1..381: mol_type = other DNA
cagttagcttcagaagaaatcaagccctgacatgagtcatttcagaactccctcaaagggcagtgctgtcttatgagcctgtgccagccctacctacactgtgggtagcttaggggcatggagctccctccatcagtatggaggagccaaatgcaattgctgctcaagcttccccgtaaattacacctgtgaacgccaggtccaggcctgggagtggctgcgcaaggaactcgcaactgatcccgcagtggtgctggaaaacccccgaggccttctgaccaccctggccagaccagactagtgctggtcagaccagcgccctctatcctggagggagctgcagcacgaccccgccgcgtctattgttatgcaaatataaga

SEQ ID NO: 31320 - DNA, 395 bp, Mus musculus
  source 1..395: mol_type = other DNA
ggctcagctgatctcagcagctctgctcctgtccgaagatcctgagagaccaggttgccatgcagccacctctctgatcaactcagcaccagcacagtagtgaccttctcctcatgagcgtgcacagtcaaggaacagacactgtaaaagttccttaagtgtggggatccccaagacctccatgtccctcaaggagatcatgctggcctccaccgggctgcctgcccagatggcttcagtgccccctgcaccccttggccatgggttcccatgtggacgacaatatgtggaaactcctccacattctcttccggccagctcggccttggcacccagggggggactagccttcctgccctggctggatgccaccctctgccaggtgggggtggagg

SEQ ID NO: 31321 - DNA, 368 bp, Mus musculus
  source 1..368: mol_type = other DNA
ctggccagcattgggtttacctaaagattatcctcctgatccaggaccccagggcccagtatccttgggtcaggaaattctcgactagaaaaccactctaaactttgtgagagttctggaaagttcaggatccagctccctttcagaatgggaggagtctgaggcacttcccttcctgcataaatgggcatggaggtgggcagggctgcaggcaaacaggttgccatgaaaagtctaaagcttttctgtctaagaacacaaggggttctatccctagcgctagagccctatgagatgacctgctttctactagtttactaagttggacgcctccctgggtcagtcagccagacctgcccccactggca

SEQ ID NO: 31322 - DNA, 275 bp, Mus musculus
  source 1..275: mol_type = other DNA
attgatctcactaaagaacgtttttaaaatgtattttatgtgtacttagtacccagaattacagagctgctatgtgctgagccccagacaggccctggctgtcttggaagttactgtgtaaaccaggctagtcctgaactaacagagagtcacttaaaaagtgacttcatttatgcatataaatgcatgtatgtctgtatacccagaagagggcatcagatcccctgaaactgtcgtaggttctggttctagcaagtcgctgctcggaggaccta

SEQ ID NO: 31323 - DNA, 261 bp, Mus musculus
  source 1..261: mol_type = other DNA
tttgtgtataggcacaacattctagcttttgtgcctgcaggtagaggcagaagacaagtacttataactagccctgctggacgcagggcccaaacttctgagttcgaggccagcctggtctacagagtgagttccaggacagccagggctacacagagaaactctgtggggttgggacaggttagaacctgttctgaccaaggctgacctggggagcccctccttcctagggagctcccccagcagtgctctctggccaag

SEQ ID NO: 31324 - DNA, 307 bp, Mus musculus
  source 1..307: mol_type = other DNA
tagccagcctagcttaacgctgacagtgttccagaggaatacaaatagaattcgtgggatggaattcaggccatccagcttcatgaaaacatcaaagaaagttcttttatgttcattgtcagatcctctggaactaaaaacaggcagtgttcttaatcactgagccatttcagtcccaaaagtttttctacattaaaaaatagaatgaggatttgttaagtactgaaaatatcttactacaggaatccacagctgtccatctgggaaacctgactcagtactgacttcctcagtggccatcatgaag

SEQ ID NO: 31325 - DNA, 251 bp, Mus musculus
  source 1..251: mol_type = other DNA
atttaggacaatgtcagcactacattttggaaaaaaaaaaaaagaaatatgtacatgtattgctctccattacacagtcatggccaggcatgcccagccctgtagtctccaggatggccctcccaggggcctgcccagtgcgtcccggaagggcccggcgcctcacagccggaagctggctttccccacccgcgcgctgcactgcggcggttaccaggatggtgcaaatcaatcatttgaaacacccaatg

SEQ ID NO: 31326 - DNA, 232 bp, Mus musculus
  source 1..232: mol_type = other DNA
cttctggggaattaagtttccactgagcacgctctacgcagtcttactcagtccactggttgcagcctctgtgggcatggacaaacttattattaaagtggaaatcttccaagtagttttaaccccagaatctgaaggcctgcctctacttcctttctggggccatgacccaaggaggtagggcatgctcagatgaatcgtgattgagtcacccctctaggagggaaaaggc

SEQ ID NO: 31327 - DNA, 364 bp, Mus musculus
  source 1..364: mol_type = other DNA
gcttccctgtattcaggaggccctgggaggagcctcctggggtcctcatcccaggtctggaaagggcctgatccataagggtcgggcaatgagctctgcccacctctttccaaagtcctggaccccctgctgggctccccagaaagccctgaatctgctgctcagttgtggggtttctaggcagccccagccagaatgacagcatcctgcctgggtggtgttacccatctctggaagaagttccaccctaagagagttgggctgggggctcaggactcctagccctaggatgacaagggtctgaataaggccttgggccaggcagggtctccccttgggggccccagctcctcatgtgcgcaca

SEQ ID NO: 31328 - DNA, 420 bp, Mus musculus
  source 1..420: mol_type = other DNA
caaatgctggaaaagttcagtattgactggcaattcagagcatgaataactggaaataagttttaataaacaagacttcacttttaagctttgctcgaggaaacgatcttatatataaccagtgtggcaccaagttgggtcaggaccgggaggtccagaactccagctgcgcagtgctccttccagccactgcaagaggcagcacagccagtcgcttctccccatcttggaagaacaccggccaccggtgccccgcaccgggctgtgacgtctccgaccgcagacctggcgaccgcctgctgccgccgctgcacacgggaggcagcaagcagcccaacctggcctggacgccggccctggggctctgcgaccctgaggaccccaaccccggacccggaaccggaggctaagcccgtggtg

SEQ ID NO: 31329 - DNA, 263 bp, Mus musculus
  source 1..263: mol_type = other DNA
attaatttaacacattaggccaaccttaccttcatgttgtcaggagggtctaggggaacagagtaaaagtgtttggacacttattcccactggcttgggcccaaagggcctcctccatccgagggcgcgaagtccggtggagggtctccgccgtagcgcccgagcctcaccacgcggcaacctagccgccggcgccgggcctcacggcccagcctctccgcctcgtcctgggctgtaccagtctggctgccgaaaagcaccag

SEQ ID NO: 31330 - DNA, 435 bp, Mus musculus
  source 1..435: mol_type = other DNA
acagggtttctctgtatagccctggctgtcctggaactcactttgtagaccaggctggcctcgaactcagaaatccgcctgcctctgcctccagagtgctggaggcgtgcgcgcccggctgaggctcagtttttatgtgtaacctgtgtgtgcgcagaaacaaggctgcttccttgatgcctcctacaccattacacacatagtagatctgggatctacaaaaccaagatcctcgaaaatagattctttttccccgggggacttctaggtccgaaaggggaccttggcggcctgtccattggggtctaggatcccaggtccagaggagcagccattgagcagcgcttcactgggtccgcagttctgcccttaggtcagagcgcgcttgcccaattggaggctaccaaggggggcgtggcacggcgcggtacgtct

SEQ ID NO: 31331 - DNA, 363 bp, Mus musculus
  source 1..363: mol_type = other DNA
tggaccatctcctggaatgtcctgcccaaggcactggggctcatcgacagagttttctcgcagagcgatggcattccagaactccgtggcaatattgccttgaaggtcgttctgcagcacttccacgaaccactcctccaggacagagtcacgaagctcttcctcctttggtgggactgtgcaaagtcgcgggaaatctgcacaggcccgacaacctttccccggcctcaccagccccagcgcggccggcggcaccagaccggtgcctcctggtcatcggaggcaataattgtcgccgccgccgccgccgccgccgccgccgccgccaccgccacaccctcgccagcccgcgcgctttgtggg

SEQ ID NO: 31332 - DNA, 315 bp, Mus musculus
  source 1..315: mol_type = other DNA
ttgagtacactaagcagagtctggccaggctgggcctcagatggtagtaaggcactcacaacagacatctgagagccccaccttgaggtaggcggcctgaggcgatcttgcgcgccaggttctcgttgacgcgggccaacttctccgtgagctgcctcaacacaactgggtggggactcgtgagcttccgaccccaactcgtgaggcatgtccacgcagcctcccgagtgggtcggccggccccggcccgcggccttcagtgcccgaccagcgccagtccgcacctgcgcactgcccacaaagcgcgcgggctgg

SEQ ID NO: 31333 - DNA, 489 bp, Mus musculus
  source 1..489: mol_type = other DNA
ctctcctggctccctgttggctccagctggcaagaggctgggctcagtcagcttagcagggtggggcagctctgcttcccagcctgggtcaccagttaaccctgaccatgccaggatatagaacttcttgggcagtggttgtctggtctccaaggcaacagaccctcagagcactgagctctgactactatcacagcatgtgtagccagagagtgcgagttcttaggacactagtagcactttaacctgggctttaaaggctatatgagctcagccttgactccacttagagatctgcagtcctaatgttaaaaaggaaattgagaccatggtccttaacactttaactagctcaggtctggccagggtttattctgtcccaggattcctggaattgcagcatccaaataaatgaagttcaagtcagtctgaagtgagtgctctgaggccctgcccccacactctctgcctcacagtcccactgtgagg

SEQ ID NO: 31334 - DNA, 384 bp, Mus musculus
  source 1..384: mol_type = other DNA
gttggtggggccctacggagtccaggaagatcgcatagacctgcacacggtacatgtggagtcccacctcatggaccctgatctggacgtatccatgatgccgtccttgatggcccaggccttcccccacttccacagtagtggagagcaactagggtggagaattaaacagtatttagtgattatcatggtgggtgtccccatcctgggtgactgagccacacccttggccagactgaggccagtgccctttccactggctctgtcctcaagggttgccagggcttgaagcaacgtcttcactgctggctgcattgtattctgggctcaaggccaagccaagactggagcttgctgggcattggctctctgcctagcccccgc

SEQ ID NO: 31335 - DNA, 355 bp, Mus musculus
  source 1..355: mol_type = other DNA
gctccaaccagctggcgcgatgtgttgcgcttgcatggcaacccctggacgtgcaatggctgcgtaagcacccgcgtccagcctcaggtgagccatctggggcgcaggacgcgcagaaactgagaccctgctctgcgtgtctccaagactcgcgagacctggcgtggcattgggctccgtgctcactgcttgtggtgcacggcgccgccgccgccgccgcaccacggtgcgccacttaccccgagggcccaccctccctggaggatgctgggagccctgtttgagacaaaacccggaaattttctgacattccttaggcatcaccactgaataccgggattaggggtggttatgc

SEQ ID NO: 31336 - DNA, 442 bp, Mus musculus
  source 1..442: mol_type = other DNA
aatctaattcagacagtgctgcctgagtctcctagaaggtaccactctatagtagaggagccacagggtttctctgtatagccctggctgtcctggaactcactttgtagaccaggctggcctcgaactcagaaatctgcctgcctctgccttcagagttatttatagacagatcctgttactcactatgtagcccaggctggccctatcagaaggagggcctcttcctgaccttggtacaaaaagaacttctacttgagcgcgcacactcaagcattccctcctgtttaaatacacttaagagtgcaggtgcactatgctaacgcgcgtgcacatgcccacgtgggcgcgtctcactcgcgcgctccacgccaacgcaggcgcgcgtcaggaggcgcgcgctcgactccgcgtcaggaagcgggggcggtgggagcccgct

SEQ ID NO: 31337 - DNA, 447 bp, Mus musculus
  source 1..447: mol_type = other DNA
catacctttccactggtcagccgtatgagctgtagcctcgaaagctgcttccattttgtcacagattcgaagagcaattcagagagacccttatgtaaggcttgtccttacttgagggcaggtaagttccctctcagcaaaatctgtacaccatgtgtccagctgcacgtgcactgattgccccctcagctcaggatccccagggcacctgacattaggtacttccctcggtaaggcttctcaccctccagcatgagcgccgccgccggctcttgctgttgtcgtagctctcgcccaggctcagcgtcaccgagatgaagtcccggtgaggcgccggcggcggcgccggcggtgggtacataaagtgcgcacgcgccgcgtcttatcggtcgttgcgcaagctcagaagcaccgcgcctcgcgggtcactggcgtcacgatacccgc

SEQ ID NO: 31338 - DNA, 369 bp, Mus musculus
  source 1..369: mol_type = other DNA
gtggtggcgaacgcctttaaccccagcactcgggaggcagaggcaggcggatttctgagtttgaggccagcctggtctacagaggttccaggacagccagggctatacagagaaaccccgagctcccaggccgaggccaggccgcggcctcagggcgcagagccaccccaggactcagcctcagcagggccctccaggcgcgccagggtgatgcccgctccccgagatcgagcgcaggactccggcaaggggggagtctgcaggacgcctgcaatggagcggatgcgcgcgcgggtatcgtgacgccagtgacccgcgaggcgcggtgcttctgagcttgcgcaacgaccgataagacgcggcgcgtgc

SEQ ID NO: 31339 - DNA, 434 bp, Mus musculus
  source 1..434: mol_type = other DNA
gatctcatggaggcatttcctcaacttgtgataactccagctgtgtcaagttgacacaaagttccctagtctgtggcacggcattccacagctctaggctgttggccatgctggatggacatgttccactcacggccagggtgccagagagaaaactggtccttttttctctctgcaatgagacactctgtgccaatgaggtggagggcagcttcccacagaagccctgcccctttgggctgtgggcacagtgccagcagtggggagaaccgggcagctcagagattcccagaaagtccaaggtcctctctcagagacactgttcctctggtgctgaccagaacagcagccagtggaacatgtggggcttgcaacccctagggactgcggtatccttccgtgggaggaccctccgtaggctgatcctcccggtc

SEQ ID NO: 31340 - DNA, 326 bp, Mus musculus
  source 1..326: mol_type = other DNA
ccctgatgccagcagcaaaggctattcttcaggcagtgctggccaagaagtcctgtctgtgtgcctggtccggctacggaggagggggagggttaggtcagagccagcactttcccaacccccagacttcttgttgaccaagatgcaagcttgctttgtctcctaggcaaagtcgtcacagcagcctgtgctggctccacaagcagatgccaggacagagtgtggtgcggctgagtcacctacacgctctcggcaggtccctcggtgggagggccttaacgtgggcggggcctgttacagccccgccccggagcctaactctgggg

SEQ ID NO: 31341 - DNA, 365 bp, Mus musculus
  source 1..365: mol_type = other DNA
acacatgacagtcatcagcgctagctgcttccagaagcactttttccagaagtaactacaaaaggcacttttagcaagcaaaacctttttcatctaagcaacagcattcgagacttcccgtaagtgccattacctgctgcagacaacccttctggctgtgagcccagacttctttcttccccggggcaaggacagaacagttttttttttttaaagatttatttatttatttatatgtaagtacactgtgtctcttggggtactaggaaggcctgctctggaccgtacacggccagatccgcggggtcctgggtggaggtgccgcaccctgggcccgcccccctgggatctcagcccccggcctg

SEQ ID NO: 31342 - DNA, 194 bp, Mus musculus
  source 1..194: mol_type = other DNA
tcatgactcgatatgtagactaggctggtctcagcatcttgaacatgaatggtgatcaccaggcaccatgcatgttccatgttgtgtgactcagggatcatgaccaccttggacagctccccagggagcgagtcaaaggcgtgcatcctgggacgctcccgcccccgcaggtggagcgcgcaggcgcactctgc

SEQ ID NO: 31343 - DNA, 205 bp, Mus musculus
  source 1..205: mol_type = other DNA
gggaccctcctccaaactgagctggcatggggaggtgggtgaggctggggcaaaggccccagccagcctggcgacagcaggctctggcagccagaagcctgtggccccaagctggcaggatggcccccttcctgcaggtcccccacagccttctgggttcctgacacgactctcctggggtcaccaactatggttatcttactaa

SEQ ID NO: 31344 - DNA, 298 bp, Mus musculus
  source 1..298: mol_type = other DNA
ctctcctggggtcaccaactatggttatcttactaagggatgggcagggcacttctgaggtgccaatcagcctgcactcgcctctgccctggccatggcactgctgcagatgctggggacgatctggccaacactgtcctcccattcacagtctggactcaggcctgctattctgcttagctaaaagctttgtataggctgagtgaccgctgggccaccctaccctggtctgggctggaagctatagctttgcccaccagagcctgctcacgccaggctccttccctttccagactgg

SEQ ID NO: 31345 - DNA, 384 bp, Mus musculus
  source 1..384: mol_type = other DNA
tcaaaacagctgtctccacctgcagagagagagagaggatgaccttgtattgagatatggtctctctatgtagaccagtgctgagctgagcgctgggttaaatgataatctaggtaaacgctgagtgactgacccaagtgaggagggtcaatctaatggtgaccaagccccaaatctctcaattggagactcatatttggaatctcctgggagaagcatccctagacgaggcctagtgctgtgcgcaggtgcaggcgggcgcgggcgccccctggcggctacccgggcgcagagacgcctttaagtgggggcgacgggcgcgggcgcgacgagtctctgtagctgcggccgccggggcggagcctgcgagcagcaggtcctgga

SEQ ID NO: 31346 - DNA, 194 bp, Mus musculus
  source 1..194: mol_type = other DNA
ctacatggatcctcaaggctctagtccggagcacttttcaaatgttagcacagttttgggaagacttctgttcccatcaggcctcctcctgagcgactagtcatctctcccattagatctcaggttccagagacctcctgtttgttacaactcagctttagaaagagatgtgtttatatctgcctggtacccgg

SEQ ID NO: 31347 - DNA, 416 bp, Mus musculus
  source 1..416: mol_type = other DNA
ctgacagtcaggcatggagccaccttggctgcacggtgtagcctggaaggcaccagcctactaggtcctggtcttagccagtgggcagtgctggtcctctgtgagcacaggttctaaagaacagctctcctagatggctgctgctgtatgccaaaggcactcccactgtgaagcccagtgggcttgggaaggcccaatggcagcctggtagggtcagaccatactgggtagtacccttcaggcttatcagcctgccggccgcgaacatgtttggaatgcgggtccgctgtcagagggagggggcatctccctcggcttgtcacacagacaggtaactgagctgagatcaacccagtgtgcgttcctgaggcttgctgagactcaggcctcctgtggtcactggggcccacagctcc

SEQ ID NO: 31348 - DNA, 270 bp, Mus musculus
  source 1..270: mol_type = other DNA
aatctacccacttccggtagccccagatgttcatgttaaatgatcctgtgccccagaacccaggataaataaatgttcctgggccccaggggaagccacagactctgtccatgggagcccaaagggccaccatgtgaaccccagaagctaggcacaaatggtgctacacacccggcaccatccccactgtgaggtatgtggcaaggtctgagccagttctgcctcagctggaacctcttacataattagcagatgaggctgcagctggga

SEQ ID NO: 31349 - DNA, 328 bp, Mus musculus
  source 1..328: mol_type = other DNA
gggaggcggggatggacagacagtgcttaagcccacaccggttttagcacaaggggccagcaggcctgatccatacggcaagtgtttaggatctgagagggtcagccctgccctcagggccctggccacgtaggctgtgaagaaccaggtttctgagcaagcttcaccagcagccgctcctcgggcaggctactcacccagtcagatctcagccatgtctcaaggctttccccgcaggcctgtgggcactgctcagggaggccagggcagaacctgggccaccttctacctggcagatcaaaggcagattgaaggtctgccaatgtca

SEQ ID NO: 31350 - DNA, 398 bp, Mus musculus
  source 1..398: mol_type = other DNA
gtgggaaagcctggtccatcaaaggccagcttgagccagacctgcaagcctggccttcctgctctagtcttctacgtgccctgctctgcaggaaagatgaacctctttcaggacgttcagacaggaactacctacactaagtttgcatagcttctctctcacagcctctggggctgggcttgtaccagcatcttgctcctatagcacagcgctccatccccattggaccatcccatggggctgcactcctatagggtcctgctcttaaagaatgagaagggaggccttgggggatggacagacagtgcttaagcccacaccggttttagcacaaggggccagcaggcctgatccatacggcaagtgtttaggatctgagagggtcagccctgccctca

SEQ ID NO: 31351 - DNA, 398 bp, Mus musculus
  source 1..398: mol_type = other DNA
acaccggagggtggattgggacgacgtcaacctgccaaggccatcactggccagataaggccaccaaaggctggcacggcggggccaaagccgggactcaccgcggtgcctctgcccgctgcgctgcgcccggctttccacctccacgtctttatggaggcgccaggctcgacgctgagagccccgaggcatcgatggatgcgcctcaggctccgactagcagccagcgtttcttatgcgcctgcgcaaactcttattccggaggattgagccaggctcagctgggccggttcgagtgcagaggtcaactcttaactttgcagctcctatcaaggctaggttctaggatggaccctggcttgcttcctgtggcactggacagtggactctgacctagg

SEQ ID NO: 31352 - DNA, 414 bp, Mus musculus
  source 1..414: mol_type = other DNA
agctgcaccctggggagctgcccaggagccatgtccctgcaaactggaagtttctcaggactggggaaatggggcaccctggaccaatcccgccaagcggctttcgagtcctttggcccagcggccaacctgctacggacagtaggtgacaggacaggggtgcactgtcctaggtcagagtccactgtccagtgccacaggaagcaagccagggtccatcctagaacctagccttgataggagctgcaaagttaagagttgacctctgcactcgaaccggcccagctgagcctggctcaatcctccggaataagagtttgcgcaggcgcataagaaacgctggctgctagtcggagcctgaggcgcatccatcgatgcctcggggctctcagcgtcgagcctggcgcctccata

SEQ ID NO: 31353 - DNA, 432 bp, Mus musculus
  source 1..432: mol_type = other DNA
tgtggtccagagcaggcctccaggcactgcatgggagaggcaccctcaccttcaccgtgcagctccttcagtgtctgcacctccacacagggtacggctccctcactagtcaagattgagagcgggactctggaactcacgactcactagccacagggggcacccttctgctcacagagactccccgtgtgtccttgggccatgagcccctgccctgagccagacctcgagccactagtcggtagaattgctcctccagcacatctgcaggtgtcggggagcaggggcaggcccccctcatccatcgtgacattctgcccagacggtcctgaaacccaccagtggcggctctgagtctggggttccagacatggcagtcctagctagccccaccaactgcccaccggagaattccactgcactgagcatgtg

SEQ ID NO: 31354 - DNA, 446 bp, Mus musculus
  source 1..446: mol_type = other DNA
ggaatccctgtacttataatttttttaaaatacctttttaacaggactgcagagatgagaatagacaattgtcagaggtgtacaaatctacatgttgacgtagactcaagtctccaaacataagcttctcttgatgaatccttcaaacttttttaaaaacctttttattatattcattgaaatgttaactctttaaacttttaaattacacttattcgtctatttgtgtgtatgactaaataatgcataaactttccacgatgtggacccagggctcgaactcgagttacatttggtggcaagtgactgcaagtgactgacgagcttcctcaacaaccttgctaggaaccggagaactgcttccgtctgtcagcgggcagagtcaaggcggcctacgggtaggcgcgtgcgtctgtccgtcagacggggcgggccgcggcagcggg

SEQ ID NO: 31355 - DNA, 506 bp, Mus musculus
  source 1..506: mol_type = other DNA
ccttccgaatgctgggattaaagaccaccacctcgaggctgagttgcttatttttaaagtaattttgtttctatgtattccaaagaagccatcaatggttcacatgtttctgcacaaaatttgccagctgctgtttctctcccagagagcacctccaaaggaacttcgaagtactggtataatgccagagaacctggattctatcctgggatctcctcgctggcccaggttctccagaagtagaccggctgggatcagtaggatcccacttgtacggcacctgtgcctggcgctccgccctgcgcagccacagggacacgggactggaaccgtggcggcgatcaggcgtcgccctccacgcgccgcccgcgggcagcccccgcgggtccctagactagccgggtgcggattggccgcagagctcgggaagtgcgggctcctggaaccaccgcaccaggggcgggaccgaggcgctggcgccggaagcggggaggcgacgaagggac

SEQ ID NO: 31356 - DNA, 317 bp, Mus musculus
  source 1..317: mol_type = other DNA
agagcagtcagtgctgttaactgccactacgtagcaagttcaggccagcctggtctaagtgagaccctgtgtcagtacacacacacacacacacacacttgtactggtccacagcggcaggctgctgtactgggtttgtcctgatctggtccccctaagcacagagcagaggaagctctggaccatgtgctggatggccatgtgtagccactgagcagactgcccagatgggtaggctgtaggccccaagagaatcttagagcctttccaagctccaatagaaactttcagtgggagaggccccctctagggatggg

SEQ ID NO: 31357 - DNA, 332 bp, Mus musculus
  source 1..332: mol_type = other DNA
gcttcccccccgtacctggatctgagcccaggacccagattctccaagaatcttgggagaagaagaagacacacacctatgcacgagggtgtgcacacgcgctgcaacacttgctgccccgccgcctgccgccctccccaggggctccacagtccctcctgcggcagactggcaagaacgcctctgaaccaagtaaaatagaacttgaggattgaagccttaggacccaggagctgccctgcagcgggttgatttacagcaccacgggttaacctaggtggccagtccgtgcctcagattggaggtacaactggctgaggcctacgcatagg

SEQ ID NO: 31358 - DNA, 309 bp, Mus musculus
  source 1..309: mol_type = other DNA
cctgggccatggaggggtccccacaaagcccattgcaggttgacacaaaggtgagggacaccttggagttaccttttttctttttctgagacaaacctagttgtctggcacctggccttaggtgacttagggcaggggtctccagtcattgatacatgtctgaaatgagctcccggcaggagatggcctatggcagcaaacgccaacaggtagaggctctggaaagagggtggcagccactgctgtagtacagaaataaacatttttccagactcttgagctagtgcgctctctgcgcatgcgagcgtc

SEQ ID NO: 31359 - DNA, 598 bp, Mus musculus
  source 1..598: mol_type = other DNA
atacatgtctgaaatgagctcccggcaggagatggcctatggcagcaaacgccaacaggtagaggctctggaaagagggtggcagccactgctgtagtacagaaataaacatttttccagactcttgagctagtgcgctctctgcgcatgcgagcgtcccgtagccgcgccggcgccaagatggcggcgctgacgggtgcctggctgccgcgccgagggccgtggaagccggagcggagccacagaggctgaggccccagaacctcgctcgaggccgcgcccgctccggcctcgggggaagcctgggccggccggacatggtgcggggtgcgctgtgctgctgccgctgctgagctcgcaggccagcccggctcgcacgtccagcaggaacatgttctccgcgttgaagaagctggtggggtcggagcaggccccaggccgggacaagaacatccccgccgggctgcagtccatgaaccaggcgctgcagaggctgagtgcgggccgcgccgtcgggcaggccggggcggctggcagggcccggggcggccacccagcctactaggttccttgagggacatcacctgacaggagacct

SEQ ID NO: 31360 - DNA, 445 bp, Mus musculus
  source 1..445: mol_type = other DNA
cagcatattgggggatggggggtgggcatggcccatcttggaccctcagcgttccaaccatatcatatgtaaaagaaagaattctgtgactttgtgatgtgcattcacatctctttttgaaatagagtttcactgtgtagcccaggctggcctgggatcttcccatcttagcctctagtgctaagatcatacatatatctgtgctaccatgccaggcttaagcccaaattctgggtgcagcccatactatgcttgtgtggaacaacaaaatgcctggaggagagtcgcaggcggggctccggccaaggggctgattaccttcttcaggtaatccagcagcactttgtacagcgtgtggatgtgctcctggtcgtgcagatgaaataattaaaacattaactcaggtcatgggtctggcccaccccacccctccactggagggcag

SEQ ID NO: 31361 - DNA, 225 bp, Mus musculus
  source 1..225: mol_type = other DNA
agtgttacacacaggcatcccttctttctggtatccttgtaagaagaaattaagaaagcagagtcagccatgcaatccctgactcaaagaataaatgcctaaagagttagttatgcagacacaggccaagtcacccagtgcctgggagggctctagtgtccaacagagctcttgaaggaatttcagggttctctgttgagaaccttagtcccccatcataatgag

SEQ ID NO: 31362 - DNA, 173 bp, Mus musculus
  source 1..173: mol_type = other DNA
aagccagactgccctacagagcaagttggcccttttcttaaagagtgaacttctggaattctgttgtgccgtggctcctacagtgtacttacatataataaatcgtccgccccctaagccggacagagcttgaggttctgcgttctgcgcaggcccgagtcttgagccccgcc

SEQ ID NO: 31363 - DNA, 136 bp, Mus musculus
  source 1..136: mol_type = other DNA
ttaagagcactgcctgctcccaggctcagctctttcatggcccagccagtgcctatccatggatgggaggccatgccccgaatccccagtgctgactgggaaagcacacaggaagtgtgcctgtttaacttgcact

SEQ ID NO: 31364 - DNA, 324 bp, Mus musculus
  source 1..324: mol_type = other DNA
gtgtatttgaaattggacagacagagatagtgggatctctggggctcactggctaggcagcctagactactcagaccaatcaataaactaactaactagctagctagctagctagctaactaactaactaactaactaactaactaatgaacctgaggttgatttaagcttattgttacaaatggagaaactgagataaataatcactccacatgctaggatggaggcagcttaactgtcatcttagcagaagctgagtctctgagcagctgacagccagctttatgacattctctaagtggttgcacatgcttgcacactctc

SEQ ID NO: 31365 - DNA, 374 bp, Mus musculus
  source 1..374: mol_type = other DNA
cattagctgggttaccatttctacacttttatagccctgaataatttttatagttcttaactgtgccctgaaggatcagggcctgaattgtggtctctgtccataaagacaactttgtgggtaaagataatgccggggcagcagtgctggcttcagcccgagagtctcaccaggcctctgatgcctggatcacctgctacagctgacagtgccaaggagccttggtgtcaattactgagtggatggatagatgcatacatgagtggacacccagaggcaagatctgtgtctcctggaggcagtcccctagggtcccactatctagcaggtgggtgatccacttgactggagaaccttctatgcagattccaaca

SEQ ID NO: 31366 - DNA, 315 bp, Mus musculus
  source 1..315: mol_type = other DNA
ttgtacccacatgtttccacgtcagtgtccacaatcttgttgctctgcagaagtactcagaacatcttgataaagattgagtgaaccacttccccaacaacttctgctctcagcagctctgatgatcagatagcagagcagtctgacttcagggctggctgaaaagtcttagaggcagctttttatgtatttaatgactgggacaaaagatgtctgagatagcagtttctggacagacaacttgaactcttggcctgtactcctaaactttctagggtggttgagctgggcaccaaggccaccaatataagctgt

SEQ ID NO: 31367 - DNA, 316 bp, Mus musculus
  source 1..316: mol_type = other DNA
gctaggcaagagctgttgaatagttctgagcaggaaggcaactgagtatctaccttgggttagcatccacaggctgcctagcaggaagacacttcctagcagggagttacagccagggctctagctcctgtgggccctcattccaaatgggatatgtgcacacatctatatatagccttgggaagggagtcccaaagcttactcagatgcctatcacctgggttatgagagtcccaaggcatatgaggagcagcctccatatggcttctgctcccaggcagccagtgtctgctgcagccaaaaatggccctgaagg

SEQ ID NO: 31368 - DNA, 492 bp, Mus musculus
  source 1..492: mol_type = other DNA
gacaggctgtgatggagcctggctctccatcccatgtcagggcacaagatggatatatggacgtcctgtcagtgggccctcagaggagggagcaacaaaaggtcaagtccccttgttgggcaatgcagccaacttacaagtgagatgtagggaatgggccttggccggtttgtgaaaaaggcccaagacatctttgctctgtagagagcacggctggccagccctgatggggcatccaggcccaggcaggggccaagccatctgggacccagaagatggtctctggttgtgaaactcagcctggttctcagcagcaggagatcagaggccagatctcagggatcatagctcagggcagccggtgtgtgaagggaagcctggccctccccctctacccagggtcctttgtgagcacagcacttggcaacaacaaccttcagctccatgatggatgtgtgacatggctagtgccaagtgggcacacgtccctgt

SEQ ID NO: 31369 - DNA, 479 bp, Mus musculus
  source 1..479: mol_type = other DNA
agtttaattcatgcctaaatttaatgtgtagctcacacatatttgtatctacattttagaaaatttgcaggagccattcatagatgcaagcatcatatactcattacgttaagatctctcgcagagatccagaggtcctgggccttagttcggatgcacttacatatatgcaggcaaatcattcatacacttaaaatgatataaataaataaaaaaaatagtgatgtggaagtggaacattttcagtcataaatgagaattggagagtatcatattaaatgaattaagtcagtctcagagagacaagatctttgctttttcataggtacatgaaatcacactaggttatctgcgtccacgaaaatgtatcctgtgcacgatagcccctctccgtaaggtggcgcgatactttgagcgtggcgtctggcgacgagctgacgcctcctccctccgctgcagccggagaccgagcctggtga

SEQ ID NO: 31370 - DNA, 295 bp, Mus musculus
  source 1..295: mol_type = other DNA
gctccagggagaacctgtagcaacacagaggtcatctctctcctgtggaaaggaaacagtttactttcagagagcctcacaaaggcccagatgtttgtgtctacctacatgctgtgtgttgaagggagcagaggggactagggttcttcccttctaccatgtaaaatccagctcagaaactgtgaaatcaatttctgattgtgagccacacaatctgtgtgattttgttctcagagccaagttaaactctgagcaggcactcccagagtgcccagctgaaggccctcagccagag

SEQ ID NO: 31371 - DNA, 321 bp, Mus musculus
  source 1..321: mol_type = other DNA
agctggagctcccagtttcatcatggagcacagtgggccttccactgagaaccccggagtagccctggcctaccttggcctttctgtcaggaggactaaggccttaattctctgacctttagagacaatacagtgcttccatggacacatgggaagggcagagggtaccctgagaggtgtcctccccatagctcagcgagcctgcagcatcttgctaagagagttagaaggccttatgccccatgggtcctgtgaagccatggcctcttgggcttgggccaatgagatgtcacatctaaagtgtgcaacagtatgtataca

SEQ ID NO: 31372 - DNA, 398 bp, Mus musculus
  source 1..398: mol_type = other DNA
gaaactcaggtgtgatggagcctgggtctccaatgtcccatcagtgggccctcagaggagggagcaacaaaaggtcaagccttgtgacatgaaccctttcactgattcatttagggggcagccaacttacaattgagatgtagggaaagtgaacttgccgtttgtgaaaaaggactaagagtgctttcccaggcaggggccaagccatctgggacccaagcaggagatcagaggccagatctcagggatcatagctcagggcagccatggcaggagtgtgaagggaagcctggcccatcccctccacggtcctgtgagcacagcacttggcaacaacaaccttcagctccatgatggatgtgtgacatggctagtgccaagtgggcacacgtccctgt

SEQ ID NO: 31373 - DNA, 371 bp, Mus musculus
  source 1..371: mol_type = other DNA
catggtgcaggaggagctgaaggttctgcatctccatctgaaggctgctagcagaagactggcttccaggcagctaggaggaggtttggatttccttgatgttcaagaatagatgcacacaaggttatgttataatctcatataaccatgtggtgagagtgggctcacatgaggtttacagtgaaaaccttgttctgagtaccacaggatgggagaacactctgtcatacagcactgagtgtgtctgaagacagctacagtgtactcacatacattaaataaataaatcttttttaaaaaaagattcaagaacagaatattttaaaaagtcctttcatgtttcgtgacatcattaacagtgggtaccaccg

SEQ ID NO: 31374 - DNA, 364 bp, Mus musculus
  source 1..364: mol_type = other DNA
ccaacaacctaccattgatattaacttgtgtggttttaacaatgcttgatacctgcctggtacctgacattagtcgggcagatcaatgagggaagtggcagccagtgggtgtctgccccaatgccaccaacacaccggtgcctggaggcagtgggagccagagactgtgcagcacactctgatttcagtgagatcctccaagcatggtggctgactctgctgtcagcttgagctgcaagccatctgtcaggactcaaacactggggctctctgagttttaacttctgagcttagacaccaggctggcctgggtccagggacctgatagccaaagaccagttaaatggggacctttggctgcctt

SEQ ID NO: 31375 - DNA, 268 bp, Mus musculus
  source 1..268: mol_type = other DNA
tctctgcaggtccccaggagaggtgcagtgatctgcattgagctgccagctaggactgagcttttgaggacaggccccagatgcgggtctccaaactgctgtgtttcaccagcgaagcccgggtgttgcctggctagagtcctcttgagactggccaggtctcccaactaggttcaaatagccctgtagtctgctccaaagagctgtaggcatcctggccatgccgtgttgctactttctgacaaaggggtcagaacaggtcacgtcc

SEQ ID NO: 31376 - DNA, 486 bp, Mus musculus
  source 1..486: mol_type = other DNA
aacacaagttccatccttgtgttgcaaggaccccaggtcctgctcaggttgtgagttgagactgtgcaagtccccaggtacctggcacagactaatacctgtatctggggcagcctgatctagagttctagcacagccagggctacacgcccacttcactccgtgaggccctgaggtgggacttagaggatgggtggagctctgggcttcctgccatcctgagcaatacaccatggttcccaggacacacaagagtaccctgtgatgtgggtagatgcccagcagagatggctatcttttctctccatcaactggaggtgagttatcaccattactattacttctggtaggagtcggggtaagatccaggttgggacaagcctggagccgaccttggtgcacggggagccaagctgacaccctccccactctggaccattccactgtgctgcgcgttgggggtgaggtgcgcggtggttgcgcccg

SEQ ID NO: 31377 - DNA, 266 bp, Mus musculus
  source 1..266: mol_type = other DNA
ccttacagcccagtgctgaggagctgggcgtttctctgggaagaatggtgaccttggcaagcatcccagagctcccgggggactgggcatggtgttaggggaggtctacctgacgtgggcagcacgcctcccaccctcctgccccctgcatgttctatatggacttgggtcagagcccaggtgagtaccccgggcccctgtggagctcctccttgagcaggcccctgggcactatcctcccacacagtgtgggctaggaccaggcc

SEQ ID NO: 31378 - DNA, 364 bp, Mus musculus
  source 1..364: mol_type = other DNA
tcacccacgcccgggccggagggttcctgagccttcccaggggctggtgcgcacacagtccgggctggcatccatttcccttaggagctcgcggttgctccggactcccgagagctgcgggggagccgcacacactctgcgacgcccactttctgccagtccgggcggagacgtcttggcatctcagtccacagatgcagcaccggtgcagactctaagggcgctcagttctcagagagcttctctgcacacaggctgaggctcaatcaaggccagagattagtctctcaagttgatactgcgcctgcgcgggatccggacaggggcgtgtcctgcgcctgcgtgacgcggcggcggcgcgtta

SEQ ID NO: 31379 - DNA, 450 bp, Mus musculus
  source 1..450: mol_type = other DNA
acacagatctgtggcaagagctcatggatcttgtcaaagatgactaggatcactaataattatgatattatttattttttatttgtttttttttagcttaaaaagatttattttgtaagtattgtgcttacatatatgtatcaacagtgtgtctgatcttcaagataattctgaagcaccattgtgggttctgagaaacacaggatccttgtgtgtgtgtgtacgcacgcgcagaatcttatgtagtcaaggatctgcctaaacgttcaggattataaacctgtgccaggcgtatgctgcgccgaggagcaaacccagggctttgtgcatggcatacaactgtgacagggagaactacaactcccatctgacccacctcacacattaatttttggtaagggggccgtgagcctgggaacgacaactcccggcgtgcccgcacttccggcg

SEQ ID NO: 31380 - DNA, 246 bp, Mus musculus
  source 1..246: mol_type = other DNA
ttctttctggagagctgaaggagcaggtacccttaaccttcttaaagctgcagagtgtttggctctgaggctctgaggcaaagtgggggagatagctccagggtcctaaccccttcccaatctgcagactgtttggaatagtttaaatgctttgacactgggtaattcatatgcaaaactgcaccactgtttttaaagctggggctgggagctggcatttacttcagctcccaaatcaaaggcggc

SEQ ID NO: 31381 - DNA, 413 bp, Mus musculus
  source 1..413: mol_type = other DNA
gtttaggccaacagtcagttatgaccaaagcaagctaatgcctagtaatgaccttagccagcagctggtgatgcgcggctgtgactctcaaaaggcactggtgcctgagcacacactgagactcaggtcaaccaatatttctaagcacttgtattaaaaccagatctctgttcaagagagcatagccttgagcaaacagtgagtactgttgaccatgtctggagacactgtcacatgcgcaccagagcccggtttgggactcagtgcctcaggtcctagtgcaggaacgagtgctcggactcccgcgcccacctggcgacgagtgcgcgcgcgcgcgcgcggtcggcgctctgtccctttaaacagcccgcgggcgcctcccccgcgccccgcccccgccgcggtgcggccgc

SEQ ID NO: 31382 - DNA, 244 bp, Mus musculus
  source 1..244: mol_type = other DNA
tttctacagatctggccaagactctgggaggctgctggagaccccaagacctgcccagggtgtggaccagccccctgctctggagttcaagccttggggcctgtgctaaactgcacctatgcaaaccaaggtgactctgaggcctgacttggggttcaaggctgtgcagcccaaaggcacccctttgtgtcccactgggtgggcctgagagactgtgtgctgttcaggccttccatgaggcgga

SEQ ID NO: 31383 - DNA, 297 bp, Mus musculus
  source 1..297: mol_type = other DNA
ggtggcaagtgcctttacccacaaaaaagagagtataatgacatatggcacattcacttatttttacaggatgtgcacatgccactgtgcaaaggtgccttgcagccacccctttccacaatgtaggataaccctgtaaggctactttccggtccgtcatgggatgatggcctgctgcttgcaggaacctggcaaggtcatttagaccggtctctgggtgccagcggcgcgcgttctgcgcctgcgcgggagagctaaactcacgctccggctgaggccgcgggccaatgacgtcac

SEQ ID NO: 31384 - DNA, 449 bp, Mus musculus
  source 1..449: mol_type = other DNA
gtctgatcggtcacagtcctagggagggtggcagcaacctgctgattctgcaaacacttctagggtgtccctaattgttaccagggcactataccctgctggattctagttcctacagccctcagtgagggctcatgatctcagggcttccgcagctcaacaggacaccggatctgaggtcctaagaccttctcgctgtactggctccaggaggcacttctgttgggggaccttcaaatcgagctcctcgtagcgatggcttgaccaggtgtggtgctgtccagctccggtagccttccgggaggcaagccagacggcttctaggcacctcggttccggctggtctccagtggcctccagtggccccgggagcgtctctgcgacccccggcccagccccgccccgcggccccgccccccaccgctccgccctccgcgggcccgaggctt

SEQ ID NO: 31385 - DNA, 484 bp, Mus musculus
  source 1..484: mol_type = other DNA
gtaatttaaatgtttatttattttttaatgcaaagattttgagtaaaaagcaattggcatgaaaatgtcaatgaaatttcttaaggggtacattttgtatttaagtaaactctaatgtgcacattgtaagaataaagaaatttgacatttagtaaagttgtttcagttttttgaaatgtgagcagctttatgtaaagctggattcagggaattctccaaacccttttctgcagacacaactctgaagttctaagaattttttgtataaataaactagagcatcctcagcacagagcctgggctgtgcccagcctggggcagattgccctgcaggcacctgggaacttctgctcaggacccttcagctctgacctgtgcctgcaagcaaaaggcctttggacccagaatctattccgccagcctgactccgcctgcccaggcctggaaggggccaagggcgggggcaggcttgtgaaggtcccca

SEQ ID NO: 31386 - DNA, 298 bp, Mus musculus
  source 1..298: mol_type = other DNA
ctggtttattgtaaacaatattaaataggtcagtagaagagattacatattctctctagtgtttaagagtcaggtctacctctcctttctaccatcttagcaggaagccagccatttgaagttgacaggtaaaatcataggttgcatgtaaaatctaggattcatgctacataagaaatacaggcatatagcaaatattttttcgatctgtttttgtcctatctgcatttcagactgaaaatcttgtgtttggggctagtgcctagggcgggaccggcgcgcgcaagcacgtgacgcc

SEQ ID NO: 31387 - DNA, 348 bp, Mus musculus
  source 1..348: mol_type = other DNA
ataggaataagttcacctgggcccctaggtggcagagctcacgatccccgtcatgggcatgctgcccatttccctaaggagacctgccccagggacactctccctcagtcttggggaagtactagaatgttctggctgagggaaagtagtctcctgaccctttagaaacagtctcaaggagctaacatatataacatatacaaaggaaaagaaaaatcaagtcttgggttttcatctgcttcggaagaaaagcttcaagctaagcagggttctgttcacaccttcgcttcctcctgtccaaggttagccttagactgggattagagcacaggctaacactcagtgaca

SEQ ID NO: 31388 - DNA, 350 bp, Mus musculus
  source 1..350: mol_type = other DNA
cttggcatggtgtccctcttcagaccagggtccagggggacactgccaacatgttcctgtccaatggaactggctgtccagttcagatcctcagggtcctgggagaactcagaggagggagcaacggccagcctcccacgtgggctcctggtcaaacgcttgcatttcacagatgaaattcaacatgaaatctggaaggtagagacttgcctagggctggacagcatcctcccagagccccgcccaccccacggtaggcgggaccgccgcagtggtggccggtgggcgcctgcccctccccaccctccctccgcctggcggcggtgacatcacagctctggcgggagggg

SEQ ID NO: 31389 - DNA, 349 bp, Mus musculus
  source 1..349: mol_type = other DNA
tacccctgctgtccagctcctgtggctgcagctctgggttccatagcccaaagaaaggcctctgagaagccaccagtgcactgccctcacgcactggatcaggtcctgactctgtagtcgggaccagcctccatagaccctgtgtggccccgcaccctggttagacctggaatctgtaacaatgttgttcggaatcctaaggcaggctctcctgactggcattccgaaaggtggggggggacctagcactcccgaagtccctgggttcttgctccctgcccagcctccaaggaggacagaagggcagcagaggattaccttaggctccttgatcccttgatccacatta

SEQ ID NO: 31390 - DNA, 484 bp, Mus musculus
  source 1..484: mol_type = other DNA
gacctggtaggagtggcccagcagggacccaagctcagacttcctggaggcactcagctttcctgaaatagtaggagaaagagtctgtatttaggcttaagagtctctgtgtaggacactcaagtcctgaggctctaggaagtagcatgtaacaccctctcactgccacagtctcaggtggcctgtgggagcccacccttcctgccagggcggccgcctccattatccctgagctcagagcctgccaatgtcaagctacccaggtcagaatgggagtcagtctggggtggcctctacgcccaggggcccaggggttgggtgggaaagggctttcaaataagctgtccacccccacagagcatgcccacccacaggcctcaaggggtgtgctctgttgaggtgtgtgtgtgtctatgtgcatgcgcgcgcattcaagcacttggagggcgggtattgggagagcccagccttctccctagctcct

SEQ ID NO: 31391 - DNA, 453 bp, Mus musculus
  source 1..453: mol_type = other DNA
ggggcccccctttatggctctgaacaaggagcatctttcactgacccatgtaaggctgattggggttcccaagagccctgctgttcactgcgccagctagctctggagtcccagggctgccgtggtaaggccacggtgtccagctgcccgccccgttgtccagctgccggccccgttccttctctagggcatggggcccagcagcagcgagcccccggagaaggagcggcggcgcctcaaggagagcttcgggctggcgggtgggacacctgtgcctacctgctcacactgcgggccccacaggaagcgggcgctccgcaagatgctagcgaaccgcgccgaggctgagttttttttttttttttttttactgtattagaattagaaaatgcaactaaataaaataatcaccgagctgagcctgttggttggcaccggtggcggatggaagcc

SEQ ID NO: 31392 - DNA, 260 bp, Mus musculus
  source 1..260: mol_type = other DNA
actggccagtcgccaggcttggttttcaccagccttgagcctcgcccattggacttgcaaactttatatgccccataaattctgagttcaaggccagcctggtctacaaagtgagttccaggacagcctgggctatacagagaaaccctgtctaaaaacaaacaaacaaaaaattaataatggataattattggtattttgtttcagctgtgatgtgttggccacacacctcctagcatgccctgcgccgcagcctgggt

SEQ ID NO: 31393 - DNA, 418 bp, Mus musculus
  source 1..418: mol_type = other DNA
tcgcttcatattgatcctattaattattcaaaacatttaatcaacagaaagttttcaaaacaatggctagaacttacttcgtaactttggtttcaaacttttcctgtccatcaactgttgcaaacagcaggatgtatgttcatcacaggcatgcccgttgtccatggaggtagcagtcagtaggcctaactactgagctatgggcctgggcaagcccggcccctcagggcttcgctttggtctaaaggctccagccgagggactcttccttctccaggcccaaggcgcctgtgctctgatccagcgagacaggcctcggctcacctgggccgcgcgcacagcaccgcagatccccgaagcagccgcgcagccgcccacactgccgtcgccatcgcgccgccgcgcttctgcggccgac

SEQ ID NO: 31394 - DNA, 598 bp, Mus musculus
  source 1..598: mol_type = other DNA
aggtatataccccgccaggcactgaagacccactgagctactctacctccaaagcgcgtctcaggggctcccgaaggaccttggtgctcaccgtgatcacagcaaggactcccactgagtctgggactagaagagcagctgcaggtggacccgctaggtccagcccctggccttgcccaagccggtgggcttaagtgccaccaggcactaccttcctgccttgaggcgggcgggcgggctgtggggagggctccccgcgctgcccagctccgcactgtggccggcgccccgccgaagccagcaccgggctaggtccccgccatgggggcgctcgctcatacgcaggagccgagagcggcttcaccgcgggccgccgccgcccgcgccccccggccctgccccagccgcgcgccgctcaccgtcgggaaccacaaggctccgcgtccgcgatagagggggcgcgccctgccgccgcgcgtagcccgacatcgccgcgccctaacccggccgcggccccatggcccgcaaggcagtcgccggcccctgcctcatccggctcggcgggccggaagccagcgccgaacgccgcggggcgggg

SEQ ID NO: 31395 - DNA, 526 bp, Mus musculus
  source 1..526: mol_type = other DNA
ctgaagctgctgatctgattaaccaggtcaaaaactggagtctgtatggagccctctagctgactcaatgtcacctgcagacagctaagagtcaaagctttaaggcttcactgactgtctatccttacactctaaagaatttaaaaaaacataaatggtttgtttggtattaaatttagaaattgtagaacatggaattagtaggttccttgcatcatctaggaaagacttccaggacgttccatagatgagtgtacttggaccctcctgttcctcataagaaacttgctgggaccaggcaggacccttgcctctggttcaaccctgcccaggattcaagaagcttcctccctgggagctgctatttttccaaaattcacattgttaaataaaatattttgggctctcaagtaacttaatttaactgcctgtgcctggtcctgccgcggcttggcagggcgggagctcgcaccgggctgtggtcctccggccgcgagagggcgctgtggcggcggtcttgggccgg

SEQ ID NO: 31396 - DNA, 406 bp, Mus musculus
  source 1..406: mol_type = other DNA
ggtctaagtccagcgttccgccgtgggctttaggccgcgccctgccgggaggagtcttggcctccaggcttggtggtgagagttcctactagcaccaggaacgccgggcaggctccagcaaagagccgtagccaaggtacagctccgcgcacgcgcctgtccagcccgcagaagtcgaccgcctagctactcgagcagggtggcgcacgcgtagtcgcccccgccggcaagcgagagggcccgctggggctctggagactgattctccccggggatctggattgaagaatcctgtcgggcgacgtgaagaggcggggcccgcgctcctggctccgcaagtgggtgagggcggggccacgtgtacggagcgcggccaagagcgcgctgacgtctccttcggacacgt

SEQ ID NO: 31397 - DNA, 460 bp, Mus musculus
  source 1..460: mol_type = other DNA
tgtgagctgtggttggcttctcaggcgccgcgaactgaaacccagccggcgacggcggcggcagtagggggaactagcgcgttcccagcagcagccgcagccatcttggcacatccggctccaggtgccgccgccgacgtgtccgaaggagacgtcagcgcgctcttggccgcgctccgtacacgtggccccgccctcacccacttgcggagccaggagcgcgggccccgcctcttcacgtcgcccgacaggattcttcaatccagatccccggggagaatcagtctccagagccccagcgggccctctcgcttgccggcgggggcgactacgcgtgcgccaccctgctcgagtagctaggcggtcgacttctgcgggctggacaggcgcgtgcgcggagctgtaccttggctacggctctttgctggagcctgcccggcgttcctggtgctagtaggaa

SEQ ID NO: 31398 - DNA, 252 bp, Mus musculus
  source 1..252: mol_type = other DNA
ttccagattccattgaactttaactgcaaagggattccttggggagttcccttagggagccccgaactcccttctacagaggctgcgggcgcgacgccatcatcgtttaaggtcaagcgttccggaagtcatggcgccagggcgccctagacctaactccaggatggagctggttcccctggctcgggacgcgctccctagcccggacaggggatggggcggggcaggggcgggcccccataggggcggagc

SEQ ID NO: 31399 - DNA, 314 bp, Mus musculus
  source 1..314: mol_type = other DNA
aggctggggaagggcccgcccgccccatgaacctttctgagacatgctgggggactgaggtccaggagggccctggaggcccatgtggggaagtagggccaagtgtccccagcagccaccactgctcatgcctgggctctgcttctgagagaggctgtctccctggaagctggctgcactagacatccataacttgtgatggtggactaagtgaggactgatgggaagttaggcccagccttggctgacagagccatcctgtccctaggcccaagctgggagacaaacaggaaggccatctctctgctgtgcag

SEQ ID NO: 31400 - DNA, 328 bp, Mus musculus
  source 1..328: mol_type = other DNA
aatgtaaggctgacactgcaagctcagcctcggtggaaagctggcagcggcccattacagcgcctccccacagcctgctagggggtaagggaggggaggagacttccatcttggcccagcctgcaggctttcagctcactggcagcctgggctgatgccctggaagaaacagcctgggttctaggaccgcatgccaccctggttgcacgcagctccagtggggccaggtacctgtgttacacacatttagggaaggcccgctcctgtgtcccaaagaagcagaaggctacttctgtcacgggctagaccctggagtcccagggaatcc

SEQ ID NO: 31401 - DNA, 309 bp, Mus musculus
  source 1..309: mol_type = other DNA
tagcggccggaccacaggtgagtccccagtaaaccttctgggcagcagccaggagtcctgccttgcagggagcatgagagcccatgtctgccaaggaggcttggacagggtttctctgtatagccctggctgtcctggaactcattttgtagaccaggctggccgccaccatgcccggcttcgtcaggcatctgggagccattcatggcttcctgactagaggctgggttgcatctagatcacctaggtagactcagttttgccatgagcacatcgccgccggggcggggccgagggcggggcggggcg

SEQ ID NO: 31402 - DNA, 352 bp, Mus musculus
  source 1..352: mol_type = other DNA
cagtgggctccgcactcagggcaaccctgccctggctgctgcgtccatgtgggaatggagggagttgcatccgcccaggacactgccgctgccctgtgggatggcagggagatacttgccagacaggtaagcacccttctttgggcccaggacccccagcgctgtcgcagatgggacgcgctgcctgtctaaggaggggccctccccggtgcagctagccctgggtggaggccagcactatgctgtgagggctggctccttgcctggtggaaggggccactttaccctgaagaggtttctgtcagccagttgagtgaaagagccccacactggctctggcagcccgctgtga

SEQ ID NO: 31403 - DNA, 528 bp, Mus musculus
  source 1..528: mol_type = other DNA
gttatataggtagatattaaaattatcatctctccggatctgagaaaaccagagattctctcagaatgcctggatataggggagcctgtggatgcattttgtcactgacatctgctctgagaacatgatcaggaaggatgtatatggctggcctgcaagccccggtcacagtgcccgggcatcaggtctccctgctcaagggaacctagccggccacagccaggtggcctagtcaggtaaccattggtcactcagtagccggtcaatgccaggctggggacttgtggccgcaagccccggtgcaggggcgtgggaggcaacgccagagcccaggccacccggcagcctcaatgtcctgccgcaagggggaggcggggtccgcgtccaggacgcggcggggcggagcggggcgcgatgccccccggcagggccaggcccggaggggcgggaacagggcgggacggccgcacctagctctgggcttccagcctggcccgccctctaccctcggcgctcctcaaaaggggc

SEQ ID NO: 31404 - DNA, 347 bp, Mus musculus
  source 1..347: mol_type = other DNA
agcaattaacatccttaaactaaagctgtcttttatcattttgcaaggcatatatatatggggggaaggcgtattccctgggaatgcatatgcagctgcagaagaaactggttctcaggagtaccgtcttttacccttgaaaaggtggaagagcaggcggggaccttacaggtcctcagcgccagcctgccccggtgtccccagcgggagagctagactagccgcggggccgcgcgccagtcctcccacgcgcgtgcacgccccttccggtctccacacgcgcgcgcacgcccctctgtccatcttcccgcgcgtgcacgcccctcctccaggccgtctccccgcgc

SEQ ID NO: 31405 - DNA, 335 bp, Mus musculus
  source 1..335: mol_type = other DNA
aaatctagttgttagaagttaggcaggaggatcagaagttcaacttatcttcaactacatagcattggctggcccaccagtggtgtattatttgtcttccagcactgtcctgaagcagaggacagccaagctgctgtgtgcctctcctggaaaagaggaaacaactggtcacctcctcaggacttcatgggtcgtttgaaaaggttctgcttggaaaggcaggatctaggatcaagcagtacagagtcccatgagcctctaaccgactgggctatgagaagcgccggcgaggaggagggcgcggcactcggaggacagtgaaagtccctcgcggg

SEQ ID NO: 31406 - DNA, 406 bp, Mus musculus
  source 1..406: mol_type = other DNA
aggagggctctggcctccttgtgtccatcttggtctttttattaaaaagaatgagacttgagacatatgtatagaagagagctcaattatgcataatatgctggggctctattccaatatcctttgacaaattgatatcccagagttcacagactcttacatgtctcttagattattccacctaaaatgtagcagaggaggtacctttgctctaagagaccactggcagccctggctgcataatgcagcagttcaggtggagcctcttagagcatatacatgtctattttgggccttctagagtgatttgggatcccaaaacataaaggcagccctccttttctggtccacaattgacaaatggccaagaggggtgtggccagtgtcatttttgtccataaagggc

SEQ ID NO: 31407 - DNA, 222 bp, Mus musculus
  source 1..222: mol_type = other DNA
cgacgactgttcatgtacatttttttttttaaagattttatttattatatgtaagtacactgaagatcagtcagtgctcttaactgctgagccatctcaccattgattgatagaaaaaatcatgtgttaggctaatacattaacacttttttgttgttacaaagataactgtaattagaccagtcttactcatgacgtttttctagattaagttgacagaca

SEQ ID NO: 31408 - DNA, 355 bp, Mus musculus
  source 1..355: mol_type = other DNA
agtcactgccccagtgagggagttttccgttgtgttttacaattctgtcgttcacatttaaaagcgaaacttctcctttaaagggcaccgagctccctgttctagaaattcagagtcacaagtgatgtaagttgtgtgtcaccttggtcacacccaaaaaactaccgggcaggctcttctttggctgggcatcccctgcaggcggggttctgacctccaggtctgcccggccctgagggcttcaagctcggtgggagcccagccctctcaggaggaaagcagctgctagcggaaacctcggcggggtcacgccgctctactggtggtacctgcgtgtacggagcttccggcgggg

SEQ ID NO: 31409 - DNA, 515 bp, Mus musculus
  source 1..515: mol_type = other DNA
accgaggcctctcctcgggccggcctgcagccgaggcagtacccagggcaggagatctgatagcaaatattctgtcacatcatccagccgagcatgcgcagtggcggctgctcgggacggtgccccaaggcgccttgcccttcttctcgaacagagggttgaccacctttgacgacggcgggggccggggccaccttcttccccttggccttcttccctttgggctgtacggaagagagaaaccggagtcattgcctgtgagtcggtcgctgtggctccctttccgcgagggaccccgaggagacagggacggcggagaacgccgctgacgggcgacgggcggcggatggaggcggatagcgcgatatcgcgagagcaggcgccctcgcgggatttcggatctgacggggcggagcctgagcgggggcgtgtcgggccgcggctgcgcgttcgtccaggcgggcgggccctggcaccggaccgcaggctccgagaggcggcgggaggcgccagga

SEQ ID NO: 31410 - DNA, 468 bp, Mus musculus
  source 1..468: mol_type = other DNA
gtggattgcctttcacaggggctgcctaagaccatctaacaacagttctgtagttgcaacaaaaataattttatggctggaggtcaccacaacatgagggttgtggtgtttaagggttaaactcaccagtcacaccggtcaggtgagcccctgtacccaggccccagggaaaatctcggtgaagttgtccatgatggacttgatccttgctctggggaagggctctctgctgggccatggcgggccctggacgagaaccagtctggtccggcccgaaccgagtactgagggctggggaccgggatttccggcgaggtcctggcgcctcccgccgcctctcggagcctgcggtccggtgccagggcccgcccgcctggacgaacgcgcagccgcggcccgacacgcccccgctcaggctccgccccgtcagatccgaaatcccgcgagggcgcctgctctcgcgatatc

SEQ ID NO: 31411 - DNA, 302 bp, Mus musculus
  source 1..302: mol_type = other DNA
tttaaggtcagtctggcctacatgtatctgggatcaaggacccagattgttacccaagaaattgcagtttcacactgcatgcttggcggtcagacagctcagggagtgctatatgaggatcacagtgggatcccaagctcagaacagggggcacaggctctgctcctaggcggtgctgggcacaatgtgtggagcagcgaacctgcggatgagcatctggtcagaaggtggttcttgccagggtgctggcgcaagaatgcaagcacatcagtgcgtccacgtgagacagagcgccgtcccgg

SEQ ID NO: 31412 - DNA, 236 bp, Mus musculus
  source 1..236: mol_type = other DNA
gagggatgagccatgactagcgttggaccccgagcctcggagaagaatcgtcctctgctttagcggcggctgtttcagcagtagaactgcaacatgacagcgcagaactgggcctgcggggaccagacaggtcttgggcagggtcctccctggcaccgctccacccagggctaagttgggcagggtcctcttccgggaccgagaaatctgcttccttccgggacggcgctctgtct

SEQ ID NO: 31413 - DNA, 406 bp, Mus musculus
  source 1..406: mol_type = other DNA
gaggggggaagggcacgtgcaccattctccaaccagtggttagggtcaccctgtgatggaggctgggcctggctgtgtggccctcggacctgtcccgctgcccaaggacactggaccttggttgtggtccatggtatctcgtggagacactgcgtccgggcaaagccctcgagccaggccttgagcatgctcggtagtgactctcgtacatggcatactcgtactacgacgcggcaggcggggccgcaagtagtctaccagcacggtgggcagggcgcgcggcggaggcggggcctgttcgtgaagggcggtgcgccggcgccaggctcctcgagcgtggcgggcggggcctggagcgtgagggcgcgcggcaggcggggcggggcgcggcgggaggcgcggtccc

SEQ ID NO: 31414 - DNA, 306 bp, Mus musculus
  source 1..306: mol_type = other DNA
ccccttttatggtcagtcctacctagctgctaccaggtaactgtgtgagtccagacagaataccaacagcttattgctggtcattaacactgcgattaagaatgtatatgtatacgtatatagtcacaattaaattttgctttatcattaatatcggttgtgcatagggcaacctacacaaaggaaggctccgcagcgctgctagccagggctgtcagcccccagtgctaactagcgggctagtcgcagagtccgcatacgtgcggaaccagatcaacccgggttcccgcatgcgcagtggagcac

SEQ ID NO: 31415 - DNA, 553 bp, Mus musculus
  source 1..553: mol_type = other DNA
gagccgccgcggttcagagggcagagggcacagagcagcaccgcgggccccgggagcctccctggccgccacccccctcggatttctccgtagagctaggcaggacggcgaggacgggcgtccgtggggccgtgacggccagcgggctgtggggcaggccgcacctggtcggcgaagtcctcggccgtgcccatcaggtcgcggcggaaggctcagctggcaggtcctgggcgctcgcgcctgctgcggcctccacaggaagtacccggcggccggcctcgctgagccgcggctgctctagcggctgccacgtaggccgggaccgcgcctcccgccgcgccccgccccgcctgccgcgcgccctcacgctccaggccccgcccgccacgctcgaggagcctggcgccggcgcaccgcccttcacgaacaggccccgcctccgccgcgcgccctgcccaccgtgctggtagactacttgcggccccgcctgccgcgtcgtagtacgagtatgccatgtacgagagtcactaccgagcatgctcaaggcctggct

SEQ ID NO: 31416 - DNA, 353 bp, Mus musculus
  source 1..353: mol_type = other DNA
ggggtcccctggtcgggggctgcccctacctccccgctgcgtgggtcaggcatgctcacccgggctgagtggaaaagcatccggcagtctctccgaatagagacaagactgtctgatcaagtctcaagtctcgtttattcaagatgttatcgttggtgggcttcttgcaaaaacatcatgctaggagcagagatgacagctgttttctactaggagtcggctcccaacatgagaggcagtctcaggactgtcatgtccttagtgcatccttttagtggctagtcaaagacctcccaggaggagggtgcacagttggaacttttcctggtgcacattccaggcaagaagctgct

SEQ ID NO: 31417 - DNA, 304 bp, Mus musculus
  source 1..304: mol_type = other DNA
ctcagacttagtcttgagccgtgggctcctttaagaaacacaggagtttataaataatgatcactcatatccacagtctgaggaccacaacattttgggcgaggctgaactggagtttagccctggcttcctggaggcacatgccagtctcgacagcctggctctgtcctaggtttctctcgaagttccaggtgggactggaggcctttgccacttctggatgacgtcttccaatcttgcaaagaagggcgtctgacagtccccgccccccggctatggcctgcgggcccgccctcccacaagg

SEQ ID NO: 31418 - DNA, 435 bp, Mus musculus
  source 1..435: mol_type = other DNA
agaagtgtttctaaaggggaactgagacttctacaacaccctttactgttttaatagcctggtaacaaaagacacagataggcatcttgattgtggctttataccattactggaatgattttgaacagtgcaccacagctatggggtgagacaccgcagggcacctgctggagttacccccaataataaaaaaatatataataataacaatcacccagccatggagcagtccacgctcttagcctggcgaaagggtgctcaggcggccctgccctagaagcgggtttccccggcagaatccagcgcctcaaggcgcacgcgatgggacacgcccgggagcccgatcgcaccctgcatccgaggcgtgcggctgtctcattggacagcacggctctgcagggccgccctgcagccaatcgcatctgtagggcggag

SEQ ID NO: 31419 - DNA, 312 bp, Mus musculus
  source 1..312: mol_type = other DNA
tgcctccttgggcaggaggttccccagggaagttcactgtcacaattaatcctcagggcctgaggaagtaagttttactcattcagccagaagagcagagtctggcccaaaggctggggctgacccaacacagaggctggaccatctattgattgacagagtccatgtgcaaccagcaggtgactgatacatccatcatccaggttgcacttgtcaaaataattatgtcatgtaattaaatattacttaaaatgatgaaatgtagcaagttgttttctgcaagaaataagttgtctgcttagaaccttttgc

SEQ ID NO: 31420 - DNA, 401 bp, Mus musculus
  source 1..401: mol_type = other DNA
tctggtggtcagacacaagactcagacatctcatcatccaaagtcctcttggattcataagacttcagctctagctcagcagggacagagctcttgagtccaatagctgcccagctgctgtggggtccagccaagctggtacgcacccgaaagcctggacatcacatggtttccagccgggtcaagggggctccgctccaccactaattgatccattagggtcagtcactctggacctaggcaagccagtctcaggctcactcactgatcctggactgtggcagcagcagccagcaggcagctggacagcctggccatactgtgcgcccggccagccgccagcaggctgggcgggggagcagcggtagttcctccccgtctgcctgacagctataaaggca

SEQ ID NO: 31421 - DNA, 375 bp, Mus musculus
  source 1..375: mol_type = other DNA
tggagtgtgctcagtgtgtgagccactgattaagtccaggccctggcagaaatcaatagtggtggctgcctctgctgggtcccatcccagagcactgggagtgaacacctgacggaagccttcagactatgggtttaaaccctgtgtacagactccttggctgggggctgaggggtgcctgccagacagttcccgctgaggggccctggccactaacttagcaagacaggccagcagctcgaactgactaaactaagtttggcccttgccatgttcatcctgggacaaggaccctgatagaaaaaggtcacattcataggaacttgtccccaagacttccaaaaaagaaacatggcttccttgggggaattcctc

SEQ ID NO: 31422 - DNA, 479 bp, Mus musculus
  source 1..479: mol_type = other DNA
ctggtctttctatgcccagccagtgggccatatgtccttcctggcacaatccagtacccatacagtacccttagtggtccagggagttcggccttaggttgaggtctgcagccacagccctctccggaatatcttccagaatggggcttatcttgggaacatatttctcaaaaggaaaggccagaattcatttccactcaaatctacttgggggtaaagtagcagagatttgcttccttcccaatgagtcaccaaccagcccagtgcagactgtacactacaccaatcagccttaaaggccctgctacaagaaggaccagggacctgctccaaggttgtgctttccagcgcagggcgcgcacaacagtgtcggacgcggaccagcgtcagcaccagggacagttcctcgcctgctccccgcagccgccgccgacggcgcgcgcagggctgcagcgcgcactcctcagcaggctagcgcg

SEQ ID NO: 31423 - DNA, 302 bp, Mus musculus
  source 1..302: mol_type = other DNA
gaggctcaggcttgtgtttctgaacctgtgcaggggcggagatgggaacaggtatgtcccccaccctccgcacccactccttctgtagcagccgtggcgccagctggagcccgtggagagagtgtctaaacacggacttgcctatgaggccctccgcagggcgtggctggaggtgtccttaggacctatgtctgcagagagtagctgtttccaacaggcgtcagagatttgttggaggcagggcatggactggtgggagggccaccaagacaatttgcagcctggcccaaccccactatggc

SEQ ID NO: 31424 - DNA, 567 bp, Mus musculus
  source 1..567: mol_type = other DNA
ttggatatccagaggttttgaaagaatgggcacagactatgggcagctgcctatagcctgtctgatcccaggagtgagcaagctagtgccaagatgatctcaccaccaactacagatggagctggctggatgcccagggtcatagagctgggctctggtttcacagtccttctctgctggccagccaggagaactgcccacttggcagctgtcccagctgggttgtccacattcctgccccggttgtagtccggaccagcagagggaggggcagtgtccccgacagccccttcatgggcagggttggagctagctgcttgctagctgggacctccctcatgagagggctctgcagagtgtcttcccgccttaaaaaagggccctgtgtctgaggcctcaggtctgtgactgagttctcattccctgtgtcctgtgccctggcccttggaaagctgagggagagaggaggagcaggctgggggcctggctgccccaccccccacccctgctctgactagctgggctggcaaggaaggagcacgtggcagctccttgggccagcagcat

SEQ ID NO: 31425 - DNA, 534 bp, Mus musculus
  source 1..534: mol_type = other DNA
tcaggggtcccttaatgctggtggggccagcaaccagcctcagaaagtttctgctccctttctgaaatgagcagctccgtgggcagccatgagggggcccctccctccatagcccctggatgccagacctgggttcccaggagctactttgtatgcagtaagctgacagcaaggcacatagatggacagctctgtgcccctctgattctttggatatccagaggttttgaaacagaatgggcacagactatgggcagctgcctatagcctgtctgatcccaggagtgagcaagctagtgccaagatgatctcaccaccaactacagatggagctggctggatgcccagggtcatagagctgggctctggtttcacagtccttctctgctggccagccaggagaactgcccacttggcagctgtcccagctgggttgtccacattcctgccccggttgtagtccggaccagcagagggaggggcagtgtccccgacagccccttcatgggcagggttggagctagctgcttgcta

SEQ ID NO: 31426 - DNA, 491 bp, Mus musculus
  source 1..491: mol_type = other DNA
ttcccctgaagattcagaggtgaagtagaggggctgacttcctgcagagagaggcctttctgggagggacttccctgggtgcaggggacagatctgtcatccttccctggcccaggtaaactgagagaggcagggttggaaactggacaccagtctcatagaaaccaagaaactgtccagagcaaattaattttaatcacaaaaatcagttatttatgcttttgacaagggggctgaaagtgaaggatttttttccccctctcaagaccctgcaaggttctgccgtgcggcggcctcatcgcaccgcaagagcctccacgtgcacctagggaaagtcgtgggcggggagcctgctcaggagccccgccttcctcaactttcgctggcggcccaggggcaggaagccggggaggtgccgggtgaaggtgccagctccgcccccggccccgcccggccgtggccgcgccccctgcacccccagcgcctaggag

SEQ ID NO: 31427 - DNA, 242 bp, Mus musculus
  source 1..242: mol_type = other DNA
tatgcaggtgggatgctgagtcctgcagctcgcctgggcagcaggagagtgggagagctgaccagctcagataccactcactttgagtcagtgaactgctggagcacgctggtcctacaggatctccaggacataggcaaagtgcaggactctctttgcaatgaacatgtgttgtggcagagctgaaattaaaacaacagggactttaactgagccctggaaaccaagggaccctagggccc

SEQ ID NO: 31428 - DNA, 547 bp, Mus musculus
  source 1..547: mol_type = other DNA
ttgttggggtctatcacacacccacctaaacgcagaaaaagggcgggacttaatctcattcctgtctttccataggcacatggggacacactgagacccaggattttggggcgggattgatcgcgactcctccctggcaaggaccgccctgcgcgcgccctcgccaggctaattaggcgcgacatgggggccggtgcgcgcctccctgctgaggcctcggggtacccgggtagtgaccccagggtgctaactgcgttcgcgggcgggccaaggttccagcgtcgcctcgggtcctggcgggcaacctcccagccccgcccccacgcgcccctaggccgggcccgctggcggccagggcggccgggcgggcggccgggggcgcgcggggcggggcacggcgtggcgccggcggggccgggacatgtagtccgtgcgcctcggcctcccctgggcggccctggcgcgagcccgggcgcggactacgactcccgccaggcgccgcggcgtagcgcatgagccctgtacagctccggcgcgtctattatgc

SEQ ID NO: 31429 - DNA, 319 bp, Mus musculus
  source 1..319: mol_type = other DNA
aggtgcagacctggctccaggttctccaaaactttgctaactgcaggccggccagcctgctagggggagctccagagccacacaggagccagatttgagcctacattcaggtgcaactgcatcgttccagatgcatgcatagcaggaagccccccgccttgcggtaggctggggaggccgcaggagctccggacttccggacctcgtggacatccaccagtgggtttcccaacagtcctgggcaggcacgggccagcacaggcaaattgtaactgttagcttggctacttctagagtgctccagtctgcagttataagg

SEQ ID NO: 31430 - DNA, 294 bp, Mus musculus
  source 1..294: mol_type = other DNA
acttgtttgaagtacatctgtcccaaatatgttggggatggtgattagaataaaaatctcgagcaagaaatctgtataagattttaaagctcccaatatcggacctttttagataatggtgaattttgtttagtagtcacaaaagcttgttactgaaaagtatcatattttattgcggttatttagaagtaaaaacggtttatttatttcaaacccgacacgctttaattaattcacgggaggctgtgtacggagtctgcgcatactcctcggctcccgccaccgtgtctccgc

SEQ ID NO: 31431 - DNA, 685 bp, Mus musculus
  source 1..685: mol_type = other DNA
aattccagctgcccaagtcggcgggcgggttgcggaggagtgcttcctttcgtttttaaacaaacaaatcatgactggggccacgggtgatgtccgaagccggcagtagcgcccttcaagccccgcgcctctgaggagggtgagcaccccctctgcctgtctggcctgcggtcagacaccaggggcccagggatgcgcagggcctcggctcttctgcagggagccttgcaggaccagggtcctcgcgcggccacggccggcctctttgtgtgtccgcgcagacaatggcccggccgcggggctctcctcccggcccggcaccaccaccgcgggccgccgggtttttgggcagccgggaagggaaggctgctttaccccaccgccccgccctggctcctgggaacccttggcagatgcaaacttgcaagtttgcagggcgctcacaactcggggccgggctgcgagcgcggggtggccgtggtggtggcggcggcggcggcagcggcgggcggggcgcgcaccggttgcgggcggggcgagtggcggcgacggcgctgcgccgagtccgcgcccgtcgcgggccccccgccgctccccccccacccccccgccccgctgcaggccgggccggagcgggtcgcgggcgcgcggcggaggcgcgggcggcgggtgcgcgcgcggggcg

SEQ ID NO: 31432 - DNA, 362 bp, Mus musculus
  source 1..362: mol_type = other DNA
gtacagactctgtccatgactggctgtggatggtgattggaaactcccattcccactctctggccagtcacaaggcattgggcaagctaacagatcaggctacctgctacaccacatcgtgcttatgtgttggggatgtccccacaggggcactctctgcctgggagtatcatgtcccatgaagccacttcatttgagacctgggtgggtatggcccagatcccctccaagtgtgatttgaaggaagcccagccggggttccgtgggttccgcgacagagctgcgggcaggtgggcggtgggacctctgagccaccaggagccaattgtttctcttcctcctccagagtctgggcaggcacc

SEQ ID NO: 31433 - DNA, 470 bp, Mus musculus
  source 1..470: mol_type = other DNA
tttgtgtctgaaagagtcaggcttttgcagggcctcccaggcctggagaagtctgggagaactcctgtctccctctgctgtagatggggagctgggagcccctctccttttccagctgtcagctctggaaggggacctgattaatgggcatccttgacagtctggtctgtggacccttctggctgaattgcaagttgagtctccgccccggaactcctccttaaagagaaagttctgtgtgggtccctcaacgtttggaggccgccgcccagagcggggagaaagaacgggggcgccggccccgtcccacgtccgctcccgccccgggccagccccttcctcatccccaccccctcgccctcggcgcccagtgggaggcggggaccggccttgctgagcggggcgccgggctctgtggggggtgggggaatccacagcctccgcgttgtctgccagcagcgagggaggga

SEQ ID NO: 31434 - DNA, 507 bp, Mus musculus
  source 1..507: mol_type = other DNA
ccctggaccagtggtggaaggtgtcatgcctccctcctgggagtaagggtaacactgagggcctgaggggcagcccaatgtgctcctgccccactcttgctggcaaatgctaggcctagccagggaaggaccacatgctccctggggcccagagaaagaggtttctcctgctctgaggcccagagatcaactgtcctctcctggcaacctggatgcttgcctaaggcttcaggctcccattgttagtgggattatgatactaaatctaagtgtacaggcctggaaagctggttctccctgcttctagaagtttccagatgccttgaacaccttagagaaaggcagtagaccgctgcctgttctgagcttcagctgcctcagccacaggggatgaagaacacaggagctccaccatgctatagagctgcagcctggaacagagagaaaagtgtgctgttgttcctctgtgcagactcctcccacagcatcctgttagggctgccagac

SEQ ID NO: 31435 - DNA, 324 bp, Mus musculus
  source 1..324: mol_type = other DNA
ggatctgtaggagcggcccttacacaggctcctcaactcaaaaccctaacagtgtggaaagtgatgacctcagatgtccacacctttcagctgaagcagcccctgactggctggagctcacacaaactgtcactggagctcacacaaactggcgttcagtgtctgatcctatggaacttcagtcctttccaccttgttagccggtaatgacaaggtacaaacagggatgcaaacagaggtgcctctagacctggctcagatgcctctgcaggggcggcctccaggaagtgactatctcctggggattggggccctataagagca

SEQ ID NO: 31436 - DNA, 391 bp, Mus musculus
  source 1..391: mol_type = other DNA
tagagttcattttcctaagactgaaagcaaaacaatgggaacaaatcatctgagatgattccaaagccttcggcacattaaaccccctacagtcaaggctttgggtccacaggggtttagttggcccgaacccactggaggattccacagcatgtgtataaccacctgtgtgggtgccacacacaccaacataggaatgggaaaggcctcttccccttaagggccatctagggtgccatcctgtcaccactcagcggtccctggctgagtctccagagtgggaagactggccaggatagacttgtctggctcactcctcccttccccgggcaagcaaggcgcacgggtccctcggcgccgcccccgccagcgcccctcggcaccgctgcag

SEQ ID NO: 31437 - DNA, 451 bp, Mus musculus
  source 1..451: mol_type = other DNA
aaaccccctacagtcaaggctttgggtccacaggggtttagttggcccgaacccactggaggattccacagcatgtgtataaccacctgtgtgggtgccacacacaccaacataggaatgggaaaggcctcttccccttaagggccatctagggtgccatcctgtcaccactcagcggtccctggctgagtctccagagtgggaagactggccaggatagacttgtctggctcactcctcccttccccgggcaagcaaggcgcacgggtccctcggcgccgcccccgccagcgcccctcggcaccgctgcagcccgggcgcgccgccgagctctgcagggcgcgcctctccgccgagctcgggcgcgcggggacccgcctggcgcgcagggaaagcaagcgcagcccccgccccgccagcccagccctgcccgagaggcagtcgcgccgga

SEQ ID NO: 31438 - DNA, 239 bp, Mus musculus
  source 1..239: mol_type = other DNA
gtgcctgctgcttcaaagtcaaaagcactatgaagtttacaagtcttggcacagaagcttgcctggccctgatctgggtccctgcgagggacccctgtcccacaatcatgggtagcagctcggccgaccggtttgcagacctcgctgcctgcagccagggggcgtcgcggagccggacctgggcagattgcgtcggccgccgcccggccttgtccccgccccccggccgcggcccccgc

SEQ ID NO: 31439 - DNA, 364 bp, Mus musculus
  source 1..364: mol_type = other DNA
ttgttgctgtcatcgtcgtcgtcatcattgtcaatgtcatcgttgttgtcgccccagagcctacaaggtgttttaactctagttcctggaggtcatacatgtcagcagttaagagcactgactgctcggtgtgtctgaagatagtcacagtgtattcatatacataaaataaatagttttttttaatgcacttataaaacaaacaataagggttgctctctgagtcctccagaggattgagaggtcgcccactggtcacagtgccaactcgcccatttacagatgcgggcgcagcgagcggtgcacagcggagagggtcctccgggccagcaagcggcgctgcgaccccgcgcgctcagaggag

SEQ ID NO: 31440 - DNA, 448 bp, Mus musculus
  source 1..448: mol_type = other DNA
acctccaggaactagagttaaaacaccttgtaggctctggggcgacaacaacgatgacattgacaatgatgacgacgacgatgacagcaacaacactgactggccagacattcatagagatctgactggtgcacataattttttattgtttgttttaaaattactatttatttttattattgttgttaagtgactggtctagtactctctttttaaatcaggctggcctcgaactcagagatgcacgtcattaatgctgaactatgtgcatggttcacaagatcattttttatatttcaccaatatatggcctaggattccctaaatttagcagcacctcacatctagatttaggctgagtcaggaagcacctaattcctgcctattggctggtgaattttgggacgatacaaggatgctagacttgcctacagctagctgctagcca

SEQ ID NO: 31441 - DNA, 347 bp, Mus musculus
  source 1..347: mol_type = other DNA
attgttggaccccaggggcccaagtgttgagggttgctcagcctcgcagggagagtcaaccacgattgtcaaaagtacagcttttttatactcttttgaagggcggttacacagctatattattattggctagcaaagcaacagtatatttttaattttagtggtcagctattagaattcaaaccatcatgaccgctaactatatttcttcagactaagaagagacagggccttggccagattcagagactctggttctaacagcctgtgttgggagacctaccatccctgcctaggagctgtacgttccgcgccccaaggaccaggaatcctgctgtgtgctgggt

SEQ ID NO: 31442 - DNA, 463 bp, Mus musculus
  source 1..463: mol_type = other DNA
gagacagggtctcactcctggaattaggtgtgcacttccacacccagcaagatttatttttatttatgtgtatgtgtccaagcagcaatctgaggcttaatcccgagtgattaaggactccttgacctgattctctgtggtgacagggactggaggagcaacttgaccttcctgccagtctgagtctcctgccaccaagctgagtcctgcaggtggcgtcggggtgtccaggatctccatcctggagctgccccagccggggcgggagtacagcgcaggcggctggcgttcggtgcgcggcgcgtgcgcgcggctaggcggggtcacgtgcgcgcgccgggcggtggacaccaggccgacgtcccaggtctaatcgcctgcgaccggcggggaaagaggccgagcgtgtcctcgagctcgcgcaccggggcccgcccctcgcacctgcgggcgagctgggcgg

SEQ ID NO: 31443 - DNA, 352 bp, Mus musculus
  source 1..352: mol_type = other DNA
tgagctgctgccgggtccttggcccaggaatggggctggggaaatgggagccacccacacgcctggacttcctggagatagggcagagcccgggcttctgagcagccttagggtcatattcactggagcctgttcataaaaatactttctgacaattaaaaatttcaaagaaaatttagccatgtctgcaatgtacacacatgcatggcatggactggatgccaacgccctgtggacactgagcccaaatatatgagcacatagtcagtgacctcattgacatcccgggaagtggatctgatgcccacacaatacatagactgtgtatgcaagcgctgtccacgctgacatc

SEQ ID NO: 31444 - DNA, 330 bp, Mus musculus
  source 1..330: mol_type = other DNA
cagctgaacaccttaaagggtcccggtagctaagggacacaccctggtaagtgagccatgccaggtttggctcagggagctcaccccctgccagggcagcctgcactgcctctctctctctctctctctcgcgcgcgcgcgcgcgcgcgcgcacgcaggagtccttcataggtgacactaactgaaccctgataaaacagggttctgctcccaggtgggcagtaacccacacaggtgcactgtgggcaccactccggatgctcagggccagcctgaccgaccaccacacctgtgtgtctgtgtatacatggtatgcacacacatgacctt

SEQ ID NO: 31445 - DNA, 449 bp, Mus musculus
  source 1..449: mol_type = other DNA
cgatctaggcctggattgaatgagtcatgaaagtgtcgcctcattcattcactgcagttcaaataaggctgtgctccccgcaccaaggaaatcagcatatcatggtggatccccagatcgctttctaagatcatgtttatatcataaggagaagagaaggctccatgtagcttagaagcagctttgtaggttcaggaaccgaacttcttctcattcagaggtagtatgttgcaaattttgctaagcatgctgtgcgtacatcctaatatgggatgcgatgtgcatctaatattttactgtcatctctaaaaggcttgtgtattaaactcacaggtgtgatgataagaagttatcaatttgttaatttacagttgcactaagagactcagtggactgctttttcgcgggccagaggacgcctggggcacgtcttcaagctctcattggac

SEQ ID NO: 31446 - DNA, 522 bp, Mus musculus
  source 1..522: mol_type = other DNA
tatcatggtggatccccagatcgctttctaagatcatgtttatatcataaggagaagagaaggctccatgtagcttagaagcagctttgtaggttcaggaaccgaacttcttctcattcagaggtagtatgttgcaaattttgctaagcatgctgtgcgtacatcctaatatgggatgcgatgtgcatctaatattttactgtcatctctaaaaggcttgtgtattaaactcacaggtgtgatgataagaagttatcaatttgttaatttacagttgcactaagagactcagtggactgctttttcgcgggccagaggacgcctggggcacgtcttcaagctctcattggacgggatatccggaaaaacccggtcgaatcctggcttgtcttcattttaaattaaaaagcccccagttctgtgtggtgtagcaaaataaacagttgcggcgacgttcctggaggccttcgagtctccatgatttacctttgaggtgaggcctcgcggagccatttgagaacg

SEQ ID NO: 31447 - DNA, 230 bp, Mus musculus
  source 1..230: mol_type = other DNA
tgtttggcgctggcctgggtacccagaggggcccccattggaactttgccaggtacaggttccactgtactggcccaggatccaagagctttaaacagtcaatgctagacttttacattttaataagttagccactctctttcacccaaatgctactgaaagtttctggagaaatttccagtgggttagaagcttctgtgaagtttgctgacgctgcagccgcctttgac

SEQ ID NO: 31448 - DNA, 464 bp, Mus musculus
  source 1..464: mol_type = other DNA
ttgtggcggcggctgctggggcagctgcggcggtgaacacctttaaagctagactctcttgacttccaggccagcctgggctacagagcaagagaaactttgtcttggaaaaccttaataaatacataattaattaaaaaaataatacaaaaaactatatacattaagctttgcaccacagccggcaaggtttgaaaagacttgacaccttgtcatggcatgcaagtaaatcaaggtattctgactttacaacatcactccacagactcttctgcaaaggaaaaagtggtggtgggggaaagccccatcctttttgctgcaattgacaggctgtccatccaaggggatcccagctggctcgaaagggccagcgctctccactgagcctagtcctgtctggagaggctgagactctggccatctggcattaggcgcggaggcccccgccgctcgagacgcttcac

SEQ ID NO: 31449 - DNA, 345 bp, Mus musculus
  source 1..345: mol_type = other DNA
gaagcaggtcactgaacttcttgaacgtgttccgttagggcttccaaggcccagcttactactgcgccatttcacaggtggggaagaggagctgccggcccggcccggtagaggcatttcctccgtaacggcgttgctgggacgccaagctatgcgtcatcggtgagcgcctcagctggggcgagtcctggtcccggatcgcctgtggagctacaggaagctcccagatcctggtttgggcggccggccgagtcatgtgaccgggttgccatagcacctgtggtcacaatcggccaagcctgcctggcctctatggcctcgaccccgcccacgccctcctgaggg

SEQ ID NO: 31450 - DNA, 383 bp, Mus musculus
  source 1..383: mol_type = other DNA
tgagattaagattagtctaaagattaagtgagatatcactatgtacccacactgtccactccctataggccagtcactgtcggggagtgttccccacaaacttaggctcactgtaaatctgtcaaatttacaacatctagagtgcagtgcctccgtgggtgtgcggccccgagggcgggaaggcccctcaggagggcgtgggcggggtcgaggccatagaggccaggcaggcttggccgattgtgaccacaggtgctatggcaacccggtcacatgactcggccggccgcccaaaccaggatctgggagcttcctgtagctccacaggcgatccgggaccaggactcgccccagctgaggcgctcaccgatgacgcatagctt

SEQ ID NO: 31451 - DNA, 459 bp, Mus musculus
  source 1..459: mol_type = other DNA
gttgtcgctcgctgtctgtcaagccagcccttccagggctgggactggattgtaagtgtgcactgccatgcttggctcacccaaagatgttcactgcagtgctagagtaacaaaacttatagaatgaatatatatgtatatagtgtatatgtaaatatatatatatgtgtgtatatatatatatgtgtgtatatgtatatatatatatgaatatgatgtctatatatgggaggttcagctattccagcagtgactgactgaatgaaaagtcaaagggttcagtagttgagagagagagagagaaatttcattctttcataggagcagctcttttccattttcctttaaaatttagttcattccagatgtaagcaaattggcaaccgatggttgccatcgcagatggtgaaaaatgtttacagattcgtgaagctgtgggcaaagctggcagcatggctc

SEQ ID NO: 31452 - DNA, 462 bp, Mus musculus
  source 1..462: mol_type = other DNA
ctcgagggaacggatacgtggatctgccagcagaagacctggctcccgacagttaagacctcatgtctcaggcattatttttgactagttactacagcctgttccccgctcgttcacgtgtttccgagagcagcccggcagcccctctggacatcttagcactcgcttcatctggacctgagtgcgtccgaagcacgtcctggatcttcgcaactatcgccggtccgccgccgccccttccgggtccgggagccgggacggcacgcaccggcgggaaggcctcacacgcctaggccgagcgaacccacggaggctcactctcccgtgggctccttctccgcgtgtctgcaggcgcgcctcgggtcagccctaccggagcgcactttccagacaggcagctccacggccatctagcagggtggcgttgcctagcaacgacggggtcctttctggctcggtggc

SEQ ID NO: 31453 - DNA, 556 bp, Mus musculus
  source 1..556: mol_type = other DNA
gccagcccagggcctggggagttggatcccggggctaactgttccatccaccagtaatgaaggaacacgactttttaaaagctgcggcgaggctagccccttggaatcctagagccgggtgcaggccagcttcccttgggatccgtggcgcgtccgcgggagagatcaccagatcctggcctgggttgtgcacatcgcagataagccggcgacgcgagacacgcggtggtcctcagaccaggagagcggctctaacccgctcaccgcgtattgcagcttcacggcaggctcccgccgagtcaccatgaggcgaaacgaggcgctgggcccgggggccgcgtcggcagccgcctccttcccgccccctcctctgcgggcggcgagggctcgtcggccttgggccccaccagggcctggtccgcctcgctcatcttactaggagcgaggaggtcgggttaccggcacaccgcgcccgttcactccccgcaggccccgagcgccaccgagccagaaaggaccccgtcgttgctaggcaacgccaccctgctagatggcc

SEQ ID NO: 31454 - DNA, 242 bp, Mus musculus
  source 1..242: mol_type = other DNA
ctctaaaacctcttctcttttaacacaacctagatttgattcttgaatttctagaaagaaaaccggaagctcttgagctgttggcgtcttgtcaccaaggagacgggacgttccatttttccgaaaggggtagtgtagacactcttccctctctctccgcaggtgggcgcgctctgctccggagcctgccttgccgcgaggtgcaccccagggtccccgtggtgcagcccggagcgcgcgct

SEQ ID NO: 31455 - DNA, 655 bp, Mus musculus
  source 1..655: mol_type = other DNA
gaatcctagagccgggtgcaggccagcttcccttgggatccgtggcgcgtccgcgggagagatcaccagatcctggcctgggttgtgcacatcgcagataagccggcgacgcgagacacgcggtggtcctcagaccaggagagcggctctaacccgctcaccgcgtattgcagcttcacggcaggctcccgccgagtcaccatgaggcgaaacgaggcgctgggcccgggggccgcgtcggcagccgcctccttcccgccccctcctctgcgggcggcgagggctcgtcggccttgggccccaccagggcctggtccgcctcgctcatcttactaggagcgaggaggtcgggttaccggcacaccgcgcccgttcactccccgcaggccccgagcgccaccgagccagaaaggaccccgtcgttgctaggcaacgccaccctgctagatggccgtggagctgcctgtctggaaagtgcgctccggtagggctgacccgaggcgcgcctgcagacacgcggagaaggagcccacgggagagtgagcctccgtgggttcgctcggcctaggcgtgtgaggccttcccgccggtgcgtgccgtcccggctcccggacccggaaggggcggcggcggaccggcgatagttgcgaagatc

SEQ ID NO: 31456 - DNA, 375 bp, Mus musculus
  source 1..375: mol_type = other DNA
cttccgaaggtctgacgccctcttctggagtgtctggagacagctacagtgtacttacttacatataataaataaataaatctttaaaaaaaaagacagcataaaacctggtatgatggtacctgcctgttatctcagtactgaccctaggctacatgagacctcaaataaacaagagaaaagctttcaacttttatgatcaccacacaaaaatgtaactgttttatcttgctaggattaaaggcattataagctaagttttggcttattattattattattattattattactactactactactatgagagtctcacttgcgcgcctccatgttactatggcagccggatgcgcagctggccggaagtcagta

SEQ ID NO: 31457 - DNA, 410 bp, Mus musculus
  source 1..410: mol_type = other DNA
taggaaggtctctgacccacctgccatggcaatggaacccagtgttacagtgtgacaggtgagtgctcctgagttactttcttgcacactttcctttaaaaaaaaaaaaaaaaggaaaaaaaaaaaaagaaaaagaaagaatgttaacttttaatttttggttaatttaaaatcgctgacctccaggtctggagtttcatcacaccctttcctttttaaaaaaaagaattattttaattttaaaattttggtgaatgtaatgggctttaagccttctgagtacagggacccacccaactgtcctttgggaaatctgacatgactgtgttccattatcggagcctgttctgggtcgacggaaacgtgacagacaggggcggggacaggctcctcggctaatttaccgctcc

SEQ ID NO: 31458 - DNA, 501 bp, Mus musculus
  source 1..501: mol_type = other DNA
gaaggtctctgacccacctgccatggcaatggaacccagtgttacagtgtgacaggtgagtgctcctgagttactttcttgcacactttcctttaaaaaaaaaaaaaaaaggaaaaaaaaaaaaagaaaaagaaagaatgttaacttttaatttttggttaatttaaaatcgctgacctccaggtctggagtttcatcacaccctttcctttttaaaaaaaagaattattttaattttaaaattttggtgaatgtaatgggctttaagccttctgagtacagggacccacccaactgtcctttgggaaatctgacatgactgtgttccattatcggagcctgttctgggtcgacggaaacgtgacagacaggggcggggacaggctcctcggctaatttaccgctccggaagtgacgccactcaccgcccccttggtgtaccacaacaagccggctctggcgggggcgggctgagggcggggtccgctctcgcggcagcgg

SEQ ID NO: 31459 - DNA, 551 bp, Mus musculus
  source 1..551: mol_type = other DNA
cggagtgcaggggggcggtgaggcgccccgccatctggccggcgccgcgccagggggatgttcaggcgcctggaccagcagcggcgaagcccacccaggccaggggctgagtggggcgcgcgtgcaggttctcccctggctgcccagggggccccacctcccgatcggcccgggagggccatgcaagccgcgcggttggcccccttccctggcccgcgtctccgggacggctgcgggcgggccccccggcggcccgagggttccccagcccagatctgagggtggccaccgcagcggcggcgcggggcaggagtctccagctctcaaccctgcggcccgtgcgcccacccagcaccagccagagggtggcggtctccggcctctcggggctcgctccgggaagctgctccgagcccgggtaaggcgagcggggagcgccggggcggcgggcggggacggaagcgccgcagtttcgccagggtgctttcattttgaaaaggcttcggcgacctccccggaccagggagtcactcggagcctcctagccgagg

SEQ ID NO: 31460 - DNA, 527 bp, Mus musculus
  source 1..527: mol_type = other DNA
cttattcttaattacaaataaaaacccttattctttaattacaaaaactttagcctgcacaggacagaggaacttatccattaacttgaaaggtatattgtccattttgatgtcacagtatatatcaatttgtatcatatataatcacattttgcttattctatagtgacacataccataatttctattattattattattgttaatttacttttttttctatttccttttaagtttcataaagaaaaacgttttgaaactatatagaataccttgctgtttcgaaaaaacatcaattgattcataccttaaccaattatttaggctatgtgttggcattttactacaggtaagagagttcttcccctttatttatgaatatggactcattcattatgtgactgttcaaattttggagatacacagtgggcttctgcatttctttgtcattcactattaagcaaaaggagaggacaaaatgtggagatcataacttcatcacgaagcgccgcgcgccgctcaggctg

SEQ ID NO: 31461 - DNA, 321 bp, Mus musculus
  source 1..321: mol_type = other DNA
ggtctcaggtttcagtgtgcctgagacccatgtgcgctcgagcatctgaaattatcatgtgtagtacccctatgcccacagtagcctgggagtctgaatggttttgatttagaattttatgttctagaaaggcagcatgtcaatataccataacctggtaatcagtactgtgctggtgaaatgtaaggtgtgtatacagctagaacactccctcagcagcagcagcaggggcttctgggagtgcaagtgcaagtccaatgcagttggctcctctagagctgattgcgactccaggttccaagaggcctggctgcagacgcc

SEQ ID NO: 31462 - DNA, 484 bp, Mus musculus
  source 1..484: mol_type = other DNA
tagtcaagttcggcagcagttgcacttgctctgtgcgcgcacacatgtgcttgcacactcgctgcaaaaacagtgagcagggagcgcccttccctgtatctattgctcactaatacttaatgatatgatttgactctccaacctattcatgagcttatgacatcatacatagcaaaggttctttgaatgcctaaaatgaactgtaaacgaactcatttgcatactagaaaagactgctcttagcaaaccagatcttctgtgtcactccaggtctgggcctcagccttggcttggaggatcggggcccacatcggctaaaggttctgcctttcactggcccttgagactcacatagtgtgtaactctgggttaccggagtgtggcgcggaggactccaagccggtagagggcgctgcgcctcgcgccaggcttagttcggctccgggccatcagggggcgctgtggcgcgagcggcgcggtgggc

SEQ ID NO: 31463 - DNA, 331 bp, Mus musculus
  source 1..331: mol_type = other DNA
aaatgccttgacagggtttctctgtgtagaccaggctggcctcgaactcagaaatccgcctatctctgcatgcccgacttagcagttgagatggctggcgagctgatgccgtttgtgtacttacagataaataaataaataaataaatctttgatcttctgggaagtatttcctgagcaggcatatgcccatgtttttttaaaaaatgcccacagagggctccctccaggttgcctaatgtggcggcatcccacatgctgcagtgggtagagcacggagctgtgagctcacggcagcattgtgagctcacgactgagctcacagacttcag

SEQ ID NO: 31464 - DNA, 361 bp, Mus musculus
  source 1..361: mol_type = other DNA
ccgccgcgcccgcagccagcagcatcttttgcagcggacagcaggcgggcgccatggctcccggccctgaagaggagtccggtccctctggtcgccgcggacactggaatcagagctgctcacctacagctggccgcgtacggggccgaagactgcggtgcagcggctccgcacggaggcccagtcaaaagactcctgggacactctgctgtgagccaggcgttatttataacgtaggcctgcttcttggctatttcttaagtacgaaggcagtactagagaccttgttcgtcactccagatctaaaaaattctcggcaacttagcgaattttatttcccccccggagggcaataagaaaa

SEQ ID NO: 31465 - DNA, 229 bp, Mus musculus
  source 1..229: mol_type = other DNA
atttctctagcagttgcaactccacgggtgcagccacttcattttcttattgccctccgggggggaaataaaattcgctaagttgccgagaattttttagatctggagtgacgaacaaggtctctagtactgccttcgtacttaagaaatagccaagaagcaggcctacgttataaataacgcctggctcacagcagagtgtcccaggagtcttttgactgggcctccg

SEQ ID NO: 31466 - DNA, 420 bp, Mus musculus
  source 1..420: mol_type = other DNA
ttcagaggctctcaatccaacggctgtgagtctagacccttacaggctttaaatcctgagttctttttgaaccttgcaaaggtactgaaaactgtatcagctgtggtgaatgaccattccagaatggtctagaagcccaatgccctgtgtattctgccagtggtattgaacatttgctaaattctatttcaagacaaatggctctgggctgaagtagattaactacagaaaaggtgcctgttcccaagactgagggccaagcctagtaatctttggcatatgtatctacacatacacaaataagcaaacaaatgtaaataataataataagttaaacaaattctactggatcccctggtccaggaaaaacttcagcagcctggccagcatgccgtgcggctcagcctaccactcccagcg

SEQ ID NO: 31467 - DNA, 473 bp, Mus musculus
  source 1..473: mol_type = other DNA
gttctttttgaaccttgcaaaggtactgaaaactgtatcagctgtggtgaatgaccattccagaatggtctagaagcccaatgccctgtgtattctgccagtggtattgaacatttgctaaattctatttcaagacaaatggctctgggctgaagtagattaactacagaaaaggtgcctgttcccaagactgagggccaagcctagtaatctttggcatatgtatctacacatacacaaataagcaaacaaatgtaaataataataataagttaaacaaattctactggatcccctggtccaggaaaaacttcagcagcctggccagcatgccgtgcggctcagcctaccactcccagcgggccgggcggctgcggaggcagtggtgcgcgcaggacggactcagaagctcgccctctgcggggacggcacagaaggcggtgctgccggctggcacagccggtgcgggtgcg

SEQ ID NO: 31468 - DNA, 305 bp, Mus musculus
  source 1..305: mol_type = other DNA
acaaatctctataattctaattttctaacatcggaaaatttatttcagtttaggattctccccgtctccctgctacacggagagacctagagacaagaacttcagttacagccgttattactgatctgacacagatgtttgcatagtaagatgggttacctcgttttactcccttaagcgacgtggcttaaaaacagatttgtagccaattcacaatcatgtcatcggatgctgatgaatttccagactttttttttttttggccaggtccgcaaataatgtagacaatctggtggcgaccggaa

SEQ ID NO: 31469 - DNA, 508 bp, Mus musculus
  source 1..508: mol_type = other DNA
gagcggcccccacaggttgcagctgcctggccagcccgagagacagccaggcccgtattgttggagcggcccactaaaagcccgccccggccccaagccgccagaggcgcccgcttgggttcagccctgcgcctcgccagcacgccggctcccagtccggctccctgggcgctgcaggtgacccggcggcacattccggcgcagcgcctgagccggtgcgtgcgcggggccaggctggggagggggccccgcgagtccagcatcccagacccggggctcaagagatgctaccggcctcgggccccagtattccggattcccagaacccagcctgggggcggggagagggaaatgggcccctggggcagcccagagtagcagggccgggatctggacaccggcttgtccaccttaccgcgggacgggctgcgattgccgagcttccagctcccgagatctggtgtgcgctttggaccggggccctgaactcaggggcttcgccactgaa

SEQ ID NO: 31470 - DNA, 385 bp, Mus musculus
  source 1..385: mol_type = other DNA
ttctttcaaaagaacattgtgaaatgctcctcagagtcaagatgcaatctttaattttattgtattaaaaagcaattgaaaggccagcctggtctacaaagtgagttccaggatagccagggctacagaaagaagggctttgcttccagatcagctgtgcctcaggccgccagagggcgggaacctgggctcctcgcgaagactgcagcctccacggctgagaggcagagagccgggaatcccgggtgtcagtattatggtacaagcggtccaccatggcccacggccgaggtccacacggagaaggcggaccccaggacgcgtcaaccctggacctctagggcctgggcgggcgcctaagaggggcgcaggggccccaatgtgg

SEQ ID NO: 31471 - DNA, 326 bp, Mus musculus
  source 1..326: mol_type = other DNA
aaggctcggcttgctggtgtactcctataaccccagcaagcagcagagataggcagatttctccctgccggctaatcccagaatccagggcggtcgtgcagtcccggctcagcagagagaacctcagcaggtgcacaagttgtctgcacgccgaggcataggaatggctttccagaagccccagcctgtgcaagaccaggccggctggcgcgggaggcgtcgcgtgtctccctgacgacggggcggtggacaggcctcgtgacccagaagtgggcggagcgtccccgtgtggggcggggcatctctgtgaacccgaccgaccggtg

SEQ ID NO: 31472 - DNA, 480 bp, Mus musculus
  source 1..480: mol_type = other DNA
taatcccagaatccagggcggtcgtgcagtcccggctcagcagagagaacctcagcaggtgcacaagttgtctgcacgccgaggcataggaatggctttccagaagccccagcctgtgcaagaccaggccggctggcgcgggaggcgtcgcgtgtctccctgacgacggggcggtggacaggcctcgtgacccagaagtgggcggagcgtccccgtgtggggcggggcatctctgtgaacccgaccgaccggtgcggggaggagccgccgcgggagccggactgcatccgccgcggcgtctccatggtcataaggagacggttctgggcgcagccgtgccgctcttggtgagaggccacgcggcggggcagggcgtagagtgccgcgggttcaagccccgcgctcccggggctggctcgaccgggcaccgtccccgagtctaggcgcgctccttcctgcgtccgaacccggcccgccccg

SEQ ID NO: 31473 - DNA, 465 bp, Mus musculus
  source 1..465: mol_type = other DNA
atgttccatggaacttgtagctgttccttatggccacataatttagcaagcagttggctgacctgaacttaaagttcaccaggcaacttaatcccaagactttgggaagcactggtatttcttggctttgtccccagccaccagctggatgtcctgacgtcgcgtctaccacactccagcctggaagatggagagagccatgatgcagctttggatccatcagcaatttcagacattcggaaggtgtaatctcaaatgtgacttctgtagattatacaacaaaatgcatttaagcctcaatttgcaatttttgtattttccagtcaacattcctttaaaaaaaaaccctgaggattatatattcattgcttttaaaaaattaatataggttaaatacgcctgctgttactactgcaagacaaggacaaggaggtctcaagcaaagacagcgtctgagctttcagt

SEQ ID NO: 31474 - DNA, 384 bp, Mus musculus
  source 1..384: mol_type = other DNA
accaccacatgcatgtgttgtgcaccacagtgttgagcttactctgtagaccaggctggcctggaactcatatgtaacgcttcacccagatcggggactcttgtattaacgtttgtaaaatattttattagaagtccaaagattttttttttagtaaaaaaagtatgtatgtatgtatgtatgtatgtatgtatgtatgtatgtatgcgcccgaacagaaaaaatactgcttgttctcttgaggactcatgagcagtaattgtgactgcgagaaattacattgagatctctggccagggggcggcgctcactagtgggcggggcgctgctgacccgttacggagaggctgcgccggatgtggggcggacaccccggaagcggaa

SEQ ID NO: 31475 - DNA, 459 bp, Mus musculus
  source 1..459: mol_type = other DNA
ctagcacccacttgcttaactttgtaaaatgtctgtctactggcaacaggaagattgctgaagaattctccatatcctgaaataaagtcttacgccacaatcttcccgtctttccggccagggcagcaacatccccagcctgactgcggcggcgggccccgccctgcccttcgccgcagtctcggaagggctcccagggcggaggggtgcggcacagattctctgcagggcggactgggcggggcaggattgctcgggtcccacgccgcggcgggcggctgcggcggctgctccgctctgtgccgcgccccgcacccccggctccttccggacgcgctcggtcctctccgtactgcagtggagcagcgagtcccgcctctcgcgtcgccaaccggggcacttccctcacgctcgcgctcggccgccgcgggggcgcgcgcggccgcttataaaagccac

SEQ ID NO: 31476 - DNA, 491 bp, Mus musculus
  source 1..491: mol_type = other DNA
aagcccggggttcaaccctttctaagcctctgccggcagtggtggcgcacggatttctgagttcaaggccagcctgatctgacagccaggcccaaacaaacataagcctttgggtgcttggcttgaactataggcacgcactaacttgtagttcgaattttaatttaacaagcattttattttattgtttatgtaaatttaatttcattccattcattggaaatgatgccaactcaaatggcctggagtagtcggctgcttccagcccggccggttctccggaccagcatggcccactaggcctgcggcggtcctgcctctgcgcccggccgctcagcgagagctgttccggacccccaaatggcctctgggcatagggcaatcccaaatcgctgcggttttgacattttcattatttttcttctgggccttaaagacgtaaggtcacgttccagggcgcaggcgcgagagggcgggaccgtcgccatggc

SEQ ID NO: 31477 - DNA, 395 bp, Mus musculus
  source 1..395: mol_type = other DNA
ggtatgtgacacaggcatgcagcagcaaggtgtagctgactgtgttagcgtgctaacacagtaacacgcaaaaatttatttttcctcttaagtccaggttcagaagtcggaggcctttattctccttccccaactccgggaagcagaggcaggcaactctagagaggtcaaggccagcctggtctatatacacagccagggctagcatttaacttctctgacacaaaccttttcgaataacgggggagggcagggccaccagccacaggcttccacgtgcaacccggggttcaaaggcagccccgcgccgcacccgcaggagccgcccccttctccatcgccgggaacccccgccgcgaacaacggcagggcggctgcgaggccgacttaaatct

SEQ ID NO: 31478 - DNA, 569 bp, Mus musculus
  source 1..569: mol_type = other DNA
ttttcaagtcctgaaaaacagtgtttaaccattaaatccctccgacatagtgcttaaggactttttaataatctaaagctgtttcctcaccactgagatcaggacacctgtcctgtggcagaaaggtccttcctacagtcagtgaatatgtaacagatttttaaaaattcagaaccgggaattggcccatgcataaacccggtcccgcgtgttctggtgcccgggtgcagaactcaggcgcctgattgtagccagggtactcctggccttacttttgaggggctgcgcgcgccccctctccagagcccccagccgccccgctaagggaagggggcggaggccccgcctctcaagtcaccgcgcggcgcgcaaaccgcgcgggggcaggaccatgcgtcgctgagccgcttcctcaccgccgccgccgccacccgccacggccccgccccctgccccgcggccgcggccaatcgctgtacggcgcgagcctctccggccgggggcgggacttgcgcaggcccggcgcgcctgcgctctgcggcctgcccctcgccgggaagaggaggagg

SEQ ID NO: 31479 - DNA, 396 bp, Mus musculus
  source 1..396: mol_type = other DNA
gccgggcgtggtggcgcacgccttcccagcactaggcaggcggatttctgagttcgaggccagcctggtctacagagtgagttccaggacagccagggcttcacagatctgacaacgccaaccacgtctctggccctctgcaccaggcaccatagggtctcaacaaggttggtttgacctgtggacacttgactcccgctgaaaaaggtcaaggtttactccgtgaccaggccaggccccagcgcatgctgcgggcaaagctagagcagaaatggccctcggctagcgtgacgctgctcccgcgtggccgggagggggcgctgctccccagctcctgcggggcgcgcgagtctccggagggggcgcccgaccgcgtgtcccgcgccacttcccggg

SEQ ID NO: 31480 - DNA, 430 bp, Mus musculus
  source 1..430: mol_type = other DNA
caaggcgccatggagccggagggggctgtgcgccaggtgaaccaagcgcacgcagcgaccgtgtttgcaactctgagcacacggtgctccctgggttaagacgctctggtgcccaggtccccgaagtgacggagatccagcccggcagcacgcctgttaccgtggaatatgccaccggcctaaaattcgatcttctagagacttgcaggaagtgcgcgcagtgggcgttacaccctagtgtcaagtcaggacttgaggggaaggtgaagtgcagtagactggagcaccgcagccctcaggcagcctgaaaggctggatctcatccgccctgcagcagcggcagcgaggtgactcaggaccccggtggccagcaggcccccagctctgtactgcttggggcagccaaaggatttcctgagcctcgcccttg

SEQ ID NO: 31481 - DNA, 516 bp, Mus musculus
  source 1..516: mol_type = other DNA
atatcatatataccatgctggggcctagacagtctaccaattgtgttaatacacactcgcgcgggtgcgtgcgcgcgcacacacgatggactaggaagtcagttcttcagaaaaagggatgtctatttgaccaaaacaaatcccaagagcatgcacactgggcaaatacctgtctaagacgcgggtactattaccaaccccaggccggacaattatttctctgacatgcgtgtcctttcccatcatccgtttgcaaaatcagaaaacgaataagaggcgtgccctcctgcaagcccggcccatcgccccttgggagcaagctccgcgtggcctccggggatcaaagatgggcacgcatgcgcatgcgggggtggggttgtcttcggaggcttccgcctcccggtaggctgtgcgcgcgcgggccccgccttcagcctcctcgggcacctgttggcctgaggggccgccggtggcacccaatagacagcctcccgcgttgctgcagccccgctgccc

SEQ ID NO: 31482 - DNA, 371 bp, Mus musculus
  source 1..371: mol_type = other DNA
gtggctggtgtagagaaccctctccagccaacagtgctctgatctcctgcacatgtgcatatgcatgcacacatataaataaatgggtcagcaggcagctgccgtcacgtgcataagcacatatacacttatgtacataattaaaataatatttttgaaagataaaatgatctgctatctgacagctcctggggagaccgcccaagcactaactaggtaagatggagtcaatccccctcgctagaaggaaccgtggagactggggcctcagcttgggcaggagcagcccagagaacccggaaccttcagccgcctccgcccacgttcgcggcgggacaagacgagagaacccctcctctgctgctaagggg

SEQ ID NO: 31483 - DNA, 327 bp, Mus musculus
  source 1..327: mol_type = other DNA
gccagagctcacgctcacgtgagtgctttattccctggagaccgaattcacttctaacctgaaacctggtttctttttaagttcacactcacaactgagtttaccaacttctattgctttaaaattgtgcaattacagaaattcacagagtttctctgtgctaagtctagttcaaacaactagttcaacgggatcactgacagtcacgccgtcctgacgctcaactgacggtcccttgggcggacccagcgcggccccgcccccgcggaacgcgcacgctccatttgcccagcgccccgtgtccccggagggaggggggcggtggcg

SEQ ID NO: 31484 - DNA, 413 bp, Mus musculus
  source 1..413: mol_type = other DNA
tatcttaaaagaaaaaaaattattattcagcaaccacatggtggctcataaccatccataatgctgcaggtatcgtgcaggcagaacattgtatatgtaatatataaataaatccttttacaaaaagaattattctatggatatgaatacactgtcttcagacacaccagaagagggcatctgatcccattacagatggttgtgaaccatcacgtggtaggacctctggaagagctcgctctgactgtacactctcattaataggttgtaaggaagttgatgtcttaaaatattcataagttaaatactattccatctgaaatgtccaggccaaaccctttaagtgggttgaaaagtatgaccctagcatagctattttctctaaccttatatagcaagcttaggacagatct

SEQ ID NO: 31485 - DNA, 483 bp, Mus musculus
  source 1..483: mol_type = other DNA
aaaaggcttcttcaaaccctaggtacaatccctctggaattcatgccagatacaatggctgctattatagcagcagctaaaagcttctcattctttacttaaaatgattttaaagtagacacagaatggatttgatccagggctgccaaaaatcaatcaatcaatcaatcacagcactcaggtggttgatggaagaagaccctgtatcaatttcttttttaaaaaatttaaagtactacatgcaaacaaatgaaatctgatggtctgaagacagctacagtgtacttatgtataataataaataaatctttttaaaaaaccaaaagaactaaatttaaggtagtcttttgtaatttccaatagggttcgtagtgctgcgaactcgttgccctggagacagggtaccaacgcagcagagtggcgtttctgagctccgcctcagccccgctgggcctctgattgggcagctccgcggaggtgtgg

SEQ ID NO: 31486 - DNA, 389 bp, Mus musculus
  source 1..389: mol_type = other DNA
aaagtaaaatatttgctaatcaacttatcaacaaaaatcacccctgacgttttgggtgttcaagattctgtgtgccattgtcaggagtctcagactgctgtgaagccagggcaagatctggtgccaagactgctagcacaagtgctgtgacagggcccacagtagcctctctgagcctctgtgtgccttggggacttagcagatcctgaggaaccatcatgatctcccattggcctccactgggttggcctggaggcagcagtcctgagtcctgctgtgtgcctaggaaggcctttgccagtgcaagtccctgctcacagcctccctcaggtgggtggtagaagctgggaacaggtcccagctagctgggccacctgagggttaaaact

SEQ ID NO: 31487 - DNA, 263 bp, Mus musculus
  source 1..263: mol_type = other DNA
ggaacgtggccaagcacaagaagcagacccctgcgctgtctgctagtctgtgtgctccagagagcagaacagtcagcaggggttgaaggttttgctgccacctttccaaggcagaaggtctttgaaactttcatggaccaatgcatacatgcgacggctctgggaaggtgcacgtgcgcggaggggcgtggatctgcagggaccgcggcggaaacgcaggcagccctagtcctgggtctggctacccacagccagtcgcgccg

SEQ ID NO: 31488 - DNA, 454 bp, Mus musculus
  source 1..454: mol_type = other DNA
aggttagaggcccatctccgtgagctcgaggccagccagcctggtttagctgacctcagggagccccagtctgaggtcccaaaagcctcccgggcgcgtgcgccaaggggcgcggatctgcggggaccagcgcggcaagtgcggcccgcgcggagaacagggtgcccgggagggggctcgcgcgccgccgcacggcctggagggtggagaccggagccggcgcccgcgggaggcagggcggagcgaagcccagcgcggggccagggtggccggcgcccctgggcagcgagagccccgcagaacttgaaggggcggagcgcgcgtccgaggagagcgtcccgtgcggtgacagcgcgcgtctcatcccgggctctccgctcgcagccgcccgcaggcagcccgggccctccacctcccagtccggccgcccgccgccgcgcgccccggaagtgac

SEQ ID NO: 31489 - DNA, 439 bp, Mus musculus
  source 1..439: mol_type = other DNA
aacctaaggattactacagttagcctgggattatcctcagctcagctcaaaattcgctgctaacgttaggctggaggtctatctccagccagaagccggggagcagatacttagtttcaaagtgatttaaatttagttcaactgtgtttattgcggaattatgcggcttttcagggacaaccgtcgcaagccggacgtgtcgaggcgcgcgtcagcacggatacttgcgtcagcttgggtcacttggccgctctggccagagtaacgcatcccttaagttgcagggatccctgtccctttaagggggcttcccgttacttccgccccgaagtggcttggcgcaggcacgtgacgggagtagggtgaagccgcctcaagctttccccttaacagacatggcgacggccgggatgccgcgggtgcgtccggccgtgacgtc

SEQ ID NO: 31490 - DNA, 419 bp, Mus musculus
  source 1..419: mol_type = other DNA
ctcaccctgtagcattgggtgaagcagtgggaagcttcctagatgctaatcccaggctgcttatcagcagtgagtagtacttgctgttcacccagcctcccccccccccctggtttggtgaggtccccaggccattgctggctcagcagcgggggcaggacaagctgacccgagagaatttccatcagccctaggggccagtggccacagccctcactggctctcttgaggcctggacagcccagacaattttggcccagaaaaacacttggtcaggagccaaggctcttgacagctgagcagtagtgagcagctccaccagtctgagggtctgaggctggagagcagaaaacatctcctcatcccggctgaagaatcttcctaggaccctttggccttcacagtccaaagccactcag

SEQ ID NO: 31491 - DNA, 352 bp, Mus musculus
  source 1..352: mol_type = other DNA
ctgacccgagagaatttccatcagccctaggggccagtggccacagccctcactggctctcttgaggcctggacagcccagacaattttggcccagaaaaacacttggtcaggagccaaggctcttgacagctgagcagtagtgagcagctccaccagtctgagggtctgaggctggagagcagaaaacatctcctcatcccggctgaagaatcttcctaggaccctttggccttcacagtccaaagccactcagccagcccacactagacacactagtactgcccgacttgagaatcctggattaactggaggctgggccagggctgagactgggcccacctccaaggtca

SEQ ID NO: 31492 - DNA, 388 bp, Mus musculus
  source 1..388: mol_type = other DNA
gacttctgagtcctgtggaacaggaggcgcctctcctatctttaaaggcaagcagggctcgaaattcatgtctgtaatttccaaaagcactcttttaagtgagaactgtcttgtgtccgaagcctggcacaaaaggcatgcctgctgattgcatcaatgtgggtcttccaggcgaccccgaaatgtcccgcagtgcctacacccgcgagcgggaacggtttggacctaaccgcctccccggcaagccggggctcgtctctgccactgcggctgagccccggtcccaactcgccatcttcgcgcgcgcggcccagccccgcccccatgcgccgtacccacgtgactgggatcctccagcctgggggcgtgggcttccgccacgtgatgg

SEQ ID NO: 31493 - DNA, 399 bp, Mus musculus
  source 1..399: mol_type = other DNA
gcgagtgcctcatggtgggcaccgggcgagtaatgcccagtgccactgccatgccagtagctgcaaccacatcctagccgctgttcgcggacatccggaactggaaaacggcattgccctgctggagcagccggtcccacttgtactggacgtagaaggcctgcaccgcgagggccaccgcgcaccaggagtatcggtcccacactgcagcgtggatgctccccgctcagcgcagccccagactcctggggagggagggacgccttggcctctggggccctcaacccgccaaggccactctgaggcctgggagccggcgcccagtcacccgcctccggccatcacgtggcggaagcccacgcccccaggctggaggatcccagtcacgtgggtacggcg

SEQ ID NO: 31494 - DNA, 414 bp, Mus musculus
  source 1..414: mol_type = other DNA
gcgagtcatggattcaggactagcatgttaaagaacttaactgtacagccttgagaacctaaataaattaagtcatgtaaattccagaagcatgggccgcgggctcccatggccagtgtgatgcgagcaatgtcatggtcacggcgacaccctgtgctcatgcacacgcactggtctacatttggcgttctaggccaggaggggtttaaacgaatatattcccaactatttaaaaaaaaaaaactaaaatttgcataatgaattaccaaaataatcaatagtatagtgttaaaaccggtttagtaaaacgaacagcccgctggtggggcccgcggccggcaggggcagcagcgctccccaaagccccgccccgcgcgcctggccccgccccgcgctcggctcggctcggccgcg

SEQ ID NO: 31495 - DNA, 199 bp, Mus musculus
  source 1..199: mol_type = other DNA
ggccagtctggtcaacaaagtgagttccaggacagccagggctacacagagaaacccatagatcctttaggagtgacatcccaacgctgaggaccagcgtgtggcagagactctctaagcagctgcttcccaacgtagctcaccccattggccaagggcctcgccgatgcggagcgcggcccgaggccacgccttcccc

SEQ ID NO: 31496 - DNA, 285 bp, Mus musculus
  source 1..285: mol_type = other DNA
aaaatattccttctgtttcaagaatgtttcttcaagaatgcatctaagatatctacaatatgtgctacatgaccaataatttttttttaacagaaaagttcctttgcggaactgcacctcttgtctgtcagtaaagggcaataaaaaactgcactaggtctttgacttggtgctgaggctgctcctccactgcgctcttctgggcgcaggtgccagacgccgagctaagcttaccttttttggacactggcaaagctgcgcgagtccccgctctgcgtggcgtct

SEQ ID NO: 31497 - DNA, 571 bp, Mus musculus
  source 1..571: mol_type = other DNA
ccgcgctctgcccgcccgccctggccgggtcgccctcaccgccacccgcctgcagcccaggccgtcagccctgccgtccccagagctcctcagactcgggagaccccccgcctacctggcggcggctgccgctcgccctcggccatcttctccgtgaggagccggagcggatgctcgccgtcactcgcgcgaaggcggcagccatgccggtgcgaggcactcagggagcatgcccaccaacggccgtctcgcggcggccgcgccgaccgaggcagcggccatcttggtgcggggcgccgaggagcatgcgcactaacggctgccgcctgcaagccaactgcggcgctggcagccatgacgttcaaggacaccagcgtgaccgcctcgacagctaaggtggctttcggaggcggagtaccgttgtgaccccgtgacgggagcccagcgccgggctgctaacagctgagctagaggtccgtctccgcaagccccgccctctgcggccactccccggcttgggcccaccccgagatcggggcgagcggccggggactgcgagccaccaaagctc

SEQ ID NO: 31498 - DNA, 379 bp, Mus musculus
  source 1..379: mol_type = other DNA
gagcgaggcccaggtccacccgaccgcgctctgcccgcccgccctggccgggtcgccctcaccgccacccgcctgcagcccaggccgtcagccctgccgtccccagagctcctcagactcgggagaccccccgcctacctggcggcggctgccgctcgccctcggccatcttctccgtgaggagccggagcggatgctcgccgtcactcgcgcgaaggcggcagccatgccggtgcgaggcactcagggagcatgcccaccaacggccgtctcgcggcggccgcgccgaccgaggcagcggccatcttggtgcggggcgccgaggagcatgcgcactaacggctgccgcctgcaagccaactgcggcgctggcagccat

SEQ ID NO: 31499 - DNA, 380 bp, Mus musculus
  source 1..380: mol_type = other DNA
atggccctgctgggcgaacccctcgcgctgggtaaagactgcgccactgctggggagtcactgccgctagccagtagaggcggccccgcggccaccgggcccggcgggctgccggtggggcaggactcacggggcggagctttggtggctcgcagtccccggccgctcgccccgatctcggggtgggcccaagccggggagtggccgcagagggcggggcttgcggagacggacctctagctcagctgttagcagcccggcgctgggctcccgtcacggggtcacaacggtactccgcctccgaaagccaccttagctgtcgaggcggtcacgctggtgtccttgaacgtcatggctgccagcgccgcagttggcttgca

SEQ ID NO: 31500 - DNA, 434 bp, Mus musculus
  source 1..434: mol_type = other DNA
ctcctggggctcagggaaccttaaagggagaaattcagactttttctattgtcattgagaagcttggggcgggttcatagcccaaacccccacccccaactagagatcaaaaatcactgggatttcaggttgcccccggccgtggcaggtggaggaggcgccgcgtggctcgaagcgggggaaccgcgcgcacctgccgcaggtgaggcccaaccatgcggaagggggcggagccatctccgctgcgctcaggtgagccgacccccagctcgcaggagtacctcggaggctcctagtcccacgaggtgccgcggccccaggagaacatcgaccggggtccgttcgttatttgaatagcacaaaggaaccgccttggtctgattggccagtctctacagtggggcggggcgctgctgcccagctaaatagttggg

SEQ ID NO: 31501 - DNA, 464 bp, Mus musculus
  source 1..464: mol_type = other DNA
ggcatgcctctgggcttaaatccaggcctctgtggccagtgtcctaaactggattctacctccagagagaagtcatgatgggatcctcctggctagagtctaaggggcctcctggaagacccatacagccttttagaacgatccataaaaggactccaggccatggcaggtgacttagaagggtccagtgtgcctagcatggcctacccatgcaaaactgacgggcgccaccgaatccgaggacgcctcggccctgtgcagcagcggggcttcgtcctggccggcccttagctgggatggaggcttcatcctcagtggctgcctgctcgcgcctggctggaggagagatgagagcaggctgcagggctgcaggcagcggctttcagaacaaacagaatttttttttgcaactagagtatctgtcagtctgacagctgattggctgctcggagatgcatataatt

SEQ ID NO: 31502 - DNA, 169 bp, Mus musculus
  source 1..169: mol_type = other DNA
atatagccaaccaggctggccttctctggctggcctggaattcatatgtagataccacacttaatagccaggctggcttcctgacaatagccttaatttaaaaaaaaaaaatatgagtattgcagagagctctgcactgtgccaggcgctccgcgtccgccccaaaggg

SEQ ID NO: 31503 - DNA, 239 bp, Mus musculus
  source 1..239: mol_type = other DNA
actgagcatgcacacataaagcccattgagttcaaggccagcctggtctacagagccaaggctgagggtgggggtaatacacctcccaagcacagcctactctgggtctaaaagagcgctctggtcctctttggatcaggcatggctgctctgacccagagtgcctctatgggtgtggccccaggcccccagagtatgtccccaggacacagtgcccattgctccccagtggctgtggg

SEQ ID NO: 31504 - DNA, 219 bp, Mus musculus
  source 1..219: mol_type = other DNA
atatattattttaatatactagtgggtggatttgagcaacaatagccctggctgtcctggaactcactttgtagaccaggttggcggtttttaagaatccagccttgtggcgcatggaggcgcgtgcctgtaaccccagcaaccacgtcgatgatgcagaaggatccttcttgtcgccaggcctcggggcggagcgatcttgagtccagccccctccag

SEQ ID NO: 31505 - DNA, 401 bp, Mus musculus
  source 1..401: mol_type = other DNA
caataaacaatgaccaacctggtgtttactctgttgggtgtcctgggctatcctggaaccaagcctagcatcccacttggttaaaacaaagaagaaattttgttccatggagcttatgatggtgcagcctcagggcaggactcaaagttgcagccactcaaatttgcgtaggaagtgatattatgccaattttccagatcaggacccctacgccacttggtctacacagtggagaaactgagacctcggattggagccagtcagtagcggggccgcatgccccgtcggagctcagacgcccttcagcggcctcgcggggaatttcagtgcggggcggagccggacagtgatgatcgccgcgaggtcctccccggcggcagggggcagtgtgactcattccg

SEQ ID NO: 31506 - DNA, 467 bp, Mus musculus
  source 1..467: mol_type = other DNA
tggcagagactcagggtaccccggggtgggtcagagtctccagggtgggtctcgagacggtttcctgctgcccgcctctgacaccgtctttcttgaaaaagttacataaaagatagacctggtttgtcgttggtccttaggagaacctattccatgcccgaaccttcctttcggcatggagggagcggggtctccttctttccatcagtgtgggaacaatgagggacaattcttggggtgccccacccccaatccagagactctggttgagatattgatttgggcaccccctaaactgcttctgggagtccgaggaccccggcctggccccgcctcccgccggacggcgcaggacgcggggaggggagccaggggcgaggtccgccccgacaaggggcgtgtggcccgggccgctggctagtgagcggtccgcccgtaggggagggcagaaagttcgggtccccgac

SEQ ID NO: 31507 - DNA, 387 bp, Mus musculus
  source 1..387: mol_type = other DNA
gctcggagctcactggcccgtcaggctggcagaatccccagcactggaagggccaaagcagggagctctctgagttccaggccatggggggtagatagtgaggttctctctctctctctcaaaaaaggaaaagagatcttctgatttactgtggcacacaataaataaataaacataattttaaaagaaattaaaaattaagatcacacacacacacacacacgaattggtaattgggggtctgtgtctctgtctccacgctcttggtcctgagccaaggatggcgtgggacacctccattccttccttcttgacttgagcagggggcctgctgagtgggcgggggtgaccgcctactcaggacttggcccgcctcctcctgccgcc

SEQ ID NO: 31508 - DNA, 387 bp, Mus musculus
  source 1..387: mol_type = other DNA
atgtacagcctgtgtgtcctgaaaggcagggggcaacctggggcccactgtgtggtatgcgcatagacaaatgtctgtcacaagcacacattattgttgctattattattattattattttatttatttatgtattatcttatatgtagagcttctgtacagcaccgtatacgtggaggtgagccaccagatgtggatgctgggagcccaatgtgcataattttccaataattttattagtgtgtgtgtgtgtgtttgtataacaaaccaaccaacaaacaaacgataggaatgaaattcctttaatggtctctagagggtttcctgacactcacaacgttggtgacaattttccaacaaggcggcttcggaagtcgccgtaccgga

SEQ ID NO: 31509 - DNA, 567 bp, Mus musculus
  source 1..567: mol_type = other DNA
gtgtctgaagtcagtatactcacatacataaataaataaaatctttaaaaaaaaatactggtcatgggtttttaacaagtatgagatgcagatccctcttttcttgtataggacagggtggcagagtgctgggattaaaggtgaatacccagccctcaaatgtgttttaacgacaagatccaatatgcagctttgaccagagtgttggggttaagggtgcacaccacccaccgcacctgtcagattatcctctcatttttaaaaatttattcatttacatgttaatttatgcatgtgtgtaagcccacatgagtttatgagcaccacatgcacgcaggtgcctgcgtagtacactgtcgctgtcttcagacacaccagatggttgtgaggagagcagtcagtgctcttaaccgctgagccatctctcccccatcattaaaaaaaaatggttctaaaacactgttacttgatggggatagggcagcagtcatcatcacctgattcctataatctcaatattattcctgtaacatcaaggttcagaggcggccccgccagcaggaaccg

SEQ ID NO: 31510 - DNA, 475 bp, Mus musculus
  source 1..475: mol_type = other DNA
tttatagacacctttaaaaagcctctgaacgtcagtggtacctctcctagggacgaggtatggacagtcagcaccgggactgatattcacccccggcaaggtgatcatggagcccgagtggcctcctgctggccttcgccagagccgtgggggttcggggcggaggcggcggggacctcttaccaggtcctggccgccccgcaaagccaggcctcccgctcccagcggctggacgatgatccccgctctagcggcccagcccccggcagcaggcagcagccggctagcccaccgcggcgctgcctagaggtgcctgccacgccccgcctcctcaccgtcagacgtccgggcggtgtcacaggtcacagcctactagagggcggtaccgggcacgccggaggcgtggccgtgcgagtggtggccacgcctggcaggcggaggcgggtctgagtgcagccgacgctctgacgacact

SEQ ID NO: 31511 - DNA, 299 bp, Mus musculus
  source 1..299: mol_type = other DNA
tcttccagttttagcctgggggaaaaaaaggagacatgtccctttgccgcgaccccggggcacctctcccagccgcgatgtggactccgagtcagcccggcgccggcggaatccggcgcgcagaagtgtcgtcagagcgtcggctgcactcagacccgcctccgcctgccaggcgtggccaccactcgcacggccacgcctccggcgtgcccggtaccgccctctagtaggctgtgacctgtgacaccgcccggacgtctgacggtgaggaggcggggcgtggcaggcacctctaggca

SEQ ID NO: 31512 - DNA, 293 bp, Mus musculus
  source 1..293: mol_type = other DNA
ctggaagagcagccagtgctctttcatagtgtagcccaggctaagctcagcctctacttttacttagattttaaaaaaaagatttgtttgtttgtttaaagatttatttattattatacataagtacactgtagctgacttcagatgcaccagaagagggcatcagatcacctgtgagccaccatagcagtcagtgctcttaaacttagatttttgatctattttaaaaaatatttttattgctctatgtttcacaagccacattgtgcaattggaaaacagtgtgagcccag

SEQ ID NO: 31513 - DNA, 416 bp, Mus musculus
  source 1..416: mol_type = other DNA
cagattctccacagcatgtgagaaatgtcactaggcctggactggtagacactgcctccttttggcagctgaggctcaggctgaatttgaaccctccaaagtccctgtgggcccttcagagattctgctgtccttcagcagggtagtgcctacgcgcgcgctgccgagctctttgggcctccacagtgttccgggagcttctagggtcggcggccatcaccagcagcccagtctgcagacagagagcgcagagtccccaggggttcacgtccttccagacccccggggcaactgcgccaaagggagcctgtgggcgggacggtatgcacgagctgtcagtccggtcccgccccgtcccggtcccgccccatcccgcccctcagctccggtgcggggcgggcgcgctgcggcggtcg

SEQ ID NO: 31514 - DNA, 377 bp, Mus musculus
  source 1..377: mol_type = other DNA
cataatgggcaatggccaactttggatgctgagtttaaatcctcaaaaccaaggcatgtatttcaagagagatttgaattcctcttggggattctggctttggtcagtcaaccgagcaccctccagctacccgaggaggccgcacggcgtagtccatccctacggggcggcgcaaaccccctggctcaggggccgaacttaggagatcccgctgggctgaagttggctcagcccgggacagcggtcgcgctcccccaggtgatggacgcggcccaagacggggtggaccagcagctccagcaacgccagcagtcgtagcagcggacggccatgtttgttccagcacaaagtgcgtcgtcccggaggtgctctggaag

SEQ ID NO: 31515 - DNA, 449 bp, Mus musculus
  source 1..449: mol_type = other DNA
cctattttgcttaaataattacatgcacatacacaaaagcatatgttacttgtgtgtccagctaaaaacaagaatctaagaactaaaccaacttggttatcagctatcctgtaagccctggtaccagggacctacaaccaagtcctaatgaccattatataaataaatctattactgcaactatttcaagctgaagttttccgccagggtcagtggcggacattgcgggttccagactttggtccaggcccctcaatccccaagcccggcaaggcagaaaggaggcccggcttgaacttgccccgccatggttgtcatggcaaaggtcctcacaggggctttgccggaagtccgtcctgggaggcgctcaggtccctgcgtgaccagagaggacctcggaggcggcagccgcgcccccttccagagcacctccgggacgacgcactttg

SEQ ID NO: 31516 - DNA, 549 bp, Mus musculus
  source 1..549: mol_type = other DNA
gccactggccctcagggccttctgagagcactgaggctcattctttggaagaagcaagcagagcaggccatccttttcctggagtccttccccagctgcaggcttccaggcatggagccccaggtctttggggaaagcggcttgccaggctggtctccagaagctctggcccttctgcctggcctcagccagccttgcctggagccccgggtgtagaggctgctctccctcatcaggatgctcctggagaggtctgggatcgcgtctgtcctcttggccgccaggtccccagcgcccaacacatctaagtggaatgccgggcgggccctccctgcccacgccgctgcggagaggggggaatggatcggcggagggggcggtgcggcgacctcccagcgtccccggagagccaacaggagaggggtgcctcaacgcggagctcgcgcctgtcggagctgggcgggaggtggcgccgggcgatgagtggcggctccgagtccacccctggcgcgccggtgcgggcgggaggcggggagcgtaggggcggcg

SEQ ID NO: 31517 - DNA, 342 bp, Mus musculus
  source 1..342: mol_type = other DNA
acataaagaaaagtcacagaatatcatttctgtattgtctgcctctgtgggtgtgtatctcatgtcaatggtagacatcacacagtgtcagaatcatttgacatttgtcaatcccttgtttgtaagaagaggcaaattggtctctatgtcggtttctgaggtaatgaaatcccatagtctggggttaattcacagacaccatctttcagtttgagaggttgttaatctcctgagcctaaggaggagattctgcccatcatctatgtgaaagattgaatgaggtggggcccatacgctcattcctttgaatgctgcatcccggttgatgaactgcaaaagcca

SEQ ID NO: 31518 - DNA, 380 bp, Mus musculus
  source 1..380: mol_type = other DNA
ggctggaccccagagggcacccagagtcttgcagggctcaggccaggctgggatctggctcatgtgggccacaactgatggctcagcagacagccaggcaaagcaagagcctctgaggggcagatgcttcatacacagcctcaagggttcttgcaagacagctgcgatcagccttgctagtcacgacctctgccgccctcccaggcgccaccagcgggttgcaagagcccacgcccgtgcgcccccgggaggtggtgcgggcgccaaggccagcgggagagagcgcggggccacgcccacccgcaggtggcctcgagccctgagaggctcggagcgggggccgggcccgagggcggggcctttctcgcgcccgtccccac

SEQ ID NO: 31519 - DNA, 264 bp, Mus musculus
  source 1..264: mol_type = other DNA
taaatctatagtctacaaaatattagattatagtggttttgttctcaatctctagacttgccaacaataaataaaatgatgaaatggaacagtttgggtaaaaactcatacagtttggtattacacctgtaatcccagctcctgggagtgagaccaactccagttttgggaggtcagacagagtttgaggctagctgtcatattcccttacgacatgagaattcatcattccgcaggtgcatagtaaacatggcagcttggtgc

SEQ ID NO: 31520 - DNA, 268 bp, Mus musculus
  source 1..268: mol_type = other DNA
cctttagaaatgggtcggtcccagtttctcagactttcacctgtgaaatccggttctggaaaactccagagtccaccgtctcccagcaggcgggggggcgccgggactacaagtcccagcattcctcgtggcaccaccgatcgctgctaactgcaatgacaaagaagaaggggcgggcgcttcctcatctctcaccttgagctcgaaacggcgtgtgggagaccggcgcctgtggtctatcggacctctccggcgctgggggcgggat

SEQ ID NO: 31521 - DNA, 410 bp, Mus musculus
  source 1..410: mol_type = other DNA
aactcacatgtatgtggtgacacattctacgagtttcaagtagctagctgcgggtgacctagattggcagtgagactcctttcctgttacccgggtgaaagaggacaccaggcttcttttgagcagtgtcatcatcttggcaaagatggcccattctggagcctgggactccctgcagcaccacgaccccacttcgagagggagggggctgcctctcctccgtcaggtggcaaaaccacacagcgggggactataaggccgcacctgcgccgcggtggcggtcccacgcttgctaaaggcctggggcccacgcctttggagggcggggtcgcaacctctgcctgtgcccagggcaggcccccctcgcgccacggccacgcccccacttccggccggacagcggtcaccgc

SEQ ID NO: 31522 - DNA, 303 bp, Mus musculus
  source 1..303: mol_type = other DNA
cgtgggccaccacgcccggcatttggaaccaggcagacctgactgagtcatgatcaccctctgggtaccaaggcacatggagcactctcagagaacccttttagttatgtgacattatttcataagttgttggtaacctcgagctagcgtttaggaaaaggaccgtcctggtaacttgagaggaatttgcatttccaccgaccttcccggacacgcggcaggggcaggggctacgccagcgcagctacgcagctggggagggcgtggagccttcccttggcctggaagtgggcccttaccggc

SEQ ID NO: 31523 - DNA, 545 bp, Mus musculus
  source 1..545: mol_type = other DNA
gtttatggtggggccacctcaccgggttctgtgctcagaggcagcttctcacacagagaccacagttgtcacacaagggtgaggaacacgtctaggcaaagcttggtgtcctggacttttattttagtagaattatagattcaaatttggcttgcctgagtttaaaaaaaatgtgtgtatatcttctggacaagcagagaagggagcttgctacccccttctcctttgtaagccatagaaaataattgtgtctgtatttgattgccacagtgaaataacccgaagcagctaattcacagaaacagttttatttagctcttgtacaggtccttggcccaggagcagaagggccgggctgacccctttggactcccaggaaggccttacactgctgcctggaggccatgcataccggccgtcagacagcggtgcccagcataatatacagcctatgtatatcttgggatgtcacctttgtagcctgaccccacagcccccactgtgaatttgctgctggggcaagtcagctgtgcccagagcccagc

SEQ ID NO: 31524 - DNA, 365 bp, Mus musculus
  source 1..365: mol_type = other DNA
tggagatgaggtatctacagcccctgcagacacacactcactgcggtggtgccggccggtaagaacagcacccagccccgtgtgggaggaaggtcccagccaccttgacagccactggggaggtaggtatgatccgccatttagaagggcaggccctgttgtctggatgggcaagcaacagactgaagttctaacctaaggagggaagggactgggtgtccatgaccctccaagccctctcagcagtgaggatgctgcctctggagggagaccaaggcagggccaccatcaggcgggaacctccagtgtctgagcccgcggttgaccaagggtggcgcccgccacaaaggaatcctggggctagg

SEQ ID NO: 31525 - DNA, 544 bp, Mus musculus
  source 1..544: mol_type = other DNA
ctcagcctgccccacgcttgccaggcggctcggcgtggggcgcgtgggagccacgcggtcggctcgttaaccgcgcagattaaggactttgtcaacggagggacgactgagaagcccccactggtggctcagatccctcctcccgcggttgggatagctccaggccggcttgggggggcataggggccagcctggctgcggagtcggggactccagcaccaggccacagggctggagattagcgggccacgcgcacacttgccccgggactggaacggagccccgcggtctctgcctagccccttcctagggacttagacgagtcccacccgagaggaagtttgcgcggggcgccgcagggcgcgcaggttcctcgaggagcccgtggcgtcctcctcaccccccagcgaccgggctagagcgggagtcactcttagagccctcggggggcgcgcgcgcgtgctcgggaagccgcggggagcgcgcgggaggcgcgggagcgggacgcggggacggcgcggcgcgggcggctctcggaggctcg

SEQ ID NO: 31526 - DNA, 321 bp, Mus musculus
  source 1..321: mol_type = other DNA
atagaagccttgtaggttgaattgagacagtatctaaggacctcacccaagctgaggcctcctgggcagggttggcaatggctgtgggaatctgattgataagagtcaggtgaagacctgcgcttgtcttgcctttcagctcaggaaggtacacaagtgcagagcttccatagctacggaggactgtggagccaggttcacagttcccgagtccacaggcactcccaggcacgtccagcaggtgggggtggtgtcgcctgcatgggtcccgccctcagatgccgtcgggttccgcctgcaggggaggactccaggggccag

SEQ ID NO: 31527 - DNA, 412 bp, Mus musculus
  source 1..412: mol_type = other DNA
ggctttgaactcccaagcccttgtggggtgagcttggctacccgtccccacagttcaggggaacagggattcctggatcccatggttagacaatgtaacaatggagggagaccctgtctctagaaagggtctctaggcataccggtactactttgtagttaggcacacgtatttatctaaaatatcggtgttatcgtggcactgccgggcaaaggtgacagtgaggtgacagcctctattggcacttgatcttcacaaccagctctgcaaagttcttagtgagatgggaaagagggcgttccgcgtccggctaaacagcgggctttgatgccccgggtgcgcgcggcagcggggaggggggcaggaggcgggccgccggaggggcggggtgtgtccggccgcgaggtccctc

SEQ ID NO: 31528 - DNA, 546 bp, Mus musculus
  source 1..546: mol_type = other DNA
gtaaatgagtgtgtcctgggtctcccatgtcccagacagacagttgacgtcatctgatagaggcttgcacacatgcaacttgttgagagactgcatctgacagaatgtggataatgtgtggaattctcttattacatatagacagggtcccatgtaactcaggatatctagagattgctatgtagcctaggaagaccttgaattccgcaccatttgcgatgtgaagtggatatggcttatgatctgaaacgattgccttgaaaacagtaaacaaaaccgatcttttgtcccttttcctctccgtttttaaaagggtaagttcctaacttctctaagtcggaagcttctaagagccctgcaggtaagtgctaccgggaagcatcgagagtctcaggaaggccgagcgtgcctctctactccggcccgcgcctcatggccacacccactgcgcggaaccggccaatggggccttgtggattggcaagcgcgcgacttccgagcgcctgggtgacgtcagtcacgcgcgccggaaacgcgcatctacca

SEQ ID NO: 31529 - DNA, 595 bp, Mus musculus
  source 1..595: mol_type = other DNA
acgccccctgggtgggaacctcctcggcggaggcgcgcgctcgggacgcgctgggctcagctaagggggcaacacgccttcttggtgtccagccacctcggcccttcacgctggtggcgacccgaggggtgacccactgcggtggcagtcccccttcgagctaaaccggtgtcagcggagcgctggtgcgcgcagtcgtgcggccgccactgacggggcgggcggaggggggcgccacctccggggagaccgcccagagctgcgccgtcagctccacagcccgtgcccggcgcacaggcatcgccgcgcccagttcggtctgcaggtcctcggcggccgaggcgaagcaggcggcggcggatatccgagtgcagtcccggagccctgcgcggcagtcagcggctacagcgacagtggcagaccggtgggcgccggaggggacctggcgagcacctaacccggagcgcacctctcggggacgtcggacctctgccgcttgaatcggagctcacgctgcaattgattgggccccgccgggcgggcgcgtgtgttccaggtctgcagcgagggtggcgcgaccgcgcggggaccgagc

SEQ ID NO: 31530 - DNA, 637 bp, Mus musculus
  source 1..637: mol_type = other DNA
gcggacctgcatcccacggggcgcacgggcgagcgcaggtcctgcgtgcgccggtgcgcgttgtcgcgcggctgcggacgaacacaggggccagatgctgcagcagagcgaggcggcgcggggcgcgccaggcggctgcggcgcggcggcggggcagagcggtgacagcacgctcataatgatcaggcgctcggggtgggggcgagagagccccgagcctcagccctccgcccccggccatccccacagcagcccggagccaggaggggcttggggatccgaggcgcccacgccatccccggaccctcaggggacactgcccaggggagggggcgccgtgacccaggcacctggagcggccctaggggcaggtgagttcgtgacgccccctgggtgggaacctcctcggcggaggcgcgcgctcgggacgcgctgggctcagctaagggggcaacacgccttcttggtgtccagccacctcggcccttcacgctggtggcgacccgaggggtgacccactgcggtggcagtcccccttcgagctaaaccggtgtcagcggagcgctggtgcgcgcagtcgtgcggccgccactgacggggcgggcggaggggggcgccacctccggggagaccgccc

SEQ ID NO: 31531 - DNA, 313 bp, Mus musculus
  source 1..313: mol_type = other DNA
actgggtgtggcttcctcacagaccctcccaaagtttcagagatgccccgactaactgcaggtatccaagtctcagcagggtttttttcctctgtgagacatacataagaactttctgactcaatgtctgatgaatgtaaatttcttacatacttgggaccaacggggtttgggggttgggagacaccaacttttcccaccctccaaaccttcccaagtcttggagcttcccaaaactgggcagtgccccaagtctcctgaataaaaaaggaaatgcgggctggaggaggaggcggtgcctacccgcctgcac

SEQ ID NO: 31532 - DNA, 195 bp, Mus musculus
  source 1..195: mol_type = other DNA
gcgaagccttccagctgatatgagctgatgtgagaggctctgactctggagcctgcaggcctatctgctgtggctggagacaacagaacaacactgtatttttaaaaaaggctctcagtgacctgggattccactgcccagccaggggcctggtcaagactacatttcccagttcagccattggcagatttaaat

SEQ ID NO: 31533 - DNA, 274 bp, Mus musculus
  source 1..274: mol_type = other DNA
caggactgtcaggctgtcagagcaggatccaattcgcccctcccccacccatggaggaggccttctccatgggtgggggtggtcttcaaccagagagattcctcttcaccaggagcctctctccacctctcccccgccctccctcccgggacaggggcgacgcagcagggggcgctgcgcgggccaccgtgcgggcggcgggcgggggcggcgcggaggcggaggcggcggcggcggggggcggggagccgagcgcgggcgggaggcggcggcg

SEQ ID NO: 31534 - DNA, 453 bp, Mus musculus
  source 1..453: mol_type = other DNA
aatgaatgaatgaatgaatgaatgaatgaatgaatgagtgcagcctttcttaccagcaagtcttgagttggggtagcccaggctatctgcagagcaggccacctccttgggacagtccctggcccctcccccctttccatttcaaaggcaaatcgggagcggtgccgagaaaatttccttactagatgacatttcatcgcaatgtccgctctcagcctgtttgacatcaggtcctcaggtaaggcccggccgaaggcccctcatggccaggcccgccaggcacttgtgtctctagccagtttggaggcggggagcgtttgctacagtggaaggattggctgccacccacaaggccttcctgggggttcttgccgcacagccaggaccatggggcctggctccaccgtggcgtgagctccacagcggcctcctgccaaggtagaatgtgcagat

SEQ ID NO: 31535 - DNA, 423 bp, Mus musculus
  source 1..423: mol_type = other DNA
ccacagggtcctaaagccgcctggcgtcacgatgaattcagaaggactcttccagaacatacctgttggagaattacagttgtgttcaagcacggtgaattcaggaatctcagaactggatactcatttgaggagctctgggcactgtcatagcccagtcttttacaagaggccgccctgggctccgagcgtttcttcgagtcccgtagagtggctccccatgtggagccaggcctgcgaaccgccaggcaggatcgaccgttgggggcgaggccgctcgcagcggccaagttgtgtctacgcggccgacagactctgagacgcgcgtgcgcagccggagcgcgaggtagtggcgcgcatgcgcggcgtgctcaccggccatcaaagtccctttttaataaagcacagtgtgtttccacaagc

SEQ ID NO: 31536 - DNA, 367 bp, Mus musculus
  source 1..367: mol_type = other DNA
gattctctggaattgcggttccagatgattctgtagaccaggctggcctcgaactcagaaatccgcctgctgttccaggacagccagggctatacagagaaaggacctctttaagagcatccagtgctcctaaccactgagaaaactgaattttggcaaaccatctgagcgtgattgtaatacccacccactgtaatacctgcgctggggtaagctaacgcgctgcttgtggaaacacactgtgctttattaaaaagggactttgatggccggtgagcacgccgcgcatgcgcgccactacctcgcgctccggctgcgcacgcgcgtctcagagtctgtcggccgcgtagacacaacttggccgctg

SEQ ID NO: 31537 - DNA, 468 bp, Mus musculus
  source 1..468: mol_type = other DNA
cagagagattacagtctctctagagagcactcggagtagtaatgacagtttcgaggggggactgtgacgtaactacaccgaggaccttcgggggctaagagaccctgtgtcactgaccaaagtcacctagggaagacttcactgggggagcccagggtgtctcgggaaagactcggggggtcaaggggccgcgacccggagcgctttacctcttccgacatcccggggcggggaggggggaagcgggggggccacatcaccacgatcccggcagccaccgcgaaactgcttccggaagctacggcttctctacaagggccagagaaggcgggtgcagagcgccccttggacgctcggaaaccctccgacagggaggcgtggccacgcggtcgcgaggcctgagcgacgggtggagttaacgacgagagctgcgcgcgcagccatgacccctcacagcggcctatggga

SEQ ID NO: 31538 - DNA, 521 bp, Mus musculus
  source 1..521: mol_type = other DNA
caacaacagaatttaaaagccaggttgttggagttacctactggtagcttttaactgttagaaagttcactaccagagggaaccgactccctctactgctcttgcatgaccagagttcagttcccagcatttaaaatgggcagctcacaactgcctgtaactacagcaagcacatataaataaaattattataaatatttcctttttttaaaaagccaggcatggtggtacatgcttgttactcccaccctcagaaggctgagggcctggccagacaggtaagaatctgtctaaaaatcaagagattttaacagattcatagataggtcttcctaagtgtctcaggatgacagggacggtcctaaccctgtgggtgcgcacttgagtgtgcgtctcgtcgggaggtggagccccatccaggccccgcctccaggtaaggggtcattctggagtcactgaggctcttcagggacacggccttgagtgccgcgcctcatgcgcgcatgcgctcatgtccccgg

SEQ ID NO: 31539 - DNA, 325 bp, Mus musculus
  source 1..325: mol_type = other DNA
gggagccgcagctgcacggctggaaaacgaagcgcggcgcgctcctcacccacctcctgaaccctaaggtccggggcacccggagtggggtcaaagcggttccgcccctgcttcccataggccgctgtgaggggtcatggctgcgcgcgcagctctcgtcgttaactccacccgtcgctcaggcctcgcgaccgcgtggccacgcctccctgtcggagggtttccgagcgtccaaggggcgctctgcacccgccttctctggcccttgtagagaagccgtagcttccggaagcagtttcgcggtggctgccgggatcgtggtgat

SEQ ID NO: 31540 - DNA, 283 bp, Mus musculus
  source 1..283: mol_type = other DNA
cgacataggtgtacgtatgcacaggcctatctcacacagggtttgttaaagctgtagacagatgtgactgtgtctgtagcctctgtgccccaggggaaagtttctgctgcctgggtcacaagggtcccacccaatgcgtaggatctatgcaggatctttatgccaggcgggctaggtaggagtggcctcctcccccctcacccctgccacgtcaaaggaggcagaagggctggatggaccagaggatacctccactccgtctacccagtgtttagaaattgta

SEQ ID NO: 31541 - DNA, 261 bp, Mus musculus
  source 1..261: mol_type = other DNA
gagcacttcctatccctttcaaaggtaatttctttggaaaatttctttcttcctcctagaaccagaaacactgaggaatatgctgcagatttttgattatagaactttggtcagctgactgcagcagcctgtgccactgggaataactgctgaaatgaagtaatcatatggcgccccgcgttgcgtctgcgcagtccgcgaatccccgcgcgccatctagcggcggcctggagaagcgctccgctcggatccccgaggggc

SEQ ID NO: 31542 - DNA, 480 bp, Mus musculus
  source 1..480: mol_type = other DNA
tacacctgaaataagaatacatatttaaaagtggcgcacgccttttgagttcgaggccagcctggtctacaccaggacagccagggctagtttgtacataaactaaatcttttttaaaaaaatgtaaaaaacaaaactatttttttaaagctgaaccgcttgctcttgtcccagccccacgcgggctcgggatctggggacaggtcagttgggatctgaccgactgtcggtcccctttgcccctgccaacagacggccgtgggaactcagaatcgccccttcccgatgctgggatctggggacaggagcctacgctgcccggcgcctcatagcacctgggagccaccgcggctctcgcggtccccgcgacgtgacctgcgcgcgaggcttgttcgcccgccgcggcgtccgcgctgaggcctccgcacctccagagggcgctctgcgcgggagtggccagccgctgggccttcggagtgt

SEQ ID NO: 31543 - DNA, 500 bp, Mus musculus
  source 1..500: mol_type = other DNA
gttcgaggccagcctggtctacaccaggacagccagggctagtttgtacataaactaaatcttttttaaaaaaatgtaaaaaacaaaactatttttttaaagctgaaccgcttgctcttgtcccagccccacgcgggctcgggatctggggacaggtcagttgggatctgaccgactgtcggtcccctttgcccctgccaacagacggccgtgggaactcagaatcgccccttcccgatgctgggatctggggacaggagcctacgctgcccggcgcctcatagcacctgggagccaccgcggctctcgcggtccccgcgacgtgacctgcgcgcgaggcttgttcgcccgccgcggcgtccgcgctgaggcctccgcacctccagagggcgctctgcgcgggagtggccagccgctgggccttcggagtgtcccggtccggtcaccgtcccgagcagcccgggagctccggagcccgcctagtgtggtgcccgccccgg

SEQ ID NO: 31544 - DNA, 396 bp, Mus musculus
  source 1..396: mol_type = other DNA
gctcttgtcccagccccacgcgggctcgggatctggggacaggtcagttgggatctgaccgactgtcggtcccctttgcccctgccaacagacggccgtgggaactcagaatcgccccttcccgatgctgggatctggggacaggagcctacgctgcccggcgcctcatagcacctgggagccaccgcggctctcgcggtccccgcgacgtgacctgcgcgcgaggcttgttcgcccgccgcggcgtccgcgctgaggcctccgcacctccagagggcgctctgcgcgggagtggccagccgctgggccttcggagtgtcccggtccggtcaccgtcccgagcagcccgggagctccggagcccgcctagtgtggtgcccgccccggtttcccatc

SEQ ID NO: 31545 - DNA, 444 bp, Mus musculus
  source 1..444: mol_type = other DNA
gaggaagaatcctcttttcctcacccagctttactaaagcctgtatgctgagaccaggctgcactctggaatagtcactgtgccatgatgccatggtggtctctgagagttcctgagacaccaccctgacacagagctggatcccggattgctcctctgggttcaatccacaattgcccctcccagtgggcatggagctgtatcatgaagccttccatgatggagcgccacccaaagtacactaagccttccttttctgtacatttattggcgtgaatcaaaccgattggcctagcgggccagggtctccactgcccgaccttgctccgctgacagcgggtcactgcggccgggagagggagcgcgatagagcgcccaagcaaggacgggctgggctttgggcggggctcagggcgggccccggtgcgccgctgcgttccacgc

SEQ ID NO: 31546 - DNA, 273 bp, Mus musculus
  source 1..273: mol_type = other DNA
acaccgaggggtgcaggcagatttctgagttcgagaccagcctggtctacaaagtgaattccaggacagccagggctatacagagcagctgctgccctgcacttccaggacgcctcaccctgtgccaggaccaaggctgagcttggcaggctcagaacagggtgtcctgttcttcgactcctacaggagtccagatctgagctgcttctgccagaatccaaagccctggggcaattactaccccgcccaacaggggggctggcagccaggtag

SEQ ID NO: 31547 - DNA, 319 bp, Mus musculus
  source 1..319: mol_type = other DNA
ccaggactgttccgggacaactcctgcctaggttttcacagaaaaatacgttggggccacctagcctttttcatgcgcaggttccagatgcgtctgggtattgtgggctctggcgctgccaggcccgggacccttcggcttcggggcggggtcaagtcagggctgtccattcccattcaggcctgagaggtcttcgggctgccaagccggccacttagcagtgaatgggtcggaagaccaatgttctagcccctggggtgtgcttctgcctctcagacaggcatgcgctctcagatccccttaggaatcctattttgcg

SEQ ID NO: 31548 - DNA, 293 bp, Mus musculus
  source 1..293: mol_type = other DNA
tcatacataatgaacatgtttgtttatctgtaagattctgtgtatttctcacatatacaatgtatctacagaataagtccccatcctctcccaagagtttgatgagcacgctatgggtccgagattgaactcagatcacagtttaaaaatagaatgatactgaacattttgattgttgtctgctgttaaactaaaaacagctaaagatcaaggcagtgtgctctcttggagacaactatcaatgcaggcttgctcattctcttctaaagatgagcttgctcagattctgcaaa

SEQ ID NO: 31549 - DNA, 447 bp, Mus musculus
  source 1..447: mol_type = other DNA
acccaactaaaactagcttttttaaaaaaggatttttttggttttgttcctggctacagagagaaaccttatctttaaatctctgggcttaccccaaggattagtaggttaaataccttggatgttgatccaagattatcttggacactttatgtggccacacatggctatgaaattcgtaattactgtacatacaaatgaaccaaatactaattttggccacaaactggttatcaggcaaactgctcatcttgttctgtttcttgcagacccagaaatggccaaatatccttagatgtatctaactttcattttttgaaaaaagttccaattgagatctctgattccgaggccagcctggtctacagagggcgttccagggcagccaaacaaaaaaagaatctttcttcagattctttaaggatcatgacccagtgttctgaaaca

SEQ ID NO: 31550 - DNA, 390 bp, Mus musculus
  source 1..390: mol_type = other DNA
ttaaagaaattataatgctcttaacccaccccctttagggggacaggcagggcttgttcaaggccaagtaccaggccttaagtaaccctacgcaaagtgcgtagggcccagccctgaccggcccgaccgccgccagccagctgcgtaatggggggtgtgcggagatccgcccacttcgccattcctcacggacattattcacttccattggaaattagaagactcctaaagctttccgcagtctaaatagaatgggaatgcacggtgactccgccccctcattgatcccggagccgacataccggcctatgattggtcggcagtgcgccagagggcgcggtcagcgcctctgcgcgccgcggggcggggctcccggaagcggcccctccc

SEQ ID NO: 31551 - DNA, 296 bp, Mus musculus
  source 1..296: mol_type = other DNA
aagactgggccagattctttttgagtaccatgctgccgggccagcaggcctctagtgactgctgcctgactcagagcctggaaccaggcaggccgagtcacaaggttgccgggctccaatgcgagcaagacctgcataggtcttgagacactgagctcaggtcttggcgggaccgcgcttctcaaggaggcgggtccagccccgcgagcgcttcgtacagtcggcctgtcaatcgcaggttggctgtgagcctcgcgcgccccgcccctgctgctctcggccgcggctccgcgggc

SEQ ID NO: 31552 - DNA, 381 bp, Mus musculus
  source 1..381: mol_type = other DNA
acacacatacatattacatatatgtccacacatgtttgtatgaatatgaataagaataaaacgtttttatttggtatttataaggtttcctttagccatgaggtttaaggagacctactactcctcatgcctccattcggggatcttaaagccccacttttggtccccttggttctaagagggccattctgaaacctctggcaggaagggaagcctagaaagttccctaggaagccaaccagtggaaattctcgactcttccattaacagtttcaaggccagaatgtagagcctttgaattaactacatttcccgacatgcactggagggcggggaaaagtgcccgcacgtcagctcagacgagtctccgcgtgtcacgtg

SEQ ID NO: 31553 - DNA, 616 bp, Mus musculus
  source 1..616: mol_type = other DNA
cctggaaccaggcaggccgagtcacaaggttgccgggctccaatgcgagcaagacctgcataggtcttgagacactgagctcaggtcttggcgggaccgcgcttctcaaggaggcgggtccagccccgcgagcgcttcgtacagtcggcctgtcaatcgcaggttggctgtgagcctcgcgcgccccgcccctgctgctctcggccgcggctccgcgggcggtcgcgccggggcttcggcattctccgagcagcgccgagctgcgtcgggctcagccggctgcgtccggaggtgcgggcgacggcgccgctgtgctccagcggtgctaaccgaggcagaagccatccggccgggtcggaaggcgcctgagactcgggcagggcaggagcgggtcccaggactgagcgggaggcggaccggcacacgttcccggcccggcagagcctcccgaagcggtccctgcagagccgggtcggtcgccgaggtggcttccgcttcccggggcctcacctgcgcaggccgcggtgcgccaggtgcggaggcgtgtgcgtcgcctgggcacctcccacggcagccagcggggcggaggcggggccgccgcccgggtctccagcgg

SEQ ID NO: 31554 - DNA, 386 bp, Mus musculus
  source 1..386: mol_type = other DNA
gccatggtgagtttgaattctgttccaccgccaaacttaaagtataagggtgacatcatcccatctatgcttttaaaagattatgttgtgtccctctagctagctcaccaaaaaatttcgcctccagtgggcgcttcaatcacggaatttcatgggattcagaggatgctgcgtcctcggaggggggacccaagggcaaaggccagcgcccccctcgaccacatcaggatgcagaggatcctacatcctcggaggggggacccgcaggccaaggtcatcgtccccctcgtgcaaccgtgacaaggcctctcagccaggcagctctgaagggccaggatcagagttctgagtatgctgcatccgggcctgattcctgcatctgggcc

SEQ ID NO: 31555 - DNA, 323 bp, Mus musculus
  source 1..323: mol_type = other DNA
catctgaatccaccaagcagaagtacgattttctggtgtcactgggacagggatatggagggacctgcctcaggcattggctgttttaaaaacagtgaattccagggctacacagagaccaattctctagcagagatagctggatctcggtgagtttgaaaaatattagtcaagttcacatcatttgagcagggagaaatggaaggactagagtgggggccccgccctcgacgtcgagacctcgcccccagcccggaggtctctgagacatccacgcgccgctagccggcgctgcgcaggccccgccccctgagcgcaaagcc

SEQ ID NO: 31556 - DNA, 453 bp, Mus musculus
  source 1..453: mol_type = other DNA
ccgtttccgcaggcctggaggggctgacgaagggtcctggcatcaggcctgaccccatgttcccaggcaaatgagctcagagatgctccaacttggctctcagtattcagaagccaccatttaaatagggtggccctctgcctgactgatcctgttccaccctggcataggtggcatcagtgcaaaataataataataataatgatgatgttctcatcctaatgagaatagtgtcttctgttttgagtgactgtgactcaggaacagagatgtatgaaacagtttcatgaagttttatagttttgcggaaatgttctgacaaaggtagtctgaagctacagctagcccaagatctgctgattttggcctctgggcagagagctggctctccgtgcatgtccagggtcaagagactccctggtcctggtggaaggcacacagagatgcttctgt

SEQ ID NO: 31557 - DNA, 244 bp, Mus musculus
  source 1..244: mol_type = other DNA
cccacccccagaatggggattacaaacacgttttgcttccacatgtctgtgtaccacatatatgtgcagtacccatggattagaagagtttagtcacataaaatagtgcaacgaatattcctaagtagggtgcaggcctctaagtctcggagtccaggtaattaataaccagagttcgaagtgtgggagagcgtctctcctctctggcacctccctggggcggggccatccgcagcctgaggct

SEQ ID NO: 31558 - DNA, 398 bp, Mus musculus
  source 1..398: mol_type = other DNA
agatggcccagtccatctgcccccacagtggcaggaccgcaccacccaaactggttgtctgtggtcctaattaggcaccggggagtctcaggtggcctctgggtcctgctctgtgcttaggggttccctgggcacagctggagtctgctgttggcatcatctcagaaatgagagtcctcattcttagcaaatctggatacacaaagctttctgagtgttctttctcatggagagtctcaggctcagagcctgaggatggtgaccctggaacacaccttgattaaacgctgagattaaacacaccagacacactgtgtgcccagggagtgcctggtggggacgcccatctcgccagagtgctggctcccagcatgccatgcgtgcgcgctgacagccgt

SEQ ID NO: 31559 - DNA, 388 bp, Mus musculus
  source 1..388: mol_type = other DNA
gtaaattccccccggggggggggggggacttgggcctgcttcaggcaggagtcaggaaccagggcagctgcgagcactgctgcttctcccaaggtggccgcagcaaccaccttacatgcacgcagggccagtacctgcacacctgcaggcccaggtagtgaggctgaggctgtacagcctgggctacggtcctgtctgtccccaggcaaggaggagacgcctgcctgccagcatcctgtcccctggggagctcccctcacacactagggactcacctgagagattccctggagttaaggtgtctgcagcagagccagcaggaaggtgactttcccaaggtcattctgccagtttggaaattacaagccgggaggagaacccctcaacc

SEQ ID NO: 31560 - DNA, 358 bp, Mus musculus
  source 1..358: mol_type = other DNA
agagggttggaggaggccccaggcttcctccccctgcctgttaggcggatcctaggcttgcctgaggtttctggaaccccagagctcacccctccccttttctggggaaggaggggctgggactcagtgggccctggcttctggcagcgccatgccctggcactgggcctctgcctgagtggctctttataggcacactcagccctggcagtgcctcagggccttagaccctcagggccttcaagccgcatcccaatggggtccccgcccagcaccctaatgggagggagccaggtatggggcccagggcctcactccccgaggcagtttgggaagtttgcttaactccctgtctgag

SEQ ID NO: 31561 - DNA, 357 bp, Mus musculus
  source 1..357: mol_type = other DNA
ggtcagatccccagtttggagtctacaattgtgagccgcagtgtgggtcctaagactcttccgggaagtcttcctaggcttctagagtgagttaagaggagaggccgctgagttcgaggccagcctggtctacagagtgagctgcagttcagccagggctgtacagagaaaccctgacatttcggtgctgggaattgatgacacaggcatctgccagcattccagctcagagcttctctgccaaggagtcggatggaggaccccctccgccctctcccctcacaaagatggccgtgataaggcgctgcttctcattggtcgggcggggcggggcgaagcggggcggctccggcccag

SEQ ID NO: 31562 - DNA, 356 bp, Mus musculus
  source 1..356: mol_type = other DNA
agcacagtggggacacagtatgtgttcactgtttgcagaattgcagacctggcccagggttcagggccctcagggatctcccaagagcctggctgtgaagaggacccagctggagtgtccctatgtatcagcccaggctgatctgcaagtcagggtgccaccaaagagtgggccctgaccatctccatgggaacctggcggggaccagctatggaactcctcaccagccagccttggcaagggatgggggaggtctgttgcctgggccctcccatcaccctagcctggcaggcagcctggcccggccccttctctaaggaagcgcatttcctgcctctctgggccgggctggatga

SEQ ID NO: 31563 - DNA, 657 bp, Mus musculus
  source 1..657: mol_type = other DNA
ggcctgagcgttgatcgctcaccgcccacagtgtcgccgcgccccctggcggccgtcagttgccatgtcaacggcgggtggctgagacgacggaggcggcagcgggggcagttctctcttcccctgcacactcccggtcctggaagaagggccagtgcggagccccacctccacagaggaggggctcgccgagggcgggggggaggggaggccaggacgggcacctccccctttatccccttgccctgccgccccgggccgggcttggccagggagcctccgcccccaggccttccccccaccaccacccgccgccccgcgcagcccggcggaggcggcgccgtcggaggaggaggagcagggcactgcggctggccccggatcgggagccagagcggcagcagcttcggcagcagcacggcccgggccaatgcagcgggacgcaccgccgcgagccccagccccagcgccacggcttcctgcgcccccgatcggggccgccaacagcgctggcggcggcggcggaggcgggggcagtggcggcggcggaggctcctctgcagctccggctccccctggcctcccgggaactacaagtcccagggggcctggcggcgggcggagaccggaagaggcgggctcggcacctcgaggccg

SEQ ID NO: 31564 - DNA, 400 bp, Mus musculus
  source 1..400: mol_type = other DNA
agagatttggtcaccacagctgcagatgtggccacactcagaactagatttgacctgtggcaactatagctgtacctggaacttgttctgtgtggacacaaaacacatacacgcacatacatgtttgtgtttgcagagcagtgtgccacgaaggtattggtgtgttctggccactgggcagttagcatatcctttgactttgggccacaggcctgggtaccagggcttagatgggccaggcccctgacagctgttggcaggtccccagtggcccccagcctagtgggctctgttcccaaagtgccccctgcccctgctgctggctggggaggccccagcccccgccccctgtggagacggtgggagggtggggctggagcgggggaggcccatcagcccc

SEQ ID NO: 31565 - DNA, 381 bp, Mus musculus
  source 1..381: mol_type = other DNA
ttagcaaccaagctgggtttgaactgcggcccacccaactcagcgcctttagttgatttatttatttatttattctatgtaagtacactgtctgtcttcagacacaccagattgtgagccacatcagaagagcaattctagaaagccacttgtaaataaggatttacttattgggtcctatacattgagtttaggaaaagatataaataaatagcgagcctgcaagatggctcagtatatggtggcatgtgcacctgtccaattccccctgggaaatggtactttcataattaatacaattaagaaagaggaacctccttctccagcccagattgtgactgacagggaggagggcgtggtcctcgggtctggccctgcccc

SEQ ID NO: 31566 - DNA, 473 bp, Mus musculus
  source 1..473: mol_type = other DNA
tgaagccagcctgcctcagagctagtccaaggacagtaaaaagcacacttttggagttccttagatgagtgtgtgtgtgaactcacgcacgtgtagctttgcctacaaaaccagcttttttttggggtttctctgtgtagccctggctgtcctggaactcactctgtagaccaggctggcctcgaactcagaaatctgcctgcatcttgaaggttctattttctgagccatgtaaggcgcctgcctgacactggcagagacattctcaaaaggcggttgtgagcactcttccgtcacatttttaaaaagagcttggaaaaggctctggccgctagttacccgtgaccatggcaacgcgggactgggtgggctcccccaggaggcctatttgcagtactgctgcgagacaacctgtgggtttctcggagcggtgcacaccgggagctgtagttcacaggttctggcggtgggcg

SEQ ID NO: 31567 - DNA, 334 bp, Mus musculus
  source 1..334: mol_type = other DNA
cccacactgtgccgggtgccgggcattccgtggttccccaggccaactcctggaggccccaccagccagaggatgccgctccctggtgcagttagtattgcgcctatttgactaagtagaaaaagggacacaacctgggttcgatccgcatacacttaaatgtaagcgtagctgcggagccaagccccgcgtccctgtgtaccagccaccgcttcccggggaaccgagcctcggaaaccgcgacgcccaatccaggctgggtttggcgtccgccctccgcgacgcgtgggcggggcctatggacatcgacctggtgcctagcaacatagggaac

SEQ ID NO: 31568 - DNA, 354 bp, Mus musculus
  source 1..354: mol_type = other DNA
gctgcgcccgttgacgttcatgaggcgccgcggccggagcagtaccagctgagcatccccgagcggggccgcaccgccatgcccacactgtgccgggtgccgggcattccgtggttccccaggccaactcctggaggccccaccagccagaggatgccgctccctggtgcagttagtattgcgcctatttgactaagtagaaaaagggacacaacctgggttcgatccgcatacacttaaatgtaagcgtagctgcggagccaagccccgcgtccctgtgtaccagccaccgcttcccggggaaccgagcctcggaaaccgcgacgcccaatccaggctgggtttggcgtccgc

SEQ ID NO: 31569 - DNA, 162 bp, Mus musculus
  source 1..162: mol_type = other DNA
ccagaatcggggaagctagagatggagttctctgagtctataaagactgggaggccaggctaagcatgttccctatgttgctaggcaccaggtcgatgtccataggccccgcccacgcgtcgcggagggcggacgccaaacccagcctggattgggcgtcgc

SEQ ID NO: 31570 - DNA, 357 bp, Mus musculus
  source 1..357: mol_type = other DNA
aagctgtggctcccatggagtcggaatctggcagacccgagcaccaagtgtccagtcatcactgagtatagtgatggtccgtccagcagctgccagcaggatgcccccctgactccaggggaccctgccaaagctttaaagatctcccaagctgggcctggtggcgcacacctttaatcccgtgtgtggctgtgccaccaactgggggctcagcaattgtttctgattatcccaaagtcccaaaggctaaggtcctttatttgagggaaggaaaggtcttcctggaagtatcctgctctgaaaaagctaggcctaggccggacacaggatcctgtcaggctgttgctatgtatggaa

SEQ ID NO: 31571 - DNA, 551 bp, Mus musculus
  source 1..551: mol_type = other DNA
caaagcaaccttcttcattagcaaagatggaccagagttgattctgtagtatttcctaattagatttggactttggaagagtgcagctccagtatacagaatatccatagtaattcatatacatagcttatacatagttatgggagaataatattcattagtgactgatagcttatgtgtaacacagagcttagctctccatcacagaccacagagacacagggatagtgtcagtgtactgtaagaatctgctctcagagttcggttttttggcaggaacagcctggctttagggagattcccatgacctgggcagcccgtgcagggctggcgaggggaggaccctgaggccctggcgcgagcgtgaggcgcaggggagggcgctcccggagcctgcatcccggagggcggggtctcgcgcccgggccgcgcttctattggcggcagcgcgcgggtgacgatgacggctggcgcgaggccccgccccgcagccccgcccctcccgcgcgcgctggccgctacacagcctcgctttggcccgagtcgcgccc

SEQ ID NO: 31572 - DNA, 273 bp, Mus musculus
  source 1..273: mol_type = other DNA
ctagttataggtaactgttacaatcctgctgccaggtgactattgtgcaagacgggttggcacaccttctaggacaggtccgatacttccccagggaagggggcaggaggaatgctgaattcccacacggagaggagtacagccccaaggcacaccaagcaggtccgtcccgggtggtcccctcccgccttggactggagaggagggcgtggctccgacaggggcgtggcctggcctggcctggcggggcggggcggggcgggcgccggggct

SEQ ID NO: 31573 - DNA, 295 bp, Mus musculus
  source 1..295: mol_type = other DNA
caatccactagcctccgtgggtaacgcacgggaacctagtgtttaaagctccgagaagaaagttggcgatgacattgccaaggctaccggtgactggaagggtctcagaattacagtgaaactcctcaggaatcatgggtcttggcaaagatttccctgtcccggtgacctgattgagtcggccccactccctgggtttccgctgcagtgtgctactcagctgtgtcgaccccggaatgagatcacagtaggcgtctgttgtctgttccctttcctgggtgcagaaatgaaacag

SEQ ID NO: 31574 - DNA, 446 bp, Mus musculus
  source 1..446: mol_type = other DNA
gttgctgggcctgcagggcctgctcaggactctccgcactggctgggaagaaccacacccatccttccctggcagggctggccagcggctaacctggggatggggaggtcctccaccgatgccgattcttgggtggaccgaaactttaaatttcagacaaagtctcgagattctagaaaccaaggaattgcagaattaaagactcgtgattagactcgaatagtttgtttctgtaactaacatactggtacctcaagtcaggtgcagatcccttaggggaggggcggggccctgggctgggtcccaggggctccagagtcgtggaccaggaaccaggacctctggtgctctgcagtcctctgccgcagaccgaccagggtgtcgcccagagactgggtggggccagcggttctcgcgagagctgagcttttccgcctatatccggc

SEQ ID NO: 31575 - DNA, 223 bp, Mus musculus
  source 1..223: mol_type = other DNA
gaaggtgagctgctaccagaagcacttctacccactactaccctcattagtggaggctagatttagaacaattccatataaaaattaaaataaaataaaacttgttccagcagcgagatgactctgcttgtaaggttcgatccggaggcagtcgtgcctgggtcccggacacagctcccgtcgctggcgtagttcagctccattgagctttgcaaccggctct

SEQ ID NO: 31576 - DNA, 426 bp, Mus musculus
  source 1..426: mol_type = other DNA
agcctaggcaccccaggttaaatttctcatataagattaattcagccatttctgtgaaatggtggaggcagaataccattagactctaagcagagagtcagctctgtggatgctgaacatcagatgtagctaccttgtaaggaaggatgaaaggtaccgagtgcacctgtctctgcatgcagtccgaccagttggagtttgcatgacatggtcaagccaaacttacaaaaatgcatgcagtgcaaacgcagtagcaatttgcatccttgttattagttgttgccatgtcaaaattaaatatactcagatgttagatttttatattttatgccctatgttaacatgtaaaaattttaaattaaaagctgggctccttaaaatacagctttaaatgatgctggttatttttatgttgcatatttggga

SEQ ID NO: 31577 - DNA, 481 bp, Mus musculus
  source 1..481: mol_type = other DNA
cagtgggtgagcctgtgcatgcagtggccttctactgccagctcaacagacctgatgcatctgaaggatgtggcctaggcaccaaggccccagctgagaacggggctttggatttaagtccacggaccttcccaggtgaccttggtgaacctggcaaacagtcttctgccacattagcagtgcctagggctccctggcctcccaagcagctgcttgcacagccgcagctgctcaagtccgttacccgagtccagtggaagcgctttgcctacacagggcagcaggctggtgagccaggagcagagctggccagccttcctgtgccaaagaaggagggggccccgcccaggccgccaaagcaggcaggaggggctgggccagctggggctggagctagtgtgacatcaccaggcggcccgcccctgtctggagctgaggggaggcccagagcttttctgggagagaagtgcctgcagccaac

SEQ ID NO: 31578 - DNA, 314 bp, Mus musculus
  source 1..314: mol_type = other DNA
gcatgatctgtgcctaggcctggttcttaccatgagcaagctcatgcaggagctgtcatctttgccatgtaatgtctagaaccccttgagtgatcctgaagatggcccagggagaggctcaggacccctgtctcacctgctgctgaggttgattccatcatggtcctaactgaaaccacagctggggctgcagtctgggcagagcatttgttctgtggattttctagcctaggcaccccaggttaaatttctcatataagattaattcagccatttctgtgaaatggtggaggcagaataccattagactctaa

SEQ ID NO: 31579 - DNA, 329 bp, Mus musculus
  source 1..329: mol_type = other DNA
atctaaatctgttatcaaaatgatcttgtctacaaaagccagatgatttaagctcactgcgtttgcctggcccagccataaaagggtctgggtgcagggagacagcttccaggcccattctaccatgggtactgtgattgtcaatttgacagatttagaatcacataaagaaatgttgttgaaaacgatacgtggcgggcggctgagcccgacgagaacagcagagcatccttgcaagcctgagcgtctgcaagaccgaagcgcaggccgccggggaccgctgctgcagcggctgcgcactggtgcaaccagccggccgcgcgccgatt

SEQ ID NO: 31580 - DNA, 564 bp, Mus musculus
  source 1..564: mol_type = other DNA
atgtgtgggtaccacgtacaaacagtcagctgtctttttaaattagatattgtcttcatttacatttcaaatgctatcccagtcagcagtcttaactgctgagccatctagggtttttctatagacctggctgtcctggaactcactctgtagaccaggctggccttgaactcagaaatctgcctgcctgcccggctgggatcttgttttaaagccagatagccttctttttgcagaagagaaaagctgcccagtgtaatcctgggtacacagatctgaaccttatatatatagttttttaagaccttgtctcaaggcaagatcctgctccggccagcaggtggagcagtcgggatttcaggctccaaacccgggttgctgttcagctacccgcccgtctactggtcggcctgcagcactagccaggagctgggattccgaccggcccgccgcgagaagtccggccatatcgacacccgcccgggtccgcgcctgcccggaagcgcgggcgccgagggggcggggcctggaagcgcttccgggggcggggggcgcgggcagggg

SEQ ID NO: 31581 - DNA, 338 bp, Mus musculus
  source 1..338: mol_type = other DNA
ctcaataaaggataattattcttccagaagagacagtagaatatgtagtgtttagaatgtcttgttaaagtctcttgaattctgccctcacagaacagctattgtgatacgagtgcaatgttttgggatatataaaaccataaagtaatgctttgtccagaaaagcttggttttgtctaaacattattaatgactggcccagctgctagtctgggtgatagaaaacccccgaggcctttggagttaactgacctggttttatctctctacttagtaaaaacaagcttttaactttagggaagcttgaaataactcaagctctgcacttgcagagtaat

SEQ ID NO: 31582 - DNA, 251 bp, Mus musculus
  source 1..251: mol_type = other DNA
gaacttctaaaaaaaaatttttttttttaatgtgtatgtaccctgtgccctcccagaatttctttgaataattctccaaggccagcctggtctaagacacaaatgtgtgtcgggtccagcttgtgtatccaccctacaccaactatccttggatttaagtccaacttaaagccatcttgaaatgttaagtcagtcttccacctgcgcgtgctctcctgaagacccgccccgagcacgcctggagcatgcgc

SEQ ID NO: 31583 - DNA, 377 bp, Mus musculus
  source 1..377: mol_type = other DNA
tagactatatcctgctcaacccactggggaatttcctcgctgtgaggtcttgtcggcttagcccagcccacacccgaactgctccaggcctctgcacttgctccgtcctctgcagaggcttctgtaggccaggctgccttacctatagccggccaggctgcgtcaccattcttttctttttaaagatttattttatgtatatgagtacacagtcacttccttcagacaggaagagcagtcagtgctcttaaccgctgtgggtcaccaccccagtgctgagaacaaagccctgtgggatgattttgggaatcttccagcaagccttcccacctgcctcctcaggactgggggacagctgcagctgcagtacaactgca

SEQ ID NO: 31584 - DNA, 751 bp, Mus musculus
  source 1..751: mol_type = other DNA
attccaggggtccggaccccactcacccagcagcacccccagggtggcgggcccggggcgaagggcgtgctcctccatcttgatgccgtccaacatcttgatgccgtccaacatcttggcgcagtccgtctgcccgcgagggaagcacctctccagcgactcgggacctgttgctatatccatgggacgcccggcgcgctgcggaccccgccggctgggccgctcaccctccggcccgtccgcccgctccgctgcagccggggaggcgcggcgcccgcggggtcggggccgcccgctgccccggggcgagcgtggagcggcggcgcgctggccccgggccccggcgtcgtgcgggagggcccgggcggctggcagccccgcgcgccgctctctaccggctactcgcagccacgcgcactcgctgctcggtcacctgcttgtcagccccgggtcccggctgcagcagcgggcggcacgcggagccgcccggaggggcggcggcggcggcggcgggcgggggggcgggggtgcaggggcggccccgcgggctgggggggcgcgggcgtcgcagcagggtcccgggcggggcgcagcaggccgcggggctccaggcgcgctccccgcactactccagtgccatggtgcgcccgaggagccgctggggctggcggcggagggatactccggccccgagccgcctcactcgtatcactgcgccgggatgagccggctgctccacgtcaaatagtgc

SEQ ID NO: 31585 - DNA, 389 bp, Mus musculus
  source 1..389: mol_type = other DNA
caatggctgcctaaacaaatgaaccaggcttttgtttgtggacagatgggtgtcacacaacacttactttgttagacagcaagcatagatcttgatatcagggttatgataaacctgaagacatctgcccctctgcatcccaagggctggaattaaatggagcaccactgtgctgggctctgtaccagttaagaacacagattgtctgccattgttttgacacaagtacctggattgtatgcacacatttgagaattgtcccgtcccctccagggcctgcaggcctggctgtgtaggggcagggatcaaaggctgctgatgcctcctttcaggcactgcaagggcagaaggcttgcccccaggcctctgtgggtaaatcatttgcccag

SEQ ID NO: 31586 - DNA, 489 bp, Mus musculus
  source 1..489: mol_type = other DNA
ttaaatggagcaccactgtgctgggctctgtaccagttaagaacacagattgtctgccattgttttgacacaagtacctggattgtatgcacacatttgagaattgtcccgtcccctccagggcctgcaggcctggctgtgtaggggcagggatcaaaggctgctgatgcctcctttcaggcactgcaagggcagaaggcttgcccccaggcctctgtgggtaaatcatttgcccagctctgagagtggggtcagtctgaggcccggctgcaccgcattagccccggggtgcgccactccgggcctgcaggcctgggtgtcagacggcgaggcctaggggcggggaccgagggcaccgggggccacagggcggtgcgctcccgggctccgccgcaggctgcacgcccctcccgccccggccccggcccgagccgctgctgccgccgccgccgtcgctgccgccgccaggccgcgccccgcccctcgccg

SEQ ID NO: 31587 - DNA, 99 bp, Mus musculus
  source 1..99: mol_type = other DNA
acgggcttggctgctttccctgtacaggctgaggacccagctttgtctgccgggccagccaggtgccctgcggggttcagctgaaacaaggactccctt

SEQ ID NO: 31588 - DNA, 326 bp, Mus musculus
  source 1..326: mol_type = other DNA
atacccaactctcactgtcagaaactgagtggagccagattgaatcagtcagcttggagaaaaacatttcaggctgaaaacattctaggctttgattagattcaatggaggctgaagtaagcctccaattacagtgtcctactgacatttctttctgtattaaccattgtccactgcagtaaaaagtttagatagtaatttaaaaagcagtttgatactatgtccatgtagcaaataatagttgcagcttttccctgtaaaaaggtaaaagaagttggttaactcccgcccccgggaggcagcgacttctcgttcctggctctggg

SEQ ID NO: 31589 - DNA, 830 bp, Mus musculus
  source 1..830: mol_type = other DNA
gtagcccataaggctcccgggctggctctcaggcaccccacaaggcgttctaggggcggggccagtggcggcggcgggaggcgcaaagcccaatgagagaaggctccgcctccggaggcggggcatccggggcgctcccccgcccttcagctctccctgcccctccccccgcgggcgccggggccgcagtgagtgagtggcactggcagcctgtcaatccctcagccgagcggccttcgagcccggtccacagcggctgctgactgggtgcgcggcaccggaggtggcggcggcgagttctcccgcctcatcaatctgctgtccgcccggcgtgcggcccgccggggccctccaccgggctccgtgtccccgccgcgccggcccgcccgcgcagcccgccgccgccgccgccgctccctccctcggggccgccggtgctccgatcccgcccggttgaggcggcggcggcggcggcaggcggctgagggaggggaccgttctggctggcgcgggcggcggcggccgcggcgtcccggcaactcggctggcgctgaggaccaagttgtgcggggccgcccggcgcggcgaggggcgctgaggaggcagcgcggcggccgcgtgagggcagcgggcaccaccgcctccgcctccgccggcgagcgcgccgcttccgcccgccgctgtcctcagtctcctccgcggcggaagccggagccggacgccggtccgcgtcccctcagtcgcgggccgcgccgggccaggccgccccctcccgcgcgggcggggagcgcgcggccgcctccccctccccctccccccctccctcgccg

SEQ ID NO: 31590 - DNA, 388 bp, Mus musculus
  source 1..388: mol_type = other DNA
ttcacttccccctccccccaccttgggggcggagcatgagagggaaccaattctccttgcttccaggcagaataactacctgcccttcctttcattttttttttttttttgaaaaaacaaaaccgacctaagcctatttaatgtaacacagtttacagtttatttaatgtaatgttatttttaaataacacagttacaataaaaatcgacaagtgggaaattatatttataagttaaaaatgaagataccgagagaggagtgtcattttcttccaccccaggtcctggcaaggcggttcgcgaccgggagcggaagggcggccgtggtccggaccaccgatcccaggggcccccgcggcgccgcgcacgcgcactgctgagggggcag

SEQ ID NO: 31591 - DNA, 492 bp, Mus musculus
  source 1..492: mol_type = other DNA
tttaaatagactaggctagctctgtataatcctggttatcctggaactctgaggggccacaaaactcagcctaggtcttgatcataacactttgtaattcttcatagcactttgtaatttagtttattgttacaaaactcaatctatgggagatactctccactttatattgtaaattgtatccacgtgctttgtacaatgtaacagacccgactgataatctttaattgaactctgttgaatggcaacatggtaccaaagacattttacttgatacccacaatgctattgtaacaaagtagcaaataggaagcaaattgtgacaaaagaatttccttttgaggcagggtctcaaagtggtctagacatcctgtgtagctcaggctggtttaaacttttgtctaattctgagacatttgcttcaggagctaccatgctagttcaattctgattcacttccccctccccccaccttgggggcggagcatgaga

SEQ ID NO: 31592 - DNA, 300 bp, Mus musculus
  source 1..300: mol_type = other DNA
gctaaacgtctttagcattgaaatgctgccaggccaatcctgggaggattctcagcgaggcagaatccagatcaggccccagctcgagacgtgcaggccgggcgagtaacagggcctggacacgcagaccccactccagtccccgggggcctggcgtgaggggaggtccggcggaaacggtctcggccagcgctgggcggatgctgcctctcattggtggccgttaagaatgaccagtagccagaggccgcttcgaatcggcagcagccagcttggtggcatggaccaatcagcggcccc

SEQ ID NO: 31593 - DNA, 422 bp, Mus musculus
  source 1..422: mol_type = other DNA
caaaattaaaacccaagtttttcttttacttgcactaaagccagtctgtcttccctctcccactaaagacacactacttctgtttctactcagagtatggtactctgttcacacataggcacataggcagtatctttgtttgtgtctagataaaaataatcacggcttttactacaacctctatggaaatcttaaaatttgtgtgtcgctgagagaagacaccaaaagtattaatatacagtgtcaatgaactttttatctcagcctgtgagctcccggaaagcccagggcctgtgcgggagcctgaagcagaattcaaggtcagcctggcttacggaagtcactactaaggagagttatggaccggatgccaaccagtacgcagtccgggaggccctgactagtttggcggtcccggagac

SEQ ID NO: 31594 - DNA, 244 bp, Mus musculus
  source 1..244: mol_type = other DNA
aggccaacctggtctacaaagtgagctcatggcgcacaccatgagttcaagaccagcttggtctacagctagttagctgatatgtaacaagcgcttcggagaacagctgtctccgtggctatggccacttaccctaacttggttaaaaaaaaaatgtgcaaatctagaagcacatgtggagggcagagacggaagtagagccgcttccgcccgacgctgggcgccggaatggcgcgcggagatg

SEQ ID NO: 31595 - DNA, 356 bp, Mus musculus
  source 1..356: mol_type = other DNA
gttctatggggaaacgggtagtttaaccttttccaaaagttgtctctttccgtaaaagaacaggaaccagattccaacggcttgaaatagttggttgtcaactagcttttaatggttcttctccaacaattcacgaaatatatatagcttgtcggtctcggagtctgaggccagcccctccatggaagatgccgaaaacttcctcctggccacctggccttccgtcacggaggcctctgtctcagtctcttagtctcccggcacgcgcaagactccgggcccctctcgcgagacttgacagatctgctgggaggcttcgccgtaagatctcgcgagattcagagaggcgctctggg

SEQ ID NO: 31596 - DNA, 178 bp, Mus musculus
  source 1..178: mol_type = other DNA
gtcctctgaagaccaacaattgttcttaagtactgttctgcattcctgaaggacaatactcagctgtccagaagagagaaatgaattcactgggcctttaaggaaatttttgtaaagccagctttctttccctgcctgctgacccgctgctggccagccccgctgggaggggcaagct

SEQ ID NO: 31597 - DNA, 471 bp, Mus musculus
  source 1..471: mol_type = other DNA
catgttggaagagcacagcccacttgcccaggacacagtcagcccagcacactgatgggctgctgagagcagccccccatgcaagtggtgactcctgaccagatacgcagccacctatgacttcctgagtttaagcgaggtagggccctatttgtcaccatcgtgactcacaccagcagagtggggtcatcggaggcctttctgctgcctctggttgcaagaccacttgtcgcaatccattttatttcagacatagggtagccaaatgacagtgtgagaaagtgacatttactcaaggccacccagatatcctggaggacccagtgagccccattgttccagaggtactgggggggtggggtggcctctccaattgtgactctgctggagagccagggcactactctctctgaaaagtgtctggacactccttaaagtttttagcctgctgtgactcagctatgacgtcgt

SEQ ID NO: 31598 - DNA, 389 bp, Mus musculus
  source 1..389: mol_type = other DNA
cacaccaggaatgcactcatcccagcagggtgtgtctgcaggggagatcttatctgattggagccctatctcttttacactgttaactctacagtgcgtgactggcatactcgaggtgacttatggcacacatatatatgtggtgtgtgcaaccgtgcgtacgctcgcccagtgcccgctggactcgctgcgcgggggcggccccgggagacgctgcggggccccgccagccgcgggctccaatggcaaagccggtgcggcccctgctaattacataagcggggacgtcaataattgaaaaagatggcgccccgcgcccggggggccccttcctgagctcaccggccccgcggcgcccccgccccgccccgcccccgccgagaccccta

SEQ ID NO: 31599 - DNA, 301 bp, Mus musculus
  source 1..301: mol_type = other DNA
ggttgtatttcgtgttcctgagacacaacacttgcgctgctatgggagggaaaccaagtaggtcctgtgcttgggttggttggttggttttttaatcttttaaactaaacttatatcctgacactaagttccctaactctttggagtaagagctgcgtgtgtttagcttaaaaagcacagcactgcactatcacactgccatctgcattgttactgatggaatgctaggagtcccccaacagaagcactccagttctgtttccttgagggaggagcgatcagcccgccccccggccagcct

SEQ ID NO: 31600 - DNA, 284 bp, Mus musculus
  source 1..284: mol_type = other DNA
aaggcccacagcgggctgagtggcatatgcctgtgatcctaaggcttaccaattctaagccacacctctgacggttgtatttcgtgttcctgagacacaacacttgcgctgctatgggagggaaaccaagtaggtcctgtgcttgggttggttggttggttttttaatcttttaaactaaacttatatcctgacactaagttccctaactctttggagtaagagctgcgtgtgtttagcttaaaaagcacagcactgcactatcacactgccatctgcattgtt

SEQ ID NO: 31601 - DNA, 364 bp, Mus musculus
  source 1..364: mol_type = other DNA
ctagcagaaacatggtcttgccagctacagatagtttctgcaattgtgtgacattcagaattctgggaacttttcagaagcaggcatcaaagaagaaacaaaaggaaagaaattaaattcagtgattttttttttctaatttcgaccagctctttcatgggagagtgattccactatggggtcaaccagagacacgcctttgagagatctggtccttgtctgtcagcatgctacccactgttcctgtgtggctcactgtgtctgggccagaagcaggcagactctgttagtgacataatgtttcaggtatttgtcacaagtgtgctgagcacaatgagactcctgccttcttaagcctgaatta

SEQ ID NO: 31602 - DNA, 445 bp, Mus musculus
  source 1..445: mol_type = other DNA
tgtgaatttatagacagacacacatccaagtgtctctagactggtgtggatccctctgcagaccagtctaagttagactcattcattctaaaaccatccatttaaaatgaaattttgagttcaaggccagcctggtctacaaagtgagttccaggacagccagggctatacagagaaaggtgtcatgaaccatcttgaacaaagtgactcctggctgccggcactgagccttcacgggggcaggcacccacatgagagtccttttacgtataaaagtaagtctttgggtttaaattaatgttaaatacccccatctttactggacatgataggatgttaaaacatattttatgttcattaaaacacaaagatctttttctctgacattaataattaaccggagaactaatttatccaactcttcaaactcagtttatttaaaagg

SEQ ID NO: 31603 - DNA, 311 bp, Mus musculus
  source 1..311: mol_type = other DNA
tgggaaattaagtttccctgtatttctgagcagtatcacatagaggaaagggctaaagagacctttctgcttcagtactgggataaagatctaggtaggagtaaggcacactgaccaaactccgaattgtgacttaggaaaactcaaagggatggagcccttgcttaagttattacaacaaccctctccttacaaaaggatttttaaaatccaaaaatgaaagcctattcagatttttaaaaaatacataaacattttattaggtttcaaaaggggaaatggcgtttaaaagtcgaatcccgttttattta

SEQ ID NO: 31604 - DNA, 394 bp, Mus musculus
  source 1..394: mol_type = other DNA
aaagttgacttctaagaagtcttgcttaatgataaaaattagacttatcagctactagttctttcaaatcattaaggtctcacaaaggtctgtacctgcagttatgtggaatcctaggatcatatagctcaagtgaatggtcactggagcccaagcagtcttgagaaggcctgccttccatcatcccaagatcgaatgctccttagggagaggaacgccccattgcttcagtggaaaaaatctctcctcacagactcggcgcccagagggctgaccacagcccgcccccccaaattgagcgcgcgcagaggcggcaagggtggcgggaagcgcctccgccccgtcccgtccactagtccgtgtcgggggcgtggcgataacaagccccgcccac

SEQ ID NO: 31605 - DNA, 385 bp, Mus musculus
  source 1..385: mol_type = other DNA
agggccttaatgacactctgagagtcactgtacctcggacaccagggtcccagggctctgactgtagtcataacctacatgcagaatacacactgtccgcctgtgctgagtgtgctcctggagccgagacctaggtagcatgctcccagagaacactgcgctccagcttcctacctcagctgctggcccttgaggacaaggtggcaagttgtgccataaaactattgcataacttcttgaagagagcccatctctttcacagagcactgacactactgtgtcagatttaatatttttatttctatctgtaagaaatgagcggcatgataaggaagtaacaaattctttcttagtttctaaaggtcagcctttccatgataggcag

SEQ ID NO: 31606 - DNA, 401 bp, Mus musculus
  source 1..401: mol_type = other DNA
aaaggtcaacttctatgctgaaaaaaaaaattgctttgctttgcgttattaacatacttgtggcaatgtaattgtaaaatataaattaaacgtaaatgtaagataaataacgtaaatgtcaaataaataaacgtaaatgtaagataaaaatgtcaagtttcccttacaaatgggttggtcaatgtgaaccacccttaatgtgaataaatgcagtaaggacagacactgtcactgcgcagtaactccgccgggaggcgtggcacacgactacgcttgcgcaggctcctttccccgcctccttcaggcgtgaggaccagtgggggcgggccgaggccgaggaaggggcgtggccgtcaggttagtctcgctggctgcgcgcggagggtgacaggaaaccctgt

SEQ ID NO: 31607 - DNA, 452 bp, Mus musculus
  source 1..452: mol_type = other DNA
gagaccctgggttcatgacctagaaacccaaactgtgattctaagacttgaaggctgctgtccagcttcagggacttgaacaagtccttgccacagtcaggaactgttaagacttcgtccttgtgctcacagatgtccagggaaaacaggacggttaagcgcactggattgtctttccaatggggaaacaaggttaaaacaaacctgttcttctatcctaagctggaaaattggaagtgattaatagccaggccacatcaagtttccatagccaggtctggaggtggctagtaacctaccaccagtaggtcccacaagtaggactggagataactaagagtctaaatggccgttattttccttaggccctcaagctagcacaggtagtctatcttacggtcgtgatccaggttgatgacgcgtcagtctgaacggttttcatgctcactgcg

SEQ ID NO: 31608 - DNA, 345 bp, Mus musculus
  source 1..345: mol_type = other DNA
cactgcgaaggagtcaaagatagactgtccagctgtgcagtgaagcatctgggctggaagatatctgtgaaaggcttgcagaggtgccattgaaatccagtggctccacagccactgctgtacatcctgcagaaaccatcagcaatgtctgatctgaggagcccgtgaggcccctcggtgcgaggatcctgactctccccttggcagggagaagtgagtctgccttcttgacagaggccagaggacggataaaggatggaccttcagcccctcatctaacatgctctgggtgtggcatttaccacagcctcagagctccagcagcaggtgactgagattcctgga

SEQ ID NO: 31609 - DNA, 266 bp, Mus musculus
  source 1..266: mol_type = other DNA
gtttgtattataaatcctgctccattataaatgctccatttagaatggacatgtcagagttctagtctaggggaaggattgccttggcatttctccttcgatgaagtcacagtcagagggctttgcctctgaaggcacactttcctcgctggatgaatgcttagcctggagccggagtctactccccagcctgccccgcccgcctcgagggcggctccggcgcgtgccctgcccaccctgccgctcgcacagcgcaccccgcccca

SEQ ID NO: 31610 - DNA, 352 bp, Mus musculus
  source 1..352: mol_type = other DNA
aaaaccagcagtgatttttcaaacatgaggttttcagttacaaactgcatccagagcctggacactgtaaaatgtaattttagaattccttatttatagaaagaagcctttcggttttgattaatcaaatgggcttgggtataatacaaactgggaggccctcgcctgctagaggcgtccgtaagttaattttgtctgaaaaaagtaatgtaccagcgagactctggcagggccttaagcattctggccacgccccctccggtcacgcactctgagggcgggagaggcgtgtcttctcctccattcccgggcacctattgggcgggccgccagctgggggcgggactgcacc

SEQ ID NO: 31611 - DNA, 373 bp, Mus musculus
  source 1..373: mol_type = other DNA
ccactcactgccaaaggctgtgcagcctcagtctgtgctgccaccaagggctacgatggcatctgtgacctgtgatgtggcagatgtgttgataatcatggtcagtactgccactgcaggccatgcatgtgctgaggtccctggcatgtgctaatgccatgtggatgtcattgtctgatctcccagtgactgtaaagggcaaggaagataccccacaagggctagccacactccagtgaggtaataataaaaatattatgaaactcaaatcagttttaaaaaactttgtaaaggttttcagattagacaaaattctatttttggcagctatagaacaaggtgttacctctggggtcactgtggcagcagcttc

SEQ ID NO: 31612 - DNA, 289 bp, Mus musculus
  source 1..289: mol_type = other DNA
ccggggtttcagctgccagtgccatggccaacagggttccgtgctgctcgcagggcagtaagtcctggcctccttgtggcaatgacaatctcaagaaatgtcattcgtggcaatcttggagcggctggaattacactctttcagagttcactaacagatttatctgtttgcgttccctctcgtggacaccagggggcaggagtgcgtcatttgtataaatgctattgatccttcatataaatggaactagctctattgtactgtgcagtttatcaaataaacaggtggt

SEQ ID NO: 31613 - DNA, 322 bp, Mus musculus
  source 1..322: mol_type = other DNA
aataggatattcagggcagcacagggcagcacagggcagggcagggcccaccggtactaacctcttttcctactgtaggggcaaagtctcaggcacttgggaggtaatctcgtcacatcaagtgtttgacaacaaaacacacacacaaacgttttattattttatatttattttgcatgcaaagtactgtgtttcattatggcattttcatacatatgcgattgcacaactgtcctccttgctgcgggggccaggaagaggctaggagggcggggatgtcaacgccactagctcctccctcaggaaggaccgggccccagaa

SEQ ID NO: 31614 - DNA, 419 bp, Mus musculus
  source 1..419: mol_type = other DNA
acccggcctgcttttgcggatcaggtgggtcccgccgggcgtctgacactgaagccacgcgagggaggtgtgggcgagcgggagcgccgctattccggcccagccctaaataggatattcagggcagcacagggcagcacagggcagggcagggcccaccggtactaacctcttttcctactgtaggggcaaagtctcaggcacttgggaggtaatctcgtcacatcaagtgtttgacaacaaaacacacacacaaacgttttattattttatatttattttgcatgcaaagtactgtgtttcattatggcattttcatacatatgcgattgcacaactgtcctccttgctgcgggggccaggaagaggctaggagggcggggatgtcaacgccactagctcctccctcaggaaggacc

SEQ ID NO: 31615 - DNA, 357 bp, Mus musculus
  source 1..357: mol_type = other DNA
gtgaccacagctgctcttgtggaagctatagacatgctctgtccattatctattcgttctaaccactagaacagtgcccctgcagtggggctctctgctgcagacccagcacagcacggtgtctggcaaatatttagtgctggatggatggatgagtcaatttctgcatcccacactgcaggattcctgcaaggcctgggagaagcccctgggctttggggtgctaggcgggcagacacccaggaggtcagcctccctcgcacgggtttctgaggtccacagccggaccagatccctgcagccagcaacgcgggcagccaggccagccgtcgtttccaggcaggctgcggcctgctt

SEQ ID NO: 31616 - DNA, 669 bp, Mus musculus
  source 1..669: mol_type = other DNA
gccagggcccgaccccccgaggcccaggccgggtgcgcagcgctggcgccacaggtgccgcggagggaggcaggtccgacgcctgccgggatgggcgctgggcgctcggccggccgagcgctcgcctgggcctccctgccgctgctggggcctcccgcgggcgcactctgcggggacacgctctgcagcagaggtaaggccgggcgcgcgccatcgcgggcctccgcctcctcctccaggctactcgcagtcccccggggccaggaggggcgggcccaggcatccacgggtttcggcgaactcttgtcaactcacctcaaacggtctcaaatgtttccatttcggaaaatgggctcaggcactggtacctgcctcaaagcctaggaaagagaagcttcggtcatctctctgtccttgggctacagcaaagaagctggacctggcgtagggccagaggagaggcgtgtggcccagcctggaccctggccaaggccgggcgggggcaagcgctggcagccgaggggttcgccctgcccagtccggcccggcgggtggtggagatgtggggtcgattgaccaaacaggtgcgcccccgcccctccccatccgcccccgctggggcccgtgggcgggcagagctgcggcagcggggcctgcgattggcagggg

SEQ ID NO: 31617 - DNA, 361 bp, Mus musculus
  source 1..361: mol_type = other DNA
gatttctgttgcttcaaataccaaacagaatgacttggagaaagtctttcagcttgtagcaaagccctccttgtattctatgtgcgcttgaaatgcacacaataattttaatggtatgaaagtcatatttttatcagatggagactgccttctgtaaagagtatagccttggtgtgtatgcatatatacatgcaccactgcacctgtggcgggatggacaggggcactctcgggccgcgtcgcccggacgactccaggccaggattttgcccgcactgactttccgggcgggtgccagcccagcctcccggtcccgggcccccgccgaggggccggctgctcagggcggggcgggggaggc

SEQ ID NO: 31618 - DNA, 359 bp, Mus musculus
  source 1..359: mol_type = other DNA
ggtagtttaggggtgcacactgctacccttctccacagtgactacagtatctgttgtgacagagtcgccccaagaaaggccgggctcccggcggagccttcccggcccctgcggggctgttctgcgcacccccctcctggagcctcatggactcccttggcagctccctgctccctgggggccacagggggccccattctttgagggaggttttatagaacagtctacacacctctctctttttcgaaacctaaatgagggctttgaaaacataataatgtaagttcaacccctagatcctgtgtttaaaatgagagagacaggcaggccctggggctcgctggccggacagcctagtc

SEQ ID NO: 31619 - DNA, 410 bp, Mus musculus
  source 1..410: mol_type = other DNA
aaagagacatctgtccacacaacctgtttgtggagtaactgggggtctgtgaggatgcccacgcatctgcatccttttgggtctaatgtaagatagaagaaatagcagaagtgacttcagggttttatggctcaacctgaaagcccgacctaaggcctcggctcactgcgagccgagaagcttcctctggacccgaagcaggcaatgctaggagtgtgctgtagaattctcagaactggcccatttatagtctctacacgagaattagttttactgtttctgtttcatatgctttggaacctttaagtgaaagactcttacaatgaagtctctgttagaagcctaaggctgctaatctgatcatgactcatgggttcacttttcctgcttcctgtaaagaaaaggggatc

SEQ ID NO: 31620 - DNA, 279 bp, Mus musculus
  source 1..279: mol_type = other DNA
tgtgagccaggatgggcccgcgtctgtctcagctccctctgcagtgttgagaagagggacacatggggatgaagccccagttcccagccgtctcaagccagttgcaacagaagacagctaggtccagggattccctcaaatctctgctggcaggtctcagaccagctagggaaatagattccaagcttccctgctattgaggggaggaggtggggagagccctcccctcccaacactggagggcagagccagcactccaggggaggtgcttgtgggacc

SEQ ID NO: 31621 - DNA, 286 bp, Mus musculus
  source 1..286: mol_type = other DNA
tttcctgccggtcagccgctgagcgcgataagtggtacctgtacctgctcctgtggggcctcgggaacaggcatgactccatgacagctgttaagtggggtcctcagaaccattggagtcctaactgcaatccaggctgtgcagcagtcatctctaaagttgcttaactggtgccaccacctgtaagggggaagcactgtgctggcttccttcccctggaggcagggctactttagtactgctttctgggaaagcaagcctgggcccagggggcttacattggtaa

SEQ ID NO: 31622 - DNA, 516 bp, Mus musculus
  source 1..516: mol_type = other DNA
gctggagatgaaggctcatctgccattcatttccagcaggtcacatcagggaatctgatgctctcacatacatgtacacacacataataaatttaaaaataattagtacgttttgttatatgtttttattgtaataaaaagtgtcggtggcctccagcctcagtctgaggctcacagaccctttccaagctcgggagcgagttcctagccagtccctgagtgctcagaaactatggctatcgccacctctgtgacaggcctggtcacgtggacgcgctcgcttgtgaggtcgccgggcccggcaggcgattgtcccttgcggggccccgtcccgaggcggcgactatccctgtcaaccggggccggcaacgggctcgggcggggagcgcgtggcggcggcggcggcggcgacggcggcggcagtttggtcgcgggccgggacggcggagcagcggcggcggcggtggctgtggcgccggcaccggccctgagcgtcatgcggcgcagcagcccgga

SEQ ID NO: 31623 - DNA, 456 bp, Mus musculus
  source 1..456: mol_type = other DNA
actgtgttacattctgaccagggtcaaattcaaaatctggacacagagaaaaatcagtatttgccgaatagcactttcttttctttttctttaatatttattaatttattatatctaagtacactgtagttgtcttcagatatcccagaagagggtatcagatctcggagagcagtcagtgctcttaactgctgagccatctctccagcataattttttaaatatttattttttaatgtgtgcgcacgcgctcacacacacacgaatgaatgaatgaaagaatgaatgagtgaatcctacctgttgaacaagtttttgaaaggacgaatgggggcttacctcccgtttatgtattccatgttaacagctagtgtctaacagacaccaacttcagctgtcttggcgtcactcctccagcggccctagagcagtgcgcttgcgcgtcgctggagacgc

SEQ ID NO: 31624 - DNA, 260 bp, Mus musculus
  source 1..260: mol_type = other DNA
aatgttggaggaatttctcaaaaagcgatttaatagcgccgatgcgccagaggttgtgccggcgcaacgctggggccggtcccgggagctccaatccaaaggcgtttttcccggcgcgcgtcgagcgggcggatgcaaaaaaattcgatttttaattactaccattaaaaaatcaaatttgcaattctttggtcactgattgacaggattgcaaaggaactaagcgcaaattggaagggctttaaatgcccactacaaag

SEQ ID NO: 31625 - DNA, 410 bp, Mus musculus
  source 1..410: mol_type = other DNA
acactgtctatgtggtctacaagggaaaccaatcatgtttgtgatagttacaatagcacactcacagagccatgcactgtgctgtacagcctctttatctgtctctttataaaactataaactataagacaaatacgaagaagtaaatgctttagtactgtgtgctgccgcggcacccaggcggcaggctcgcctcaccggtcgcagtgcgcccatgcaggtcgcagaggccggaaccgtgcctgggcccgcctgaaagctgcaatcccaggcttcccgcctggcagctccactatccccggcatgacggcggtagccgcgaccctgaccaggtgccctcggccgtgtcgtaccatctgcgcatgcgtctccagcgacgcgcaagcgcactgctctagggccgctggagg

SEQ ID NO: 31626 - DNA, 193 bp, Mus musculus
  source 1..193: mol_type = other DNA
tctaagtctgagtgtgcacagtgttttagaagaagacacgtcagtgtttgtcagtgtcagacctttgccaagctggtgcaagctcggcttcatgtggaatccacacctattaacgttgtgtgactccagcggcagggcggtcgtcgccgcagaggaggcggcagccgcagaagcagctgcagggacctctcca

SEQ ID NO: 31627 - DNA, 478 bp, Mus musculus
  source 1..478: mol_type = other DNA
tctccattctcggatatttttgaaaaagagaactaaatttaaaaacgcaaatattgaagtaattgacagatactgagacaggcactatcatttaacgactcttcagtttagttcccttatgaggagagtacctactcacccaacactgagaaagctgtgtgactggggcagaatgctggatttgaatgctagaacttctgatgttctcatcaggactgtgtgtgaacacaatgagtagtttactttttgcctatgtttctaaaataataaaagctcctatggcatagggccttgatcatggttctctatgcccagcatattgtacactgcctggctcagagtgacaaattcctgcatcacgtggtcattttaaataagaatatatttgagaaacaaacagtaaagtctaataagttagtatgtgactatcaagtctctttgagcgattcctggcagcgaagtcactattgttatttcc

SEQ ID NO: 31628 - DNA, 205 bp, Mus musculus
  source 1..205: mol_type = other DNA
gatgaaaatgtcctcctgatcaacatggttgcctgccttactgcttcaacaatccagaagacaagtagttgtgtgtgagttaataaaaacctttgcccactggtcagcagaatgatgattttaaaagccccaggcattcgactcaggcctgggtggaattatagtatcctagccctacgaggtccctccggtcatgacgtcacgg

SEQ ID NO: 31629 - DNA, 491 bp, Mus musculus
  source 1..491: mol_type = other DNA
gaatgctggatttgaatgctagaacttctgatgttctcatcaggactgtgtgtgaacacaatgagtagtttactttttgcctatgtttctaaaataataaaagctcctatggcatagggccttgatcatggttctctatgcccagcatattgtacactgcctggctcagagtgacaaattcctgcatcacgtggtcattttaaataagaatatatttgagaaacaaacagtaaagtctaataagttagtatgtgactatcaagtctctttgagcgattcctggcagcgaagtcactattgttatttccggccagagacaggacaacgccaaggccccgcggccaggatggcactgagcttcgggtactcacctgctagcctcagagctgtgccctcagctcatgccccgaaagcagcttccgacgctggggtccgagcgaaggacctgaggttacccgcctggccgcccgtgacgcactacgcctgcgccg

SEQ ID NO: 31630 - DNA, 456 bp, Mus musculus
  source 1..456: mol_type = other DNA
ctaagttagggcaactttgaaaaaggttctctgaccacagaaatgtctcattaattttattttgtgtaaggattaaaatatacaaatgttataattttcttttaaaacaactagtaaacaaaattgccttatgccatacatattttttgatatctactttatatgtatcttttaaaaattttgttttttaattttttacttaatcctctgagtaggtgggggccccctgggtatccctcacttgcatgtccattttataaataaatacaccctgtgtattaggaatgtaaattacagctccttctgcctgctcaacggagaaggaagctcttctgttggcgggctgcaggacctcgtgtgcaggctggactggactgcacccaaatggatgcatttctgacactgtcaaggatcgtgagttacggtctgagcagtcaccatgcagtaattaataaa

SEQ ID NO: 31631 - DNA, 518 bp, Mus musculus
  source 1..518: mol_type = other DNA
tagttctaataggaaattaaaatcattggcaattgtttgtactttctcataatgcttaccttctgagaggagcattatccacacattcagtgtctttgttaaaaggtttttaaaattacaatcttaatagaatcagtttataacacatgcatataaatatatattctaatatacaaacaatattaacataaaggctagtaaatttttcttctgcaggtactagaaaaactcatctgaattctgtagatttcatctcactgatgaagatcttttgtaagaaaataaactgcttcaagggaagtacaacttcttactttgaaaagaaattaggtaatacagacattactagtttgtagttaagtaaataacagaggtgtcactttgtatttaattgttagatattcatctaatgtatttctctgtcaattcttagaaaatatgtttcaaactcatgacaaatggtgataagggttttttaaggggagaagttattcagatgaaaattcctctcacatctt

SEQ ID NO: 31632 - DNA, 513 bp, Mus musculus
  source 1..513: mol_type = other DNA
taggatcagcctaatgccaggcaagaatttcacactttaaggttaaaagcatcagggggttgttaactcttgacaggccttaagagtaatgcgctatcacagagctctaaattcttcggtctagtaaaacttatcttgtctggagagtttccccttatcagggtagtatatcaacttatacttgacatagaagtagcctaaaagatttctatctcagtgagacttttagtcttaattgtttactgaatgagttaagctccttgcaatctaagaacactggaaaaaggctttagctatgttagaatacaatcttaaaaggcatttactataaggtaatactatatagagtgcacgtggatctatacactagactaatgtgggaatggaaaaattaattttatggtttacgggaagggagtttccttgaaaccttcatgatggcagagaacaaatccaatgggaagggttcctttaaacaattgtcaatgttacatgagcaagtttgtccagtta

SEQ ID NO: 31633 - DNA, 448 bp, Mus musculus
  source 1..448: mol_type = other DNA
ataactcatgtatatttaaagcttcattagagaaatttccatattctaacttacatacagattattatcatggatgttgctgaacattttgtttcgcatagattcacaatattaaccttttaggattactttgataaattaactataaaactaaaatgcttttaaaatatcagttatcatacagtcctctaacaaatattgagttataattccaaaacttgtaaaatttgatccttctcacttttgaggtttgctaatctggttagtatctcactacaaagagatactgtaacatagatgaagcaggttctgctctatggatgataaatttaacgttggcaatcttgcaagccttggttctggtggccgggccactacgcttccctctcgcgtgattctcgcgagagcctccaggtccgcctccgtggtgaggaggaggaggagaggg

SEQ ID NO: 31634 - DNA, 530 bp, Mus musculus
  source 1..530: mol_type = other DNA
gccctcaggttaggtctccaggttaacttgggggcacgtctgatggctcatcaatctaaaatgtgaacatagacaaatttgcagtaacatctaggtggtcctagatttcaaattaagagccctatcttaaacgctgcattttatacaaatcgagcaaatttgatatgttttaattagcacacggtttaatttacatttgaggtttaacaaaagttttcaaacatagggtagtttccttgactttttttttaatctagaattttcaaaggtaatcattatacataactgttgtaaactctgtaaactacagagtcaactatttgactaacattagttgataagagttattacaacttctgttctttgagttacttattcttgaagaagttaatgtttcttaatattcctttgtaatttgtctcgaaacttggaacgtaagttaataaaaatttcatatttaactagaaatacacatctacgagttttgtcctaagctaagacccgtagctcctcctcagacgcccgccgcg

SEQ ID NO: 31635 - DNA, 348 bp, Mus musculus
  source 1..348: mol_type = other DNA
tgaatcccaactaattgaggtgcaactcagaaactattgctagtcccattgtaattggccattgtaatgacttacagagcactttaaatattcttaattatcttcttaaattcccatccgagttaacattatgattaaaaataaggagaagggaggaaagcaaggctttactttcataaagccctgtgtttaattcccatcacccaaagagaagaatcttttagggcacacattgttccggccctgagcgttcttcgctcgcagcatatttttctgtctttcctgcagcggaaaaagagaggaagaaagagcatctcaggatgttcttccggggcgtccagacagtct

SEQ ID NO: 31636 - DNA, 374 bp, Mus musculus
  source 1..374: mol_type = other DNA
gatccaaaaagtccactcaatgggcaaaaagttcaccttttcaacagatgtggttatacaacattgtacaaagccacttagctttaagcttggaaaaagattaaattgataattatttctgtttcctataatagggaattcagaatgatttccagattttcttgtttcaccaaacactgctccagtgctcatattcaggtgctcccacgcagcgagtccacatccctgggcgggaggacaggctgctcaggcccatgcaggcaacggtcagcgggagcacttcgtgactgcagccgcgaagaagagagctcgggcccgcctttccctctcaggggcccgtcgtcctccgagcaggccagggctgcccttccggt

SEQ ID NO: 31637 - DNA, 672 bp, Mus musculus
  source 1..672: mol_type = other DNA
tcagagatccaagatcatcatctgctaaattgaatttgaaatcagtgatactatgtgctaaattgcattgtatcaggaaacaaatctagcacaatatcctaggtgacattcgaaaaatacagggtttagaagacaaactcagtaacttatttcatttttttagttatctgcaaagagccattcattttcaaatgtgcttcaaagagcacattttaaaaacacttaaaaactagatgcaactgatggtcaattaattaaatctagtaatcagaagaaaggtaggtgttattaattaaaaaatgacactacttactggaatagtattccgttacaatgaggccttgtgtcaaaaaaagacatcagattattaaattgatcttgtaaactgaaatgttagcattgttttaatttttttctccaaacattctaattacgtaatagttttatttaagaaaacttaatttactcatgtactttgactatacttaataggagtgcacgagattatagtttagttctcatattatttgtatacttaaaaatgggtgtgtataaggaaaaggaagcatcattcttgtcccacaggagtctaggtgttttgtgaagaacaagacacaaaggggaactgtagcagcaaaggttttcttctttttgctttcctggttcacaatg

SEQ ID NO: 31638 - DNA, 479 bp, Mus musculus
  source 1..479: mol_type = other DNA
acaacttttctttttttggaaaaagtaatttcacgagttctctttatcaagaagtaggatttagaggccactctcttctacagttgatgaacctctattgaatggcataacaccagtaattcaaaactgaaggccttgccttggctactttttacaaaatgccagagtctggcttcctggccagctacagggccctatatagagggtctcaggaagcggtccctggggcatcctgagattccccactgcagattccatgggccagtccaatggctcaaaagtctgggggcctagaccagctccttggctcccatcccagggcaggttgcggcccacgggggctccagagaccccgcaccctagcccggctctcgggtggcctccgaaaccaggagctgcggcccctcggggctccgggaagggggagaccggaagggcagccctggcctgctcggaggacgacgggcccctgagaggga

SEQ ID NO: 31639 - DNA, 381 bp, Mus musculus
  source 1..381: mol_type = other DNA
ggcctagcggcaaagacctgtgctcctagctactctgggtctcaagacttgatgtagagtaacaacaaagcttgcactgttttgtattttatttatttatttatttatttatttatttatctgtcctggaactcactttgtagaccaggctggcctcgaactcagcatgcaaggcctgccggcccggccccgacaggacctctaaactgagagacatgtttttataaaataaactatcacaatcctctcccctctggctaccgctccgccgcagtcgctgtgttagctgaggctcagccctgcgcgcaggcgcggatcctggggcaggctccgagcccgggtggggctgcgggaaggaagctccgcctcgcgggagaacgc

SEQ ID NO: 31640 - DNA, 452 bp, Mus musculus
  source 1..452: mol_type = other DNA
gattgtaagcatcctttgcccacagtataaaaatacaagttggatcacatggttctttgttcaagtgtacagatctcctaggattactacagttgcagcatttgttttattcaggcaaaattaaccctttatgacattatccaaaaaagtagtgtgttatttcaatttgcattgttttagataagtagaaacaagattgaactgtaagattcaaagacttggtacctaaatatctgtgtactgtcactccactcaagtggagtacctaactaatttccaaatattagccaatatctaataaatgataaaggaaaattgaggctgaatattgtctctcagctgtaacgtcttgtgcagctgaattagagtcctttgttcttagggacacaaaaaaatctgaattctgctcatttacctatgaggatagagtgtgtgtgtgccctagcacacaa

SEQ ID NO: 31641 - DNA, 443 bp, Mus musculus
  source 1..443: mol_type = other DNA
gaaatgctagaatagagtcggttgtagtgtacactcaaatgctacagcagttctgcttcactttgtaaagtattcagtcaagtgagtagataaatttagctgggaagttgcaaagtcagaacagtctatataacatctttgtgaatttttttttgatcagaaaattatgtgcaacaatttttatacttattgttaataatatggcttatttattgatcttattttaaaaattcaggaagtattttaggaatttgcattgccttatagtcatcattacattaataaacaagacaattctttagatatgccacttaatggaatttatattagaacagtaatgctttctttgcttgagaaatattagaacagttacactttcttttttaaatgttagcccaggctgtctttggactctattgtgaaatacagagtttatttggata

SEQ ID NO: 31642 - DNA, 632 bp, Mus musculus
  source 1..632: mol_type = other DNA
ctgtaaaataaaacttgaaccttttatttctttcccagtccattggaacaaagtgggtagatcttaaataggaattacagttttagtttttgtgaagtgagctcgagcggttcggtaacttggccaaggtcacacaaccgtactgcctgcccctcctccacccgggaggcattgcggcgcttactagaagcatcccgcaccgggacgcagaacctggggaagccggctctcattgcggccgggagcagctctcagaacctgcagttacgaagttaatgcgcgcttagcccagcaacgcttaccgccgcaggcacagcggggctcaggtacggtttgcggcccgggctaggcgccgcggcggtctcgcaggtgcaggcggcggccgcgggcctgagcgccctgcgcgctcccaggtgcgcagttgacgcaggcgacagcgcggcgcggcggcggcgggcgctggccggagctctcaggtgcggcagagcgcgcgtgcagggggcgcgcggagggcgatggggcgggctttccgttccccagcagccgcgggccccgccccctggatcggccaatgggcgtgctcggcggcgtcacgtgcttgccgccgccgccgcggtcgctgccgaagccga

SEQ ID NO: 31643 - DNA, 555 bp, Mus musculus
  source 1..555: mol_type = other DNA
caacgacgacgatgatggtgtgcactttccagtgcagctgctttggagtcacccataaagtcattggttccacaggttaaacatttggaaaagctaaacatccatggtctgtgaacttcagttttcaaattcgggaaaccagaaccctgaagcctgactcagtgaaactggagtcattgtgagggggaggacaactgtttcctccatttagcctgtcaaaaattctccacttgaggagtggacgaaggcttctttagtggcctctggggacacgatggaagacaaaggtccctaggtctcttctcagagaagccacagccggggcctcacgcgagtgcacttcccagcagcccccgcggtcagcggcgcgggcgggagggggcggcggtgtagacggagggggcggcgcgcgccgggtacgcgcgcgggcgaccatggcgctcgcccggctggagcgagtactttaaccccgggaggcgacagcagctgcggcggccggggagcgagcctcgagcgggcgggcccctgcctgagggaagtcctgagggaggcctg

SEQ ID NO: 31644 - DNA, 238 bp, Mus musculus
  source 1..238: mol_type = other DNA
atttccacccagtgcaacgtcagggggcacgtgctctggggcccagttactaccttactgatagtcacctggtcggacaagccccaggaatcttggctggccccatggactggaccgcctggcaagagggcttgtgcactgagacccagggtcaggcccagggccttgcctggatggagctgaggcctgtcagaccctccgggaggatcctgtccgggggagggctggaggaggggcc

SEQ ID NO: 31645 - DNA, 447 bp, Mus musculus
  source 1..447: mol_type = other DNA
ggaggttaactaaagaaaactgtatatatgtctacaggaagctttcggtcaacgacgacgatgatggtgtgcactttccagtgcagctgctttggagtcacccataaagtcattggttccacaggttaaacatttggaaaagctaaacatccatggtctgtgaacttcagttttcaaattcgggaaaccagaaccctgaagcctgactcagtgaaactggagtcattgtgagggggaggacaactgtttcctccatttagcctgtcaaaaattctccacttgaggagtggacgaaggcttctttagtggcctctggggacacgatggaagacaaaggtccctaggtctcttctcagagaagccacagccggggcctcacgcgagtgcacttcccagcagcccccgcggtcagcggcgcgggcgggagggggcggcggtgtagacgga

SEQ ID NO: 31646 - DNA, 377 bp, Mus musculus
  source 1..377: mol_type = other DNA
ctgagtgcctacaggagggggccttcttgtttccctttgagaaagtcaaacattgtaaaggaggttgagtcactgtctccgagacatgcctccagactgcagactggcagtattgctggccggccgcgccccccgggagggctgcgctgctaaacgcagcgcagagagtagcgcccccctcctcaaccccaggttccagaggccaagggggagaatggagacttcctcaagcatcctttggcagcgctggaaaggtttaatttttcttcctgaagaaacacaggaaacgccttcccggagcacgcgctgccaaggcctggggcggcgggcggccaatggcacggcggcaggacgtgatgtcaggcgcggctgtaggc

SEQ ID NO: 31647 - DNA, 468 bp, Mus musculus
  source 1..468: mol_type = other DNA
aggagggggccttcttgtttccctttgagaaagtcaaacattgtaaaggaggttgagtcactgtctccgagacatgcctccagactgcagactggcagtattgctggccggccgcgccccccgggagggctgcgctgctaaacgcagcgcagagagtagcgcccccctcctcaaccccaggttccagaggccaagggggagaatggagacttcctcaagcatcctttggcagcgctggaaaggtttaatttttcttcctgaagaaacacaggaaacgccttcccggagcacgcgctgccaaggcctggggcggcgggcggccaatggcacggcggcaggacgtgatgtcaggcgcggctgtaggcgcggaggcttgcgctggcgcggactgcagagccgaggctgagctcggcgcgcgcttgggtagcgttgcgcgcggctgggcccgcggccgtcggctcctcctcc

SEQ ID NO: 31648 - DNA, 296 bp, Mus musculus
  source 1..296: mol_type = other DNA
catcttttatctgaaatgctttggaccaaatactttggagctgccgtctgtgagatatcacatgaagtcaagtgtgaacatttccccacttgggagcactggagatgtggccacatcatgcatgtctgcagttcttgccatggcatgctaagacagtgtgtgtagatacagcaccatatgtctgcccacctttacagtttggacagaagacaccaaacattttattttacacaaacacggcccactggttggaaggaaaacaggtcttacctcacaagcagaggcccacgggagcc

SEQ ID NO: 31649 - DNA, 256 bp, Mus musculus
  source 1..256: mol_type = other DNA
gcttagggctcagccatcaggatccaatagggctaggccagttctggaactggctaagcagggatgcctggcctggggcctggtaagcaggctccctcatcagcctggacagccagctggccaaggtctctccagtgccttggcctatagggatatttttttttcttttagaagagtgaaaaaagatatagatgggggcagagaccaattgggcctccggtggcccccccacccacgaggggaggaggaaaggacg

SEQ ID NO: 31650 - DNA, 420 bp, Mus musculus
  source 1..420: mol_type = other DNA
tttcatatgatacatcaatggacagctgaaccaggtgtcatttgcatgctttcttactcagtgttcaggaatcaggaaggctgtagcaaggtgcttacttaagatctttggatgaagcaagaatcctactttaaaagatgtagccttccttcgtttcaaaaggattgttttgcctgtccttatttattataacaacaaaaaacagagcaaagcttttagttagcactaaatgttttaatccagagtttagaaatacatagtagaacccttttaaatttagttcttcaaaaatgttttaaactagaggagcatttcactttaaataataagtctatcagcatgcacactgtgaccttagagcctgaactttgtaatcacatgaccggcttgtaaactgacctgtgaggatgacggtcggcc

SEQ ID NO: 31651 - DNA, 129 bp, Mus musculus
  source 1..129: mol_type = other DNA
gcatgtgaacatgattaccacatgaatgtatagtatatcacatgtgaatgtaattataccctagaagcatctgtgctctgtattgggggaattttattatctgatttaacaaattccagcggcgccgga

SEQ ID NO: 31652 - DNA, 525 bp, Mus musculus
  source 1..525: mol_type = other DNA
ggtctggaggatcaaactcaggtcattccccccactcctgggtatttggctgcctggagttcccaggaaggcagtatccccaggagagggcactatttgtacactgtactattgtacacactgatatatatatatatatatatatatatatatatatacatatatacatatatacatatatacatatatatatatatatatatatatatatatatatatatatatatatatatatatatatatataatatgaatgacaacatctcatgtagcccaggctggcttggaatttgctatatagccaagaatgaatgaatttcagacatttttgccttgagattaggaaagcatgcaacttcatggagtctgaggctcagtcttccaacctgagttggacgatcaggcacccaggctgggagcgcgcccccggcgccccctagcctgcgtggcggccgcgcgcacgggcgcagggggcggcgcggccccgcggcggggaggggcgggcgcgcgggcgcgcgcagaagcg

SEQ ID NO: 31653 - DNA, 337 bp, Mus musculus
  source 1..337: mol_type = other DNA
caacctggtttcctagtggctcagaaaaacagctggtgaacctgaaggaccctagtttagataattcatctaaagactgccagctaaggcttaaaggctagcagcttcattaggtataatttagatctataaaacttactatgctactatgtagctaaatttggcctaacttttataattaccttatcaaactgcggctaaatcaaacaattagtttagttacagcacaattttctctcagtgactagaagcagccagacactcaaactgccagtaattatggcctctgaatggtgagggcttcacatttcaccgatcagggcacagcccaactgaa

SEQ ID NO: 31654 - DNA, 273 bp, Mus musculus
  source 1..273: mol_type = other DNA
gagaacgcgcgcggggcatttctgaaaatcacccccatggccgcgcgccacctggtggcagcgggaggtgggcccacacctctcatttttgagacaggtatacgaactctttaagacacaaggagtcaggaggaggaagagaaactttaatctttcccgcccaaacacttcaccccgccccctggggccttcccccacagggctgggcaaaactctgacatagccgtttattatattaatatattagaaattttattagagtttgtaataacg

SEQ ID NO: 31655 - DNA, 188 bp, Mus musculus
  source 1..188: mol_type = other DNA
cgataccgtcttgaatttcattacagtggatctcaactagcatcacttgaactttgcaagcattccaaagagactattttctcccttttatcgatggggaaactggatcggagaggggagaggaggggcgggcacccctccaccctagctccgcctctagcagagctactagggcaccgggctggggt

SEQ ID NO: 31656 - DNA, 269 bp, Mus musculus
  source 1..269: mol_type = other DNA
gaaggaactaagtcactgagagcctgcttctcagaggtaccagaaataagggacctcagacatctgctgtggactcctgctccttgcaccctggaggtagaggaagatgggcggtacactgcgtcccggtgcgcggggccagcgcgccctctagagcttgctcgacagccagaggagctctggatctggccagcaggcaggttccaaggttggaagcaccttccatggaggcggctcagagagctcccccactgcggctgcgccgcccc

SEQ ID NO: 31657 - DNA, 436 bp, Mus musculus
  source 1..436: mol_type = other DNA
tgattaattaagacagcccttacatttttaaattttacatgtaccatgtatgtgagaggtgactggatctccctggaggtggagtcgcagagcactgtgagctgctatgtggtagtcttggctgatctagaactatgtagtcaaaactatctagagaataaggcatgtgccacattactcgccctaattttttttgctcgagttctactaggttaaaatgtaatagttttctttttttttaatattttttattaaatagttttcatatagttacaagaaaagattcattttagcctacgtctgaaatagaaagaatcctggggattctggagtcgttaagaaaggatgttatcaagcgtccctttaaagccgcccggcttccggttccggcgcatcccggaagtgggcgggcgacggcggctgcgcgcggaggagg

SEQ ID NO: 31658 - DNA, 521 bp, Mus musculus
  source 1..521: mol_type = other DNA
atcttggagacggtttcattaatatatcttggtgtaataaagagtgacactggggatgagatttgtactactacatcactttggataccaaacttgggtacaaaacaagataggtaggtaggtaggtagatagatagatagatagatagatagatagatagatagatagatagatagatagatagatagatagatatggagttaggtcgaacctgaccacttgcgttcgacgttcgagcgccgaacagtggaagaagagaactccacaggttttagaataagaccttgtctcaaacttttaaagaaaactgcagccttctctgcgctgcctccagccagcccggtgttgctcatcgcgagactcagtttccccagctgggtcgcttagagaccagccaaccttaggaaggcaggacttccgggaagcggagggcaccacggccgcggctgcgcaggggcggagcgggcctcccaaaccgcgacgctattggccgtgcccggcgccacccggcagtagttga

SEQ ID NO: 31659 - DNA, 592 bp, Mus musculus
  source 1..592: mol_type = other DNA
aaataaaacgttgttttgatgtttgttaaataacaagattacagaatatctgtggggttttttttgtttttgtaataaagaattttgcattgataaatattctctaggaatgtgtatacattcatctagtgtgaactttgaatcacgtatatattaagtgtatcatcaatataaaaataaacattatttgcttaaagttttgtgtatttcttattttgtagattgagattactgtttataaagtactaggataaaaggttctagaaacttctttcagttgtataaaagctggccctggggtaccgcacgccacggggctcctccctcttcagaagggaaggtgccgatccagggtgcggtgcctctcgctgacgtgtcagtggccggccaacacaggtagaggtgcccgcgcccggtagccgtttcaggcacaagcacccccgcttgcgcgccgctgaatcgcacacgggcgcatgcgcgcgctgagaaccaagccgacgcgctgccacttccggcgcgcggcaaacgtgcggttccgggtcggtgctcggctcgtcggcctgaggtgggggccaagcgccctcgagagtcc

SEQ ID NO: 31660 - DNA, 517 bp, Mus musculus
  source 1..517: mol_type = other DNA
ttctccctttgcatagatcttaagaattaaattcttcgggtgcattacatatacatctgctatattttcaaagatagctttttgttagagcagaatagaaaagattactagtattaattgtatttacatgcttatgcatgtaatgttttgcatgcttaggtctgtcaaaaaatgcagtgaaattttataccaaaaatgattagctggttagattttttaatcatcttatacaagaagcagttctttttaggcttttcaaaatggaatacattccttattaaagaaattctgctttcttacaagcttgcatccaagcttaggatctttcctagtcccttttgaaggttctagaaagcagggatgcaggatgccagccaaagagaacctgcaggcaggtgtctggcgccggagatgtaagtccccgggcacacggaggcgctcagggctcctctcgctctgctagcgggtgggccgcgaggaggggacgggcccgagccccgcggcaagcctggccggg

SEQ ID NO: 31661 - DNA, 419 bp, Mus musculus
  source 1..419: mol_type = other DNA
tctagtaatactttgttgctattcaatatagagttgtcaaatggaccaatgttaaagctatagtaggtgtgagattttggggcaaataacacatgcaaactttgcattcttacagtcttacaagaattgaagtgccagtatttgtacagaatgtggcataagaaatgctttattgtttctaggccaggtcttcagtagtcctggaaaggcggtaacagtaactcttaactttaactgaagatactttaaaccacttcatggtcttccttagaaaaagcctcatttgaggtgaagagagctacgggtcccagtaggttttatcaaaaggacctccgggttctcttggagatagatccgtggcccggaattccgcctgagagatttacgtcgcttcgcagacgccactcacggatcggacg

SEQ ID NO: 31662 - DNA, 424 bp, Mus musculus
  source 1..424: mol_type = other DNA
caggctgactgggcagacccgcgagcatgctcttctggctgattgttggtgtcaacaaaatggcaaccctgacacagtagcatttgtgccaatttctggttggaatggtgacaacatgccctggcagtgccagtggcaccacgctgctggaagcgttggattgtatcctactagtgttctcaaacctggcatggtggttacctttgctccagtcaatgtaacaactgaagaatggacaatgtgggcttccaatgttgctggtgacagcaaaaacgacggaagcagctggcttcactgctcaggtgattatcctgaaccatccaggccaaatcagtgctggctatgctcctgttctggactgtcacacagcgcacatagcatgccaaagatcgatcgtcgttctggtaagaatggaagatggccc

SEQ ID NO: 31663 - DNA, 211 bp, Mus musculus
  source 1..211: mol_type = other DNA
aaggtaagctgtttatgtgtactcatacatcccacaaattcattgtctgactgtcctctctctctctctctctgtgtgtgtgtgtgtgtggagaaaaccatcctggcttgccttggcttcccagaaaggaagcttccttacagccaaggcatcaaatccgctttgcttgagaagcccttcccaaagaggcagaaagagcagtacttgtaag

SEQ ID NO: 31664 - DNA, 437 bp, Mus musculus
  source 1..437: mol_type = other DNA
aggagcctggggtcttagtttttatgcctaataggtattcctcaaaggatccaagcttcagcatttaaagaaataattaaccttaataatattttccaggctctgtggttaatcatactatcaagatttatgacctcaaaaattttaaagtccatttattaggcagtaaaatatttcgaggaattagtggactatattaattttagcaaagtcctctgcctttaggactgagcacttgagtcagtggtaggtaccaccacacacagtttattttaaacttttgcataaaacctgtattcactataagtcaaaaaccaatcaaaaggagaaatgtgtccagagttcaaggagaattcctctgggagttcagctctctgacacagtgctcacagcagagctccacatcagtggttagaaatttgcaacctgattcaaca

SEQ ID NO: 31665 - DNA, 445 bp, Mus musculus
  source 1..445: mol_type = other DNA
ccttactaagcctgtttcagtgtagatgcacacatgagggctgatcctgagatcagctgagagggacaggcgcttgcccaaaggacagcccttggacagttttatgttagactaaagggcttttgcacaaatatttttcatggcatttcagatctgcttgggaaactcagagagaatgtgccagggtgaaacttcatgctgtttcatgctatagcaggcattctgagcctagccacaagtgtggcaaatagatatgcagtgcttttttgatagcatgaatatacaaggaactttccggctaaaattttaatcacattttctcttttagaataacttgatgcaccacatataaatatacgactgactataacattgataaataatgatattattgactgactgtgtttttttttttttcttaagtactgaaattaagcagcaacga

SEQ ID NO: 31666 - DNA, 463 bp, Mus musculus
  source 1..463: mol_type = other DNA
agtaataccttcattacctgggtaccaggtactacaaattgatgatcttcttgaaggttctgtcaggaaaatgagctagtggattcatcagaattcttctgggttgcatctactttagtcattatagtaactataatgtgaccacatgttgtttcttttttaataatccaaaaaatatctcagtcatgtttacttttgctaatatgttcattttatgatgttttagaaaaatgctaattttgttgcttacatggatatgtgataatagcatgattcactaaatttcggacaactattactattgtcatagcaactattgctatgacattctgtagttagtcgcatatattcagtactctaaacatgtttgaatctctaaaaaaattagcttttctgtagatgttgagaacaacactagtatatgatgtctattttgatatgaaaatatcaattttcttctaag

SEQ ID NO: 31667 - DNA, 495 bp, Mus musculus
  source 1..495: mol_type = other DNA
gcagcattaagcagatgatttgctgaatcagtcagagttaacagttagttccctcttttcaaaaggattgaaaacatcttttctaatgacgcatatgtgttataaacaaatatattcatttaccgtacatttttatttactttctgtaacttactgacttgtccttaagtttcaaaaactaggatataaatatatttccatgtagaaaaaatggttagctataattttaaagacagaattagctgatatgaaatatatctacatgtcctttaatgtaagtgatataagttattgttattcctaatcaattgcgttggaagcagaactcaccgtaacttactctggaatgtatatttctaaatttccctgactcttgtcttttaatgtatgaaaatcaaatggtcagcatgccagatgcttgacatttaactctgtggcgattactcagagattcatgaccttggaacaattattttctcaaaagatattaccaac

SEQ ID NO: 31668 - DNA, 418 bp, Mus musculus
  source 1..418: mol_type = other DNA
tctagtcttttcaatacctatcaaagaaaagcaaaattgatagtcctatactgtggtataatacaggcttatagccagcgggcatactctcacaagagcactggtgtaaggaaagcagttacttactccattgagttgtgtatgtgtgtgtgtgtgtgtgagagagagagagagagagagagagaaatagtagtgcccttctctgtacaatttccatactaagtaaatgacattgtttcttagaggaactatattgaattactttgtagtaaacttgtgcaagttttgtatatgctgtacaatcagtgagttcacacctcctgacccttagggaccagagtactgacattactgaagttatggcaaaagaagcatcatttctggtatgtagctacggttactgttcctttaacagtac

SEQ ID NO: 31669 - DNA, 526 bp, Mus musculus
  source 1..526: mol_type = other DNA
aagcaacttgtggaaattacatctgttccaagttgtagctttaaaaatgaagttaccagataaaagcatagacctaccgttgcatgttctgtctttgcatgaatcatttaatccacactaagggagataaattcctatttttaatagaaaccatttagacttttattattaatactctaagattagtacctgcaggagggtgtgcactcgccttgcggggtccccgaggcttaggcgcgcccggaaggtgccggctagccacctgcctgagaacgtgcgagccggtgagtcagcccccagacctctcagcgtacgcggggcccgtgggtgaggagccgcgccaccgtggagagttcgcccagcaccgcgcgtcctctgagtcaccgactaggcgtggaggccgccgtccgggggcggagcctcaggcttgtgggcggggaggggcggggcgagggcggggccggcgcctgacgcgccccaaggccgcggcagccgcagcggggaggggctgcggcctcggtggcgg

SEQ ID NO: 31670 - DNA, 369 bp, Mus musculus
  source 1..369: mol_type = other DNA
agaccaggaaatgcagccccacgtcttcagttccccttcttcttaagcaaccagaagatgaaatgtgatttttcttttaatgaacctccaggaacctccttgttttgtatatatttatatagcttcttttaaatttttaaagaaatcatcaggctgagtcgggtgacagttgtatcagagctaaagctctcaggaaaagtgtaaccagtaattacaaaataaataatttcattttaagatgttctgttcgacaggaaaagtcattcatgcatgacacatctatgtaacctacacgagtacacctgtttacaaatatttcacagatggggaaaaaagaaatggccagtcagtgggaggatttttttcttt

SEQ ID NO: 31671 - DNA, 227 bp, Mus musculus
  source 1..227: mol_type = other DNA
ctttccaggttttccgcaaagcttgtggccctcgaggcacagcgtctcccaccccgcggagtttagtttgagctgaaagaatcgatttttaggtacaaaagtttcgaagccaaaactttctctttcctttcttgagaggggaagaaaacaaaataattatatttcttttgccgggtaaaagttcccgagcccggctgaggacttttctaggagttatgactcatttt

SEQ ID NO: 31672 - DNA, 261 bp, Mus musculus
  source 1..261: mol_type = other DNA
cgcgcgggccgcccaggggatccgggccagggcccgggtgagcacccatccgcgcccccagcgaaaatgagtcataactcctagaaaagtcctcagccgggctcgggaacttttacccggcaaaagaaatataattattttgttttcttcccctctcaagaaaggaaagagaaagttttggcttcgaaacttttgtacctaaaaatcgattctttcagctcaaactaaactccgcggggtgggagacgctgtgcctcgagg

SEQ ID NO: 31673 - DNA, 326 bp, Mus musculus
  source 1..326: mol_type = other DNA
attttgacacattaaaaaaaaatacaaatatatcattttttgatctgtcctactaatttgaaattgagacttacaaaccactgcatataaaatatatatttaataaaataagttgctagttttatgatagcatgctccgacttttcagtcccaaagtctggtgtgtgtgtgtgtgtgtgagagagagagagagagaatgaaaaatcgatgtgtatattacttggtcatttaaaataaaatatcaaaagttaccctaatttaagagaactttcacttctttatttataatcaagaagtgaggtgcaagtttctgcttagaaaacagc

SEQ ID NO: 31674 - DNA, 247 bp, Mus musculus
  source 1..247: mol_type = other DNA
tcttttctttttaattttagtttaattgcaatatcaaaaatatgcacttcaaaccagcatagtacagctctatgttaacctagagaccctttattaaaatgccaaacttttaatatagggatccgcaccgttttccgcccagtactctgcaggattggaatttcatttcttccacatcccagatcctttcccagagagaaacttggcgatcagtctctcttctctcccctacagaaaagaaaaagaa

SEQ ID NO: 31675 - DNA, 415 bp, Mus musculus
  source 1..415: mol_type = other DNA
gtgtggatctgctgctcagcaattttttttttccactttctaataatcatgagaagaaaacccagtttgtttcttgaatttacctactattatttctaaagtctgataagcatgattaaaataatttatttataagtacgaacaatttgcatattgccttaattatactgattctttgtcaaatactttcgtattttttccagaaagattatatcttttttaaaaaaaatctgtgagagctgatataataatagagagtaataagctgttatagtcattgagatactcatttattttcattattagtctcttaagacccaggagcaaattgcattttaaacattgttttgaaaacgaactgataaatctggacgccaaaaatttttttacaaagaaattacgacagaatttcccc

SEQ ID NO: 31676 - DNA, 365 bp, Mus musculus
  source 1..365: mol_type = other DNA
agtgtacactttttaacttatccttagatttaactatttttatatgttaagggcctgtaaatatttttatttaagaaacacatctgatattcttttagtttttattaatttgacattttaatttttttgaaatataggtgatataggatgaatgtttcttttagaaaaccatttgctgtagaacaagagtaatttgaacctactcaaaggctattcaagaaagtatttttaaattttaatttaatttaaatgttttaacttatttactttatatgaggccctcctgggtgtcccccatccacttacaggtaacagtttcccaggagaggctgaatgaagactgagtcacatactcaggtgacttc

SEQ ID NO: 31677 - DNA, 734 bp, Mus musculus
  source 1..734: mol_type = other DNA
aaagtggaaaacaagatctccccctttattataccaaattgtgctaaatgggccaacttcgaatatcccaaatagccgagcttctgttcggtgcttaactgaacacccgatcaacagttcaaccaactaggagcaaacctgtttgcaacacaatgctttgtgtatacaaggtgtggtggataggatccgaacctcacatcgagggcgagggtgtcctgacctggcggacagccctcctgcctttttttagcccaaagacaaacgtggggaggcctcggcggcgggggcgcggccggctcgcgagcaccgagctcgctcgggcagcagcgggtgcggctcccgcccactcggagcaagtcggcgcggcctcggcgtcccccagaggaaaggctgggcgccgcagtcggccttagcatcgcccatcccgctcgggcgccgcggctctcgcgcccgggcgggcaccgcactgggcacaccgggcgtctcggggccgcggcgggcacccgcagggcccgccgtcccgtctgctcggtctcggttcccgcagcctcgcgagcgcgctccggatccggccccgcccctccggctcgccccgcctccggatctcctcgcgctcgccgcccggcacgcgcgctgcgcccggccgccgctcccgccgccgccgccaccgccgccgcggagcgtttctccgccgcgcctggcttccagcttcaggacggaaccggaagtgtagg

SEQ ID NO: 31678 - DNA, 429 bp, Mus musculus
  source 1..429: mol_type = other DNA
gctcccggtgtagggagatgtcttcagccagggccaagcagcagcaacagcaacagcagcagcagcagcagcagtagcagcagcagcagccaagggtctctctttctctccttctctcccggccacagagaaggagggtgtgggggtttttctaagaagaagaaactcctctcctctctcaattcccccactcggggctcagagctggagggtgggggaggaactcggccgccttccccccacccccctcaattcaaggttgaagtggggtacttcatcatcagctgctgctgctgctgggggctggcgacccggaagccggaggaagttgctactctagagcagccccagctgcctcctccctcctctgggagagcggagggacggaagggcggagcgggggcggggccgccaaagccggccggtcgc

SEQ ID NO: 31679 - DNA, 338 bp, Mus musculus
  source 1..338: mol_type = other DNA
tgtttgcagcattaaggcagagagcatgcagggagccctcatggttaggtttttctctctctgcagagaacagcagctcccggaagccgagagccaggggcaggcctcctgctttaggcctacccggccctctcccagtcaagcctgcctaaatcgggcaaagccggccgccgccgacggtgaggaccgaaggatgttcaccacctgcacggcgaccggccggctttggcggccccgcccccgctccgcccttccgtccctccgctctcccagaggagggaggaggcagctggggctgctctagagtagcaacttcctccggcttccgggtcgccagc

SEQ ID NO: 31680 - DNA, 771 bp, Mus musculus
  source 1..771: mol_type = other DNA
taatacattctcacaaggtggcattagattggtgaacgtcattgtgatatttgcataaagatgtcattagatgagcaatcttaacataccaccatcatagaaatattgtatccttgactaaaattctgttcattaccttattatatgaagtttttgatttattcaagtagttccataattttcatgcacacacacacacatagttgtatgtttaactacctctagcgttttaaaaaatattctcttagttacaatgtatttacctagaacatttgagtcatttcaagtgatttctttctcaccatatgtgaggatctcaagttatatgtgtatatcttgaaagaattttctaattatgttgtacattttgaacttaaagtaaatttttaaaaaaaatttttgatttctttgtatccaacacagaaatagcaaatttctattatcccagatagttcttttattgcacaatgccttttaaaaaggatttcaaggaccagtgttgatttaaaacctgccactggtggcagtaaaaacttaaatcttgatattgtggccacattcaagtatgtgattgttttgttaataagccatgttataatttagtgatattagagtctaataattaactttggttgcacatacatattgattagtaaaagatttgacaaataatgtttaactagttaatttgcactgaatcctttgtgaatgacatatgttcacctttgtgaaataaaattgctttgttttccacaattgctaaatcaaggc

SEQ ID NO: 31681 - DNA, 602 bp, Mus musculus
  source 1..602: mol_type = other DNA
tttgacctgtcacagcaactgactatagatgtcatgtggactcttgttactaattatccagcagtttagttgtaacacagtaacacgcaaactaattggacactgtaaccagtgttttcacatactttggttagagatttcaagaaatgccaaccatcaaactaagaaagtttctggagagctcctctggacagggactgccccgcgagacgcagcagggctgtgcctctcggcgtgggcagacgcagcggacttgtcggacctccccggggatgcgcaaacccgaggcgcgccggggaggggcggccggtggcccgggggcggaggcctcctgtccccccgaggcgagcggtcctaggcactgagccttcccgagggagccccgcgcggagcgagtcggcggcggaggcaccgaggcgcccgctccggagccggggaccgagcgcacctggcacctgccgccccgcctgcgtgccgagcgtcccgccgaggagggccaccgggactcggctcgctctcgccggctgggctggccgcgcctcgccgcggagagagtgggtgggcagggagagggcgacgcgcgtccccgaggcgggggcgcg

SEQ ID NO: 31682 - DNA, 298 bp, Mus musculus
  source 1..298: mol_type = other DNA
gggcaaatggccctgactgtttcttagatctgttcatttctgcaggattctaaacatcattagaaattgatctatgattgcttataacacaagctctaaagtagcatgctatttgatcggatgtgaacaattttgaatatgttcaaacgtgctgataagtatttttcctttcaggaaaagatgtgccccatcagtcccacctgcaggtagagtggcgactacaagtcccgggatgcgccgcgcttacacccagggtgaggcggatctctgcagtgacgtcaccgtgccgaggcggggc

SEQ ID NO: 31683 - DNA, 387 bp, Mus musculus
  source 1..387: mol_type = other DNA
caagcctgacagacaagcaatttctctctgagtgacctctttctaagttagagatctgcctgccagcctggtctacaaagtgagttccaggacagccagggctacacagagaaaccctgtctggggagcttgctttcaagatttacaatccatcttactaaaatagagtgactccacctcactctgtgagggctgcggtgtccctccgcgcggggtccgcgctcttttcccagccggccaggctaggtgggaactcactgggcttggtgccaccgggcgcaggacccaggcggcgtccccaagcgggcacccgggcggctccccggcgtgcggcgctcacctgtcggcccgcctctccgggacgacccaggtggctcggggcgggga

SEQ ID NO: 31684 - DNA, 337 bp, Mus musculus
  source 1..337: mol_type = other DNA
caggggcaccctttgttgggaccccagtgtggtgtgatttgttggaaaacttacacatgaaacccgtaaagggctttctaagctgtccaccatttacagagcaatgtctatggtctatgcctagctagcccagggtgagagcactcccttgctcaaagccatggcttggtttcaacatggacattctgttgtggaatctgacatgcaacttcccataatcctctctcctcagtacctagttaatccggaaattggaatacctactgtgtgccacatactgtttaaagttcggggaacccaaaatccttcaaaatgagaaagtcattgttcttatgga

SEQ ID NO: 31685 - DNA, 377 bp, Mus musculus
  source 1..377: mol_type = other DNA
tgtcagtgtcacactgccttcttcccaggttgagaaatccaggagttattaacaccagcgccagtgttcttgtaaaagtcaagtggcctctctggctttaacagcagtgcttggccggtgtgagctgctcagctaggggcacaacctgagcaaacagattgccatggatgctccgtgggaaccagtttcccggacaggtcgtgcggcggacctccgcctgagttttgcagacttggcctcaggtcgagttgggcggcgcgggccaggccaatgaacgcatcccgcagagggctcggctccgccctgcgaccctcgaggccgggcgcgagtgggagtggcgcgcgcccccccaccgccccgcgcgtccctccagccgc

SEQ ID NO: 31686 - DNA, 582 bp, Mus musculus
  source 1..582: mol_type = other DNA
ttctgaattacagcatagatattaatattttcctcccttatattaatatttttttgcaaattaatcctaattactggtgatttccaggtatgaaaggaattctagaacctccatttcccttcttgggtttatccctttgagtagtcttgaaggggaaaaaaatcagatttaattttccctgtctcattttaagttgtggtcgtgagaaaatctgcccagagtttaaaattgagatctgtttaataggaaaaacatagccctgttaattcttctgttagcatgagaagttataatttccttaagtgcaaagtattataataaacagggctgaggtgtgtagaattactttcatgtctcatgctaattctgccacatgcataagtaatattggggcaaaatagctctcattttcttagaatttctaaggtgggattaattatcttccctttgtattaaaagtagcttaatcaattacttaactatgtgaaaattttgttcagacataaaatactataggaactcaaataatttcagaacttctttaaaagtcaaactgagagcatcataattctgttaactcgt

SEQ ID NO: 31687 - DNA, 385 bp, Mus musculus
  source 1..385: mol_type = other DNA
ttctataggaaaaggccaaataaaaaattccttctataagtttgaccattgtgtttaatcaacacaacagaaaagtcattatcaaaatcaaagaaacttcaaaattaactatgaggttcttttaaaaatacattagataagctataggctattactgatacatacattatataatgtatgtatgtttaccaagacaaacaatagttcttgacaaacagttgtcatgcaaacagaatcttcggaaagctgtaggaaatttcatctgcacatatatatacgtgcaaatataaacaaaaaataatttttaaaatttaaaaacgccttctggagcccaagatcatcctctactcgaagatctcaggcctgggcgtcagcagcgcctctg

SEQ ID NO: 31688 - DNA, 497 bp, Mus musculus
  source 1..497: mol_type = other DNA
aagttaaaagtcttcttacgtcttatgtccttacttatgaactatctaaggtaggatgtgcacagcatacagtcaagtgcatttgtagaaattgtaaagtcgcttactatactactaacttttcaaaacattctaaatattaactgaaatcacttttaaaattgtggaaaggggattatatgagtataaaatatgtatatattaaattggagaaaatttaatagaatgtgctcaactaatttcatacccactgcaggccaagctgtcccgacagaggttcaggccaggcagtggcgtgtccctccccaaagcccggcctcgggccccgcgtccccgggaagccgggggacactagggcgctggcactcgggccgggccgggccgggcccagcaggtctgcgctccgagcgcaggctcgggcggagctgagaggggcacggtcacccgtgagtgttcaccgcgcggcctccgcgccccggccctcaccccgtccactg

SEQ ID NO: 31689 - DNA, 549 bp, Mus musculus
  source 1..549: mol_type = other DNA
atatcaaaaatatcaaaatatattttaaaatattaatacaattataaaaagaaagaaatgatcctaagaatgacaatctcgtgtttgccatggtaggtatactttatagaggataaggtaaatctaggactcaaggctatacatagctgcggccactgggtttctccctaggagctgtaaagtagcagtcaagagcactttggacagtgctgtgggcagcagtgctgtatgtcaccattggctctgcactgagccagtgactggtcatgggcccagctggtgtggcatcaatgcaatcagtgcacattgggtttattaaaatttattttgtactattgtactattaactccttaattatcctaggaagatgcatcatctatatagttcagatatgttagaacattttaatatgagttggtaggaatgataattcaatcatttattaagcatgctatgtgcatgaagcctgtattcagttatgaggatataaatgattggggtttttttcccattaatgggaacttacactgtgatcatgttaagtacta

SEQ ID NO: 31690 - DNA, 480 bp, Mus musculus
  source 1..480: mol_type = other DNA
cccctggttctagagctgtcacagagagagtggcagtcagtttagtgtttgaaataaatcatctatgttattatgtactatatatgtagatagatagatagatacatagatagatacatagatagatagatagatagatagatagatagatagatagatagatagatagatagggtaggtagatagatagatagatagatagatagatagatagatagatagatagatagatagatagataatgattttatgggtttgggaacacaaaaacttagcctttcccttccaagagccccttggaaagcaatttgaaaggaatcccaatgcaaatccatgtgcacaggcaccttcaggttatgccagaacctgggtctgcaagccatcctgcacgccaccctagagggcgcgctgctttttccgccaacggggcggccgtgctggctcccaggcgcggatcggtttccttctctcattgagaaa

SEQ ID NO: 31691 - DNA, 104 bp, Mus musculus
  source 1..104: mol_type = other DNA
ggattaaattctaactacatagagtttacatttttaaaagtccagttcgctgctggtcccggaaattattgctcactgcccaggaagccagatttgtgaacagt

SEQ ID NO: 31692 - DNA, 382 bp, Mus musculus
  source 1..382: mol_type = other DNA
agatgtccaaatctttagaaatgtttgcatctaaagctaatttgagcacaccggttgaaaattggtatctcccaatttcagccaggctccagggccattcggaccctgcccagatgcccctggggcatcttgcacaggtacctcaaaggcgccaagggaccgacccagccgggctccgcccttccaaactgagtctcaactggaaagcgaaagcggaacccgttcacctccagtttagcgctcccgaggcctggcaagtcgcttttccccgggttgcagtgcaggaaggcgcgccgagggtcccggagcacgtgtcctgcgcggtcgcgcgccccgaagtggccgtcacgggcgcagcaggtctggctcccacgcgtgggga

SEQ ID NO: 31693 - DNA, 323 bp, Mus musculus
  source 1..323: mol_type = other DNA
tatccctgtgttcgaggctaacctggtataatcaagttgacagtcaagattagccatcccagcctgtctggagcagcattccttaatgcgggaatgggacttccctcagagaagatgtccaaatctttagaaatgtttgcatctaaagctaatttgagcacaccggttgaaaattggtatctcccaatttcagccaggctccagggccattcggaccctgcccagatgcccctggggcatcttgcacaggtacctcaaaggcgccaagggaccgacccagccgggctccgcccttccaaactgagtctcaactggaaagcgaa

SEQ ID NO: 31694 - DNA, 343 bp, Mus musculus
  source 1..343: mol_type = other DNA
ctgttttaaaagacagggtcttactagacaaggtctcttagccctggctgtcctggaactcactcttaagaccaggctggcttgatggaaagaattttgcttctgccaatgtagaagggaggccctgatagctctctatttttctagcaaaggaaaagttcacatctagcgatgtgtttgtttacaaaatcttcacaacaaaaaacccaggaagcagctttctcagcttcctggttttgcttgtgtcaaactttataaccgtctaaaaagttacagaagctctggtttccatcctaatgcacataaataagctttttggcgccctggacgaagtcctcagggc

SEQ ID NO: 31695 - DNA, 354 bp, Mus musculus
  source 1..354: mol_type = other DNA
ttgtttcttttttaaaataagtaatttgtttattcactttatatccgaaggggaagcaccactcactgagtgtttgttctttctaattgggctgacaactcaaaagaaacccttaacctgttttaaaagacagggtcttactagacaaggtctcttagccctggctgtcctggaactcactcttaagaccaggctggcttgatggaaagaattttgcttctgccaatgtagaagggaggccctgatagctctctatttttctagcaaaggaaaagttcacatctagcgatgtgtttgtttacaaaatcttcacaacaaaaaacccaggaagcagctttctcagcttcctggttt

SEQ ID NO: 31696 - DNA, 376 bp, Mus musculus
  source 1..376: mol_type = other DNA
tacagtcccgtaccattgggcctggctggtctgtatcagacaagcctcttgctacatagtaatcttgctacatagtaatcttaaatttcctagagtcaggcttagttacccattaatgactgactttctaggcagtctctacttaaaatacgccttgtgttaacatagcgaaatatttagatagtccaagaatgtcctaagactctccaagctacatacacctttgtacctttgttataaatcttcacagacttatttggcaatgtatagcaaaaaccttcaggatttctcagagaattccgacaaacaaattaaaagtgactgacagaaataaacgaacttgtttctgagaaagagactaaaaactatttaaaag

SEQ ID NO: 31697 - DNA, 282 bp, Mus musculus
  source 1..282: mol_type = other DNA
catatcccagggccaccaccctacaccattttgaaatctgcaaatcaataccgcccaaagctgagatgaagttttcctaaggtcacagaccaaagcttgttttgcaaacttttacatcacccatctctagccccgggctggaggcgatacacaccccccgaggtgctccgggggcgggggcgggggcgggggcgggcagcaggccatcgagcagcccggcgcgccaccgcccgttggattggctcgagcctctcccgccaggcctgcccggctcccgcgcgc

SEQ ID NO: 31698 - DNA, 518 bp, Mus musculus
  source 1..518: mol_type = other DNA
attttgaaatctgcaaatcaataccgcccaaagctgagatgaagttttcctaaggtcacagaccaaagcttgttttgcaaacttttacatcacccatctctagccccgggctggaggcgatacacaccccccgaggtgctccgggggcgggggcgggggcgggggcgggcagcaggccatcgagcagcccggcgcgccaccgcccgttggattggctcgagcctctcccgccaggcctgcccggctcccgcgcgccgctgggcccgccccccgccgccatcttggtcgtggaggagcgggctgcacgccgcgagccgggagcggacggcgggccccggggcggcgagctgcggagcggacttcccgcgtggggggtgaggagcgggaggctcggctcggcccggccggcgccgcctctgccccctcgcggccgtgctgcctgggaagcggcggcgggagccgggcaggcgggaggccggcctgcgagcgcgcggcccggcgtgcaggtgagggcgccg

SEQ ID NO: 31699 - DNA, 245 bp, Mus musculus
  source 1..245: mol_type = other DNA
taggccagccttgatctccttcctaagtgttgggatggaaggctatgtgaattttccagttgctcagctccctagcagctgggcaactgggggaagaaatctcattcaatgttacaaccaaatagtgtaacctatatccgacagcctgatgatgtctggattgtggcattcctaaggaagtaaaatcccatctaggctagctttagcttctgaaatttgagcaactcgaggttcctcccacatga

SEQ ID NO: 31700 - DNA, 274 bp, Mus musculus
  source 1..274: mol_type = other DNA
tcaaaactatcacagtcgtcagttaacctcaggaatcgaccctgttcctacatcaggaatatggagatctagagtctacctgtttagctaaacatctatttaacatgatggtgacttgagtttcaataggccaatgatttctgctgcttgtataggctctaaagatggttacatatttgcattgtgacttagaaacggccgcagaggccgctccgcctccgggcacggcgcctgcgcagtcccctcgctccgccccgcccctgcccgagccacc

SEQ ID NO: 31701 - DNA, 571 bp, Mus musculus
  source 1..571: mol_type = other DNA
aggcaggcttttaaaagctttcagcgaaacacgcaagccgtgggctcggtggcgccgctagggtcagggccctcggtcctcactcgccggccaggcagcgcgctgggccctcggcgtggggcagggcacgggaggaacctctccccagctccccggagcgaccctcctgcccgacaagggccgggacctccccgcccggcccagcctcaccctggtgagcctccagatccgggtaaagagaattcccatcctcgggcagcggagccctccagcctcccgggctcaggctgcggggcagaaggacgcgccggggcctccgcctctgctcccgcgccggccgcgcgcccgcttccagggacccgcggggaggccgcagcccaggccgcccagccacgcgcgaggccccgccgctaccgccgcggcgctcgcctggctcgcggacatcgccgccgcgttgtctgctcgaacctcgcgggccaccgtcctcccccagctcctctccggcggtggctcgggcaggggcggggcggagcgaggggactgcgcaggcgccgtgcccggaggcggagcg

SEQ ID NO: 31702 - DNA, 348 bp, Mus musculus
  source 1..348: mol_type = other DNA
aatctatccaggtgaccccattataatttgtcctccatcagcgtgaggatggttacttaagaggaattttaaataaattgaactaaaagaatgttcaattttttggctacctctacagacttcactagtggcacaagagtgttatcttgccagatggaaaacttttcctatttagattaaaattttctctatgacttagttaagtctctttatgaaatactcaaaaaatggctactgctaagtgttcgttgtagagctagcaagggtaggatgctcagagtcaccctccactctctcagggaacgctcttcagctgactgaagcaggggagctgagccacagagccta

SEQ ID NO: 31703 - DNA, 531 bp, Mus musculus
  source 1..531: mol_type = other DNA
gcatctccagtcagactctgactgacaggctctcccacgccttaccatccctgtgtgggataagtcaaggaaggaggagtcagtcctgtccttttcgaaagctgcgctgtaaagcgctcgcggggtgggagagcacttctccccgaggctcgggaaggcgacaaccgagaagccccctctcctggacctccaggagggcgcggggggggggagggaagcgcttcggcccctttaaggtgcggcgctcggcgaagtgcgggcaggcggcccgcgagccggcgcggggccaggagccgggtagggaagtcctgcctccccctccacccgcaccggcccgcgccctccgcccaccgcgctgcgagggccatgcggcgcctctgaaccatgtcgtcctcgtacggcaagaacggggcggcggacgggccgcactcccccagctcaccacccgcgccgccccgcgccccgccttggtgccgcgagtgcggggcgctggtcctgagccgccgctccctcctccgcggccctgctccg

SEQ ID NO: 31704 - DNA, 439 bp, Mus musculus
  source 1..439: mol_type = other DNA
actcttatacataactaagtcattataaatgtttttgcactataatgcttgagtgcacttcactcatctttgaacatgagggattaatggcgtgggccacaacgccaggcattagcccaggaactaggcattacagactgctgtaacccctgccgcaggagaaatgagaagcaaagagtctctccacagccgctttccagggtgactattggttaaccgcggccgagtagacctgacctggtacccaggaagtactcgggtgggccccgtggctctctcgggtcctcactgcggaaagtggcggctgccgtgtctgatcaggcgtcggatcgggggctgaagcgtcgtgcggccccaccggtggggctggagccgcggcggccgggcgccggacaggcaggcgcgcgcagggcaggcacggcggcggaagtgaaggcac

SEQ ID NO: 31705 - DNA, 430 bp, Mus musculus
  source 1..430: mol_type = other DNA
tatgagtagctttaatcaaaagttctacggaagcaggatgggtgcagtcaacgaccaccctcatgcaaaatagttattttaaactgtcttccttactagatttgaaagcattgcagggctattttctttgaattgtctattgtggattgaattcttgtaaaaacctccacctgtagttcgtgaagttgggcattgccaatacccggggtggctcttctgaaacttaaatcacgcgtttcatgattgactggagtcattcactcattcttactaaagccacctttcacggcggcaagcaccccaactacagcgcggccctccaggagcgcgcgcggtttctgcgcgtggccggtttgggccgaaactacgcgtcccggcagtccgcggggcgggtgggcggagccgggccgggggcgggggccgatgtcgg

SEQ ID NO: 31706 - DNA, 591 bp, Mus musculus
  source 1..591: mol_type = other DNA
tgggcggcgcctccgcgcgccccccgcgaaggtcggctgtccacccggagacggccgtcggcggacgggagtgcaagagcgggttacccggggactccgcttccggaggcgccgtgggagcgcgcgcccatggcccgccgcgacaagtgggcacgcacctctcgaggagagatctcttcgcgcgcccttcactatgccgggcgcgcgcgcagctctctccccagggcaaccgcgcgcgcgcgcactaggccgctaacgccgggtgccgcttcccccgccccacccccaccccacccctggtggcctcaggtttgtggggcgaacactagggcgaggggctggacgccactgccccaccccccgacggggtgcggtggcccgaacccgggaatctgggtccccgccgtgtcccctttcctgggggaaggtagagtttccccggcagagcactcgacgcagaaacttcccctccccccccctccatgcaggcgacgccgagcgaggcagggggcgaatcgccgcagagctgcctgtcggccccgcagctcagggcagcctttaccctttggccccggcgggcgccagccagcg

SEQ ID NO: 31707 - DNA, 594 bp, Mus musculus
  source 1..594: mol_type = other DNA
tcgtcgggctcagactgctccgtcggcggccactgccgctggctggcgcccgccggggccaaagggtaaaggctgccctgagctgcggggccgacaggcagctctgcggcgattcgccccctgcctcgctcggcgtcgcctgcatggagggggggggaggggaagtttctgcgtcgagtgctctgccggggaaactctaccttcccccaggaaaggggacacggcggggacccagattcccgggttcgggccaccgcaccccgtcggggggtggggcagtggcgtccagcccctcgccctagtgttcgccccacaaacctgaggccaccaggggtggggtgggggtggggcgggggaagcggcacccggcgttagcggcctagtgcgcgcgcgcgcggttgccctggggagagagctgcgcgcgcgcccggcatagtgaagggcgcgcgaagagatctctcctcgagaggtgcgtgcccacttgtcgcggcgggccatgggcgcgcgctcccacggcgcctccggaagcggagtccccgggtaacccgctcttgcactcccgtccgccgacggccgtctccgggtggacagccg

SEQ ID NO: 31708 - DNA, 338 bp, Mus musculus
  source 1..338: mol_type = other DNA
ctggagggaggcgcccagctgctggccgacatctagaccactgattttctgcagtggcaatgaagtggttggtcacttgcccacctcccttaacagagaggtgacagagaagaaattcccagtcttcccaccttggtacctgtccaccttacatctgctcagaggtgatagggtggctcttaagagaggtgctcttcagatcaggacagaaggcacaaagcctgctgctaggttagctcctatcttagccgcccctctaagccgagcgggcgcagccaggggccgctgttcgcttggagcaggagccgggccaccgccaaggcccgcgcctcccacgg

SEQ ID NO: 31709 - DNA, 478 bp, Mus musculus
  source 1..478: mol_type = other DNA
agtactgtaagaagaacttgtctttttacaaataagatgtaaaaaaaaccccacgccgcagtgagggaggggtatattccaatattggatgtgactcttctaaaatgctacatatattgtaaccgtgtttagaactacatttgaaggagagattcaaagcaccagagcgctctctctgagatagggttcaaggagaagacacttctgcttttctggaactttccccgagggcagtccccaggttccgatactcgctagcgcaggggcgagcacggggtcagggctggcggcgatgtccacacactcgcgaccccacagttgcttttgggggccgtgcctgccaagtatcgcgggacttgtgcgcctcgcaggagccgcggctccgggagcagctggagcgcgctcgggtgcgcagcgccccagcccggggaggagcgggagccgggcgagcccagtgacaggcctccgggctggggct

SEQ ID NO: 31710 - DNA, 376 bp, Mus musculus
  source 1..376: mol_type = other DNA
tattcaaaagggccttaggattccagggccagagagcttctttgcagagaccccataggagaagctgtaattggagctaaacgttttgcactttgtttttatagcaagagttgatgacttactaccaactttgcatactccatgacattttaaaacgagcattaagttaactgccaggctggggccattaaaatgtggcacttttccctcaattattgccacacactaactatagaatcattttcagaaagggatgcctatctgaaagtcgagtattctccccgcagaaagcagcatttgttgctatttaaagctgcttctcattggagggctcacattctctaagcgctagtgtggttctgcagctgatcacacg

SEQ ID NO: 31711 - DNA, 366 bp, Mus musculus
  source 1..366: mol_type = other DNA
ttggaacaagtcaggcaccctaagcgcagggtgcttggccagactgcctgtgctgctcactgggtgagtgcccaggcttccagagctccctggagcgcaggggtagcttgacgtccgctcaccccctccggagaaaggcccaggtggagcgcgtgaaaactcggccgccggcgcacctcaggagtacaggtctctagagtcccgggaggcaccgctgcccaggagacatgcctctaaactcattaattttcagcaaccagttcatgcaaagagctcagaggcaaattttcacttgggttcttgcctggaaagaaagcctctgtcccaggggaggagaggaaagactgctgctacctgcagggtgct

SEQ ID NO: 31712 - DNA, 336 bp, Mus musculus
  source 1..336: mol_type = other DNA
cccggaccctgggctggggcaatgggagcccctgcgtttcagaaacctgtgaaaggggtcaactctgtcaagagttgaccgaggggttagtttctgtaaagaaggggaaagggcctgacctctcatccttcgaagcgggaacggactaggggaatcccatctaacgcccaagtctttggagagaaggcacacctctgccctctcggcccaggtgctagctacctggcccacctccccacgtgtgaggacgcaagtcgtgacgtcaggggccaggagtccggggagcgcggcggctcggcgattggaccgcgggccgctgacgcgggctgacgcgcg

SEQ ID NO: 31713 - DNA, 423 bp, Mus musculus
  source 1..423: mol_type = other DNA
atctagaaccagaaaattgtgatggaattatgaaattattcaagatgcatagaacctaattgatcgttatatgaagatatacttttcctaacaaaacccaagtattgaaaatttgggtactatttaaatgaataaatctttaaatggaatctggcctttcttccctgagtaaaaatggcattcacctaaatctccagatgcaggaatggctttgcaacttccatattctttcaatcacatgcatatatgtgtgtgtatatatgtatgtatgtatgtacagacagacagacagacacacacaacactatattctcaaagataatttctagtgatgcagacctatctcttcagttcgagcctgttctacataataagttcagagagaggtttccctacatataacacagtctgtaagtctatact

SEQ ID NO: 31714 - DNA, 582 bp, Mus musculus
  source 1..582: mol_type = other DNA
cgatcgttgaatttaaaactctgtgacatgatacatgtagaaacgttttctgagattctatcttcaaatacaatgtatgtaagtgagatttaaaaacttaaggagaaaaacaaaagaattctgtttcttttcctaatttttaaatatatatataaaaacagaattgacacaagaattactcatgtgtaaatatatcctagtatagtataacagaacaccataatatgtctcgcctgccacgcgggaggcccgggttcgattcctttgtttcaaatcttgtttttctaaaatattaacattaatgaagaaagaaactacgaatttttcttcctagcatcactagagtgagtatgtacaagtgaaaatcttttctttgagaaagaatgaatgccggggattgaacccgggacctcacacatgcgaagcgcgcgctctaccactggtacatctgaaccgacccggtgcagggagcggtcaacgccaggttccagttggagccgggagccttgaactgccagaggggcgggaccgagcgcagcccagctctttgatctgcgcaggcgccaacgattcctggcgggt

SEQ ID NO: 31715 - DNA, 334 bp, Mus musculus
  source 1..334: mol_type = other DNA
taaacatgggaagtcagcatggaccctgatttcgacctacttctttgcagagaaacgcattgaacttctaagtaaatatttgcttacttctagggctctcacattttatagcgtgtccaaggccaggaacaagttcttttgccagttactgtgagtttgtgaccccaaactataggcattaatacgtatgtgacttagcaattgattactaaacaatttccttcaaactaatttggcacgaggcaggatttaaagtggggggaacccgaactgagccctccttgggtacccgttgcaacaagtgagctgggcatgctcagtgggaagcctgtgg

SEQ ID NO: 31716 - DNA, 356 bp, Mus musculus
  source 1..356: mol_type = other DNA
aagatacaaagttttgttttaagcaaacacaaattgacaaatgtaacttttggctgatcttcctaagggataaaggacggtctccttcctaaagctgcagcactcagcaaactttctttggcaagacacagttgctttgcggacaagttaaaactttgcataaagtttcattgaaaagtcaaacttccctcgcctaaccctgaatgagaattgtgctcctcctccgttggtgggaacctcctagaagcggcagaggaccaggcagagtggccctgagctcgcggcgagcgcgccgggatgtcaccgggtcaggcggggccaccgtaacccgacccgcccgccgacgcgcctccgcc

SEQ ID NO: 31717 - DNA, 617 bp, Mus musculus
  source 1..617: mol_type = other DNA
ttcaaactaatttggcacgaggcaggatttaaagtggggggaacccgaactgagccctccttgggtacccgttgcaacaagtgagctgggcatgctcagtgggaagcctgtggctccgcagccagggttctccgcctcctacgaggcccggcccgctgggccagcgctcagcaagcgggtcccggtgctaacattcaggcccggggtccacaggcctggagcgcccacagaacacgctggggtatctgggccgagagctgcaggccgagtccctagagtcccccgactcctagacgcctttctaggcccagggaagcctggcggctgggagggggcgcgcgacgggtgggcagcaggcgggggaaacgtcctccccctagggcagattctttcctccagctagcaaggagctccgccggggctcagggcaggacgggcatggccagcccacgtccctgcgagacccagagcgccgggtctgcagccgccctttcccaccatttccctgccgggcagagtcgcccgggccgcggtgtcgcggcgaaggcggtggctgagttgccggatcatcccccggggaggcggaggcgcgtcggcgggcgggtcgggttacggtg

SEQ ID NO: 31718 - DNA, 357 bp, Mus musculus
  source 1..357: mol_type = other DNA
gttacagacccaaagtctcttgactgttgagtcatctctgcagaccctagagacaaacatcctgacccagggttgtcgtgcttattgctgttaatgtcttaagaacaaacactgtttgttataactttgatttttttttttttttattacttaaaaatctaactttatctcttggaacaggagttcacctctttttattattattattattattattattattattattattattattattattagttgttgttggctgtcctggaactcactttgtagaccaggctgtcctcaaactcagaaatccgcctgcctctgcatcctgagtttgtgaggtcatgaatgacattatcagca

SEQ ID NO: 31719 - DNA, 409 bp, Mus musculus
  source 1..409: mol_type = other DNA
agaacagatatggtttcttcaagagtccctcttgttgggccctcactgagctcacttataagaatttggtggggacacaaacattcagatcatagcaaagtgccctgaattttataggaatattacaaaatgtatcagtttattaagtgacctacttacttaaattaagccattaacctcttagagctgaaacattaaggtcaagaattaattgattgctccaagtaagtactcaagtatctgttagtttgctttctgtttaattgcccttaaaacacatactctctcacatagcacagaaggtggagaagctgctggctgcagccccagccgcagtgaaactgtcctgcagctgcagctgactgctccgggagccacctggagccagtgtcaggcagtcagtaagagc

SEQ ID NO: 31720 - DNA, 335 bp, Mus musculus
  source 1..335: mol_type = other DNA
atgctatccactgggcaatggcatccaggccccatatggaaattccaagactctcaaactttgaaatacatgcaagatacaaagttttgttttaagcaaacacaaattgacaaatgtaacttttggctgatcttcctaagggataaaggacggtctccttcctaaagctgcagcactcagcaaactttctttggcaagacacagttgctttgcggacaagttaaaactttgcataaagtttcattgaaaagtcaaacttccctcgcctaaccctgaatgagaattgtgctcctcctccgttggtgggaacctcctagaagcggcagaggaccagg

SEQ ID NO: 31721 - DNA, 392 bp, Mus musculus
  source 1..392: mol_type = other DNA
cctttacactgctcatttagatccatcactgtaaaattagttacttaagttaatcataagcaattaacattaaaggaatgatttgttccttgatcttggggaaggacttcacaaatatcattatgaaatgcaaaggataattctgatcagcttcctgagagcacactatgaaatcagttgccaaagtttacaatcaagttgtcatgtttacaggtccttgaaaagctgttaatagatgagaaatgatgccattgtctcctacaaaatagctgaggttttactcgaaccaaatctgttcggcgttcccagagggggactgacaagcggcaagtccccctttgcatttcagattgcttgtttatgcaaattggggctggttaccaaactgacgg

SEQ ID NO: 31722 - DNA, 208 bp, Mus musculus
  source 1..208: mol_type = other DNA
ttatcttcaactacttgaaaaatacaaaatttaaaaaataaaaaagttgtaggtatgaaagctgatggagcaaatgagcgaacttgaacaaagttgttttcttttctttgaggaaaagtacactgatttttttctttttctttttttttttttttaattgtagaaaaggaacgcaagtctcaaaccacagcagtcacatgggttctgt

SEQ ID NO: 31723 - DNA, 466 bp, Mus musculus
  source 1..466: mol_type = other DNA
cagagatgtctctttccacgtaggatattccagatgaatcattctgcactttgatcttggacttggaagcctccaggatcctgaaaatacaaatgtcttgtgtgtacagccaaccagtgaatggtgcgtcctatactacataggattcatgtatgctcagtctccacgtatatgtaagcgtctatgtttaacatactatacaaaatcagctattactgctgagtttggttttaagtagtaagaactcagaagggaacccttcaaaggaaacaacctaagttccctatgaacttgccttcaaacagatgtactcacaaagtactgttagagccagttctctgggcaaccaggctcattgcacagcaggctggacgaagaactcacttgcatgaggaggaattccaggtgctgctggatatgaccttataagggtaaaagaagtttacccagctaagtgtttgtgagg

SEQ ID NO: 31724 - DNA, 309 bp, Mus musculus
  source 1..309: mol_type = other DNA
ctttccctttcaggctgcatgagtaaatggatctgtaactgcagagatacgctatgccacctggcacagttgtctcaggggagtcacagagagagagagcactttcacaaagcagctgcgggacctggcgcggcccgcttctcttcgcccacaagagtcggtctcctgccccgccctcgggagggtggctggcagccgtacccgtggaggcgcggcaggggcgggcccggtccctcgaggcagcccgcggggccagtggcaggagcggcgcgccgccagccgcggggggcgtgggatgggggaggcggc

SEQ ID NO: 31725 - DNA, 377 bp, Mus musculus
  source 1..377: mol_type = other DNA
tagccaagcaaatatgttggccaaactttttaagaaaaaaaccttaggcctcaataaaagtctagctcaagttgtagtttgttatataattatcttctagcacagattttaattagtacataagtctttagtatgtattgcttagatactcaggacttgttcaacacttgaactctggatcctctagaacaggagtcaccaacatgtaggtgctgagacctgaaccctggtcttctataagagaaacaactttaatctacaggacgaatatttgacagtaaacatgtaattacaaaattttattttgacttttatcctgtaacttacgtccttgaagaaacaaagaaacaaataaatgtcagcattaatttattatt

SEQ ID NO: 31726 - DNA, 498 bp, Mus musculus
  source 1..498: mol_type = other DNA
gtgaatccctttggattcattagaaagtcactgagaaagatttagacatggtctcaatcattttctatatctagcttgccattttataagataaaacttaaaaatatagatgattttataaacagttcaaaagaaacaaagagtatccattctaaataaacctttgtttattgcttcttgaaaggaagcactttgaatttatagttcacaatttctgtagctgtaataagatttataggcaagttaaatatttttttctcttgtgcttgctcagcgctcagcacattaggaacattctgaagaatggagcatatttgtagcttggtactaagtgactcactccacaggggtccatttcagtaggtgctcagtaaatactaagaagtaagtaacagttacctcatgactacttagcctcatgagttaatgtttacaaagtgctttgaattacttagaaaaaaaagagactgtttttgttggcactgtggcatgccaagg

SEQ ID NO: 31727 - DNA, 730 bp, Mus musculus
  source 1..730: mol_type = other DNA
attaccaaggaagccctggctgaggcggagcattgagtatccacccctgtgcctgacacgcagggctggagatgagtgcaggagcccccgcagttcccggctcggctgcctgctgtccgcccgccccgcgccccgggagctgtccagacggccccgcccgcgcctacctggccgctccccgtgccgcgcgcctcccccgcgtcccgccagcccggctcgcagcagcccacagcccgggcggcccgaagggtcgggggtcgggggcggcgggcgagcatggctaggcgggcggaatccctggggccgggcgcctgcagggggcgcgaggagcgccccgccccgccgccggccctctccctcccggctccctggatccgcgccgggaggaaagatccagctcccggtcgccgccgccgccgccgccgcccccaagcgctgggggaactttgccgccgccggctccccgccgcccccagccgagccccgcgccgccgcaagcgacagccgtctccccggctccagcccggtgcctgccgccagcctgcgccccggccccgtggccgccagcctcccgccccgcgccgcgccgtgccgcgccgcgctgcactccgccgccgccgcccgggccacccgcccgcggcccgcggagttccgggctccacgccggctgcagcgccccgccccgccccgcgccctcccgcgccgccttgcagctcccggtcgcctcgag

SEQ ID NO: 31728 - DNA, 573 bp, Mus musculus
  source 1..573: mol_type = other DNA
gctgtctctccagcagaaaattcctcttggaagagatggattttagtctgccaagctcagcttagaaggtgagcccttccgccgcggcttccccccacgtcgagagggcacgcagccgagggggaggcaccgagacgcccaccctccaggtccccagctccggcggcgtggccggcgacctgctctcacctctggtccagcggcggtcgggtgctgaacccggggaggcggagagctcgaggcgaccgggagctgcaaggcggcgcgggagggcgcggggcggggcggggcgctgcagccggcgtggagcccggaactccgcgggccgcgggcgggtggcccgggcggcggcggcggagtgcagcgcggcgcggcacggcgcggcgcggggcgggaggctggcggccacggggccggggcgcaggctggcggcaggcaccgggctggagccggggagacggctgtcgcttgcggcggcgcggggctcggctgggggcggcggggagccggcggcggcaaagttcccccagcgcttgggggcggcggcggcggcggcggcgaccgggagctgga

SEQ ID NO: 31729 - DNA, 465 bp, Mus musculus
  source 1..465: mol_type = other DNA
ccagatttgcttaaaatctatgataccaatgttcttttccttactccagaatgaaaatatgttgtagaactctgtaaaccagactactaattaacagatttctttttataaaaataccatattttctgaaaatattcagctataactctattggttcagtggatggtagagtcaacctagtacttggttaattgaggaggcctcagaaaaccagccttgtttaaacatcagaccttctgtatgaaatgggcaaagttcagataaaggaacctttctgaggtcttgacattggatgctctcctagtcctcacgagtgctgggcacatttctgatgaggttagcatagaagcagaaagcaggcctgtgggaggtcacacctgtcctacgttgggaccaaggtcacatgccctggacaggccaaaggagcctatcttcttggggaatgattctctacaagttgggcca

SEQ ID NO: 31730 - DNA, 408 bp, Mus musculus
  source 1..408: mol_type = other DNA
aaatctgagtttcaagaagcctcagtatcaaagtcttggatttgaggttaatgtctagcagataggatattagaactccttagtagtaccctacaattaaaggcttcataagacagaagattattatcatgataagattacgttacaagctgactttaaaaataaaaatcaccatttctactcctcctggcattatttttcgaggaggttaaagaaaatgaagaagatgccatgactgcattttcctttttaacatattgatgttatatataactgtgggaggccaaatctattagcctgaacttttgccttaattttcttcaacacatgaaaaacacaatgagagcagcatctttcacacatggtggcacaactgacttgagttcagctctcacaactaatttgctg

SEQ ID NO: 31731 - DNA, 312 bp, Mus musculus
  source 1..312: mol_type = other DNA
taccgattttagtattaatctggaaaactgccagaaagcaaaaatccatcatttgtaatctatttttttctttttgagaaatcaagagcatgcacctgccaagctcttcccactcctgagctttcaatgtaaagtagaagtccagagtctagctcccattggctcgttcaatatgagggccgggccaatggggagggccggccctctccttccgcccaatggggcgggcgcggagcctgtctggggacggcagcgtgctgacgttcccgggtgccgggactggccgggcgggcgggcgggctggcggcgggg

SEQ ID NO: 31732 - DNA, 784 bp, Mus musculus
  source 1..784: mol_type = other DNA
gcctggagccttaaggctggggcgcccgggagcgtgcggtttgcagctgcaagctgggagccctggaccctccgggcggtcgtcacgggcaccagcgctgctctgggggcccgggcgacacgccgggcgagcgtgggaggcacggctggcggttgccgagggacggacacacagacggccggtcccgggcacgacggcgcgcgggagcctcggggctcaagttcgcggccgcgccgagctgtgcggggcaaagttgtgcgccgccggggcacgcggcggggaccgagagatccgagccagggagccgcggggggcgcctggccgccgccaggtcccggctcgacgcgctctgggcagctagcaccccagagccccgagccctcaggcggaggccgtcgtcgctccagggaccagggacatccacgccgaagggtcgccgctgcggcaccggagcaaactggccgaagtgcggcagcctcgccgctgccctcccgaagaggctctcccaccaccccggtggcggcggcagctcgcctctaccccgtgcccatagtgccgccgccgcggccggcgtccacgcgcactcagccccggagccctctagactgctcagaggccgccgccccgccgccagcccgcccgcccgcccggccagtcccggcacccgggaacgtcagcacgctgccgtccccagacaggctccgcgcccgccccattgggcggaaggagagggccggccctccccattggcccggccctcatattgaacgagccaatgggagct

SEQ ID NO: 31733 - DNA, 409 bp, Mus musculus
  source 1..409: mol_type = other DNA
agaacagtttgtccccctggaggtacagcaatatgctttaactcatacgttcttagcaaaaagttgcatctattggttaccatatttctgcatcaatgagtattagttgaaacatgatttggaatatgcactacacagcattctcttgatcacatcttaatttagctaagcctctaatatttatagtagatgtgatgacaggtacatataattctaactcgttcttaagagccctgttttaaaacaaaattactatactttcacttgtattgtctcttagaaagactatagatgtcttaaagcaaagactctgtcttgtccattgtgacacccctggacgtgaaagaattcatccagactggatcagcttcagcaatgcaggggccccgccccctgaagctataaagcc

SEQ ID NO: 31734 - DNA, 306 bp, Mus musculus
  source 1..306: mol_type = other DNA
tgtcaactggaccagacctcagaaacctaggaattttcctaaggacttctagacctaggggaactccctaaggcagcagctgcactgttgcccggcaggcttaaatgaagcatttccagatgctgcagctgctcgtgacatcggtctgtggcacgtgcgcagcccactgagcctgagccctaagcacagggcctgtgaagtggctgtgtgccaggacttccacactgccatctgatggtaaatgtttccttgaagagggaaatgtaaacactttagaaatacacgattgcatatatgatgtcatcg

SEQ ID NO: 31735 - DNA, 458 bp, Mus musculus
  source 1..458: mol_type = other DNA
gattcctgggaggttgtggaggacccaggtctcccagttcccttcaaacttctgttctattgggaataacaaaacattttcaaggaagctagccgctggcgagggaggactgcccctgactctgggcagtcagaaagaaaaaggtgcaatgggcgagatgcactttccatctttctcatacaagaatttgtttgtgttgatgctttcagagagcagagaggctgatcctgtcccactggggtccaggcgaggccccaggggagcaaccttctcccggaaagcttagcttcccgcttggcgtgcggcgccccagcgggtcccagagccggggcagctccggtcgggaggggcgcgggaggcacagccccggcgggcgcgcacagggaaggtgccttccggaacacgcgcaagggcggggactcgcgctgtgggccgagcgaggcgcggggacgggccgg

SEQ ID NO: 31736 - DNA, 463 bp, Mus musculus
  source 1..463: mol_type = other DNA
atcagtgtgcctctctgtggaggccatgctcacagagccacaaggactcgcagtgggtgctccaggagagagcttggcagccaccgagggacaagctgaattaataagttcccgaggcttctagaagttctctatgaaagaaacaggaaccagactgactccagttccctgcaaaggcaaacttctagagagacaggcttttttgtaaaagcaaagctggattctcaatgagtactctgctatgtcttactgagtagttaggaaagctgaggacgcatgccacctaccttgacgttttctgacgtgagaagtctccgctgtgtcagagtctttcatttttcccccctaatatgaatgaaaaatatcaaaactaaaatatattatggacttcagcagcaagcaaagcaagtttgctcaactaaattattcataagaattacaaaacttgtcacttagaatgggt

SEQ ID NO: 31737 - DNA, 305 bp, Mus musculus
  source 1..305: mol_type = other DNA
ctgcatccttgcaacccagcctgtttgcttagctcagtcccatggctctaaggcactgggctaagaatgtggagagacaggcaccactctacacaacccagagccactgggtacttggtataatctaagtacgaaggagcttaatctaacttttttttttctgtgagcaaaaaagttaaactaccattcggcagtatgatatagtcccattcctaccggagctgccgcgggcacgcatgcgcgggcatgggcgcggggtggggcttgcgcggctctccctgcgccgcagccacgcccacctcagt

SEQ ID NO: 31738 - DNA, 429 bp, Mus musculus
  source 1..429: mol_type = other DNA
tattagtcttttaaagtgtgtttaactagcttttttttttttcttaaccgaaactagaaaaaaaaatgagatagattatacaaataactgtaaaagaacttagtgtttattcatttgaatattattgattcacaccatgaacatcacaagcatttaaattcgtccatggaaaagcatggcatattaatttagcgtgtagactccaacacaattcctagtttacaaacataaaagttggtggagataaattaaaaagcaaaacaaaacatgtaagtttcttaactttttcttgggagcaaactcaaagatacagtattaggtcatttattattggaactgaaatggtataaacaattctccttgttaatcatgaagcctagtgaagctgctgaacaaaccttgagaagaatcatctcctgcttcaatctg

SEQ ID NO: 31739 - DNA, 580 bp, Mus musculus
  source 1..580: mol_type = other DNA
tcacccctacgttctggatacaaacgggggagtgttttgacgtcccccatataccaacacgtacttttgtaggggggtgtgtagagtcggccccttacacccgtgtctcgccccgggtcaggagagccagccttgcccgtgtcacgccactcccggtgcggggccaccgagaggcctacctccctccacctactccgaggggactgggggaacccgggtgagccgaccccgcactacggccgcccggcgccgcaggtcgtcgcgggtccccgagggacgcgcaccatctgcccgcccgcccgcccgccctgcccccggggtcccgggtgggggtgggggtggctcgcactccagcgctcccctcccccccacgccgagcactccgctgcagggagtgtcgcgctcgccgcagccacaccgccgccgccttcctcgctgggctcggctcggctctcgggcccggcagagaagtcggcgacgaagcacaatggcggccgcccctccggatgcgccgcagaagtggccgccgccgttggcagccccgcccgccccctgcgcgctcgctcgcccgcttctcgcg

SEQ ID NO: 31740 - DNA, 322 bp, Mus musculus
  source 1..322: mol_type = other DNA
agatagccaagactattggttccattggcaacaactcaagaagaacccgtttttggtactgtttcgatacagtaactagtggcagttcttgccaaaaggcacaaaagatgctaacatttggagaagctgccgcaaggattacgggaagttctatttatttttgcaacattttagaaagtctgagattacttcagttcaaatgagaagtttatctttaactctgagcgtcccagcagtgcgaccctgggctccactcccccgcctcgagtgggaggcgtcgcaactgagctgggagctgcgcacccgacaagcaccgcccccg

SEQ ID NO: 31741 - DNA, 433 bp, Mus musculus
  source 1..433: mol_type = other DNA
acttaaaaatcattgaaacgccacataatttgtgggctctcagagcttaaaaagcccgatttttttacccccgcaaccagccgggcgggacccggagcggcgggcctggtaggggcccgcggcgggcgcgggagccaggcgggcgccgaagcccctcgcactgcgggcggcgaccggcccgcccggcctcccgcgccgcgccgctccgggcgcccgcacgcccgcacgtcgccgaccgtctgcggccgcttaccgtggcgcctcgcagcttcccccgaggcggccctcaacggctgccgcagtcagagcaccaccccgcggcggggcacgtctagcccgcccgcagctcccggctcccccgcagcgccgccagcgccgccgccgccgcggctctcgcgagaagcgggcgagcgagcgcgcagggggcgggcgg

SEQ ID NO: 31742 - DNA, 415 bp, Mus musculus
  source 1..415: mol_type = other DNA
agtgctctgtgtagccactaaacacaaaaccacctgggcagttggaacatcccctatactcaataaatatttcaaaaaattttcacttctaggcaagttagttagtttggaacagattctcatttcaaattactactagattattctccttaaaagtagtacaattgctggaataactgtcaaccccacgtggttgtgtgcacaccgcacttccccaaatttgcttaagaagatggggagtggactcccaaaccctgtggttgttctggaggtcccgagccttcgcagaggtctgccttgggtgggtggggactcctgcaaagcctccgctgggcccgggacccaaagcggagctctgattggccgagcgcggcggaggcggggtctgcgcgcctcagaggttgccccagaggcg

SEQ ID NO: 31743 - DNA, 331 bp, Mus musculus
  source 1..331: mol_type = other DNA
gctaaaggttaactgcatgaagactccatttgacttattcaggtcgaatagagtctttttatttgggtaccccaaaacaaaagcatggacaaatttaacaactgtaatgtttaaaatttttcctcattcatatttgttataaattaggattgaacttatgtgcattgagccttcacaggaccaagggtctcttctccaattgagtgctacatatgcagctggagccacgggtccctccatgtaaaagggactcctttaaagtttgtagttaaggtggaatgcagcctcactttcttggaatgtatccctttctaggagcagaatccagcta

SEQ ID NO: 31744 - DNA, 401 bp, Mus musculus
  source 1..401: mol_type = other DNA
ggctatgcataccttgtaggcagaggcatatttcctgagtctggcacccaaggtcttacttaggcaagggccttgtatcagtataataaatttcaactctacagtgtgggatatttgattagatgaagatgatctaagaaaacggaagcctggggttattttaaaataggatgaagaccaggttgggcccctaggtgtctcctgtgctctgcattccagaggcatcccgggcctgcggcagcggcaggtttcttctcctggagaggattagctcgctcacccacactggggacgggtgaccaggggaaggggagccacggtgctgctttaagggcccggccctttttcctgctccctccccaaagcagtgtgggcggggcggcgaaaactccgctatttgc

SEQ ID NO: 31745 - DNA, 448 bp, Mus musculus
  source 1..448: mol_type = other DNA
tcccaaacggcccctgaagggagggttgtcatccacataacaagtaaatgattcatatgtgtcaagccatggcactctcgagacagagattcagagtcgtgactgctgcatatacagtgcttttaatacgcttttaaaattaagaactctaaaggtgtgaaaaatagctcttatataatttgaaagataagaaaacagtgttttttgttctactttgcctaattctaatttgactgtaaaataatgtttatatttttcagagctcatttcaatgaaaaccaaacctctcaggtattttaacttgtttttttaagcttaatccttacagcattaaattaaaattgttatgaacaccatacatttaaatcggtcttttgacagttcattgattaacatttcactaaagaggcataaggtgaaagtgaacatgttgaagttgcttttaaac

SEQ ID NO: 31746 - DNA, 626 bp, Mus musculus
  source 1..626: mol_type = other DNA
tggacttaaattgcacgtgactttacatgtatcttggaactttggacttttctgaatcttggaacattttggcaagaacagtggccctggacccagggtcctgacagtttgcagtctcctaagattcatagacagatcagtatctttttctcagatagaaatttggttcattataactacttaggttttaagatagatatttctaacattcaggaaagaaaaggggatatattacctaaccatgtcatcaacttagcagttgttaacaggttttattttttctttctagaaagaatacttgagtggctaagttggtttctagagaattaaattaaaccgagtgagcttttgatttgtggcaaatttataatcctaaaggccctatacaaaagctgattttacagtgaattgtttaagatgtttttagcagtgggcactgacagataatatcagcaggcattaaattatgagctgatttttggagagaaatgctgacattttacttaactgtacaagttacagtcacatcttaatgcaaatttgtgatttcagcaaagcatttattactaagggaccttattgtcacctcgccattaagtcacaaaggcaagggctgcaactaggtc

SEQ ID NO: 31747 - DNA, 469 bp, Mus musculus
  source 1..469: mol_type = other DNA
gccaatttaaagatggcaaccagccctggtaaccctatccagaaatggcttgcttgaagtttttatttttttttccacttgagaacaaaggaaattactcctgtctccaggaaggacagtaatgttgtcttgaaggaaaactcttcctaatccgcgccttttccattggctagcgatgccggggtgcgaagccacggcgacgcctggcccaagggcctggggtggctgctcccaggaatgtgaggcatgcggggcgccagagccaaccattgcgcgggatgggggcgccgcgcagcccgggttgccgccccagcccgggaggccgagcgcgggggccgaggccgggggagcgggcgcggccgggcggccgggcgggcgggaggcgcgggagggctgggcgcggcactaggcggtgcgcggctgcttccccgcccccggccggcgcgctctcggggcggtggttgaggcg

SEQ ID NO: 31748 - DNA, 381 bp, Mus musculus
  source 1..381: mol_type = other DNA
cttcccaaggtcactagaacccaggtgtcctggctccgctttggaatttgggggaagtgagagattaatcagatttcctctttccctctttcttaaaaactcgggaaagtcttcgaggagtggtggaaagtcagccctcacctccagcgggtcccgggctcggcggcgcccaagccccgcccccggccgcccttcccccgcggcctcggcagcccaccccagatgccgcctggcaccgagcgcagccgccgctgccgccgttcctagctgggctcagcctgctcccggagcgctgcgcggccagagcgccagcccttggcagctcgggtacagtcgggctcccagaggaaactccttgggagcgccctgtccggggtgtcc

SEQ ID NO: 31749 - DNA, 388 bp, Mus musculus
  source 1..388: mol_type = other DNA
tctctttttgagctagaatataaaagtcttctgcaggcaacttcagggaccaattaactccattaaattatatccagttatgtagattctatgtgtcaccgaagcacactgcaacaatatgccagcctgactttcaaaatggaggtgggagttgacagactgtctggcagcattacttcccaaggtcactagaacccaggtgtcctggctccgctttggaatttgggggaagtgagagattaatcagatttcctctttccctctttcttaaaaactcgggaaagtcttcgaggagtggtggaaagtcagccctcacctccagcgggtcccgggctcggcggcgcccaagccccgcccccggccgcccttcccccgcggcctcggcagc

SEQ ID NO: 31750 - DNA, 496 bp, Mus musculus
  source 1..496: mol_type = other DNA
tatgcaatttaagaactgatagtgctttacaaaaggaactaaactatgaatcagaaattgtagattttagtttctattaactggaacgggagacttccccacagggggcaaccttccctccctgcttactcatatgtaataaagggggaaaccgaggacatttccattttataacaaagaaaaatgcccggatattgctgtcttccatttatatgtaacaaacctgaaattctgtctaagaaagcaaagaaaaatatactcaaatttggggtttgccttttatttatagatattacttggagtaaggctaaaatggcatttttccccaaataagcttacttttaaaactttttacatgaaaaatactttttccaaataaaattttcatgtttataatttctagatttttttcatgtcttaactattcaggtaaaatatcaatattttgccatgattggctgttgatagctacaaataaggaagtcttcaacagggg

SEQ ID NO: 31751 - DNA, 481 bp, Mus musculus
  source 1..481: mol_type = other DNA
tataaattccataaaccccacccaccactgtggtagagctgatgaaagttttttaatagttttaaacgatggtttgaattttaaaatttgccccaaatattcaagctaacggttagaaccattgcaactctcttgttctgaaaagatgttttcattcaagcatgtctggataaaataatgagaaacttttaatccccgagaaatttactagaaattgaattttttttagcaagtatatccattggaaagtattagtaatatttctcaagttgtggactttaactcaattatattcgcatactaacctacatataaggtaatattagaagtagttatttactgtttgctcaaaattctagctaagacactgaagtgacctttaaacaaatgacttatgtttatggccccgggcctccaaggagcttggcggggcggggctttgactcagagcgcagtcgctgccctctgaactggaacggaa

SEQ ID NO: 31752 - DNA, 450 bp, Mus musculus
  source 1..450: mol_type = other DNA
tatgcagtgactgcactctacagtccatacttcataaaggaatactcttgtcatatcctatatgaagttttcactttatttaaatttagcagtaaatccttcgattctaacacaaaaattaataaaattcctcaaccactggatgaaatcttgcaaatagttaattcttttctagcctgtgttcgcttcactaaataataaggtttagagaccatgattattttgtctcctgaggggaacaaacttaaatattttactgaattggatatagtgtatctgttttcttttagaaacctaaagaatagcaagaaaaacggtttctttttcaaaaaaaacgattgaactatagtatgtccagacattgtctagccgacttaccaatgtcagtgcacatatttcacctagctgaaagttgaaacaaatgaaaaagactgtgtttttggtagatat

SEQ ID NO: 31753 - DNA, 472 bp, Mus musculus
  source 1..472: mol_type = other DNA
gtgtacttacatataataaataaataaataaataaataaataaataaataaataaatctaaaaaaaaaaaaagaaacgctttaaagatgcattttaacatatttgagaaatagaaacttgccaaagttaatttgagtaactttgttttgaaaatctaacacaaagataaaaggccgttatcgtttaattatgtagagaagtagttttttttcaatacgtattgaaacaaaaacgtcaaatttcccccccacacacacacagggtttctctgtgtagccctggctgttctaccaggtgcccggcctataaccccttttttaggcagtgaaatttttgcttttcaagtgaccaagaaaaccttaattcaaccttttacggagcagctcgcctgacttccgcctcgcggggaccgggaccaggcggcctgcgcgtgcgctgtgtgctcctccgcccccagcccggcggactccaa

SEQ ID NO: 31754 - DNA, 410 bp, Mus musculus
  source 1..410: mol_type = other DNA
tagaaacttgccaaagttaatttgagtaactttgttttgaaaatctaacacaaagataaaaggccgttatcgtttaattatgtagagaagtagttttttttcaatacgtattgaaacaaaaacgtcaaatttcccccccacacacacacagggtttctctgtgtagccctggctgttctaccaggtgcccggcctataaccccttttttaggcagtgaaatttttgcttttcaagtgaccaagaaaaccttaattcaaccttttacggagcagctcgcctgacttccgcctcgcggggaccgggaccaggcggcctgcgcgtgcgctgtgtgctcctccgcccccagcccggcggactccaatctctcaggcctgaggcgctgccctcgccgccgcgtcgccacaaggcc

SEQ ID NO: 31755 - DNA, 428 bp, Mus musculus
  source 1..428: mol_type = other DNA
cccgcccccagctagctgctcttcagatgatctgcaaccaagttggctgataaaatatttagtaacgatttaaaaacccctgccggaaaccgaaccttcccgaggtggcacaggctcaggtgtgtgtgcttctgtgtattaactggaaaagacagactctgactcgcgcgtacattcaactgaatatttggccctcctccgcccctcctctctaaagagaggggggggggtaaggattgaatcttcctgaagcagtggtcacaaagcttaaagatgatcgtcgcgaccattatcctaattaatgtctatctaattaaattactgtcagcagctaaccaagtttcatcggctgcataagcagccaaaagtgagccttttctgattgcttgtcaattggccaatctcttctcccagggaaaaaaaaaagt

SEQ ID NO: 31756 - DNA, 416 bp, Mus musculus
  source 1..416: mol_type = other DNA
ttcagctctggctcaaggctccactgagtcttgactcaacttgtgcaagcgcatgtgcatgcgccttagtctatttataaagaaatatacttcctcaaattgtggccagtggcttcagtattaagtaacttcccacttaagaagcggtagggttacttttttgcggggggagggaaacaatcaccttttctctttctttgccttctctcagactgacagacctctcagggaaggggcagctaggccgtgaatctgccaaactccatgcctcttgaacctcagctgcctcgattatccacgcaaacagggtaccgcgctgggtcggctgccccgcgctcacactgtgcaccgaagcccgcactgcgtgcagagcagccgcgcaggacgtccgtctctgcgcgcagtgacttctgcct

SEQ ID NO: 31757 - DNA, 525 bp, Mus musculus
  source 1..525: mol_type = other DNA
gaccctctctcaaagacctaagagatggacatacagctcagcggtaaatatttgcctagcataagatcccataattaatttcaagaaatatgtatgcaaaatgaattccataattatttaaagaatgtgtgtgtagaccatcgccaatgtccttccatgaattacttaactagttaaggcaaggaatatatgcctaagctactgtaatatattttagttattttcatcctgtctgttttgagagacaaattttagaaaaaaatcctttttaatagtgtatgacttgccagtttctcacaatttaaacatagtaaatgtctattttaccacttacatttttaagttagtgaatggttcaagctcactgacattctaattttgaagtcatattacctcaaatatcatactaaatgatagtaggtaagagaactcctatttagactttgaactatttggattctggaatgaatcagactgaactcatgaactcatttgtttaagaagttatcatctcaggcaaaattc

SEQ ID NO: 31758 - DNA, 389 bp, Mus musculus
  source 1..389: mol_type = other DNA
tcatatattaaacaaatgcttaaggcttggccaaatacttatgatcagaaacagcatgcatctcctcagtaaaattaaatttaagtcatttttatttcattttaagatgaaaacagaaataatagacctggtgcacattacattttaattgacatttaaaatctccccacaaagagaatacaaatttattccattgcctagatgaatgatctatcacttattcaggaactcaggatatagccataagggataagaccctcaaatgagactaggctcatttgacgtcaaaattcacttgagagaactttaccgaagggtggatctccaaactgccctttccatattatttacagatgagaaatttatattgtcagcgtaatctaagcctg

SEQ ID NO: 31759 - DNA, 492 bp, Mus musculus
  source 1..492: mol_type = other DNA
aattgctctggaccacagagaaggtttaaaattcagtcattttactgatctgccaagatgaccgatcactttgaaatatgtggacttagccaaaatgaagtacacatgacttctcttttcacttgcctttttaaaatttattttaaggtctttataattactaaatgttctcctttctcagaagatattctgagagcaaagcaagcgcttcatttctttaaaggaaagcagccgtgggtttagacagttgaatttttaaacttctgtatttactgaaagtgcatatggtgctatacggacaaagaaattgtgctgaaagaaaaacatttgtgcctgcagcacctgggatttgaaatccttcctctcagctgcaaacaagaggagtactaaagtgactcgagtgatttttgactgtatgacaacttaagcagatgttggtgtaaaaatctgtttctaattttacagaaatctttcgaaatttggcacggtagt

SEQ ID NO: 31760 - DNA, 230 bp, Mus musculus
  source 1..230: mol_type = other DNA
atgacatagacaatccaaggcagtgcattagttgctaattaagttactagatgcttcagcagagagttgtctactagagaatacagggaccttgcatactgggagttaggaagccttcagtcttggcttcctcctaaactcagttggtggctaaagtcagcatgcatctgtcattaggcaggccccgggaggaacaaattagttttttgagtacagtcttctaacacaag

SEQ ID NO: 31761 - DNA, 562 bp, Mus musculus
  source 1..562: mol_type = other DNA
gctgtagtacagcagagcgatttaaattactcagggctggtcaatacttaacagtttaatattagctcttttctttttcataaagaaatcaaaatggtatcccttttgtttataagttaatcttctgaattctagacttggagaaacaaaattcaggaatttcagagaaaagcaggcttgtccttcctttttgcaaaatgataaaaaccaagatgttctcttgatgtttataatcagatataatcatgtattaatagttttctcaaaagttgaatcactggtaaagttactaaattaaacaatattctaaaaagcagatgtattttttgttcagtatttgggacatacagattttaaaaatctcttcaaaaatcaaattcaatagatatcctgtatttttatttgctatttttggcaactgtggccaccatttatctataaaatctcacattaggtatcaagtgtggaaagtaactctaggagttgatggcctgagacaggctgcagccaatcacaggtgaggcctgtggtcgggggcgggactccaggcagagccggctca

SEQ ID NO: 31762 - DNA, 221 bp, Mus musculus
  source 1..221: mol_type = other DNA
gggagacccagctgggactcccttggggaaacccggtatgctcagcggtgccagagaccacccctgagggtgtcagggtcagagctgaaccctgaaattgagggctcatctgccttccgataaggcacgcttgagtaacccgagctctggcggcgcccaagctcccggggagagggcggggacagtaacgtcaacccccaccctgccgagaaacagatcga

SEQ ID NO: 31763 - DNA, 202 bp, Mus musculus
  source 1..202: mol_type = other DNA
ttacctttgcatgactgtccttgcttctcacaaactgttcatgaacaaagaattttagaaaagttttccacgaggtgtaagaatccgtgaacataatgcttatacctgttttcttagcaatgataatttataaaagcacaccccgtatggattagttgtgatctatactagctgtcctgactggtaaaaattttttctcatc

SEQ ID NO: 31764 - DNA, 712 bp, Mus musculus
  source 1..712: mol_type = other DNA
ctgggtccccagattgctccatagcggggggctgggaaagctgaagccccaggtctctgcctgcgcaccaacagccctcaccgtgggcccccgggcgctgctctcccctgcccgagccgcctgggggaggtagggaggggagggcggtgaagtgggttcaagctgatctgcctccccaacttgcctctccctagcagataaagtcatagcctcggggataggggacgtcccggctccacgtcccggtccccgtcccgtgcgcgcagcagcagggagggctggccaggctacggtggtgaccggaggaccggggaggggccctcagggacgcgcgatcgcgcgtggacagcggggctcgcttcccccgggggcgtcgctccccgcgcgcgggctgggccgggctccgcgtccccgcgcgccggcatgacctcggggccccctccgggccgcgggagcgcagctgtgaggctgggcggccgccgaggcccgggccgtgtaacatgacccggcggccggccattgcgccctccctgtccgcccgcggccgggcgccgctcgccgcctcccgcctccgctccccctgcagtcccggcccgcgccgccgctccctcccggggctcccggcccgccgcgctccaacgcccgtcgccactgcctcccgacgcccggccgcgcggccgcctgcgcggcgctctgcgcctgcgctcagcct

SEQ ID NO: 31765 - DNA, 656 bp, Mus musculus
  source 1..656: mol_type = other DNA
acgactcagaatagttaaaataccagaataaaaatgagaggtttttttctttaaattgttaaagctattaaacatttaagatagctttgttttattttaatatggtgaagtatgctaaattatgcaaacctctgctttccccaaatgtgtgaagatcagaacagatatcatgaattctttttctgtttaacattatttatattgattgtcagctttgtgcttaatatgtaatattcaacaggataaaaccttgagaatggctggaagtttcatggtagaaacattttacctgctgacgtgatatatattgcttatgttaaatctagcattgaaacttatggcataaattaaaatacaccagcatttatgattttttgtgagtagcataaataaatttggttcacttacatactgatagactttaacgtatgtaactaatggaatatatgtaaaataatgtaatgagtttcttttagcgaaacagctgcttagtcaacaaagatggcattgaattgcactgttttggaaaaaaaaaatgaagggaactagatgcctgttaatctggttctttaaatatcataaacaaaagtatattggctgcagccctgtcctgtccacagccatccttaattggctttgggtagcctgggatacag

SEQ ID NO: 31766 - DNA, 359 bp, Mus musculus
  source 1..359: mol_type = other DNA
gccatcctggtctacagggtgagttccaggccagaaaattaattaataactaagtaaaaatataaaaatttactccatctcttgccacggaggaaaaggaaaggtgatgatcaagccccctactggcacggaagggtctaaggaccagttctgcctggacccaggcagattggaggtcggtcctcctagcccagagtggcactcggcccgcgggactttcagcctggacttagggagcctgaggtcgaggtccccacgcttcaggagagtgacaccagcgcccccgagtgcccgggctacgcgcagggcccgccaggctggcgctccatccccccaccgcgtcccagccgccctggccg

SEQ ID NO: 31767 - DNA, 646 bp, Mus musculus
  source 1..646: mol_type = other DNA
tgcacttcgaaggtcagactgcaggtggtcaatcagcaggtttgctggccaggtagcctccctgtgcgaggcttcccaaagctactcagtgggtacctaaaagccgcgtgctccgcggaggggtgcggggtggggtaggaaattcctcctcgctccacgtcctcgtcaccctcacttctgcagagcgaggtggccgaggcggctgcgagctcggggctcccggcagggccatgttggggcgcgggcgcggcggccgggggccggccgctttccgccgcgcgctcgctccgggcgtccgagctagccgtgcgggggaggagcggagcctggacgggccgggtcccctgcagctcctccggaaaagtttggggattcagttggtgcgcagcgggccgctggagcccaagcactgcgggcgtggcgaccgtcccgcgcccggtccgctcctcagcccgggctgccgcgcgccgccccttcgcccgggactggctgcgggctgcggccggggcggggacctgtagccgtcgtcgcggcgccctcgggcagggaccgaccggcaggtggaagcgccccggggaggcggggccgcccctggctgccgtgggtcgaggcgggctcttggcccggccgctcccgccctgacccg

SEQ ID NO: 31768 - DNA, 386 bp, Mus musculus
  source 1..386: mol_type = other DNA
tactagaaattattgcaaagaacctttaattaagcacgggttataaatactagtttaattttaatgtgaaccaaaaatgttaagtcctttgtcatttatatatttttaatttaatatgatttactttaaaacagttggcaagggtctgcacccggttgtcaggtggcacgtctcctctgagaagaactctcaagcactgtctgagattcctttcttacagggattgcacttcgaaggtcagactgcaggtggtcaatcagcaggtttgctggccaggtagcctccctgtgcgaggcttcccaaagctactcagtgggtacctaaaagccgcgtgctccgcggaggggtgcggggtggggtaggaaattcctcctcgctccacgtcc

SEQ ID NO: 31769 - DNA, 634 bp, Mus musculus
  source 1..634: mol_type = other DNA
tgacttcgcactcggctcgagcaccccgcctgctcccggaactgtcaagccgggctgacagctggcacaccttgctgcgcccctcaggaagccccccccaacaaggggccctttgtcattcgcctggccttccgtcgatcggaaagccccgactcgtccgggaggacgcagtctcccgcccgcgtgtgggtcggcccgggagcccggcggccccgcggggagctcgcctcgggcaggtgaagcgcgcgaggcctcggcggccgggagggaggcttacttaccctgcggagcccgcgggctgcatggcgggggtgcggggcgcgctgcggggtaggggatccgggacgctgcggtccatcgcgctgctggccgcggcgcgggctcgggctcggaggcggcgcgtcactgctagaggccggcgggtcagggcgggagcggccgggccaagagcccgcctcgacccacggcagccaggggcggccccgcctccccggggcgcttccacctgccggtcggtccctgcccgagggcgccgcgacgacggctacaggtccccgccccggccgcagcccgcagccagtcccgggcgaaggggcggcgcgcggcagcccgggctgaggagcggaccgggcgc

SEQ ID NO: 31770 - DNA, 403 bp, Mus musculus
  source 1..403: mol_type = other DNA
cagcaaccttagctgtccagcttgccctggaaggggtttggagaacccaaactctggtcggtgcgagttttctttatatattaaaacttttttttcatatttaaatagtcacgaaaaataaataaataaataaataaaataaataaataaataatataaagaacctctccgtttcgttctgtttcatcctgtttaacacaaaatgacaaatagaaattttcatttaaggttcttcctagaggcttccaaattctacttaatataaaagttctaacatttcacagtccttttctatgtaaacaaggttcttagctggcttcagactctggacccgcagcagcgagcagggtgcacccgccccgccccgtgaaggcggagacctctgagctgcagcctagtgccc

SEQ ID NO: 31771 - DNA, 345 bp, Mus musculus
  source 1..345: mol_type = other DNA
aaattcacaaagaatcaataagaatttttttaaaaaatcctcaccgtcggcctgctacggtgctgattccatgtttaatgagataatttttctctaaatgtgaaaagtaaaaccaaaaagagaggtagatcacggaagacccctgaggtcaataaaataataaataaataaataaataaataaataaataaataaataaataaggtattcagatcgaaataaaaaatatgaaaagtttacatctgcatatatgttgtactattttctaaattttatgaaaacctgtgattcctaatcaaaggttaactgtgcacactcgtgtggtacagtaacacgttgaatgct

SEQ ID NO: 31772 - DNA, 391 bp, Mus musculus
  source 1..391: mol_type = other DNA
ccctggcattgcaggtggactggactgtctgccttatacattatcaaattaaacttttatttatttatttattttactggagaaaattaacttagtgcatagtgaaaaggttgcctcttcgttaagtcaacaataatttataatgctaaacttgactgtattattgtgatttcattaacagaatcagtaacgcactgtagggatttaaatctttgaaaagtgtctttttggattagaaaataaaacgctgaacgaaacagcagaatcgggctccacccaggaatgctcagggctgccgccggctgagttataaaaatgtcactttatgcctgttcttacttcagttaccagaatcctcttacaggaagttaaaaggagaatttgaaaaaaa

SEQ ID NO: 31773 - DNA, 257 bp, Mus musculus
  source 1..257: mol_type = other DNA
gagaccttgcatatgaatttgctttgctgccttaaataaatctaatcagttcagaagtgaaatgattagagtccaattagccataatacacaactccaaattatttgaatattcttctactctgtttgaaaggttgtcatgtcaccagtaagagatgtcatgcttgattcatttcccatatgttttttctactaaagggaaaaaatcagacaagacttttgactccagctggctgttgttgatggacgccaggatct

SEQ ID NO: 31774 - DNA, 550 bp, Mus musculus
  source 1..550: mol_type = other DNA
ccacttccctgaatacttttgagaatagtcaaataaaaagttcatagaaatgtgtaaaagcaatttgaagtgtaagtgtctcaaacacactggcaaagcctaacatgtttaagagtgttctactcttcagtgaaaacaattcctttccaggaaccctggcagaggggttctccccgagggcgctgctatattgattggttggtcttgcaatagatagcaacgcctccttggaggcttccctaccctagcgccggcggcaagctgctgagcctcgggaggaaagcagcacggtctcccaggggtcccggggaacgccgcacccctgggtttggaccacccggtccctgccagtgggctctgggtaccaggtggccgcggcgcggggcagcgcaggctcggcactgcggagggctggcgggcgggcagcgcgcgggcggcggaggagtttgcttggcgcgcgcccggccggcccgcggctcacctggagcgctcaggtaggaccggggcggggcgcggggctggcgcgcaggcgcgggatccggcctcgccc

SEQ ID NO: 31775 - DNA, 172 bp, Mus musculus
  source 1..172: mol_type = other DNA
gtaatgtcttcttcaaggtcacgtgagaatcttctaaatttgagggacagtttagatccaaactacctaaaagaggtaaccacatatttttaaataagactttgagccaggcttcaatacacgtgtcaggtaaatcattttccctggtcttttgcgcaaatcccacaagtcg

SEQ ID NO: 31776 - DNA, 484 bp, Mus musculus
  source 1..484: mol_type = other DNA
ttttaatagcaaaaatgtgaaagactaatgatgctttaaattataatatatggcttagaaagttcagttccccagacttcagtatgggctcctcattgttttgggaagacctagtggacaccaataatatttaatacttacgtttgttctctaaaacatagtgtgacaattcaatggctagtcatatctgggagacaaatagatatattatgggtataaaaataatcctatttaacatcaatactatcatcgatactgagtttaaaattaaagtaaaagactactcacttttctccagacagtagaaataagcaaatttcatttccgtaatctgtaaaagtaacaatgagtttttttttttaatagagaaaataaagtaacatttacaaacaaaattagcacctttttttttttaacttaaaagcaacgctctccagttctgattgttttaatctttaattttttttttaaaacaagctatttg

SEQ ID NO: 31777 - DNA, 615 bp, Mus musculus
  source 1..615: mol_type = other DNA
ttttaagactgtagctcatgttacatacacttgagataattgattgttaattaggcagtttaatattttttaatctgctgcttaaaatattccccttggtatcaagaagtgaatctaagaatgaccatctttttaaaataaaataaaataaaacaaaataaaataaaatagaataaaacaatttctatagagattgttttgaaagtctaaaagaatgctcttttctcagtacagacagtacaattatcacatctgatatttatctgcaaaccacaaagatgtgtacctgctcttattacttggatgaacatcaggagttaaaatgcattaaaacagtttaacccagcatctcaatttgatggagaagagtaattttactatcatcttgtttattaaaatgtgtctaaagtattgattttttttttttggttattactctgcaaagcaacctacatcctttgcattggagttgacagcaggagaagtcgtcccctcgggtttactgcacactccaagagaggtcccctgcacaaaatgagacctatttctgggcaacgtttcaaaaacgaaaagcaagacctggttcatgatttccatgcaagatctcagcctgcc

SEQ ID NO: 31778 - DNA, 288 bp, Mus musculus
  source 1..288: mol_type = other DNA
tgtgtgaaaatttcctgccaatactagttcttgcagcaggacacaaagaaccagttctcctctggttttacctttactcttagatgagttaagggtctagtatcaaatgacactggagctgctgcagtatgcatcccgagactaagtaggcagcataaaaaaggcttcattagcaaagttcaatttaggatgtttttaatcgtgtcttaattctagaaccagtgcgagactttccatgcttattcaagcatgctgacagaatctgaagaaacagttccatgagtttcc

SEQ ID NO: 31779 - DNA, 764 bp, Mus musculus
  source 1..764: mol_type = other DNA
cagccttaagagctgaaagatgaagcttgctttagcttattgtttccatagaaatgagagttttaaaaacgggaggcaaactctggcacacattctcgtctcagtgtttgtgaggagacactgattccctccatttatctgataaacaaaaggcatctttggtcgcaaacaaataaatgattgaggaagtctatcattcacatcatattaaaataaaatgaaatatctcaatattaaattactcatattatttgattcatttttctttctagagaaaacttttaaaagtgataagtagtataaaataaagtaattataagattatggaaaataaggcaagtaaatctaaataagattacataaataaataaaaatatctaaataaaaaattcaattgctgcactcactaagtgactgttacttccagataacatagtatttttatatgactttatgaagtgttaaagtttacaaaagctgaatattacatatatatatttctaggccacacatattacatatatatatgtatatacatacatatatatatataaaatagcagataagtaattattgtgtgaacaaataatacattcattttaaagttaaatattgaccacaataatttgacttgttacataattaattataattcaggttagagttaataatttttattccattgtttctgagccaaactctaaatttaattaatagaaaatcagtatctctaaaaagggatttcaataaaacgagacactgta

SEQ ID NO: 31780 - DNA, 200 bp, Mus musculus
  source 1..200: mol_type = other DNA
gtgtttgtacacactttgtagcagtgtgtagtccctctttcctccagcacagcaggccataatattgaacttaagcttcacttccccggggtgttctgaaagctgggtcaaattcctaagtctaggaaaaaagaaatatgcattctttgcctatctagaagactgcacagttctgagcgacaatgctttgggccttttta

SEQ ID NO: 31781 - DNA, 461 bp, Mus musculus
  source 1..461: mol_type = other DNA
aaacaaaagatgtgttcctgtaaagtgtgtgattaaaaaagtttctaactcaatatgttgtctttagtgagtataaactgaacatcagactgcacatttgattttttttaaatagcttaccaagagcaaatggtagttaattgcatacaattcaacaaataatttcacactgaataacttattgtagaatttgaagaatcttcatagaatctcaagtgtcactgagggcaaaactaatttgttccccatttgtttcttttgacagctcacagaagctgaattaaatctagactataaaagccttaattaattgcagaataaaatttaaatgatattaaaatatttttcaacagacttgaagatggaaaaaagcagatttcacactgcagtcagtttctctaaattactgtccaacactgaatttaataatttaaagctgaaggctggaatgaagccactga

SEQ ID NO: 31782 - DNA, 395 bp, Mus musculus
  source 1..395: mol_type = other DNA
aattgcatttgtaataacactacaattggcattgcaaaattgttacttttatttttagatttgataatagtactagattaaattctgtaaaatatttttttattcatggacatatgctgatttttaacaaaccatagttttaataaatcctggacaaaataggattatacaatgaatggtctatgttgtttcagatgtagaacatgccgattttttaaaagatgacacaaggtttttgtcttccacctaagcagttgcacacctgcacctgaaggctgacagtgcaggctgacattttagccccatgtgttctactgggcaatcccagggagcaggggaatgcaaagccactgctgaagctgttattgcctctgcagctgggtctctgtcaatat

SEQ ID NO: 31783 - DNA, 553 bp, Mus musculus
  source 1..553: mol_type = other DNA
ttagcagtgtaaaagtaagatgctttcttcaagttgcagacaggattcttcattctaacgcattctaaagaatgtggcattatgaagctgaagggtaatatcagctaacttccgtctcagtctactgagaaagtacagtggcaatggtatgtaatagaattctctcaagagaagattatgagtgctttatgagggaagacttgaaaagcaaacattgctttaatatgaaaattgtaaattaaaaaaaaatctatgatgatcccagggtgatcctccaatatttcagtctgtagaatctgagataggtagacttcctaagttcccttctgaagatttcaagttaattatcactatcccaaacagaataaataagatcaactttttgtgtgctttgtctcttaagtgagtaaaggtatcttttaaaagcaagcaattgaagtcctttaataaccccactttattctcagaatatgttgagaagttgtgtcagagccatgcatacatttctcaggagagtacttcacttctgaaaggagtggttgactcaagtcag

SEQ ID NO: 31784 - DNA, 375 bp, Mus musculus
  source 1..375: mol_type = other DNA
aaagaacaaatgatctctgttaatgttttagtggtgttactttcctacttcaaaacaaaacaaaacaaaacaaaaaataaaccctattttttttaatggttttcctgatttctgtctaagattttaatatagttaaaatgtcaatgatatactcaatgcatgtatatgatcttttttaagcagaaaatttgacgttgacatgtaaaacatagaagagattttttttttttaatggaacatataccagaggaactcgagaacgagagctcatgcataaattaggcctgatttatgcattaaggaggttaaagttgaattatttcctttttgacttgaaactgtattatgattatgatcccgaccatcagtatctta

SEQ ID NO: 31785 - DNA, 364 bp, Mus musculus
  source 1..364: mol_type = other DNA
gttaaattcaggctctaagggtacagtacctgagctaccctttaggaattctttccacactgtggataaaaatttcatatcgttcatttgtatgtacacacgtacacacacacatacacacaagtggacaggataatcgatcaactatccccttccctgagttcttctagaaatcacacttgttcactttttaacaaaactcattctgcagcagaagtagataaatttgtatcaactgtttctgttagagttataaatcaccttttaaaaaatgaagacaacacgctttagaacaggttgtttctgcagcatcactgggcatctgctgatgacctcatcaagcagctttatgttgctgactgat

SEQ ID NO: 31786 - DNA, 429 bp, Mus musculus
  source 1..429: mol_type = other DNA
aattagaaaaatctctggttttgccacagctattttaaagatgaggagtgttgaaaaagcagcatttattcaaaactttccacaagaaacttgcttaagttttaagcacataaaaagtgctggggatagaaccatagcatgctttttttaaccggcgtcctacaaaaccgacgccgtgtaggcgctcggggagagttagcaggctgagaatctggcagccgttcaacgaccccgccctcggagtcccaggggggcttcttcggcccgaagccgcccggctcccagcgcgtggaaacttccctggcggcgagcagggcgggagggggcggcggttcccctcggcgctgagagcaccgtgcgcgcgaggatcggggcgcgcggcgggcgcggcggccgccgcctcctcccgtccccgcctccgcggcgcag

SEQ ID NO: 31787 - DNA, 397 bp, Mus musculus
  source 1..397: mol_type = other DNA
atgtcaaaaaaacagcctgaattaaggcagcagggagaggaggaataaatactcctgcccccattattcccacagtattttcagaggttactggcgcagttccccataatgctgccgttactagctgatcaagcaattcattaatcaatcataaatgcctaatttcttgtgaagctcggcccctgccaggctccttttcgcctccctgcgctcaggaagaggacaagagcgcgacccaacttgggagaggtgcgggacgcgctccaggtgcgggtccagagccagagcgcggcccgcagctcccagggcgtgggcgagccggccgcgtgtgcctccagggcgtgcggccaggctgccacgtgacaggcgaggcggcccttttcccagcgcggccaga

SEQ ID NO: 31788 - DNA, 491 bp, Mus musculus
  source 1..491: mol_type = other DNA
taataatattagaatccaattagttaataaaatgtccccagatggaaatattcatatgtcagttccttttgtaatacacgggaatttaacacctgatgtagttttgaaacaacaataataaatgaaccatgacatttattttcatattggaaggctttgtgtgtgtatatgtagtataaatttcatataaaattaacaaatagctttgattatatctctacatactgtgacaatgagattctctataccagtgatgtgaaatacatatagacttcacagatttctaagtctcttgaagacagatagctttctcactacgggatctattttatgtatagagacttgaaggatcacttatgtatatctggaaatactatgtacactagaagacaacatacataccttctaacactaaccaagttaaatggttataagaattatataagtagattaaatgtgagttattatctgagaagtggctttaagaccct

SEQ ID NO: 31789 - DNA, 138 bp, Mus musculus
  source 1..138: mol_type = other DNA
acgttaacagtctctctgagtgacttggaagaacgaaagacagctgtgactgtcactttctgttctgtgctttttcaggaaatgaactggatgaaagtccaggggctggaacttcctaaggactgacgtactctaagc

SEQ ID NO: 31790 - DNA, 391 bp, Mus musculus
  source 1..391: mol_type = other DNA
ctatctttctcagttttacaaagaaagatgtagttagctgaagttgtcttctaacaaatcttagcttaaaatctttactattttttaaaattatgtgtatttttaattatatgtttaatatttagtatacagtgatccaggagcttgtttttgccagtaggtcttaaaatcaacagctgaaggactggcgactgcagggcgtctgctcctcaggcagaggaaattcaaacattaagtttgggtaggtaactttcaggatgtttcagcctaatcatcataaaagaaagcagttaaatttcaatttttacatttttttcttcagaatcccagaatgctctgctccatagttgtccgcgagaattccgcagagtctgccctgtcagccaatcag

SEQ ID NO: 31791 - DNA, 410 bp, Mus musculus
  source 1..410: mol_type = other DNA
tgggttcactccctggagtgaggactgactcctgaaaataataatagttcagttcaaacatacttctacacttaatcttacatacttgtattacccaagtaagttaaggaaatctacttttttttcccctcacagtcaaaaatgtatcctgttattctttgatagtaaagatctatctgatcatttgttttttaaaacctatgatcaaaaattaatctgccaaatgatataaaattttcaaataaaaaccattcattcttattgtttccctgaaagacccagtgctgaaattaaaatgtcataagcagatgagcttttctgggggtggagaaccatcgtgcttgctccacagatggtcagcatcacatgtcacgtaatggctcagtgcatcacaagggtaccatagagac

SEQ ID NO: 31792 - DNA, 502 bp, Mus musculus
  source 1..502: mol_type = other DNA
aagatttctaattaaattctggtctcatttcaggagcccaaaactggatatacactggatctctgtatttttttcccaatgtggaacactgttattggcctataacttggagcacaagttgggaccccataagaaatataaaaactaaatagcattttgaatcatatggccatattactttttataatacaatgcaattgaaattaatgaagaagaaaaatggtaaaacttgtttttttaaagaaatatgtggagattacttatttttaaagtaatgcatttcactgctcagaccagagttcaagggtcatctgtgtgcacagagttctgagcagaaggcaatagatttttttaaagttactttttaaaacctagggcttaaaaaagaaggaggccccactctcgggcaactgggcattttctaaagcttgttgataccctcagaaggtccccacgcaggccattgacctataagcaaatagatagtgttcttaaaaaagcc

SEQ ID NO: 31793 - DNA, 343 bp, Mus musculus
  source 1..343: mol_type = other DNA
taccccatctgggtagcctgcaccctgtcagggggaggagggccccgaggcgaggcaaggaggtcaggcggcttggcatagcccaggctgtcctggaactgtgtggaccaggttggcctcaaactcacagagagccatccctctgagtggcgaggccaagcccttgctccgaatgtgagcatggcgctcgccggagcctgtgctcctgggtgagagcatgcacgagcgagcgcgcttgtggagtgtgcatgtgctagcgcgcaaggggcccactcctcccagagtcgcaaagtgcagggggcgggccgggcagtagggggcctggcccactggattcccgcat

SEQ ID NO: 31794 - DNA, 524 bp, Mus musculus
  source 1..524: mol_type = other DNA
ttaaagggggaaagtatattttgcatatatcaggtaccccaaatatttttctggaccacacctacctaatttaaaaagcagtagccctgtctagacaggaggaaatagtaactagtaaaacttcagtgctgcagggaaggtgggtggcatctcatcccccaccccttacagcaccaagcaatgccaggtctgcattttctagatgttttgtcataccttaaaacacaaattaggaaaagaaaccacaaatcattcccaaaccatatttggtcatttattatgttgatccataaaaattcagtgaaatgatcagttccttgcaccaggagatttacaaaagatacaaaataatttttttttaaaaaagcttcttagttactttcaagatagcatgagtagttttctctagctagccacacttaatttataaaaagcactgacgattcctttgctccatccacggaggagagacttagtcaccacttggtgttgcaactcactgagagaatggaagtcttcacaca

SEQ ID NO: 31795 - DNA, 364 bp, Mus musculus
  source 1..364: mol_type = other DNA
tatgtctccagaactatattttcttaaacaaggcctgctctcgaaataattttgtgaaaggtatgtttcagcacaaaatattcctatcatttcatatcccttgtatagcaagacagaatgtaaatgaatttgataatttagtagtaattatagttttcccacctaaaaataaagataatttagaatattttagaaaactaagtttctctgatcacttaaaaggttatataaaactaagaagtatatagacatctttacatttcctactcgaaaaagaaaatcctacctacttttagtaggaagcagcagtctttattttgtagctacttttagagaagtgactcatttttaaggcttcaggctg

SEQ ID NO: 31796 - DNA, 415 bp, Mus musculus
  source 1..415: mol_type = other DNA
tatacataatgtgaaagagtttaaaaggcaagtgttttcacgtcagaggctcctgagtatgcccaggagaccccagatcgaagcagtaatttatttaacgtgttacttgtttattgataattttcatatagtaaaagaaagccatttgattcgtttaaaaatatataaagtatgtttataatcccagcagtctgggcccagagacatagtttatcttgtactctgtgctgcacattgatcaatgcggtgaacaccagatgtagtaggacctctaacaggttctgagcctcgggctggaatgtagccagagatccaggcaaccagtaatgtaatttgatgaagttaagatttctaaatactacctggtggaagcttgggccccggcgcccgccgtagatgtcgtgacaaagccggc

SEQ ID NO: 31797 - DNA, 654 bp, Mus musculus
  source 1..654: mol_type = other DNA
agggagttcaaatcccagcaaccacatggtggttcatgaccatgatgccctcttctgaggtgactgaagatagctacagtgtacttgcatataataaataaatctttaaaaaattttctgttttcataggacattggtatagatataaatatttggaatatttagttggatttttttttgatactagatcaggcaagtcttgaacacttacatcagcctcccaaatatctggagtatagatctatgggtgacatttagttgtatgtgatacataggaatatttacttattccatttaaaacattgagatattggtagaagatgagtagatattaaatatacaaatatcattagattctcccttcttaggctatgaggctagagttatgcagtgcataaaattcccctacttggcataagtatacggaatgtttattctagcgctctcttaaaatattttaaattatgtgtacacatgtgtttgtgctccccggagctggagttacaggggcctgaaatggatgttgggaaccaaaagaggagctcttcttccccttacgcagggcttctgagacctccacagaagagggatctggagttttctattaaaacaaactgaaagctagttttctaaccttaaaaaaatatttatttt

SEQ ID NO: 31798 - DNA, 348 bp, Mus musculus
  source 1..348: mol_type = other DNA
ggcatcctagatttaatttttacaatggaattctttaaaagatcgatttctctcacaaattaagatcttaggtgaactaaattcctatgattagaatatattggcaaatgaagaaactttgtctcaaatttcatcctcgaaaattaaatcacatggccaagggctggcgagatggctcagccattaggacttgaaggaagacccatattgagtatatacagtgcatatatctcttaaagagtctctaaatacctcgacagaggatgtcactgtttataaagtgatgcgcattttcgggagcgctgtgacactgacggatccacgtcagcccgggaacgccgggagtcg

SEQ ID NO: 31799 - DNA, 436 bp, Mus musculus
  source 1..436: mol_type = other DNA
agtgcatatatctcttaaagagtctctaaatacctcgacagaggatgtcactgtttataaagtgatgcgcattttcgggagcgctgtgacactgacggatccacgtcagcccgggaacgccgggagtcgccggcacccatccctgacgtaccttccctccacgcctggcctgggctgtgggggagggaggcggcctttcctgcgctttccaggaccgggccgggagacgagaagcccgcggcgggggtctgtcggcgcggcggcgtcttctgtcagggcgaggggcggagccgcggcgggcctctgggccgagctgctcgggctcggaggggtggccccggggaccgcggcgcggcctggggccccgtggtggcccggcggcttgcagccgagccccggggcgaaggaagcggctcttcctctccagcccccgccc

SEQ ID NO: 31800 - DNA, 397 bp, Mus musculus
  source 1..397: mol_type = other DNA
tcaaatttcatcctcgaaaattaaatcacatggccaagggctggcgagatggctcagccattaggacttgaaggaagacccatattgagtatatacagtgcatatatctcttaaagagtctctaaatacctcgacagaggatgtcactgtttataaagtgatgcgcattttcgggagcgctgtgacactgacggatccacgtcagcccgggaacgccgggagtcgccggcacccatccctgacgtaccttccctccacgcctggcctgggctgtgggggagggaggcggcctttcctgcgctttccaggaccgggccgggagacgagaagcccgcggcgggggtctgtcggcgcggcggcgtcttctgtcagggcgaggggcggagccgcggcgggc

SEQ ID NO: 31801 - DNA, 504 bp, Mus musculus
  source 1..504: mol_type = other DNA
agttccgtctagaaatttttattaagcattattacagtggaacatctctgattagaacgttcattattgaaagtcgcacttcctttaatttagtaatgaaatcatgtgtcattagagactgactggttcccgaagtacactaattacaagttatttaccaagcagtttaatgtatgttaaaaacattcaaatcatttaaaagtggtcaaagggctgtccttcacctcagccagcggggcgcagagtagaagctcgcacccagcctgggcctcgactcgcacaccggccggttccaaactggcagcggccgagcgggaccgagggctcctcactgacccaggcctgggtcgcagcgggccgccagcatcagcaccagcgtcggccggttggttctcgtgccttacgcagccggtgaactgctagcgccggctcgcccactgctctgcactgcgcacgcgcacacccgggcttcgggcctcggttcagccgcgttgctaaacaacc

SEQ ID NO: 31802 - DNA, 458 bp, Mus musculus
  source 1..458: mol_type = other DNA
atagttcaaatttccaagaatctattagttaccatgacaacaattaaacttgtggaaagactttgtttttagaagtcctacttgctcacatctttgaaaaaaaatcaaatcttaggtcactttaattggtcactttaattaccttacattatcaaagcattttttccgtgagctttagaaaagattactaggtctgcaacattataaagattttgataggtcaataacatttccaaacggcattccaaaatttattttacagctggggtaaggctttccaaggatgcttgctgggactgctttcgcatttcaaaggcacgggccaaggcagctcaccttggctttccttcgcctgcccggagcgccgtccaaagcgcacctgcatctttaacaaagctgaactgagcgataactaaaccatttggttgtttagcaacgcggctgaaccgaggcccgaa

SEQ ID NO: 31803 - DNA, 411 bp, Mus musculus
  source 1..411: mol_type = other DNA
tgaatgtttttaacatacattaaactgcttggtaaataacttgtaattagtgtacttcgggaaccagtcagtctctaatgacacatgatttcattactaaattaaaggaagtgcgactttcaataatgaacgttctaatcagagatgttccactgtaataatgcttaataaaaatttctagacggaactttacacagtgctagaagttccttcacgggacagaaactctgagctgagggcctgttcactctagagttatgaaaattatcaggagttttaccaaattagttacaagtattgaacctcataaaatatctcaatatggtcttatatttcaaatagggtctcatatttgacttgaaactcccgattgcaagtgccttttccatacaagttggtctagaactagtt

SEQ ID NO: 31804 - DNA, 400 bp, Mus musculus
  source 1..400: mol_type = other DNA
ctaagatataaaccatatcatgtttttgtttgttttgttgaagatttaaatctggggtgagggttgtgaagttctacacaacactcctcaaagaagaacaagcatgttacttgttcagagcttgcttggcaagaaggggaggggagagtagtagcctccacctctgctaccccaagaggaagtgggggtagaaacccaagttggcttcctaagctccctattcaaaatcttgcggctaaaaacatttgatactagcttttgttgcaataagaaagtggactttctggtgtggcacaatggacatcaccagaaggctggagcttgccccttttagctgcttgtgttctacaacagtaactcgagaatcttaggtgcctggattcagccttgacctaggcta

SEQ ID NO: 31805 - DNA, 321 bp, Mus musculus
  source 1..321: mol_type = other DNA
cttggctgtcctggaactcactttgtagaccaggctggcctcgaactcagctgctgggagcaagagacttttaaaaagatttgtttgtaaggttactcattgagtcagactccggaaaccaagcaactgtatggttttttaatttttttccaaaaccacgcactcccggctggtctacagagcagcgcgagttcctggatagccaggacatttctcgggcgggagggcgggactcctcctccgaggattggctggcgcgtgcgtggaaagcagagccgggccactgcgtccgcggccacgcccacctgtccgcaagggctg

SEQ ID NO: 31806 - DNA, 444 bp, Mus musculus
  source 1..444: mol_type = other DNA
ctggtctacagagcagcgcgagttcctggatagccaggacatttctcgggcgggagggcgggactcctcctccgaggattggctggcgcgtgcgtggaaagcagagccgggccactgcgtccgcggccacgcccacctgtccgcaagggctgccgggaaagccgtttggctggcccgccggcgctcggaagtccaggcgggctgtgctatgcgcaggcctcaccttcctctccgcgccgccgcgtgggccgcgcggcccgtggccgtgtgctggaccgcggcccgagggggcgcgggcctcggcgaggccacggagcgggccccggccagagatgcgggcgcctggggctttccacgtggcagggatcccggcgggccggtcgcggggcctttaggcagaggctcgccgcaactggccagaggcggagggggccgctattgggt

SEQ ID NO: 31807 - DNA, 194 bp, Mus musculus
  source 1..194: mol_type = other DNA
tgcccgactattaatggcaataataaagtcattcttaagtcttcttttcataattataattatttttaaaatttgctcttctgttttcagaatggtctggatcactttagacaagacaaagctggtgatcgccgatgaagaccgcttcttccctggtcctgcagctcggcgcccggcacgtgtcggtacttccg

SEQ ID NO: 31808 - DNA, 360 bp, Mus musculus
  source 1..360: mol_type = other DNA
aagaggtcatttgtgaagaaacgcttcctcaagtccacaacctgaaactcgatttctagtatttgtctctaggtacatgtccttgacttcgtattaagcaaatgtttaatgagctcctaactagtttccttgctcctgagaatttacagtaaaactactttgtctaaaggtatggtatgtctccagaactcttcacagcacgggagctgcagggaagtctacctaacccgaaactccccagcggtgcagggtgggggtggggtcgaggggatcccacgagcctcgcggggatcgccgcccgtggaacggtccctccccgcagtgccggaagtaccgacacgtgccgggcgccgagctgca

SEQ ID NO: 31809 - DNA, 360 bp, Mus musculus
  source 1..360: mol_type = other DNA
tacttgggcacctagtgcccttgttacagaacaggaccctgtgccccagtctttggttcacccagtgctaggcggacctgagttctgtttccaaatagactcttaactcagaaatatgatcagggatgcccttagtcacgacagacagggccaggccaccaacataggtgcttagcagtgacagcacagagaggggcaaacccacagggtttgttgagcaattgcacttacaacagtaaatgcttttgaaaataagcttggaggggcattgatggatgccccaacatccatagcaggcaggtacaagtggccccttgggatcttctcagcttcagcacagagcctgggcctcctctgaag

SEQ ID NO: 31810 - DNA, 557 bp, Mus musculus
  source 1..557: mol_type = other DNA
aacctgatgacttgagtttaatcctcaggaaatcagataataaagaaccagcttccataaggtgttctctgattagatgtgtatcggaggacttctactcaaacaaataacttgaatgtaattttttaaaaagacaaaaaaacaaatacttttaatgtggggagacaggcagatctgtgtctacagagcgagttccacagagaaaaataaaagaaaagaatcttaccttaaaaaaaatttattttaggagattagtagtaattaagtctctgataacagcatcaacatctgaagaccagatatggatgcctaaaatacatctggtagatgttgtgtttaattcctatgttccaggcaaataaagaaaaaaaaaacccacttatcttttttctttttatttattcaaaccacttttattaaagattgtctttgcgccgagttgtgtaagtggggcggggaccgcgcagaagtgctctgcagcgccgggtatcgcgagagttgggcgggccgagccatcgcagcagtcaattcccccaccctcccgggaggagccgggg

SEQ ID NO: 31811 - DNA, 473 bp, Mus musculus
  source 1..473: mol_type = other DNA
cttgcccggtccagctcaactcacagaactgtttgtctggaaagtacagtcaaaagttcacaccagtgggagcttcaagcggctgtgtgtgcgccacccactgctgccctgggaggccgcccagcctggcccagggtcacggcgccgcctgccactccgcgggcgagtaggggggtgggacacgcggccgaccgggtttggtcagtcccacgcccgaagttaccctcatcccgagtactgtgcctgaaagctgaaggcagattttttttttcctagagataacaaagacactttgtcactttgagcactgggatcgagtgtcccgagcaacccaagcgcgagtccaaatccaattatttgtgtatatacatttttgtggattcaaaggatttgctttcgcttctgaaagagccgctattctttgatgattgggtagcggcaaacttcaaaaaatttgactgcggcccagcaaa

SEQ ID NO: 31812 - DNA, 436 bp, Mus musculus
  source 1..436: mol_type = other DNA
agaatggaagctattaccagagtcacttgtcagatgtcatttagtctgtaaagagtttctctctccgtgttgtgagaaatatgcttaaaactgaggttttaaaacataataaagaatacactttccctttgcctttatggagaaagatcttgggtaaaactcaagactcctgacatgtagtcgggaatgatttcattgagttatccatgactcaaagagattttaaaaacaacggaaactttctgtattcttggttctggttctatttttataataatgtcaaaattgaatccgtttttctatacattaaaacgtacatattttaaactcgttgcctagcaacaagttctctgtgtccaaggagagaagttacccatttcccccctagaagataagcttgagagaacattgaaattttctaacaggcataagacct

SEQ ID NO: 31813 - DNA, 329 bp, Mus musculus
  source 1..329: mol_type = other DNA
tgggggacttcaccccgctcagtaatgtgcttaaatattagacacggagtgccgtcctggcttcccggagccaccctccatgctctgctgccccaggcgtgtggagcggcactcgtgcgtgttcttttacccctctccagggagagggctcagagaaagggaaatagaccccttgcctcttgcctgtacagccatactggctcagtagagcgagacaaaattcttcgtaggaattatatagagcgtgctgagtgcattctggattacgccccagcgctccgcggacgagctgcccccgcgagcaacggcccccccgccgagcgggtccc

SEQ ID NO: 31814 - DNA, 539 bp, Mus musculus
  source 1..539: mol_type = other DNA
atttttataataatgtcaaaattgaatccgtttttctatacattaaaacgtacatattttaaactcgttgcctagcaacaagttctctgtgtccaaggagagaagttacccatttcccccctagaagataagcttgagagaacattgaaattttctaacaggcataagacctctaaagggctgaggtgcttcagtagcagcccgggcacccagacttggcccgggctgggtggtacacctgaaccggatgatgtcgaggtccccaggaaacccataatcttctcggggccaggatacgtgggcagcgcgacgcccagttcctccggacgctgggccacccgcgccgcccgctccgcccttcgcgtggttccagcagctggaacagttcccgctccgctcccgccccgcgctctgcgccccgccccgggcccgccgcgctccgccccgctcgcccctccgctgcgtcgggctgtccagtcgctgggcagctcgggtggttcccggggctcctcccgcagcccgtccggtctccatggcaa

SEQ ID NO: 31815 - DNA, 393 bp, Mus musculus
  source 1..393: mol_type = other DNA
agagcgtgctgagtgcattctggattacgccccagcgctccgcggacgagctgcccccgcgagcaacggcccccccgccgagcgggtcccggctctcccgtgccggaccagggatcgtgcaagcaaggaagcagccctggggtgacacccagcctcctgtgacagagccgagcccagcccagccccgggacgcttcgcagaggagtcgcgggagggtccagctcgctgtcgctaataccggatcgcccggacttgccagagccccgcgggaggacacataagggctgaagtgaccccagagccgcacccgcgtcccaccgccgcccgcggagctgcgagagcgcgcggaggttgcggggggggacgacacgcaaaaggcggctggtgggctgc

SEQ ID NO: 31816 - DNA, 407 bp, Mus musculus
  source 1..407: mol_type = other DNA
ctcaacttatataagctgtaagataagtataaaagaacgagcctatttttttttcagctctgggcagaagctgatcggctgacttgggccatgagtttggcagagtaaagcactgcactcaggaagcagtgtgctcacatctgttagaaaggtgcctctcctgtcatcaaatatataaatctggtttatgctgtactcatcaaatgatatcatcatatagatgtgtgtagagatgtaggtaataattaggctctgcctagtaccgtaataaaaagcaaagactgttcctactcgccttaatattttattagcaggagtccagactacacatgggcgtatatgttttaaaacctcaaagaaatgaatttgtgttttataacaataagaaaaatgttttttagaaggaa

SEQ ID NO: 31817 - DNA, 262 bp, Mus musculus
  source 1..262: mol_type = other DNA
catatgattttccatatggcgaacctgtcgggaagaaactagactatctaacaaaacagtctttattaaagcaagcgccaggcgtgctcggcatctgctctggtcaccaggaggcgcagtcttgtctgctccggggccccgtagcgagccgtcctccggctcccgtcagggggcgctgtctgcggcgtggcagcggccgtggctgccgggcgacgatctcccggcgggctgtgcggcccggctcgggctgctgcaagtgcca

SEQ ID NO: 31818 - DNA, 736 bp, Mus musculus
  source 1..736: mol_type = other DNA
gccgccacccaccgcccgccaccgcccgggcgacgccggggcccgacgcactgcagaggtgccggcaggttccgcccgcggaagtggcctcggtcggcgcggcccgcgctccgcccgcgctccggccccggccccgcggccccggccactcgccccccgcccgccctccgcccggcgcgctccctcggcggcgcggcgctcccctcccagccctcgcgcccgcgctcgccctcagcgcggcccccgccatgacggaggcgggtgccggtgccgccgccgtcgcagggggggagtcgggctccgtttggaggggccgccatcttggtcccggctctccacgtctccaaccccgggctcggcggcggcggccaggtccctgctgaatcacacgccgccatccgggaggcccagggaaggtaagcgccgccgcgccctcccgcgggctccctcggcccgcgcggaccccgggctggggtggggggtggcggttcgcgggcgggaggcctgccctggctccctgagcctcctggcctcggggctcgggtgggtttgccctcgcggtgcagcctcggcgcgcgagccccctcccctagaggcggtccccgcgccgcaagccgggccgccgggaccggttaagatgcccctcgcccgcctcccgcctctgggctgcctcggatccgagtcggatccccatcgcggcccctagagcgatcgtgggcaaggctgctcgtgccac

SEQ ID NO: 31819 - DNA, 331 bp, Mus musculus
  source 1..331: mol_type = other DNA
aagttaatagagccttttataatatgtgatcttggatgacaggcaaatctggttgatcatcgcttgcaagtgaggaaaattccagaaaccatcgccctggactccacagagtggaaattagcattcactgcattctcagggacttctcttccagagatgagcagaagagcatccgcagctctgctggtctgctgtcagtgctctcaggacattaagtatgactttgaattaagaagcgtatagttttgagaaatgtaacccgtccatgttttagaagtggaaaaatgatctactttattgttgagtatggtctgctgtcagccagtagcag

SEQ ID NO: 31820 - DNA, 628 bp, Mus musculus
  source 1..628: mol_type = other DNA
atttagattttccacttctgtgaaaacaaagaacataccccaccggtagggtttcttctttttctcctgaagggcaagaagcaactctctcgggcaggctgggtgtggggcgcgcttcggagcaggcgcgccgcggcgagggggaggcaggtggcagcgggggcgcgcctccctccggccggctccgcgcacgcgactcgccgctccgcgccgcgccgcgggccccgcgcctcccagcgcgctcgcgccctccccgccctcgccccgcccgggcagggccctcccccctcccccctgccggccccgcggccgccgccgccgccgctgctaccggaggcgcaggagcctcgcgtttgcattggcggcgcgtgacgccgccgccgccgccgcccgtaactgatgcagaggcgcctcagccgccacccaccgcccgccaccgcccgggcgacgccggggcccgacgcactgcagaggtgccggcaggttccgcccgcggaagtggcctcggtcggcgcggcccgcgctccgcccgcgctccggccccggccccgcggccccggccactcgccccccgcccgccctccgcccggcgcgctccctcggcggcgcggcgctcccctcccagccc

SEQ ID NO: 31821 - DNA, 380 bp, Mus musculus
  source 1..380: mol_type = other DNA
atgggaaaataaatatatttgcaacagtacaccaactctactgtagtctgtagaagactttttcagagtacattcttttaggggacccaatagtgtcttttaactaaaaaatcatgttgtctgctagcaagatagtttgattgctacagcttaaactttgagcactctaaaacccatgaacacatattggaatttgtcaaatgccttttcagcatactgaatgaattatgtgatatatatatatatatatatatttatatgctgtattacttttatatatttacatatattgatattatgtctctaaatttggtttgcaggtattttattgaaaaattttacatatacattcaaagaaattcatctatagctttcttttt

SEQ ID NO: 31822 - DNA, 451 bp, Mus musculus
  source 1..451: mol_type = other DNA
acattcttaaatttagtactctcctgaaagacacaaagaatttcagttgaaatctacagttttaaagtacaggcaaaagaagctttttaaaaactacgccaggcggcggaagcccggcaggaggttggaccccgggcaccccgacttcggcgggcgtcacctggcacaccagcgcccgcaggatgcccaggttcgtcctcgacgcctgcgtcgcgtgcatagagcccggcgactcagcctgcggcacacattggccttccgggtccggcccatggagactaggggtccgcagggcccaggaggggcgcgcccctcacttccgcgaggggtggcagccgccacctgcgaacctcaaaggaaggctgacgcgggaccccgcgctggggaccaggcagagcgagggctggcctggccccgccccacccctccctgcccctggccctaataggct

SEQ ID NO: 31823 - DNA, 373 bp, Mus musculus
  source 1..373: mol_type = other DNA
aggcaagtccagggctgtgactgcctgtctggcgcaactgcaagttgccatggtaaaattataaggggtgtgtcacttctaaggactgttctaaggactgtgcccaggtctttaagaccattggggtcacaggtggctgccctcagcagcagaccctctggggggtcaggaagcctgcttcaccactttcagtgaatctgtctctggtgacaactgactcacactcaaggacttcttcaggtggtggccaccacggcagccagagctcacggtgcagccgcgtgatcggggaccgtctggagcttgggcccgcggcacccccgggaggccccacagcctctccccacgggcggagacggcgccgagaagtcgc

SEQ ID NO: 31824 - DNA, 452 bp, Mus musculus
  source 1..452: mol_type = other DNA
aagctggtgtgcttactgactttttctttaagcacagttacggaaatttttagtatgttagtaattttgaacacgcaggctgagctagttcacagagaatgttattttttacttagagaagtcaacctggattatcttaggcagttcaataagaatgcaaacatttcatattttattccctataagggggaaaaatggaagtgcggctgagggaaagccacggggcgtacctttggagggtcccactggccacaacgcccctctggacgcgtggccagagccttgcagggtcccacgacccgacaccaccaggtggctgcacagcacccaccaggtttaccgcgtgcagcccggaaggctacccgacccactgcgcagccctacggcgcagcctattagggccaggggcagggaggggtggggcggggccaggccagccctcgctctgcctg

SEQ ID NO: 31825 - DNA, 476 bp, Mus musculus
  source 1..476: mol_type = other DNA
attcttatttcaattattttctttatattaaaaatctaaccagatccaatagtataaaatgctttcttaccaaacacactttttggaggaaactattctgttataaaatactagaaattatttttatgctaattatttttttgtttagacagggtttctctgtatagccctgtgtccttcactttgtagaccaggctggccttgccctgcttaaattaatatatttttatttaaagatttatttattttatttatacaagaacactgtagctatcttcgcatcagatctcagccagtgctcttaacagtctctatgtttatttttgatcttgtgtcacatgctacaagaatcctccatgcctataaataaacttcttaaaatgcccttttctcaggttcattatggaaaaacaggacttaagatttttattgttccaagcgctcgcccaggcagggcgcctggttgccgggacttg

SEQ ID NO: 31826 - DNA, 432 bp, Mus musculus
  source 1..432: mol_type = other DNA
ctttgtagaccaggctggccttgccctgcttaaattaatatatttttatttaaagatttatttattttatttatacaagaacactgtagctatcttcgcatcagatctcagccagtgctcttaacagtctctatgtttatttttgatcttgtgtcacatgctacaagaatcctccatgcctataaataaacttcttaaaatgcccttttctcaggttcattatggaaaaacaggacttaagatttttattgttccaagcgctcgcccaggcagggcgcctggttgccgggacttgccaaagcggaaacgcttcgggccccgggccggtgtctgtcaaccgggagattctgttttacaaaaggtaagtcacggagaggccgcccctctgcgctgggcggcaaagactctgattctgtgtgagaccggcggccg

SEQ ID NO: 31827 - DNA, 589 bp, Mus musculus
  source 1..589: mol_type = other DNA
ttgattgattgtcatggaacatctatagaatttaaaagaatttttaggaacttcctgtttagctattcagtgttttattaagtttctgggaacaaaacacagacatctctggtaatagttttggtttcatagctgaagacataagcattctttaaaagcctgtcttgctgtcaggctgcctggaactcagaatctttgtgccggtgtgaactatcatactcgtctagaacttaaaaccaacagtgtcgtttgttttaagcattagttatgacttttattatctagtactcaaatacagatctgggtgtgctggctaactctggcacaccagagtctgagataggagaatcgccatgaggacatcctgggctacattatgatttcaacatctatgtactagctgttgtgctcaagttctaggaaatatttcttcatacatttgtgtataatttttcttacattttaacagtatgcatatatggtttttgctattttaaaagtagaactttctatgggtaccattgaattgaagtacttttttaaaaaaagcctgttgcttgttcttttaaatcaatgtaatgattattgt

SEQ ID NO: 31828 - DNA, 537 bp, Mus musculus
  source 1..537: mol_type = other DNA
aacttaagctacttgcctggccctcacatatcttaatggcaagttagagacattaatttagcttaagataaataaagttgttttctatatacattgtacaaagaatttgggtggttatctattaataaaccattagggatatcccaaggaatgttaattcaggagcatatttctgaagttatgtttacttaggttttccctttaaaaaacctaactaatcattttccttatcaatatttgtcactggttgtcataaactcattattaataagccccaagagggaaccgactttggctgaagccggtgcccaaagccacacccactgccaggccttgggacttggggctggcccagaggagcctctgctcacactgcgcgttggaatccggcgaccggagctctggtgtcccccgcaagaggtgcgactgccccgccggcccgctgataccgacgcgctctagctcatagacgggcgcggcgctgcgacaggagggagcgcgggcgcggccccgggccgtggcgcgcgcgcgccctga

SEQ ID NO: 31829 - DNA, 667 bp, Mus musculus
  source 1..667: mol_type = other DNA
ccctctttaataattaatttcttttttgtgaataacattgtgtctagttaagaattataatttactgtaaaaaccttatttatcattttataattaatgaaagaaatattcttcatatgtaattttctaggtaccataagtttccctacttaagtgacaaaattctttgttatttctgttttttttatataaaattttctaagatatactaaaaacttcatatgtatgtatatgtaaatgtgtataatatatatacacatacatacacattaaaggtacttgctgcagccactgcacatgactaagatcgctcttttcccttgggaatgtgcagcttctgaggtatgtagccatgtacttgggcatccgagattccattcgccagaagatctaaatgtagcttttggagaagttgcccttctcctgtaaaatcttaaaaaacacactcttcttttatatttaatggtctgtatcttaaacatcaagagtacgaagttcttacttaaactttatcttagactactctagaatgattcaagtatccttaaatcttaaccatttaattatttgattataagctatttctgaagtagaaaacacattaaaaatgttttatgactcacatatagtactttagagcaagattttttttaattatgttttctgt

SEQ ID NO: 31830 - DNA, 492 bp, Mus musculus
  source 1..492: mol_type = other DNA
tcttttctagagagacccgtgtgttgacaccagggagtctggtatttgaataccatcgtttatgattaaaaatgacctcatacaagtccaactaaatcaagccacttgaggtagtgttagtaaccacttttagtgagctaaatggttgtccagaaaacttaagagcaaaagcaggtatatttctaaattttacttttaatagttgtgcacgctagcatgtaaagttctttaatatggcactatttttcaatttgggagcacaaaattcagaggaaccttttaaaatgggttatggcaaagttgaatcaaaaagtttaaaaacttcgaaaccttaagctgtttgagaattcacattaatttctaagcaagagggcatcctcacgtgcggtggctaggcaaccgcgggcgccttctcacggtgctagccccgcctcctgaggcacttccgccgccgcgcgccgggcggtaagtccttgcggtcacttccggccc

SEQ ID NO: 31831 - DNA, 505 bp, Mus musculus
  source 1..505: mol_type = other DNA
ggattctttaaaatcaatgagaagacatccacatattcacaaggaatccttatcgatctcgactgcattcaagtatcatcgaaggtacagcggctgcctcacttgccttgacataggggctatgcactgacatgcgtcattctttaaatatctaatttagggataacagcagttaatactgccaagcaggaagtgtcatgaagatacccacagggccacataggtgtcccaactattctatctcgattaatattttgatcaaactgatccaactttttcaactagttgcctggaaatgatttgtaaaatggtgccatccctgatgggtctggaagctcagagactgcggccggagccagcctctcctggtggaagcgagctggccgcagacggagctgctggcctcgacaccagaggcactcgctagcccgggctcctgcaagccagctcacgcgcgcgcgcgcactcgcctcccactgcttgagagcgcggctactccagtggg

SEQ ID NO: 31832 - DNA, 620 bp, Mus musculus
  source 1..620: mol_type = other DNA
tcttaatattgtactagtaattgtactgtctaaataaataaaacttttaaacacatttcaagtaatttatgtgactaaaactgcaagcactttcagatgagtccccagagaactgagctctgaaagacctcatctcttcagagacaaaaggtagctgatttgataagttatggaatttaccttaaccttcctttagtcatatttttgaaagccaacgactgttttccaatacagtgggacattttatttatcacaaattactatatttttcttacaatagtgctgaacttttatttgaggttctctgtttctgaaaagcagacatgatggattgaaataaaagataatttattgcaatgcttactttcagtgtaattgtcatttacagtagctgtcaagcaaaatccatcacgatgacattaaaatgacttattttgtttaaatgtgcataatctaatagaaagagattatttttctaaaaaaatcttgctttgtattgttctaaattaatatcaaaatatatacttatgaattaaacattgaaaaaccccatttattgatagtttcgtcatgacatctccaagcctaagtttaaattattttggagtatggataataca

SEQ ID NO: 31833 - DNA, 478 bp, Mus musculus
  source 1..478: mol_type = other DNA
gcagtcgcctggtggctggtgcatcgaactcctgccaggtggtcattttccgacctcctggggtctggccagagtacttggggtttgggagtcctagggagacaccgacaccccagtggccaaagctggagcctccgggcccgggggtgccaaagcgcgctgtctacatctgaaagtgcacaagtggcgcaagttgaattactttgttaggtaattagaaagtgttgataattatttctttcatcttgtgaaagttcacacgtgcacacgtattagttactgattcatttgattaaatgggctgaacattagcataacactgatgtttaattttcatacgcataattagccatatatttaacactatctggcctgagctgaacctgcgccgcggcaccttccagtgcacagtgatcacagggagacctctgtaatcaaaattacatcggtgatgtcgttacagatatgagtaagcagc

SEQ ID NO: 31834 - DNA, 498 bp, Mus musculus
  source 1..498: mol_type = other DNA
gcggccagccggcccccagggcgcagtccatcccatcccagggcctgtagagctgcactgtggagggggtgggggtctctgagacctccccagagtccctgccgcagagaacgctcagcgagaaaattttcctcatttgcctggccacggcgctatttgaggcttgaatgtctcccctaaagctgcagcaatcatgtggctttagacacttccggaatcctataaagcctgcaattactatataattcttcgcaatttcagatgtcctaatatggactgtaattttttcctgctatttcaagcatcaacattgtcaaagttgtatgtacataataaatgggaatatcaatgcatagtttttattagcctgaattgcatggtaactgctgctgctttaaaatttttaaaaattactcataattttcccaaagattaccaagaagagtaaacatttatgctaataatctgcaatttttttcatcagctataaagacagag

SEQ ID NO: 31835 - DNA, 609 bp, Mus musculus
  source 1..609: mol_type = other DNA
tggccagaccccaggaggtcggaaaatgaccacctggcaggagttcgatgcaccagccaccaggcgactgcgggccctcaggactccacgctgagccgcgccctcggggcgagtgagcccggggctcgtggctcaggggggaggcggtgcggccgcctttcctatcagacccgtgcagcctcgagctggagtggccagctggcccctgagttgggccagagggcccccaaacccagatccccgggatgtggccgagagaaccccaacctgggaggcgcggcctggagcgcgctgagctggctacctgggttgtcgcccagtgcgcgactccgcgatccagagaccgcggccggactctggagcggcgctccgcaccggactaggtgcgagggaggcgggaggctggagtcgcgcgccttcgaggttcctgcgcggacgccgcagcccattgtgcgtcccgctccgcgcgctctgttgcagaggagccccggccgggacgtgtggaccggattctccccaggccgggccgcgtcgcccgctctagtccagccgagcccgagcttctcggaccatcatgaatatttatgaccttggctgagtcaaagcttt

SEQ ID NO: 31836 - DNA, 373 bp, Mus musculus
  source 1..373: mol_type = other DNA
ccggaaataagactcagacttaaattatatttacaaataccttggccatatagctaggctctactctgactagatctacactctgccacatgggtggctgtggctggttacatcttgtgtaccttacacatctccacaaaaatctaatattttattaattctttgagacttgcatacataatagaatgtattttaggtatattatttatttttgctgtaaagagacacaatgagcatgtaaagttgcttcatgaagaaaaacctctgttatcatcatggtgggaagcatgatgacagacattctggatctgcaggcaagcctatagggtccccggccgttagctccttagctaggggtcagagttcatgagcc

SEQ ID NO: 31837 - DNA, 490 bp, Mus musculus
  source 1..490: mol_type = other DNA
taaaataaagtagacaaaataaaacttcttatatttattgtttatatcaagaaaacgtgtgataatgaatcttgataaatctctaatattacttcagtatctctttttttttttcattccccttttcataaaaacaccaatgcaggaacctcagaatcagtttccagctagtggctcagatgtgcgtcattactttatgtgtatgaggaaaagtgatttcaaatacattactagtaataatacctttgggcttatagagctcctcaagcaaaaaggaaaaacgttaaacattatccaattaattgttaatttaaatcaattgcccgtcaaaaggagacagagctggctcggccctcttcctggctttatcgggccatcccgcacctcgggacacgcacccaccgcggccgccttgcccgccacgtgacacgcgggtcccggggccgcccggtcgcggactcccggcgccccgcggctcggtcacgtccac

SEQ ID NO: 31838 - DNA, 398 bp, Mus musculus
  source 1..398: mol_type = other DNA
aactgtaacaaccaacttttctggataaaacagtattttctactgataattgggtctacattcataagagaaaacaataataaaaaatggttcactaaaatgtatattgtttgttctcaagctgtctctatctatgcagttctaactagactaggaaatttctttctttcttttttttttttttaaaaaaaaaaccaaaactcatcaaatgaaacagtgtgtttttaagtagcacagagtcagccagcctggctagtcttgccaagctccgggacgcttccgggcaggtggcgggaaggtgggagggctgcggcgggtgcgccgctgcggggcggggccggcagggaaggggcctcgggaggggcggggcggggcggggcggggccggagtcccggtc

SEQ ID NO: 31839 - DNA, 307 bp, Mus musculus
  source 1..307: mol_type = other DNA
gtgtgtattctacataattgataaacttcacacggttagatattaaatatgttctaattctacattcactatctctatacattgaaaagatggagcagctgtggcaatattgcttgcataacaatgagaacaggctcattgccaacgatctcgcgctccgggtggtttcagctgccaggggcggtggctagcgcagcctttcgccctcctccgtgtgctccgcctacgggggcgtggttccagcgagggggcggtggccgcagcgctgacagcagctccccgcccccgcggccagccacgtcccgca

SEQ ID NO: 31840 - DNA, 360 bp, Mus musculus
  source 1..360: mol_type = other DNA
atagatatttaggaatggatatatatgcatacatgtgagacttggatattcaatactcatatcacatggctagggatgtaggtacaaggcttgttgcccaatcagcattaataagaaaaggggctcatgttagaactattactattatattctgtactcaagggatgtccccagtgttctaaacactcaaggaatttggaaagttcatctgtgagctgagctctcaagtttacagtgtaacaaagtctacttgcatcaaccatttgcacatctggagacagaacctgaatagaaaggcttttctcaggatggctcatgcttatctgaggtaaatttaaatgggaacaattgctttccaga

SEQ ID NO: 31841 - DNA, 456 bp, Mus musculus
  source 1..456: mol_type = other DNA
gagttcaaggccagcctggtctacagagtgagtttcaggacagccagggctattcagagaaaccctgtctaaataaataaataaagtaagtaagtaagtaagtaagtaagtaagtaagttctgttttagaatagcaatctgtaaaaagagatttcccagagccataaatgctactgaacaaagatatttgtgtagtggtattttatcgtctagactctaccagataagttgtcagttatgaggggggacaaaaatgattcatttttattagtaatctcgcaacactgtgactaagaggacacaggtgtcaggagtcatccgggtggattccggaccagcatttcaggcagttgtcccagaatctgcaccttcttcctagacagcgtgtaagcagaggaccctgcttctccggaggcagaagcctgtgctgactcctggcacaggaactccagccac

SEQ ID NO: 31842 - DNA, 278 bp, Mus musculus
  source 1..278: mol_type = other DNA
ctgaaccctgtgcccaggaacttggcttccaggcctgaaaccttagttctgcattgtaaaggtgagctgggggtgttccctcccccgaggtgagggtagacgcgggcctggcggagcggggcacctgccgcaggtgtcgtggggtcgccgctcctggcgggcgggcggggcggctgggctcccacgcgggcgccgcagtgcagcgcgggcctcgcgcctggcccgcccctcggtccccgccccgcaggccgcgggagcccgccgggaggcgcgcggga

SEQ ID NO: 31843 - DNA, 232 bp, Mus musculus
  source 1..232: mol_type = other DNA
aatgggtcacaaatttctgtggcctctttctgaaacatgtctctcaattttctttttaaaaagtagggcttaacatcttcaggctggtaagcccgtgtgtacacgtgaaattctattcgggtaagggggggggggcagcaaccgggctctccgcgaccccgagccccggcctccctgctgggcaccgagccgggcgtgcccggaggctggccggccggcggttccacgctcg

SEQ ID NO: 31844 - DNA, 493 bp, Mus musculus
  source 1..493: mol_type = other DNA
tgcttacacttcaagaaatgttttaaatctatgattataattaaagctcttttaaaaagcacccaaggttttgtgttttactctttaaaaacaggggagcccggtcttagtgagaaagaaagaaagaaagatcttctaactagctctggttgttcccaattttgcctggagaaaaatggacaatccaccgcctgcagcttttatctccgaaagataaagctctaaagacttttacccttcggactggtctattgactacatatagatatgttctttaacatttttaagagattaaactacagcgaaagaaatcagacggccagtctcaggacctcgtttccagtggcactgagtagaacattcagcagtttccgaggacactcaaggttattacaactaccgctaaagaggtcatcttagctggcaggacctgcgtcccggcgcgggaaagccggtggccccgcccctccggcggcggagtgcgcgccccgcc

SEQ ID NO: 31845 - DNA, 222 bp, Mus musculus
  source 1..222: mol_type = other DNA
catgtataaagaacttaaccgctgtctttcagttgaaaacttgtggaagaaagaaggacttttgtattgtaaagagaacagtctcctgtgcttactctgtgacagcaacactgatgcattcatgagggctgtgacctcaccacccataaatcactagaaaaatcacatgttttaattttatgggtaacccagttccaacctcccaatactaggcaggagaga

SEQ ID NO: 31846 - DNA, 513 bp, Mus musculus
  source 1..513: mol_type = other DNA
cttcaggttgaaagctataatccaaactttggttcagatgaaagatttctgagtgttttgtggtcaaccaaatattttcccaatattttttatttagaaagttagagatttgatgttttatgagattatttgtaacttagaaaataaaacccactcatttgtgcacgtgtgttcgtgtgtgtcagcacatgcatgcaagggtcagaggacagcaattcaggctgtcaggcttggtggcaagtaacttagtctgacgagccatcttgttagcactcagtagcttgattcttaacagaagtattttttcctgttgtgttaaaaatctgtgttttcaaaagtctgatgtttttgtataaaaacaaacaagcccaaacaaaaaaacacaatatgctgttgtatccaaacttaatttatttaactttcattaattaaattttgtcaatttgctttgcataatgaattcagctacactactaagatgcacacacgtgctgtgctcgtggtgtgtgtgag

SEQ ID NO: 31847 - DNA, 632 bp, Mus musculus
  source 1..632: mol_type = other DNA
gcgcatcccccctgtgtgcgggcgcgggcggcggcggcgggcgggcgtgtgcccgcggcgggcgggggcagcaggaggggaggagggagcgcgccgccgccgccgtggccgccgcggccggggggagggcaggggaggggcagggcccgggccgcccggcgctcactaatgtggccgcggctcgcgggccccctccctccgctgccttggacgtggacggcggcggaggcggcggcggccacggcgagtatctacagcagcagcagcagcaacagcagcagcacggaaacggcgcggcggcggcggcggcccaggtgaggagcggctgagcgcggccgggctccccgcgcgccgctttctccgcgcgcgctcgcccgcccctcccccgccccgggagctgcccgcccgaggcgccaacgctccgaccccgcccgcgcgcccccgcccgccggtgcgcgccctcccgggtgggatccggacggagggaagaggcccggcgcgcagccgtccgccgcgggccaccgagcgcggggagaggcgccgcagaccccggacgcggggccgggttggcggcgcggccaggcgcggagcgagccgtacttcctgtgcgagcgggcccggccctaaccgcc

SEQ ID NO: 31848 - DNA, 649 bp, Mus musculus
  source 1..649: mol_type = other DNA
agagagagcaaccctcgctgcctccgccgctgccactgccgcccacagccagcccggggccgccaccgccggctcccggcctccgggagcgtgcgaccgagtgtcggcggaggcagaaagccgcactcccatctccgccatccagccccagcgccgagtgcccgccgggctccgggcgggcggcccggtccgccgggagcgcatcccccctgtgtgcgggcgcgggcggcggcggcgggcgggcgtgtgcccgcggcgggcgggggcagcaggaggggaggagggagcgcgccgccgccgccgtggccgccgcggccggggggagggcaggggaggggcagggcccgggccgcccggcgctcactaatgtggccgcggctcgcgggccccctccctccgctgccttggacgtggacggcggcggaggcggcggcggccacggcgagtatctacagcagcagcagcagcaacagcagcagcacggaaacggcgcggcggcggcggcggcccaggtgaggagcggctgagcgcggccgggctccccgcgcgccgctttctccgcgcgcgctcgcccgcccctcccccgccccgggagctgcccgcccgaggcgccaacgctccgaccccgcccgcgcgcccccgcccgccg

SEQ ID NO: 31849 - DNA, 564 bp, Mus musculus
  source 1..564: mol_type = other DNA
actgactgcaaggcattgaggaactgattttaacattgaataaaaacataactaagcctgctttgatatcactggcagaactaaaaccttttttctaaccacgaaacgtcctcctccagcctcggagggggtgtctcccccaataccagctccctcccccagggctcgtggggcgggtccggtttagcagcagcagccctggggccgagcggcggtggcctcctggcagcgctggcaagacgcagctccgagcgcccgggccctggggagatccagtccggtcggcgagtggagccggagccaccggggacggacttcctccccagctcggctccccgacagcctggcgaggcctgcacacagggccagccagtggaagaggcctgcgcctcgggtctggcagccgcagccgaggaacgaggctggcacagcggggtaacgcgcgagccggggccgttctggagaacctacggcgccacggccgctctccccttcaacccgggggcaaacaggaagcccgccgccaggccgagcgacggacaggcgtccggaccgggaagaggg

SEQ ID NO: 31850 - DNA, 652 bp, Mus musculus
  source 1..652: mol_type = other DNA
gaaacttgctccagattcaaaaactctagaaactagagtgatactatctgtgagtgaggaattttgcgcgcgatctccggaaagcgcgggccggcccgggctcccaccggggacgcgagcgagcagggaagcgcggcagagccggacggcccgcgcgtgacggccgcgcggcggcgggaggccttgggctggcgggctggcgggcgggcgcgccgcaggcccgggatggcgggcgggcgggacttaccgctccggcggcggcggcggggaccccggcggcggcggcaacggccgcctcctcgtcgtcgtcgcccggcgatggcggccctatcttgctgcaggtagcggccagcagagcgagcggtgacggcggcggttagggccgggcccgctcgcacaggaagtacggctcgctccgcgcctggccgcgccgccaacccggccccgcgtccggggtctgcggcgcctctccccgcgctcggtggcccgcggcggacggctgcgcgccgggcctcttccctccgtccggatcccacccgggagggcgcgcaccggcgggcgggggcgcgcgggcggggtcggagcgttggcgcctcgggcgggcagctcccggggcgggggaggggcgggcgagcgcgcgcggagaaagcgg

SEQ ID NO: 31851 - DNA, 318 bp, Mus musculus
  source 1..318: mol_type = other DNA
gggtggcggtgggggggcggacgccgctcgcgccggtctccgcactgtttagtcatatttgacaactgggttaacctgggactctgaggatggctacaagttcaagttcttcgcagcaacaacgtgtacacacaaagtgaacgcacagccctactaaaatttttaattgcactgtaacttgactggcacgcgccaggagcccgggctcgggcccctcggagcgtctgattggctgcggggcagcttgctctgcctgcgccctcattgggcgagaggcgcagccagcggcacttcaaagcgggtgctcctcgcacgctg

SEQ ID NO: 31852 - DNA, 504 bp, Mus musculus
  source 1..504: mol_type = other DNA
aaaaaaaactcagatttttgcagagagatcaactagtttagttgtgaaactttacctgtattttctgatactattctgtcatctgcaaattggggattagcaaccaattcacactcttttcttttatttgcaactggtatgtttgaaaaaaaattataatttctggacattcactgtaacaaatacttgaaaaggtgactttatacatattatttgatttaatcctaccaatagccttatgagatggatcgcagtaagaaccaggaagaaatcatgtttccttctcatagttcttaatggcttctcatcgttaacccatctgaaagaagtgggcacgatcagtcagggacaagagcgccctcctcctcgtaggccccgcccatccgggcccgggcatccgggccaatgggcgtgaccctgtgggggcgtggcctgcgcacaggtgccgccccggcccgcccgttccgtcgcctctgccgtcgtgcgtgcggctcggcggagggc

SEQ ID NO: 31853 - DNA, 440 bp, Mus musculus
  source 1..440: mol_type = other DNA
agcgttacgtggaccgcgccacgaattgaaagctgacatccgttgtaccttggcaagttctcatcattcacgatgtttgctgagcaaaggcctttaatcccaggcctgggggtatacataatgataataataataataataatattattattattattataattattattaaaccttaacagtaattggaaaggagcggcaaaagaaaatttttttgcaactggagtcggcgccagaaaggctgggctcgaacctcgagacctcgcttgttcgggctgaccgcgctcggatcgaagctgacgcagcagagcccgccgccgctcgcgaccccgcagagagcgagcatcgcgcagggtacctctgctgcgcacgcgcggacgccgccaaagccgcggcagccacgacctcggaagttctcgcccaaacttgcctagcagttc

SEQ ID NO: 31854 - DNA, 443 bp, Mus musculus
  source 1..443: mol_type = other DNA
cctaatgtacatgcatgctaatatatacattctttagatgtatggtaatacaaaagcgaaatatattctcataagtttgtgtacttttgagtacttgagtaccctaaaatttttacaaactagggaattcttgatcaacagtgtacgaggctaatgctcacatcattgagtttaaaacgctcaacttgatttctgccagaagatctccgtcccagagggtctccccactgactgacaggcgggacttgggggcagatcgacgactccagccgtgaggaggatacgaccctcccagggagcttagcaatctccgcaggatggaagtccttcttacacatgaaattggcgaatgacttccccatcttggcgtctgagtcggagaagccaaccgctggagcttcaccggaactgctaggcaagtttgggcgagaacttccgaggtc

SEQ ID NO: 31855 - DNA, 488 bp, Mus musculus
  source 1..488: mol_type = other DNA
aattagaaatattttttgtttcagaaaatgtcttcattttcacacgttgacttcgagaagccccagtagacttccgagaatactaggagattcctgtctgtaaactaagagagcacacaactaaagcttatattttaatctcttttgatttaggagaaggcagggtttgaactcacatccttgcatttataactctccttgggggcggggcctaaaggcgaggtggagacccgcattcgggccttctggctaggggcggggccttggggtggagccccagggcggagcggacctccatgctggaggcggggccttgggcggggcggggccatgtcctgagcttgggggcggggcccttctctgacctccaggccaggggcggagcctgaaggcgggggctgcagacgcctaaggtagctgacaggaccgcagcggctcacccctccctttcaacgtggttgggcatctgccgctggcacacgccgcta

SEQ ID NO: 31856 - DNA, 463 bp, Mus musculus
  source 1..463: mol_type = other DNA
cagtaaaatttgcaaagcaagatttctttttaagaaatacttacaaaatcactgagatcaggctttaaattagaaatattttttgtttcagaaaatgtcttcattttcacacgttgacttcgagaagccccagtagacttccgagaatactaggagattcctgtctgtaaactaagagagcacacaactaaagcttatattttaatctcttttgatttaggagaaggcagggtttgaactcacatccttgcatttataactctccttgggggcggggcctaaaggcgaggtggagacccgcattcgggccttctggctaggggcggggccttggggtggagccccagggcggagcggacctccatgctggaggcggggccttgggcggggcggggccatgtcctgagcttgggggcggggcccttctctgacctccaggccaggggcggagcctgaaggcggg

SEQ ID NO: 31857 - DNA, 466 bp, Mus musculus
  source 1..466: mol_type = other DNA
cggggtgcttcgcaccctggggaccgcagctctggcaccagaggggacaagctgtggagcagaggcggacaggcgcagcagctagccgaggcgccagggcagcctggcgctgcccactggtccggaccccaggggcaggggccattgcaaacgcaactggctgcagctccggtagcggcgtgtgccagcggcagatgcccaaccacgttgaaagggaggggtgagccgctgcggtcctgtcagctaccttaggcgtctgcagcccccgccttcaggctccgcccctggcctggaggtcagagaagggccccgcccccaagctcaggacatggccccgccccgcccaaggccccgcctccagcatggaggtccgctccgccctggggctccaccccaaggccccgcccctagccagaaggcccgaatgcgggtctccacctcgcctttaggccccgcccccaaggag

SEQ ID NO: 31858 - DNA, 340 bp, Mus musculus
  source 1..340: mol_type = other DNA
cacatgcatggttcataatgaagcgttctgaaaggtatgtgttacaaaaatgaatgtgaatttctcagacgcatcaagaactttctgcaaatgagaaaggctcacttaggttaatttcagtgactcttctcaatattgctaaatgaaatagtcagaattgaggctcactaattgaattcttttgaaaaaaatctcaagttccaggagtaattatttttgttccacttacctctgcatcaagtggctatattctatcctgaaggaaggagaattgcttcttaagtaaaaccaatctagtttctttttctatagcaaaggaggattgcctctgacttggtgt

SEQ ID NO: 31859 - DNA, 255 bp, Mus musculus
  source 1..255: mol_type = other DNA
ccctttaaaagcaatttttgagaaaagaattgtgatccacaggtttctgtgttgaccttcttccccatctagggcaaagagggaccaaagtcaacacagtggctctgttttctaacccaagaattagggcacagtgtctgactctcactatcaagggtccttcccatctcctgagtatcagagacccatctgcaggagagtatcctcacaaatgtcacatgcagcttcacaggaagctggccagaatatagctga

SEQ ID NO: 31860 - DNA, 474 bp, Mus musculus
  source 1..474: mol_type = other DNA
tggaagacttcccacgaagtgctgcgctgtaatacaggacacaggaggctgcagtgggcccagctaagctctgggtgggctgcctagggccctggtaagctgcatatgatcgtatatggaattctccagcatccaattctatgacacagaatttccaaagtattttgctaataattgattcatcagcacctgagttttaaagcaaattaattaattaattaaaacccctatatacaagactaggggttcagtacactggtagagttgtgatagccatttctatttaattcaacaccgactcatgatctatgtagactctcagacactttacatctagtaagagtattgtggccacagaaggccccaagctttgaggctgtgggcagctcagctgtcatgcgggcacacaggtgatgtaagacaatagctgtggagtcagctggcttccaaggccagcagccaagctccctaagc

SEQ ID NO: 31861 - DNA, 428 bp, Mus musculus
  source 1..428: mol_type = other DNA
gtgtggtagctcagcctggaatcccaccactggttccaggtcagcccaggctattgtcagacctgtatcaaaataataatagactaggatatactgcttgcttttatttgaggcaacaatgagaatgtgaccctcattctatcaataacgccgaagcaatcaaaagctgagtttcactgagtttcatggtatattacaaagtttattctttattagatttttatattatattgttacataatttcatgtatgtatacaatgtatttaggttacacccacccgaattttaattttattttaactgagacggggtccctgcctagcctggaactaggtgccaccacatttggggctctgcagtgctgtgcagcagcccagcggccagcaggtggcaagcagagccctctctgaaagggccgccccccccc

SEQ ID NO: 31862 - DNA, 326 bp, Mus musculus
  source 1..326: mol_type = other DNA
tctcaggaaatttaaggtgagcttcatcgaagccccttagggagctatagcattgctcttgaatagaattgtgtttgacccggggccacactgcgtcgggggcccgactaggaaactaggctctagcatattggtgtattaagtgtagatctacagccaatatgctttttctggatgaaaatgcaacacttaaagtcctgtttttcttcatcaaaatatgtagctattttttgttcacctttaataaaactggaggtcagttaagcccagtgggggtgggatcactatttttttttctttccttgagccagcaagaaaaatcttgc

SEQ ID NO: 31863 - DNA, 354 bp, Mus musculus
  source 1..354: mol_type = other DNA
tcctgagatatattaaataacacaatatacccaaaagctccggggaatcttttggtggctttagttattgcattcacaggcagggaccgctcgccggttaaccctgagggcgccggcaggagctcatcctcagacgaaccctggtcctcaggagaccccgcctgcccgcgagcccgagcatcccgggatttcaggagctgcacccgcttagcccggggcggctgttgccgtcgccccgggggtgcgccttggggtggggggcgcagcctcactctaggcgcggcggatggggcgcgtccccgtgggccgtgcgcgcgcccgttgccatggtaacgcgcgctcggccgcccgagg

SEQ ID NO: 31864 - DNA, 340 bp, Mus musculus
  source 1..340: mol_type = other DNA
ctgaaatttgtatttttatatctaactaagtaaaggaaatttgataaaagaaacactcataattacaagaatttttctctaggaaaaagatcgttgctttgttttaaatgaacatactcgtatgtaatataccatatacttgagaacaaagaactctctaagaaaaggtttcggctgggctcctccacctgcgcgcgcgccccagatccggtgcagcttctcgtgcccgcctcccgacggctgccaacagttccctggttaccgaaacaacggtccttgggcaccttggccacggcacgacggagtcacctgacccgcgggcgctccctcggtggaaagc

SEQ ID NO: 31865 - DNA, 432 bp, Mus musculus
  source 1..432: mol_type = other DNA
ctatgagattatattatctcaaaaaaactattttaaaaaaatcaataagactgaactggtttgttcaaagttatcagaactgggtgctgaatagattttgaaaactattcaggcacttttttagtccgaaatgatgatacattattatctcttaattctcccagttataatggaaggctagcctagtctacagagttgcaaagctcttcttcccaggacttctaggtaggtcttctgagaaaagatttgtttctttgaaagtggacgatcaaggttctccctattgtagctccctgggagaacccctgcctggcacgtgcaaggagcgaggctcacactaacaaagccaagactggccgccagccggtcacggagggggcctgtcattgtcctcctctgagtccatccgggtgctgcggcgcggataagagc

SEQ ID NO: 31866 - DNA, 527 bp, Mus musculus
  source 1..527: mol_type = other DNA
agaattggtagctccccatctcccctggaagagggacactgtctctgtgtgcgccaccttcagttctcccagagaatggattctcagccaacaggggctactggctggtcccaccagaaagacactggtccttctccattgagacaaatctttctctacagacaaaactggtttctgtgtgttttaaaatctatcattcaagaaagcatatatatatatatatattacatatagatatatacacacatatatattctttcaatatattgatatatttctatatattgatatatttttctatatatatgtgtgtgtatgtatatataaaagacacataaaaagaagtcttaaaacataaccagctttattatttatatcagtggaagatgatgaatataggagtctaatttataaagtgctttccttcatcctgaaggatgaaaaatgaaaaacatctacactgaagtttgtcaaagtgataggcgcctgcctagcatctatgacccatccagcatcctcagtgggta

SEQ ID NO: 31867 - DNA, 378 bp, Mus musculus
  source 1..378: mol_type = other DNA
ggagcagctcctgggcccaagggctcgggctctaaacagccagcccggcctcaggggaggcagagccgggtctcgtgcgctccggagccgctcgggccgctgttcagggcgacggagggcagcagccccgcggcgtgttccccagccgccaccaagctctaggccacttggcaggggcggaggcacccgggccggcgcgccgaggaacccggagactggttcccgctgtccggagcgcctccgtctacgcggccctcaaagcgggcgccgctcggcctgggcgtccactcggggaagcctgggtcgccaccggctcctgccgccagccaatgggcgctgcagccggcgcgcgccgctcccccatcacgtgatccggcc

SEQ ID NO: 31868 - DNA, 375 bp, Mus musculus
  source 1..375: mol_type = other DNA
gtaaacatagcatattattatatctattgcactttgaaaatcagaaacattttcttccttaactaaagaagaaaaactaaaagctttttacttgcagttgactggaatacagccttctttaggtcagctcagcccccttagcttgaaaagaccatccttatcatttcaagttcttctcatgctggtgagataagcgcgtagtcatgaaaggaccctttttccctcatggggtatggcgatgacagctgatctgggatctcaggtacccgccctaccctgtggtgcccctgaggcaccaacggctgggccggccggatcacgtgatgggggagcggcgcgcgccggctgcagcgcccattggctggcggcaggagc

SEQ ID NO: 31869 - DNA, 258 bp, Mus musculus
  source 1..258: mol_type = other DNA
aaaatctaaggtcttcgagttcaaaagcattttcaaaagtacaagatatagaactcagaattctatttgttaaataaaatactcattattaatatttggttcttaaaacagaaagataagtaaaaaatcaaagcattatctattatttaacacgtatctcccccgaggccaacccccgggatttgcttataaacctgttacaataaatgattattcgaacggcgtcattcgtaccttaatgacgagcgggcgctagaa

SEQ ID NO: 31870 - DNA, 241 bp, Mus musculus
  source 1..241: mol_type = other DNA
ttgcctgttttgcccagacaggcggcagctagctccaactctcagttgggctaggagcttgcagggtcaagtgaatgggtccttgctgccaagtgcctttggcagagaccactttagaggccctttctataaaaaaggatccaggagcagtccgtgccactgccagctcttattgcaacttaaagttacttgggcaaagaaagaggtctggaaactttcaaggcattgagtgttatcataa

SEQ ID NO: 31871 - DNA, 401 bp, Mus musculus
  source 1..401: mol_type = other DNA
attttcctagatagatatgatactaagccattatgtgcctaagtataaaatccctaaccgaagttctgaaagaaatttggaaccagggtactaaatggaaaaaaggacggtttaccctgctgttcactccgttgagaaagggggaagcttttaagggccgagggttctcccccttgggaggcaggctagggaggcttcctggcttggtgggggagggaggtgtgccccatcactggcctctctcagcgggggcacagcgcctgtccaacagtccttggacaaaggtgatctgagtcttttcggtaggctctgcagggaagagactggctctgggtgtttccccccttttctcttctttcgtttcctaaaagagcataaataattaaagtttggcagggagg

SEQ ID NO: 31872 - DNA, 386 bp, Mus musculus
  source 1..386: mol_type = other DNA
acatctgtggactttttaaaaatagaattttggtgtgcagctcgaggagcgaagcgcaggcctcggcgcccgcctcgcagacaggcccgagatgggccgtcgcgcaatcagggggggtgggtccagccggacctgggctgggagccaggctctcccgcgcccccacccccacgtgtcccggcgcagccaatggcagggtccccggccggcgccctcggggcgggagacggccccctgaccgtcccaggccccctccccagggaggaggcgcagcgcgccatggtgtcctgcgcggggccgaggccggggcccgggccgggccaggccgggccatgagccgctcggggactggctgcgggcggacggcggggccgctggggcggcac

SEQ ID NO: 31873 - DNA, 443 bp, Mus musculus
  source 1..443: mol_type = other DNA
cccggccttacctctcaaggggaaaagcagcgaacctaccctcggagatgcggttcctgcaggcctctctgaggcgagaacgctcaccacccatgcgagggcagagagacagcccttggaggccgtgctgagctggaccaggcccgagagtccagttgacccagctcaccccctgggcctcggggcgggcacagctgctccatcctccgttttattagggacacattaatctataatcaaatacacctcataaaatttttattgaaaggcataatatcattacagagtgttttaaaccctttgggcgacaggggtccgcccttaaaggccagcctgcctggggcagcccgggcccaggagcctccaactgctccggggctttggatctaggtgtgacttagaagcccggcccagggctcagagcccaggagtcggagagccag

SEQ ID NO: 31874 - DNA, 416 bp, Mus musculus
  source 1..416: mol_type = other DNA
tctaaaacttgtggacttttcttttgaaaaaaaatttctttttcccttctctgccctgtgttatcaggggaaggattcgcgaatagcactctccaggagcttcccccccccccttagttctagcagaaagatctaaggagggggtagccctcggggcctggtccaatctttgcactgaagattttcacacagccccctttggaaccctagggagggatgtttccgaagccacagcgctctgaacgcctcccgccttccgctggcggggcccggtggccgggtgggggactcgagtggggcaggccggccggccaaacaagccccgggagacaggctggccggcagcagagctctgggccggttgtccgtgcttacgcggccagccggccgggctggggaacacgtgacctgcaagg

SEQ ID NO: 31875 - DNA, 528 bp, Mus musculus
  source 1..528: mol_type = other DNA
cgctcaccacccatgcgagggcagagagacagcccttggaggccgtgctgagctggaccaggcccgagagtccagttgacccagctcaccccctgggcctcggggcgggcacagctgctccatcctccgttttattagggacacattaatctataatcaaatacacctcataaaatttttattgaaaggcataatatcattacagagtgttttaaaccctttgggcgacaggggtccgcccttaaaggccagcctgcctggggcagcccgggcccaggagcctccaactgctccggggctttggatctaggtgtgacttagaagcccggcccagggctcagagcccaggagtcggagagccagcagcgcctcctgcggccgcagttaggcctgtggccgccgccgccaccagggcgggctgagccgggccaggccgggctggtgcgtggacctgggcccggcagctccacagcagcccccagtagcggactgatttactccgtcacgtgggccgcgcgaccaatggtg

SEQ ID NO: 31876 - DNA, 477 bp, Mus musculus
  source 1..477: mol_type = other DNA
cctgcagctgcctggaacggactgaggaattcaatttctccgccgcgctccacccgggaccacagcccgcccgagtctgggcgcctgggttgggacccgggagccctgcgccctgccctaggaggaaactatattcatgggcatgatttccattaaatatccgtcaagggtaaatgtacatctcatttccacagggctggattgtggctttttaatcaaaaccacttagctaggcatccaggagccttgctggaggagagaccgtctgctccgaggcctcctgggagtgaccaccccgcctggcccaaggctaaggttcggccgcgccccctctctgcggacccggggggccccccgcgagcccttggcagtgcggctttatgggccccctttaaggctggcggaggcatcccggggccggcgtgcggcgtcccgtccggcgcaggggccgcttcgccgccggcgggatccctccgc

SEQ ID NO: 31877 - DNA, 307 bp, Mus musculus
  source 1..307: mol_type = other DNA
ataagaatatcaatatatttttattggatattcatgctaatcctggacttctgcagatgacactgaaaatcacctgcagctgcctggaacggactgaggaattcaatttctccgccgcgctccacccgggaccacagcccgcccgagtctgggcgcctgggttgggacccgggagccctgcgccctgccctaggaggaaactatattcatgggcatgatttccattaaatatccgtcaagggtaaatgtacatctcatttccacagggctggattgtggctttttaatcaaaaccacttagctaggc

SEQ ID NO: 31878 - DNA, 398 bp, Mus musculus
  source 1..398: mol_type = other DNA
atggcccaccgccatgtgcagtcttatgcgcaatgcggcagattgtccctatgtgttcctgaaggaacaggaaattgccatccaaaattttggggagtgaaacaacattatgttctgcaaagattttctttttttcgaaataagggaaatattgcagtatggtgtttattggaaaatggaaaaaaaaacaaaagatctactctttcattactctgacaaatgagaaaaatgcctcacatttctcaaatatctattgggtttatcctaaaacctgtaccagattttcatttgtgacataaaataaaattcacctgaaacattattaccattttccccttaagaattagagaaatgtttttaaataattaaagcgtctttatacacaaggcccaataaaa

SEQ ID NO: 31879 - DNA, 202 bp, Mus musculus
  source 1..202: mol_type = other DNA
caaaccattcacagcctttgggatgagtggttgctcccccaccacagaaagttggagccatcttggcctaaacggccaattggcgctcgcgagctgtatgtgcaaaatccgcaaggaattgcagtaaattcctttttgtttgaagaaaatttacaacttggtaatagacctttttatgaggctggtcatgtgcaggcgccgc

SEQ ID NO: 31880 - DNA, 298 bp, Mus musculus
  source 1..298: mol_type = other DNA
gggctttgggtatgcccagcctatgtacatatcttctagaaacctcatttatccagatgggctcacactctggaagtccacacaccacagactttcagagagtcagaaatgtgtcacagggcccaggcgctgttgtcctgggtactaggaacttggctgttcaggtgcctgaggtttaggaacagcttgctctatcacaaaccctctgggtcgccgagggaaacaaggtggccttttcaggttccaaagacctcagagatggtgatcacaccacgcacgctgagcgctgagcgagctg

SEQ ID NO: 31881 - DNA, 326 bp, Mus musculus
  source 1..326: mol_type = other DNA
ggtgattagcattcacttcaaaattgctcatccagtgctaccaaaaagcagtttttgaaggaaaagtctttctttttctttcttttttttctttttttaaagggtcagagggaataaagcatgcaaagagatctttatacaaagattttacaaatctgtgcagcacatccattattttatcagagtagcaaaaaaaaaaaaaattttcacaaggtttgtgggtgggggacttcctgccattccttaggctctccctgtgatgggggccagcagtagggaagcccactcagatgtgggccttcagggacccttgagcactgagctaa

SEQ ID NO: 31882 - DNA, 357 bp, Mus musculus
  source 1..357: mol_type = other DNA
gggccagcagcccactcagatgtgggccttcagggacccttgagcactgagctaattgctttaaggctcttcagagccttactcgccagagcctcaagtcttgctgtgcaaatgcatgtggcaatctcaaaaaatctcaaaaataatttccaacttttgcgataagcaagtaagaagtagcctttgtctttcctgcttacgttgaaaagcccggggtattgatatgaattggaactatttaaatccaagggaacagttgcagtgaacctttatttagtgaataaaagtttaaagccaattataagcattccaataaactttgttttatggcttgagagttgacaagccaaaatataa

SEQ ID NO: 31883 - DNA, 364 bp, Mus musculus
  source 1..364: mol_type = other DNA
aagccttatctaaccttacctaagccacacttttaagggctggctctcacaaggcctgatggatgaatcctctgcccttatggagaggaccatagcttaccttgttttctctttggggtccaagcctgatctgaagcccgtccagtgtgtccaaactgaacagactggatgccaaatcttttgccatagcacacgccatcccatcaggtctgtgggggtggaggccatggtcttcatcttatgataacttggctcatttttcaataaggtttggaaaaattgccaggccctttcttaaagaaaggagactggaagaccctttaatggctctattccttcttctctgtgccacgcaggaaagtgg

SEQ ID NO: 31884 - DNA, 428 bp, Mus musculus
  source 1..428: mol_type = other DNA
aaacaatacttagaaatgtggacatctcataagctcggcccaggccagggcatccctctgcccctgaaatcagcccagccccagagtgcatctgggctcttgatgccctgaattgaggggccttctgtgctgctgtcggcaaagcaaaaataatgaaactttgtgatatgtttgtaaccagggaggctcggtggccgcaaacagcgcctgcctccgggtctgcagcagcagtcatagcagcagcagaagcagcagcagcgggacgaaaaaaaaactccccttcttttcttttcttttttttttttttaagaagaagaaggtccgagcagcaatatgcaccgagtgcaccatctctgaaagccaggcttggtgagatcaggtctggcagcttatataaccgaatttgtgtggtacccacatagtcacag

SEQ ID NO: 31885 - DNA, 407 bp, Mus musculus
  source 1..407: mol_type = other DNA
aagctttaattgctttaaggtacaagccagtccaaagctctgagatctgaccagtcccgccgagtcgaaagcgtgcgcagattccgtattctgatgacctcatcagaagggaaaatccaacgcgcccccgcggcccccccccccggcctaggtggtcccaggggatttctgggtcaaggaaaccaaagaggggcaagagtaacttgaccttctcagagggggtcccgagagggaccagccctgaccgctgcatcgagcccgcccttccgccggcgccgctctcccccgagctgggcggaggcccctcagccactttggctaagttggccactccagtcgggaccggccagtgcggggaaggcgccgattggctggctggcgccacgtggctgccgccgccggtatat

SEQ ID NO: 31886 - DNA, 670 bp, Mus musculus
  source 1..670: mol_type = other DNA
cacgaaggaggcgcccccccctggggcaggctccaggggccggggacacagtctgaaagggcccggggtggccgtctgcgggctccttgagatggccgctgagcaggaatgatcccccgccggagaagaccgccgaggtggcatagtggacgtgcgccccgccctcgtccgccgctctccccgcccgggactcggcggcagaggcaggtgcggcgccccgctcgtaggcgccttccagggtgcagggcgcgtaccggggcgcggcgggctgtgggaccggggactgagcggggcctgcgggaggcgacggcgtgggccgagcggtggccaggggcaggcagctcacgaaggcgccgtctccgctgcccagggggaaggccggctgcagggccacagggcgcgcgtcggcgcggcagaacttgggtgcgaagccgagcacgtcgccgcctacccctccgctgccaccgcccgcggcgcacgacacgctcatggctcgctcacgacctaggcgccgcaccctgcaggtctgcgcagctccgccttcccgctacccccgctgccctcgccgagccatggcgagcgagcggcttcatataccggcggcggcagccacgtggcgccagccagccaatcggcgccttccccgcactggccggtcccgactggagtg

SEQ ID NO: 31887 - DNA, 358 bp, Mus musculus
  source 1..358: mol_type = other DNA
agattctcagtgagagaccctatctcaaaccactgtacaagcttccctggaacccatttggctcaccaaatgatttctgaaatcaagtgtaactttataattttctaattctgtaatatttatgatttttggtcaattgtaacctatagttaaaaaaaaaaaagatgaaagattcaagggatctagcgcccttccttttactcttcttggagttgaaagattaaattatgtctcagctcacaagctggtggaattgagagacctgagtttctgggctccaaaagactctagccagagagcctgctctcttagggctctcgcaggtccggagcgcgcggggcggagcagccggaagtgc

SEQ ID NO: 31888 - DNA, 122 bp, Mus musculus
  source 1..122: mol_type = other DNA
cttaatgcccttcgaatctaactgtgataatgaccccgtggagtgagagaggagcaggccctgtctccacttatggtggctggagaggaagcagcgttctcgggaggaaacggatttttctg

SEQ ID NO: 31889 - DNA, 404 bp, Mus musculus
  source 1..404: mol_type = other DNA
tgagagtcttagaatccactcgcttgggccccgagcccagggcacgtggactcatccatctccctggggcagaggtgtttgagcggacctggggccagagggcagttggcctcttgcaaagtccgggtcccagctcagagccctaaccccgaaactggcgccacagtggcagctccgatagcagcgcacgggccggggctcccggtgtgcttgcaccaactgtttaaactgcttgcagaggactgggggggccgaaggcctcctgctcgcgctccgccccccgggaactccggccggaagccccttgccccgccctaggcctttgcggggggccctcgggccctaggtccttgttccgcccccagggggcgggggcggggcggactaaggctggcctgccactc

SEQ ID NO: 31890 - DNA, 359 bp, Mus musculus
  source 1..359: mol_type = other DNA
gactccaaagaaagtgtcttttgtatacaacagaaccacaagaaaagtactttttgccagtggagtctcaaccacacttcagagtgggccccaaatggtatttttgcagataacactttttcacgtaaaaaaaaaaaacaaccattagattgaaggctgtggtttttatacaactggaagttgtcctctcacttccacatgagtgccattcctaggggaagttcaccaggtttggaagatgccacacccataggtttggcaactggctctgcaggtacgccaggacgaggcgtggcgaggcgcggcggcgggcgtggccgaggcggggaggggcggggacagagcccgttgaagctcca

SEQ ID NO: 31891 - DNA, 233 bp, Mus musculus
  source 1..233: mol_type = other DNA
gcatttatgtattaactagctgattcatacgtgtagttttgtggcttctccttgaagaaggaaaagaccaaagccgtgtgcttcatcaattcaagcaccaatttacgttcataacagcggtcatttacgaatggtacttaaatctaaacggcccttgcttaacaacgtgtagggagtgtttaaaaacatatccagaaattgatagaaacgtgtcggtgattcgcttttatcca

SEQ ID NO: 31892 - DNA, 709 bp, Mus musculus
  source 1..709: mol_type = other DNA
aattgtttctaaaaaaaaaatagtactgttctttgaagctaataaacaactgataaatatctgattttttactgttcataattgaccttttgtagtgtttgataatataaataattttaaaatcaatgtttaattcctatcagatgtaggtattagacgacattaatcctagagtttcatctcttagtatcttcagaaagggaagtacattttattctatttgacattatcaaagtcccttctggcattaatggaatataaatattgatacgtgaagttatacttacattatttaaagttacataaagagcatctgaattttttttatggagagtgctccttgctgggctagtgttcttttgtttttaataattatcagtctatctttcaaaacatcaaaaaaattaggctttgaaagtttgaaacgcacaaaaccaccaaattcttgcaatgcaacaacagctttcaattatgctgttcctataataaaatgccttttttcttccagaaacgggttaatatttttacaggggttgtgtagatatatgaagcatctatattcatacacatacagtcatccctttaggtagagactgtaaagtgtacattattcaaaatatgaggatttcatgtttaagaaaaacacagaagaatatatacatatattcttctactttatgttcaggaacttagtgaacttcgtttccgt

SEQ ID NO: 31893 - DNA, 405 bp, Mus musculus
  source 1..405: mol_type = other DNA
ctctgtgtgtcttggcgcctttgtgcagacagaaaaagaccaatggggttcagagaagtcccagataaacgaactagtccgttcagtttttactgggatatcccatctgccagaaatcggatgtttgagccttttgagagtccactaggtcttgaacctaaattcctactggacctgttctaatagaaatgcccaagtctatgatcgcttttatagacaggcatgtacacagggattcactcagactaaaaagccaggcgtggtggcgcacgcctttaatccatgtgcatggtttacatattatattcaaaactgtgactttcccagttaaagactgattgttaactctgagaactgtgcccctaaagctgagagtgttaacaattcttgaaaggaaaaagcccc

SEQ ID NO: 31894 - DNA, 600 bp, Mus musculus
  source 1..600: mol_type = other DNA
tgttagtgcaatgaaatttacttagttgatatattagtcttcaaacattacactaataaaaatatatactctatgaacgttttctaggtttttgtctctgatatttattcatgaccaagtgaaaatttttaggctgtcatatatgagctaatggcaaagggtagtgtaggtaagcccttagcttagcctgtggcacacacacaagaaatgatagtttccttcagtttgaatgtgtttgactgtcagacaaaattcacagtggtttcagtcatcatttggcaactgtgactatttcaattaacatacaattgcttataattaagaatgattaaaatagttaaattattgataatgcctgtcttaatgcttttgagacaaggactcacttgcctcagtcctctgaggtattttgcaacagtttaagtttgttgtatttaaaacttggtactcttagttttgcttagaataagcattttattaatactgtagccaccaaatattcttggaccattcaaagactttgtacacactgtaagtgtacagggacagtcggaggacccgcagcctctgcgagagttgggagtcctgcgggatctcaca

SEQ ID NO: 31895 - DNA, 270 bp, Mus musculus
  source 1..270: mol_type = other DNA
gaagactgtgttttcaccaaaatttcagacaagccctggctgtcctggaactcactttgtagaccaggctggccttagttttattacttatcaacttatcacttggaagcagatctactgagagtctctctttcaaatgtagcaatctgattacaggcttagtagagccacagggcaaagtggtttgcataaacccatttgctgagtccaccgtggcaccagggggcgctgcagaatgttgaagcccgcagacctcactgcgggacgcac

SEQ ID NO: 31896 - DNA, 242 bp, Mus musculus
  source 1..242: mol_type = other DNA
gcattacaaaatacaacacatggaatagatttatttttggcttccacactttcgaataattaaaccaaaaaatatagattttgtttatattcacttactttaccaggaactgggagtattaaagggctgcctttccttaaagtaaacatttgttttcgagagacgatacctgggtcttctcaggagattcatgagctgtcgtgtgtcctcactgagagcactcgctgtgtcacctgaagggt

SEQ ID NO: 31897 - DNA, 443 bp, Mus musculus
  source 1..443: mol_type = other DNA
tcagagctatgtcagagcagttatccctttacagaagagatcaatctggtcttgcatgccagggactttaaagaagtgtctctcccggactgagagttcgcagatttattggcgccgagggccaggggcttggtctcgcagagcggaggccaccaggctgcagttctccggtgaagccgctccatggccggagcgctgcagcccagcgctcccgccgctgcaggactggacacgcggggggcctatctctcccgcggattcccgtggacgccaggcagggaccagatgggcgctggatcccgcacgagggacaccatggagcccgcgggaacgatcggggctggcgggtgttccggagccgggggcggggagcccggagcgccgccccgccagcgcgccccgcccgtgggagaggaggggctgcggcgcggaggaccactgga

SEQ ID NO: 31898 - DNA, 313 bp, Mus musculus
  source 1..313: mol_type = other DNA
ttggggatcccacatgttcccaaagcagaggttctaaacctgtgggttgcaaagcagcgggcccgccagacagcagcgggcccagggatccagggctcttaaagccactggctgccccttagctgacgctctcgggtctcaaattttcttagtaatttaccattcgaatttttaaatctttcttaaagctaggctcgtagcctactactagctttctcgctgagaaggaagccacctccctttaaggagggcggagccaggtcgcggggccgggctctggggcagagagggggtgtggccggctcttccgcgc

SEQ ID NO: 31899 - DNA, 555 bp, Mus musculus
  source 1..555: mol_type = other DNA
ttttggttgtatgagagcccaaaccaaattgaattctactggggcttaggttaagcctattctcgcttttatttctgtataatatacacgggttacaatccaataatgctattacacttatgtgttaatgaatatcgtattgtaacaaccactaggtttgtttctagaatttaatttaatggattcacaaaatttccttgaaaataagccaaaactttatgtaactattttataggtagagtaatgagttagaaccttccatagtagtttttaatatgtaatgtaatagtaactaaaaagccttcaagaccctatagagatctgcgaattgatatgtggtactaaacatatagtttcacaagcatacaaaaagagacatgcctgtgttaggatctgtacactgtgaagcttcaaaaagtacttttctgctgccaaaattcacctgctggactcatatccaggctaagctgtgagcctccttccaactggctcattgctggggggaaagcccttcacactacctattattcattacccgagttcatgaagggaggt

SEQ ID NO: 31900 - DNA, 444 bp, Mus musculus
  source 1..444: mol_type = other DNA
gactggactaatctctgttgtctattagccagctgtgaaattggaacaaaatgttcaatagtcagttttcctgtctgatgtgaatgaattctcatgggagaaaaaaaaaaaaaaaaagcttttctctgctaaaggccttcacctcaaggggccgggcatgggctgctgaagccctggagacactccactgtgtgttctgagagtctcctggctgcatatcaatttcttggcccaacattttaatattttaaaaatactgtatttaggatcctacagcttttctatggccaaatgggtcagtgtagcatttaaaaatttaaaaccaagccaagtggagcccataaaattttgcagcatctccgtgcggtgctattctagccagagtacaaccggcggcgatttgctggtgcgagagggggcggggcctctcgtagccccgccttg

SEQ ID NO: 31901 - DNA, 524 bp, Mus musculus
  source 1..524: mol_type = other DNA
aaactttctaaatctaaaagttgtcaagtgtgtaaaaaaaaaattaagagaaatccttttaaaaacaaaacaaaaataggatgcacgataccttcttaacattttttgtgtgtgtgtgtgtgtgagagagagagagagagaaggcagccttattaaaggcatacatcgtgatgtatgacaggcccccaggacagtactggtcaagctcccggaggcaagcgctttacttggaaagctaactactttcttaaaagaaggatgtagcccaggctggcctttggtccttacagggccttgaggaggcgatttcgaaggaggcgaggccttcggcagccgccttgtgcaggatgccccgggagttggtctgcggactggagatgtccggatgcggggcagccggggagcgggggaccgcggagccgccccacgagggcgcgcggcgcagcctcgggcacgcggccgtcccgcagccccgccgccggggaggggtttcgtgggccgagccggcccctttcatccaggaa

SEQ ID NO: 31902 - DNA, 500 bp, Mus musculus
  source 1..500: mol_type = other DNA
agaagtgtctttcctttatcaatgaattttacaaatccctgggttgagccacaacaaaggccatttgatatgatcttttgtatttgaactatctctggcttaaaattaaattcactcctaaaatagtaagtatatcactttcttacaccaagtaaaagaaccctatggctggtttaaactcccatgggtattggtaaatactataccgaagccttaagcagactttgcctttgggtgttacataactcactgacattggcatagctattctatagaacaaacaggacaaatggattctcttcaaatgctacgtttatcgaaactgagtcttcagagaagatgaaacctatgtgtgatataaattacttctacaaatgtcaaaggtcgattttaaaatacaattctatttcctcggtaaagcctcttctgaaaggctaaatttagcactgccaatcagaggaacaggtggtctgtgaatcacagagccgggctgtaagggc

SEQ ID NO: 31903 - DNA, 412 bp, Mus musculus
  source 1..412: mol_type = other DNA
ctgacctctgacctaaacttcagtgctccaacagctgctgctctgacagaggcagagcttctagcaataggattaatctgtgagcctcttgaagctagttgaaaatttttttttctccaggtagaaatggggatacaaagaaaacacatttcttagagttaacaagaagcatggaagtgctgagctttctcacagctgtttgctggctgaattggaaaatactgttcagaatgggtgagttgttttaaaaatacttaactcctcatttagtagttttctttgcacgaagaagacttgaaaagactgaatggcaaaactaatttgggttagctatcagacatcagctgataggcaaagagctcaaagctgtccctcgagtttcagataatggttcaaataactggcactttct

SEQ ID NO: 31904 - DNA, 430 bp, Mus musculus
  source 1..430: mol_type = other DNA
ctttgaccaagtactcttttttcagccaagcagcttaaacagagaaagtggccttgtgcatcctatggaagaccaggcatagcgaccatgtggccattgaactgaattcaggaaatgagaattttggatcatccaatagaaagattctggaatcccaaccagcttttgcccggcccgggtagcttccaccacccacgcggtcaagctctacggggtggggaccacaggacgtcaatcccaagtgccccgcccccttccgcgccgggcggggtctccgcgcggccgccacgggcgcacgcgaggtcgcgcggacagggccaggccgcgggtgccgggaggtggccgggccacccgcgccgccgccccccagcctgacgcacggagggccgggcagcgatttgccgcgggcccgccgcccgggccgctccgc

SEQ ID NO: 31905 - DNA, 221 bp, Mus musculus
  source 1..221: mol_type = other DNA
atgtcccataggtagccagcagcctagctagatagccagggtatctgtcaagatattttcatcagcatactgcaggactctcggatccagtcacagtcataatcaatgtgtgtgtgtgtgtgtttgaaccaatagttctataactaaatatatattttctaattaagacacagtcaatatagccaatgagtggggctaaaattagtccaccaaatcttgaa

SEQ ID NO: 31906 - DNA, 438 bp, Mus musculus
  source 1..438: mol_type = other DNA
gaacccagcttctaagagctaatgttaaaactcactgttttgaggtcatgactgtgcaaacctgacatggagagtagatactgtatcattttataattcccccacataactgaaattagggttttgagttggaatacatcactgctaatgttgtcaacatcaaatcgtcatcagctttagccttttttaattatatgctctgaatctttacttaaaacctaaatttccatgggaaacgaagcactttttttctaccaaatagcttgtaaataaactgttctctgctaacagaatacaaattgggtctatttgggaacaggttctgctcagaaataaaaggcaaatttaaattgtagatctgggatacaaagaattccaaatcgtctctgatttatcttgccacagttacaataaagaaagtgacttgtcagtctttta

SEQ ID NO: 31907 - DNA, 613 bp, Mus musculus
  source 1..613: mol_type = other DNA
ggtgctggcgcctgcgctgctccttcggaaggctccagaatgcagtgagtgtgcatttatggcctttgtgtcaatcatctaagacaagatccaaagaaaaatattttaaagtcgagtcatctgtttttttttttaatttcttcccgaagaagtcatcttagaagactgagcagaagatggcttacaccgggggaacccctgacacggtttagtttttgaaacttcaataggagcaggcgagcccctcccctgcgcacgagcctcgcaggtccttgctgggctgcgaagccctgggtccccgcggaggctgatctgtgtcgcccgccagccgggagctgcacgcgggggcagagcccatacttggtggcctccacacgtcggcccccgcgcgcgcgaggtttgcgtcccgccttggggaatccccccacccccgacccctgctggaggctgaggggcgcgtgggacccggtgaccaggcggccttccaggctgcgccgcccccggggcgtctccacggcgttccccaccccagccgcagcatcccgcgccgagcgcctcgcaggtcctcacgcctgtccccgtggcccgcgcggactcggcacacgcccctcac

SEQ ID NO: 31908 - DNA, 418 bp, Mus musculus
  source 1..418: mol_type = other DNA
agggtttctctgtatagccctggctgtcctggaactcactttgtagaccaggctggcctcggggattaaaggcatgtgccaccacgccaggcctgtccaaaatatttggagtaaaggcagacaccaaacatatcatttataatcagatagtcttccattcacttgaatttaaaatcttggaacttaatagatactaaacattttgtagacttttggtaaagcttctgtcaaaaatctgaaagggatcgctactttttttattattttcaggcaaggtattatatagtaagcctctgcggtagtttcatagtatgtatcttagtgttaagcttttacactgaaaaaaaaaaaaaagaaatactttttaggcgctgccagagcaaggtgttactaccgcattatcattaatcgtatcacc

SEQ ID NO: 31909 - DNA, 258 bp, Mus musculus
  source 1..258: mol_type = other DNA
ctacttcctggagggatattctgactctcgtttgcaaccctgaagtctttcagcagagtttgaaatttttctgtaaggaaagatttttttttgtactaaaccaggttttgaaacctagaatgcgaattttaaaaaatatttgttctagaaaaccatatatgttcccacaggttcaaccccgcaggaatcatcacttcttgaaatgtaaatattactgtaagaagcaacttgttaaacccttgcaccaaagggcctttc

SEQ ID NO: 31910 - DNA, 464 bp, Mus musculus
  source 1..464: mol_type = other DNA
gttttctgcatgttagctatcacaaataacgaacgttgtttgtacaggtacactaaaattattccaaaaagtactctactggagaatttgtcattcatatatatatgtatgtacatatacatatatatatatacacacacatatatatatcttatactacatagttatatgttatatatcatatattatataacacacatatataacatcatatataacatcatatataatatcatatatatgttttgctctcagtacgaatcatgaccctgtcatatatataaatatgaatctttggatataccacaccttattcctacaatgtgaaacctatgttagaaatggcaatagatttgcccagaggcatagattttctcatatatgtttatgcaattttatatactgaatcgtagataaatagactgaggcttttttttttaatgaaaagattagtttaagtttag

SEQ ID NO: 31911 - DNA, 551 bp, Mus musculus
  source 1..551: mol_type = other DNA
agagtcagtccacatcttgagcgggacatttaaaacacagtttgggattttgtaagtttccaaagcgtccagagggcagtccccttttggcagcgccacggggcctctcggggcaccggggaagccccagtcacgcgccagggttctcgctcaggtacgggattcccggggtaaccgccggcccctaacctcaggggcgggtagtccactgggcagcgtcggcccggaggcgggctcaggccggaagccacccgcggccccgcgagaccgcgcccccgcccccgcctcctcgtcctcctcttccagtacgagctcggcggccaagggcgcaggggccagcccgccggtccccgccgcgctctttgtcccggccgcgcgcgggcggacgcgtgcgcatctgcccccccgccccccaggcgcagcgggagcgcgctcgcgcgggggcgcgcgggagccgctcgcgccccctccgccaggcaagcagcgagcacgcgcgccgccgcgcccgcccctcccccgcccgcccgctcgctcggaacttgctgactgcg

SEQ ID NO: 31912 - DNA, 346 bp, Mus musculus
  source 1..346: mol_type = other DNA
taagtgaggcaagtcacagaatttccttagcttgcctatagactctatttaagagtaaaaggctgcaggccttgtaatttctgtatgctacacagcacatattggccactgggactggccctggaggccagtcacttggtgaagtcccgcaaggcatcaagccttagccaacgggccccagaagccactaggtcccctagcgccccctacagctgctgcggggcggggatggaggccaggctgtgagccactgcaccacaccccagatcctaggagcacccggcccctggctccggggccacagaaacggggcgtgggccagagcctgtgccagcaccggacacgc

SEQ ID NO: 31913 - DNA, 454 bp, Mus musculus
  source 1..454: mol_type = other DNA
cagaggttttttaccatgtatctctttctaagcagcaaaaaaaaaaaaatggaaagttctggaagacctgactttcagatcccgaaaatggagaaattaaattcagtttttataacgccaactgcatggatactgtctgtttacaaactagatctctacacgtgtatggaagcttgaagccagctcctggctctggccgcaaaggagacatttgcctgctcagttcctggttaagagacagcaacagtattctcatcagatgcagaatctcctcacaactttacaaagctgcttcagtagcttgtaaattatgtaaatagcctaattgtcatccgataaatcagggatccgttattgcttgcctgaatcaatttttctaatttctgaaagtaagagttttctaactttggaatgtttcccatttttaattgaactgtggttggctagtggaagc

SEQ ID NO: 31914 - DNA, 251 bp, Mus musculus
  source 1..251: mol_type = other DNA
caaaaactagctttagacacaaaattctagggtttagagttgaagtttttatatgaaataaacaaagcctctgcaagggaaggacccttcagtgcacctctgagtggttcgcagtcttcaggctaggacatagactcagttcttctggccacaaaggggccggtcacgtggttcccggctcttggctggaccttcaggacgcttgcggggcgcagggacctgctcgttgctcagctcacggccccgcccgc

SEQ ID NO: 31915 - DNA, 427 bp, Mus musculus
  source 1..427: mol_type = other DNA
gggcccatatggtacttgctggagcagcgtagttgaagctgaatgcaccccacttctaatgcaaatcattagaactgttactgagaaactgaagaatatttctgtgatgctctttgtgtttgaaacgtgtttgaactacaaaagaaaagtcagtattggctgatccctgactccgattccaggagtagagtttaaaacgttacagagatgcgtgctctgagctgccagctccactggcaggcaagagttaagaactcttcctgacgcctgtaatactaagtgaagttacttaccatttgcaaagaaaataacaattcatttcatatgctatcttaattgcctcagagcagacctgtgattaggttattgctggtaaactgacctgacagcaggacattacttatgtaagccgctcacagcttagcta

SEQ ID NO: 31916 - DNA, 358 bp, Mus musculus
  source 1..358: mol_type = other DNA
gctgtcttaataaaaaaaccccagaggagctagagccccagagtcagacttaagacttgcactgtgcagtccaccatttctgtcttggtttttgtaaacgaaattctgcgatagcacagctgtttggattatctctgaagttgtgggtagtagcttgggaacacacttcaccagatgtgtgtgtttccaagtaagcagaagccagtgactttctgggaaatctttacatttttccacctctaagaaaaaacaaacgccttgtatattttatcagcatgctaatcaattgaggaaggataaattttagttttcagtcttaaacttactgcattgtttatttagtaagaaaacagacaga

SEQ ID NO: 31917 - DNA, 438 bp, Mus musculus
  source 1..438: mol_type = other DNA
aaataaaaatctttcgattctaggatactcagaaatctcaaagagtgactgtgaacccacaggctgggttgaacaattcatctttttaatgaccatcttgcaatgaggaaatttcagggaattaatgccataatcttgaacctgaaattcatcccaaaatttaaggcctttcagatgattcaataaggccatccacattttgaagggtaatttactttgcttcatcttcacatgaaaaaagagaaccttcagttgggtgactagagaagcatctgctgctgttctgtatacaatgtcacactaagtataggatatatagcctttaagtccccagtaccaattagctgtagaaaaacaggtaatggttatgtttcaccctgctgataagaacagagagaggagaaagaaaggaatgtgatgacatcacatgattacacc

SEQ ID NO: 31918 - DNA, 306 bp, Mus musculus
  source 1..306: mol_type = other DNA
agcaacagatattatctgcagtttggcagacaatcattttttaatcctcaaaggattcacagagcgggctgaacgcagctgctgtgttttccctggttaaattggcagttacccactgtgtattggctgcatttattcaggaagtgtgctgtatttttaagtgcgacaaaagccttggtatttaaacaggcacattcagcataactgtagaaattctgatgtgcttctgtgcacggaacagttgcagatgagctgcttggcaaatagcctgctcacatgtgtggattgctcccgtgaggtcagacg

SEQ ID NO: 31919 - DNA, 339 bp, Mus musculus
  source 1..339: mol_type = other DNA
tttctttgaaaaatgctctaccattttgctcttttgcatgactcttaaaaaagaaaaaaaaaaagttcctaacatagctggccaagtagggcaaggctctggaaactcattaaagttaaagtttttcattctggatcatctcttccaagacatcaaggttcgtggagattatgtctgcaacacacaacgtgctcaaatcaagatggtaaacactgagttgaattggtatactagtaaatgtaatgataattctaaatttatttttcaatcctgttctacagaagatattgccaagtgagaatagctatctaaaatctataaataattcttaaaagtcaa

SEQ ID NO: 31920 - DNA, 400 bp, Mus musculus
  source 1..400: mol_type = other DNA
aaccagtactaggaaaatatatgtcaaaaattattcttcaagaatttgtgctaagcagaagtctcttcgatatttaaatgtgatacatttccattttttttaaagtaagttatttttatagtctataaagtagtcattattttggtcaatttttaaaatttgtttaaaaggcattataataaaataaaaaattagcatcataaccaattagttctgtttctttgaaaaatgctctaccattttgctcttttgcatgactcttaaaaaagaaaaaaaaaaagttcctaacatagctggccaagtagggcaaggctctggaaactcattaaagttaaagtttttcattctggatcatctcttccaagacatcaaggttcgtggagattatgtctgcaacaca

SEQ ID NO: 31921 - DNA, 329 bp, Mus musculus
  source 1..329: mol_type = other DNA
tcaggagttgcaaactatgtaagatgcaactccagtcctttacaataaagctttaagaagcttccttaccatctaaaaatataagttgaaatgtattcatgtaacaaaaacctattagtttctatgataatcatatgttggtttagcaacaggtcctacagccataaaattaacttatttcaaagtgtcatgactcaaacactgcagtttctgtaacaaatccttcatatttgttgatacataaaagttgtaaacaattttatttctagaaaactttaattattctgtccacccgggttttcccgtcgccctggcaacgggaccggaaa

SEQ ID NO: 31922 - DNA, 390 bp, Mus musculus
  source 1..390: mol_type = other DNA
tatgataatcatatgttggtttagcaacaggtcctacagccataaaattaacttatttcaaagtgtcatgactcaaacactgcagtttctgtaacaaatccttcatatttgttgatacataaaagttgtaaacaattttatttctagaaaactttaattattctgtccacccgggttttcccgtcgccctggcaacgggaccggaaaaggcgggcttcacacccttccttccgccagcggttgactacggccgcaagatgcctgtgggccgcgctgcgggatgcttccctatctctggctaggagcgggacccgcagccaccgccgcagccacacagaaggccacgtcagcctcggcggtcggccaatgccccgcgccaggccccgcccc

SEQ ID NO: 31923 - DNA, 702 bp, Mus musculus
  source 1..702: mol_type = other DNA
aagagcaaaaggcagccttctggtgccctaagaagtaattttgtctcttttaaagatatttacctaaatatctaaagatatgttttccactttgttttactaggtatatattaacttaatatggttgtgttaaatggattcataagaattgttttcatgtaactatgttaagaaagcatgggataaatgcatactgctttatattcttaaaatctagtgggatggtaaaatctagtaagattattggggctattaaatattccttataaatccttgaaatgctacttgttttttagaaatcacatttacagaatcataaaagttttattaagctacaaattttaagattgtctacatcaattttataagaatttccttcaaaaacagattttagagcaaaattaaaattttatttcaatttttatagtcaaggtaataaaaataaaaggacacaaaatactttgttaatcaaaatactactaaataatgtaccttaaaaaaaagaaattcacagatgaactactgtgaatttggtttccatattttaatataaaatgtaaatttaagatttttaaaatatttattttttgattatgtaacttaattagaagtttgtgatctatgtaaaatagtgtaggaaggggagtttgcaaagtttctgttaaatttccttttcacaatgaaattgcaggggtacaatct

SEQ ID NO: 31924 - DNA, 190 bp, Mus musculus
  source 1..190: mol_type = other DNA
gggaagggaggaatcacaccatttccacgtttcgacatgacatttaaagtgactcagctcctgtcgggagctgcctggcgcagctgcgagccaaggcgctgacctcctctgagctcctctggccgctcgcaggatcttcccgaccctgcaggacttggcatgtgctaaggctgatgtctctgccagagcg

SEQ ID NO: 31925 - DNA, 440 bp, Mus musculus
  source 1..440: mol_type = other DNA
gactctgtagaccaggctggcctcgaactcagtgattgatttaaattcatgaatacgattcacatggagacacaatttgttccagtttgaaaccctctcggaacaaaatttgtcttccgacctccttcctccgaagccagctggaggcgggagcgagcaccgggaggtggcgaggcgctgcccgccgtgcggagcacacatctgccgcgttctccctgggctcggagccgccaggctcctctcgggaacacaccgtccccgtccccacggcggtgcgggccctggggcgtggggagcggggggggaagtccaggaccgcggcttgggggtccccggagcggaggaggcggggcggggcgctccggaccccgggctccggccgcagttctcccggcggcctcgcgggggcgccggcgcggccgatcaggtgaccgagcgcc

SEQ ID NO: 31926 - DNA, 617 bp, Mus musculus
  source 1..617: mol_type = other DNA
acagttttcatgaagccattaaccttgtcgtatgtcttaatataatactaattatttgtcctcgctccaaatatttgaacacttggactcataattccaactcattttgaaggggcacaaaaattcagcccataaactttgtttcgaaagcaacaaaatgtttgtatgcagtgctgaagaatacatttttctaaatcttaacgttatgcactgtacttaaatgatcttaaaattccattttattaagggttaataaggaaaatttcagttgaaatcttgcagtccccgtttgcaaaaagcaatcgtcttttgtaagcagaattggtaaatgtttatgcttttcccaactacgtatagacttattaccatttactctgtataaggcgttgaaaagaaggaatacacatatattttaacccttgctagtctgtagaaacatatacttaaaacaactttttaatgtagattctattcagtctatctagtcaatgtttcttctagaactaacggcaggggcagcccctggggccttaggcttttgtgagtgagccacaggagactcacactcgtgaggtcagctgctgtcatctccggcatccaatcggcgcccgtttctt

SEQ ID NO: 31927 - DNA, 113 bp, Mus musculus
  source 1..113: mol_type = other DNA
ttcccacgcttcggttttaaaaaagaaaaactcgggaagggaggaatcacaccatttccacgtttcgacatgacatttaaagtgactcagctcctgtcgggagctgcctggcg

SEQ ID NO: 31928 - DNA, 350 bp, Mus musculus
  source 1..350: mol_type = other DNA
gtatgttaacacacacataagcacatgaatatacatactcccatgggcaggatgcctgtggctccagggctttccttacatgggcagtggtgacccagcctggtgtacagagtgaaaaacatattttgagaaaaaaaggcttaaagttgaaagaaaggaatatatagtttcattaaatgtactttaataggtgctagggaagttgatttttaacaacaacatattaggaggctttccaagatcttgacaaggtttctctgtatagccctggctgtcctggatctgtagaccaggctggcctggaaaatggctgaagcgccctcagcctccgcagagagctgagcggctct

SEQ ID NO: 31929 - DNA, 461 bp, Mus musculus
  source 1..461: mol_type = other DNA
aaatgtactttaatgggaagtttttaacaacaacatattaggaggctttccaagatcttgacaaggtttctctgtatagccctggctgtcctggatctgtagaccaggctggcctggaaaatggctgaagcgccctcagcctccgcagagagctgagcggctcttaagagtttccgccatttttgaaaactgggagagcggccgttgcgatggcagcgtttgcggtggatccccaggcgcccacgttgggtgagtggaccgcggctttcccggcggcacagccagcgcgctgttgacccggaggtgtcacacgccacggaggctgtggccggtgacatctgggcggtggtacccgggaacccggcacggcgcccggctgcactgtggtcacctgcccggtcgctgtagtaaccggttgccgctgggccaccttctaaagaattatccccattatttgttgg

SEQ ID NO: 31930 - DNA, 548 bp, Mus musculus
  source 1..548: mol_type = other DNA
ctggcatgggagctcctggcagcggcttcttttgccgcaaagcatccttttcctccccaagctcttagcacatagcatttgtgatatgtacctggcacctgccccgattcgctgcaattggaagcggatggcttgggtactaaattattaatttatttatttcccctgcagaagctgcggacttgtaaccggccgtcgcctcccggcccctggcggtcgcgacgcactcccactcgtggccaggctggcgcggccgtgggtcccggcggcgggggaggcggggtgacagatgtactcctctgacagctctcagtatcagcccagtggctccctgccattggctcagtgcgatggacccctgccagcggcagcgactgcgagtgcgggcgcccggcgcgggggatgctgcgaccgctgcctctgccgcgcgggcggctcccgctgcccggctgcgccctaccgcgcgggctctgaccgctcccgcccggtcccgcccggcccggccccccttgtggctgcatcctccccaggggctccaccaggcgagc

SEQ ID NO: 31931 - DNA, 482 bp, Mus musculus
  source 1..482: mol_type = other DNA
gttttctgcttatgaaattgttgaaaaactaataactcccttctctggaaggatgattcttctgcaaaagaacagccattcattgtgtgcttttttaaagtcagtatttggctgaataaaaaatagtagattcatttgcatatcaaaagccatacttttggtttagtctacaatataaacagagtaacagttaaccatgtgtgtgtaaagtcattatggaatttaccaaacacttaaactaagctagtttgacatagtaaaatagtgatttttttttttccgacttcatactgaaggtgctgcattgcaaccctgtgattactcaagatggtactgtccagtgctaactagatctagaactctctacgccaggggtcccccctcccggctcggcgcagccggagcgcacgcgcagctccacttccgggcgcctcgcctcgcgccccacagtgcatagcggcgccgtgctgtcgcaaaggcca

SEQ ID NO: 31932 - DNA, 397 bp, Mus musculus
  source 1..397: mol_type = other DNA
tgtaggcctggccagcctggaatttgctaaaccaaaacaaaacaaaaaagacttattttgtgtgtatgggtgtgacccacgtacatgcctgatacacacagcttgaagtcttactttgccttgcaaaagctttccggaggaaccagggaacggggtgccagtccccggcttgcagggcttcggctggaggcgcgctgccactgcccccctggtcctttggatctgggccgcagtcccgggacagcctcggaggaccggccgccagcgcgcacggaagtgcgcccggccttctcctgtgggaggccaccgtgagcgcgacctctttcggcggggcggcccggcctggccggctcctcctcctccccggcctcctcccccagtccgggctgctcacggt

SEQ ID NO: 31933 - DNA, 387 bp, Mus musculus
  source 1..387: mol_type = other DNA
acagactttacttaattcaactcgtaaaacgcacagagaactcctagtttattatttgttaaataagacttttatgagacagggtctttctctatagtccctggctgtcctagaactccctatgtagaacaaagttggtctcaaattgtaattaggaataatttatgatgaagaaagaaattctcatttaagcagaaaaaacagtttatcttggaacctttaccacagttgtctgattgctttagaaggaaattaatgtgccacgtaaagattaagggccagaaactctttcccagggcccaggcccccgctcgcccctcccggcggtcacgtgcgcgaggatgcgaaagcgggctcgccatcctcttgccggcccgctcctcctcc

SEQ ID NO: 31934 - DNA, 584 bp, Mus musculus
  source 1..584: mol_type = other DNA
aaatatgttgattcaaagtttaaacagacaaattatattattttatccatcctttccagacatttgatgcaaagagttatgattattgccaaatctcataatttatcatattatataaaactaacaagtatatttcaggtttataggctttttttcctgatcatacgcaatgatttcttactttatgatataattatgtttagagggaaaacttttttttaaattgaagttcatttattgtatgaaattatttcatagtatcatgttaaactaaagccacctttccttgaaggttattttgaggtacaactagtataatgtttagattatataaaatgatataattatgtcagatatttaaaagtatgtacaatgatttcatactctatacacagtctggctttacaggatcatcttctcatgcaaaactggttgtggagttgcatcagatattagtgctcaaaattgagtccgaattagtaattctgatgctcaaaattccatgcacatttaagaaaaaaagatgtgactgataaattgttccttcttgtcagagtgagaagggagttgctgctcctgggtaa

SEQ ID NO: 31935 - DNA, 414 bp, Mus musculus
  source 1..414: mol_type = other DNA
aactgttagttcttcattacttaataagaaagcaaaacaaaatagttttgttcaaaccctggacctgaggttgataagataggatcaatgcattccttcttcttcagtttcttaaaaagaatccagccacatggattcagtaaccatgactcaaactattgactaatattttaggatagctctcaacttggaataacaaagttcagaaacaattttactccttaaaatagtgctttatcaattttgagggtgtggatattgacagcacatccaatatattgcatgctgtggtgagtttttttttttttattatgaaagagaaattcacagaacttgacctcaggtttcaaagtctaagcttggacttcggaaatttctccaccgttaccgcagcaaccgcgctgcacgctgttg

SEQ ID NO: 31936 - DNA, 277 bp, Mus musculus
  source 1..277: mol_type = other DNA
gtttgctctcacactgaaatctgtttgtcagcgaggcaaagagcttgcctgtctcagctggagacctgagctctggaaaaggcaaggccttacatcaccccagaggtctgagggtaaatttgtagaccaaatggcctctgggccaattagagattttcccgtggaacttacagtgtccacagtttgggcaggacccaggcctcgggtgagcctggggcagtgctttgctcctcaacaaggtcaagacctgatgaggacatgtcacatcacagtttca

SEQ ID NO: 31937 - DNA, 289 bp, Mus musculus
  source 1..289: mol_type = other DNA
cagctgtacaatttgtttaaaactcacaggaagaatttacttcctgtctgaaagggaaaaatatgggtggggaacaagctggtcatgccccccccccccgcatagtaggcaagtgttctatcctgaacattcaggatgttctacattcaggctgtgctacgtctcacctggttaccaaagccataagaaacagttaccatcaagtttatgtttagttttttctctgagatttgaaaatacacagtggggccagttgtggagtggcactgactgcccagacactcgatgc

SEQ ID NO: 31938 - DNA, 275 bp, Mus musculus
  source 1..275: mol_type = other DNA
aattggtttgagatggggcctagagccccagaaacaattcatctgtttctgatacatcaacaaaaagaccttttgtgtgaaaagaggccttccggtgcaacagttgtggcagtgggaccagtctcggttttactttgtaaccaaaatagtctgtttacagtcctctaataataattttgaattcaaatgttccattgcggctgatcaagttaagactctctgcttcgtgaccagagaggcagtccctcttctacaacccttgtggacaatggaag

SEQ ID NO: 31939 - DNA, 446 bp, Mus musculus
  source 1..446: mol_type = other DNA
accctataactcagaagtcggaggcatggggtttttaaactttaaaggaattcgtaggaaaacccctataatattttatttaggtcaaataaaaaaggcaggtaattttgggttgactaaacaatagcattctcttaattattttaacgatgatattcttaactacaaacccatatctgcttccttttagtttagagaagaaaggctaacaaactattaagaagtctaagcatttattttctccattagcttttaattcaattaagccaaaacaatgaaattgagtttgtctcagataacttcctttgggaaaacgctttggggaagagtaaagaaagtaagctcttttctgttttcccacccagataggtagggagtctccgctttaaatatacatataatatatatgtataaaacttccttaatttcctataataaagtagggc

SEQ ID NO: 31940 - DNA, 352 bp, Mus musculus
  source 1..352: mol_type = other DNA
gtcctagaaatcattatggagactatggcctggaagtcagagatctgcctgcctgccagcctgacttacagagtgcattccaggacagccggggctacacagagaaaccctgtaaactcattccttgaaaaaacaatttttttaaatcattgtttttagtaccatcactgaaaagcttgtagtcagaatctgatctgagattcaggttctgaacctgtctcttcttagaaaatacctatcaagcagaaacgtatgtttggttttttttctccagccctgtcctccatgtgctctgggccaaggcagatcctcgtctgattggctcgcccaggagcggccgtccgaattccgg

SEQ ID NO: 31941 - DNA, 363 bp, Mus musculus
  source 1..363: mol_type = other DNA
tagtgcaacacataaaaggcttgtatgtgttatcatttaaggtttcccaattaaaagccttcaaccatgattttcatcattggaaatagtgaagaagaaagccccacggctggacagctgttctcttgtttgtttgtttttttaatcctaaaattgaatatcaaacccaggtcaacttcctttttaaggttgtggatgagggctcgggttcaaatacacttaaccggtccgtttttgtttcaccgcatggagatgtggagtaaagaattctcttacaatccttgggtaggaggtatagataccgaaaacccccagccaaaggaggctttcaatgttggtttttgaagggcccgccttcagatc

SEQ ID NO: 31942 - DNA, 343 bp, Mus musculus
  source 1..343: mol_type = other DNA
acaagtttgtgacagactttaaactaaaatcttaagtgtctccagatctaaacaacggctcacgtttttaagttatcccttagggttgtgatcaggtagaaggggccacttccagccgtcgacttatccgctcctgcgggggccgaggttgccgtcgagggcggggctgcgcctggaccacctcccggaggaggagggggtggcgggggaggcccaaagcctagggcgctccaaacagtgccgtgacactctgcgcgtactttcacagggtaccaccctcctaagaatagactatttaattcattttctgatctattatagcatccaataagagatctacatc

SEQ ID NO: 31943 - DNA, 359 bp, Mus musculus
  source 1..359: mol_type = other DNA
gtctatcagagaattgatagacagcactttctgaacgctgcgtttccttactgtgatcacttcgttaaaaattaaacaaaaaaaatttaatggtatttctactattggtagaatactgttcatctgtgatggaaaatctgtttctccatcttaaacacggaggttatgactagataacggcctaggctctgctgctcccagattttcacatgcacctgcatcacccagtcaaagtcacagttgttgcgtggggagaccattgcaaatccctcgatgtagatctcttattggatgctataatagatcagaaaatgaattaaatagtctattcttaggagggtggtaccctgtgaaagtac

SEQ ID NO: 31944 - DNA, 237 bp, Mus musculus
  source 1..237: mol_type = other DNA
agactactgtacccttcatttttcatgtttctgctggatatctaaaaatcactaaattagatcattttgcacctatattgaaatgacttcaatttgaactttaaacaaataattttatgaaagtaagaattgattcaattctaatcctttctttgaacaggttaatctacaagtttgtgacagactttaaactaaaatcttaagtgtctccagatctaaacaacggctcacgttttt

SEQ ID NO: 31945 - DNA, 341 bp, Mus musculus
  source 1..341: mol_type = other DNA
ggctaacatcagatactttctatattataggcattgtgcttagcacatattcaacgattttgaataactgtcagttcataagataaacgaaagaaatcataggacttttattctatatttactaaagtaaaaaaatcagcctggttattggcttaagtctgtaaatccttgtttcttctatgtgccagttccgcatagactcaaatgggtatggtctagtcgagcagagctctgatctagacagtgatgcaatcctggacagcagatagggagagcggcgctgccccgcccacctccgcgggtctttcccagaatcacgcgatcgcgtcttctactactgc

SEQ ID NO: 31946 - DNA, 358 bp, Mus musculus
  source 1..358: mol_type = other DNA
ctccatggtctgaatggatctccacagggaggagccttgcagtctcaatgaaattaagagtgtgaagactcttggcaggaaccggtggcttctaagcccagtgtcaatgcttaactcaagagccaaatcactggccatttcgcttaatacagacagttgggaggtcacctgagatcatcaccttgagacctctttctttttttttttttcttttcaaaaattaagaagttagcattataggttgcaggcagagagcaacagaagtgtcaaatgatgggactccggaggcgggccggcatgcctttgctgctggccggagctcttttcacattgtgctactgtctaacgtgtagagcag

SEQ ID NO: 31947 - DNA, 414 bp, Mus musculus
  source 1..414: mol_type = other DNA
gtgcttcactccatcggcaagcactgtaaatctagggaattgttttaaataaagtttcagtccttaaagaaaaaaaaaaaggctgccgaattttttttgcttaaaagtttttcttgactcagacacgacggccaggcgcgcgcgctcccgtgtcactacgtgtttgcggcgccgtgcccctgcagccaatcagaaggcgaggtcgccgcggtcgcccgcggtcgcgcgcacgctctagagcgccgtggggggtgccccgcgagagacgtcgcccgcgcccgcgcccgcgcccgggagccaatgggaacggaggctacagaccggaggctgagggcagcggccgcgcgccggccgcacagaggcgagcgtcggccgtcgggagcgcgcggcggcggggcgggcgtggagcgtgcg

SEQ ID NO: 31948 - DNA, 361 bp, Mus musculus
  source 1..361: mol_type = other DNA
acttttctaaggtccgagggaagatatgaatgctctcctctcagaacagcctgcttttgcagaagacgtttgatccaaaaaaaaaattcagactgctcagtcaaatttgaattttagatacaaaacaaatggcaaaaagttttatcaccagcatattacaagattgcatggaatttacttaaaattcaagtctaactggtaggcaaccacaaagacatgtacctcagaatttggtcttttgggagattcgggcccaaggctggcatatctccaaatgagagcaatggaaggccatttaactacttctaaggcttcccaagttgcaatcattaatttttaactgggctgtgtccagccaata

SEQ ID NO: 31949 - DNA, 350 bp, Mus musculus
  source 1..350: mol_type = other DNA
ctctagaacttcttccagagggcagagggctagagactggacacacagtagttccatagtttgtaatcagttggtgataaaatataataggctcctgaaatctatctttctatgtgttcagtagagtctcgggcaccaagcaacctaaaagaagcatcgctgcgtttctgcccatctgctggactgtaccactcagggagcggtcctcgaaagtgacttggcccaggattctaggtcgcagagagccctgcccagcggagctgacagaggctggagatgaatcccatcctggcttctattgctgagatacgagatcgccaagctgggcactcgactgcagcctccagatc

SEQ ID NO: 31950 - DNA, 159 bp, Mus musculus
  source 1..159: mol_type = other DNA
gcgtttgttttggttttcagagcaaaatcttaatttatattcagagctgatcatgtttcagtcgtgagcccacagttggcagtggctccagttaccaccttctcagtcccgaagcccgggcctcttgaagggactttgagctgaaggctccaagccacc

SEQ ID NO: 31951 - DNA, 408 bp, Mus musculus
  source 1..408: mol_type = other DNA
aggcttagacatgctggttttctgtgtaacaacccaggctgccctgagaccaggctggcctcaaacttgagagctctgcctgcctcatatgtccaaacaagtatttaccaaaagatcaatcatttagcgacaggaagcacctgatcactgaatcaatgaacatttatttgtacccagcattaattactactgcatcctagctgttatccaaatttagattaagttgcccaaggtaactcgggctagacagctttctagcatataaactccaaaagagttcccgactcttttggaaaagaatccttttcaactcagccaagtttttggttgttttgaacaaagagcgccccgggcgctaaggggtggggaaggacgggaacccccgcccccaccttggggcgctgctcc

SEQ ID NO: 31952 - DNA, 380 bp, Mus musculus
  source 1..380: mol_type = other DNA
aaaaagacttcatctgctaaagataatagatcaagaaaatgtgactaaatagtaagaattattaaatcttggggatagattcaatgattcagtgaatttgccctaataaaattttaaagggataaacccaatgctttttattattacatttatttatttacttactttatttattgtgctaataaagaagtgcagtaaaacatgttgcagcactggggccgcaaattagagagcagcctaggttccatgggaccctgcctcaaaagcaaataaagacaatctctatacatgtttctttttttcttccaggtgttttaacatgcaaaatggtgggttcagggaggaggctgccggctccggatcaaagaagaggctagact

SEQ ID NO: 31953 - DNA, 500 bp, Mus musculus
  source 1..500: mol_type = other DNA
cctatctgtggcgccaggagaccggcggttccgaggcccgctgggtctggcacgcagggaagacaccccgcgtggatcctgggtctcaggagatccggagtaagcgccggggagactctgtgttactccgggtgtctgagcagctagcgcagctcaactttagaaccacggttgtcattataggatgggacctcggggatccctgattcaaaagccccgtttcacagatgaggggctgggccaccccctagagaaggcccttgttggcggtggctaccgcggccctggagggctcgggtccttataaagtctgcaggcaccgttcctgccggagcccaagccccctcccagggacagaggggctggcgcgttcccaggcgcgcggcggaatgaggggcgcgcggaggcgccacggggcccgcccagggtctccctccacgtggcagccgtgggattggcccaggagacaggacgagcgccgccggctgtgtcaggcggga

SEQ ID NO: 31954 - DNA, 505 bp, Mus musculus
  source 1..505: mol_type = other DNA
agctagcgcagctcaactttagaaccacggttgtcattataggatgggacctcggggatccctgattcaaaagccccgtttcacagatgaggggctgggccaccccctagagaaggcccttgttggcggtggctaccgcggccctggagggctcgggtccttataaagtctgcaggcaccgttcctgccggagcccaagccccctcccagggacagaggggctggcgcgttcccaggcgcgcggcggaatgaggggcgcgcggaggcgccacggggcccgcccagggtctccctccacgtggcagccgtgggattggcccaggagacaggacgagcgccgccggctgtgtcaggcgggatcggggtagccccagacttcctctgagaatccgatctggtgcctagaggctggctagctgtgggccagaggtggctacagagcacggtgtgccccttgagcgggatcggggcgccctggctcgggtaggcaagcccggcagcgcgc

SEQ ID NO: 31955 - DNA, 78 bp, Mus musculus
  source 1..78: mol_type = other DNA
tttgaaagagactcttttattttacaagttggcaagctaggcccacttctaaggaggggcattgtgtttagcaaattg

SEQ ID NO: 31956 - DNA, 425 bp, Mus musculus
  source 1..425: mol_type = other DNA
aataaaggaagaagcagctacttctctgctcactcatggaggccaccaaggtcaccaggctggtgaaggtttctccttgtaaaactgtaatctgagctctataacagacaacacaaaaaccctcaatgtctttctgtctgtcttgctttgttgacacacgctgtacattctctccaacagactaggcacattttagtcactgtcccatgggtgccggttgttttgatgttttaatcaaccaataaataactttgtaaaaatttccctacatacaggtggggaaaattgtctgtctaaaacaatggtctgtaaagacaaaggtgcatgttaaactctaacagatgcttcctccagtagccaagagtgaggattcttcgctcagactaagaactctgtggtgactagggggctcttatcaggttgcc

SEQ ID NO: 31957 - DNA, 171 bp, Mus musculus
  source 1..171: mol_type = other DNA
acaccacaatcaaaacattgagtggaatggcttattgttctgaatcaggagcatgctgcttatgacgcccctcatatgcttccaaaacatgggtttccatttagggccacaggtccctgaaagcaggggggtgaaaaaaactgaaacttttttttatcagttctattgggg

SEQ ID NO: 31958 - DNA, 420 bp, Mus musculus
  source 1..420: mol_type = other DNA
ctttaacatcagccttttataatcatgagggttcagggtttgaaatatcactgcactgacttgctaactcagtcctgggatatgacattgctagcactatttagctaagtcaaactgggcttaagacataatgaaaattaatgcagcacgtttctaggatctgacaaaactgttgagattttaataacttcggggtttaaatttctgtgcaacttgaagagttgcaaccaactattactttccgctttgtagtattacaaatctgtaatcacaacactcaaaagaaatgcgtgtcttcctcccaggagacacagaactctccctatttgtgctattgctaactcagagggccctagccagctgcatctcgagcccgggattggagaccccacccctgctgtgacatcacaggggagtggg

SEQ ID NO: 31959 - DNA, 285 bp, Mus musculus
  source 1..285: mol_type = other DNA
tcttaagcccagtttgacttagctaaatagtgctagcaatgtcatatcccaggactgagttagcaagtcagtgcagtgatatttcaaaccctgaaccctcatgattataaaaggctgatgttaaagtttttctcatctgtaaaatgagataaactcaagcagacagtaagttctagctcaaataaaaggatctgatctaatctagtctttgaagagcagcttgtaactttctaaagccgcgtgggattccatagcaagcctctcgctttagccgaccagagtgct

SEQ ID NO: 31960 - DNA, 339 bp, Mus musculus
  source 1..339: mol_type = other DNA
tttttctcatctgtaaaatgagataaactcaagcagacagtaagttctagctcaaataaaaggatctgatctaatctagtctttgaagagcagcttgtaactttctaaagccgcgtgggattccatagcaagcctctcgctttagccgaccagagtgctgcgcgacttccggtggcgggacgcggggctgcgcacgcgggaaaagcttccccggcatcccttcccccgcccctcactgtgccgtcgcgaggctgcagctctggtcgcgatccctgggcccctggtgtgcatgggccccgctcccccgcgggacgatcggaatggatcgatccgcacgcg

SEQ ID NO: 31961 - DNA, 313 bp, Mus musculus
  source 1..313: mol_type = other DNA
ttgtttgacttgaaactcatttaatactttttttaagcaatgttagatcttacaatatcagctccagaggctcctggcacaggctactaccatgtggctgcaggtccctccctgactgtcctggaaggggcaaccccagggagttttcctctcaccctccttccccttggctaggccctggaaatccagtgggaggccattgctatggtaacaggactaggccctggctttacctcatcaaattaaagggaaaaaaatgtattccagatgcttactttttatagccactcccagccgcggagccccaggttgg

SEQ ID NO: 31962 - DNA, 271 bp, Mus musculus
  source 1..271: mol_type = other DNA
taaatggccttgaaatattgttttggagacaaagtctcatctatattgcaggtgtgggccaccacatccatttttatgggtgcacatatatattcagctggctctcctggctccaggcaggacgttgatggaagacagagacagccatctcctagatggctaagccccctgaatcagattgaatcctccaatgctggggtgacatgagagaggctctttgtgtgcaacagtgcctcacagtttgacttcatgaatgcattgtgattaattt

SEQ ID NO: 31963 - DNA, 416 bp, Mus musculus
  source 1..416: mol_type = other DNA
tatatatatataaagttaacaagtcttttttataagatgggataatgcatatacacctgcgctacacacatacatgaacatatacactcaacattatatatatgcatgtaggtcatgagcagcagcacatatgtataaaggtgctgtgaccaaactcactactcatttttttaaattaacaacaaacttttgagacattttataaagtcatatgtccctctataagactggcagagctctagatgacagagcgctgacagtgttcacaggggcttagtgaagttattccaggaaccaatcctctgacaagagggatgactcagccaggatttgaatcttgcccagtgtttccttacactgagattcatctgctgaagtcaaaatctccagtgtgatgccaacagaaggtggaacct

SEQ ID NO: 31964 - DNA, 207 bp, Mus musculus
  source 1..207: mol_type = other DNA
gaaattaaattcctggtgactctggaggttgaaaatccaagctcaaaatgttagtaggttgataaggctttaaaggccttgtctccaaatctagtcacaggctcaaggactagaggattggaaagcaaacttcctgtcccccaggtgggtcctggaagcttatcagaaactttccagaaacttgcccacactgagcacagttttatg

SEQ ID NO: 31965 - DNA, 271 bp, Mus musculus
  source 1..271: mol_type = other DNA
atttacttattcactcaacaatcagagatccctgaagacatactagaactgtattctatacgggcttagaaaaatttaccctgtaatatttgtcttaaatcaacaaactctggtctgccagcaggttatgaattgtaaagaaatttcattatgcttttgtctgcaaaagaagcagggaccatccagatgctggggattcaggtcaaactggatttcaatctgcataatttgtcccatttaaggaggggggatagatactccccccatccca

SEQ ID NO: 31966 - DNA, 277 bp, Mus musculus
  source 1..277: mol_type = other DNA
ggtcctcatctgaaagatagtgagcaaagaactttgtaaggacactagatttcttgagtgcacagttgggtgcagagaccactgagactgaatgttcaggcttctaggtgaactcatgcccactgggccaccaggagaaatggcctctgggaccttgaatgttggagatcaaggtgcaatcagtcccagacctaggacagggcttaatgccaggacctttaaagggctacaaagggacatcctatgaatcttaggaagtccttgggtggctctcaag

SEQ ID NO: 31967 - DNA, 421 bp, Mus musculus
  source 1..421: mol_type = other DNA
caaaacagatacattcttctttcttagaactgagcactgagtctaattttagcagctgcaaatatcagtagaataaatacctttttatgacaattttgaattgtgttgaagaatcaattcagtctcgcaactgcatttctggaatccactgacttgctcacccacgatttgctcaggtagcctttagaaatgtttgcaaattcagaaagatttcatcaactcctgcttttgaaaatgacacttaaaaagattttttttaacctacttgaaagcttttgggtaaaatgacagctgtccaaagagcatttcaattctgaaagcttttgttctcatgatgagtttacaaatctaaaggttgtcatttgtcttagcccctcctcccatggcgcaaggggtggggggggggggggtccatccagac

SEQ ID NO: 31968 - DNA, 701 bp, Mus musculus
  source 1..701: mol_type = other DNA
atttaagtggtttatataaaaataaaaatgcccatagtaatataaatattacacaatagaaatattgtgaaataaatatcttaaatatgttaatttattttatatctttcccaacgtcatgatgtgatgcttcaacatttacacatggtatgtagtcatcaaatcagtgtaattattctatacctaacaatctttagggatcattctacttttataatgactttaattttagtactcactcatgggagaaaacataatatttttgtgctacccattatagtaaagatgtgaagaaaaggaaactcatatagatataacttaacatctgtaaaatccaatatatatatgtgtgtgtgtgatatatatatttgattgaaagtttttggattttatcttaattcttgaaataaacatgtaaaacatgaatctttgaattactttttcactatagtgataaatttcttctaatgattacactcaaggaaatgtctttcttcttaatgtcttgtgtcttataaaaataatttaaagttaaaaaaagtaaaggaataagaagattgatatttccagaaattttgaaaaaatggtctatttttgaaacaagaaggtaataaagatacataatttcagaaatatttaattattttataattctttttttcctaaaggtaaaatagttctttctggatttaaaaacaaat

SEQ ID NO: 31969 - DNA, 362 bp, Mus musculus
  source 1..362: mol_type = other DNA
aacacatatgggatatagattgtagatgacctttcgtcaaaggtcaaggaaagtggaacctgccctttattgttcttttatttttaaagatacagatcttttgaactcatagagatctaccagatcaactggctctctgaagataagagaggaggcaatgggagatgggagagacagtcacttcagcttgtctccctcctggctgagtgtgacacctgtatctgtcaggctcctgactgacaccgcacactcttaagaagagtcatctgacagatctgtttattttccctggatgaggagacaggatctggcctcattcaccttctttgtattccaaattccaaatacagggttctgtatag

SEQ ID NO: 31970 - DNA, 571 bp, Mus musculus
  source 1..571: mol_type = other DNA
agactgaaaatagattgagaaacaatactgacatgtcttatcattcttcatttggaaatcttgttggaaataacatggcatttactattttcatttcaacaaagcaagtacttagcataatgattagtgaacattttggttttgttacttaaggaacaaatcactcattagagccatataactttcgtgatgtgtctgtgaataattttcacccaaattctttcaatgactttttattaataattagtgtattatccaattaatctcacactagtattaacttgaaagccagaaaaaaataaagtggaaaattaagagtttacaaattaacaattgatgatggttgcacttaaaattaaaaagtaataagaagaacaaaaataggtcatagcaaagaaaccctttttcttttaaagattttaaagaatattcaaactctgcagaaatatatctctgtctaacacttccaaaaaagtgtctgaaaactgtatgaagatgcttttgtgacaaaagtatggcataaattacttatggaatctcaattctttttaattgtgaacagttttcttca

SEQ ID NO: 31971 - DNA, 471 bp, Mus musculus
  source 1..471: mol_type = other DNA
agagctgggcacagttcagatcaggacttgtgatgacagctgccagatgggctcacctttggtcaagagaggtgaggcatctctctccatagcacagctgggcttgccatatgccacagctggggctctaatcactggaccagcttctgtgcacctggcccaactgtgacctgggcaagaggcacgctcaagccagagccagggagggagtcccaggctgaagagtccctgtggctctggaacagtggagcagcgtcccgggtcccgagtcccaggaatgtgggggagggggcgcttcctccggccgcgggaggggagacgccagagcgtgcaccgggctcgccaccgcccactccccgcccgccgccagctcgctgggggcgggggccgcggcgagagggcggcgaggggccgcggagcacggcagcggccggcccgcccgagcgggaggaagagagggggccgagcgct

SEQ ID NO: 31972 - DNA, 418 bp, Mus musculus
  source 1..418: mol_type = other DNA
aaaataacactaatttccactgaaagaaattattccactgaataattcaataatttccatcgaattcgggcaatgtaaagtgttactgttaacttactgcaattcaccttgaatttactgtaacatgaaccaaaggtcaaagacattgaagctaagaaaatcatatcgtttgaatgaaaatggttacgttggggatcatcattattattaataaaggaaaaatgcaaaatctagatttaaatatatgtatacatgacatgtatgaaaatgtcatatgatgtccatcatttgtaaaatgaataataacattaataaaaaagcaattctgcctacgtctgtgagacagggtttgatgtaacctaggcaggggtgtgggctcctcggggagcgatggggcctcaaagtccaacccccacca

SEQ ID NO: 31973 - DNA, 459 bp, Mus musculus
  source 1..459: mol_type = other DNA
acatgttcagctgtaagcctgaagttgtagtttaatttatttactcattcatttacaaagtctcactatgtagccccaaactggctctgaatgatcaatcttcaacctccagaacaattccttgcacgtttgcaaactgtactgtattttcgataacttcaagaaggttggggcattaatatttaaatcctagtactccggaggctggggcggctgacatctcaacacatacatgtgtatgcgggtgtgtaaagtacttttcctccttgtttcgctgaacgatgaagaggggaaggttcccgcaagctgggagtgtgcccgtcaggccccgcccctgctcgaggccgtcgggaaaagggcgccgccgccgcagccgccgcccgtctccggccgctccgaagtgaccattctcgcggtgaaaagccgcagatgagcacccccggaagtgacgagccgacg

SEQ ID NO: 31974 - DNA, 356 bp, Mus musculus
  source 1..356: mol_type = other DNA
tgtctgacttacatataataataaataaatctttaaaaaaaaaaaaacaaggctggctagatagtctagaaggtttgtgtttgccacacatgtggggctaaaagcacttgctctttgagcagcaccaggtaactagctccctagggatctgaaacctagcatttttttaaaaaggaataattactattttaaaccaaaactagaatgaacctgattccttctctacctttaccgaaagtagaacagactgtgtctgtaaagtttgagatgaaatttgaataaacgcaagttgcctgacatcccaaggctcgcagcttacagatgagggcggggtcctgccctccttccgcttctgg

SEQ ID NO: 31975 - DNA, 432 bp, Mus musculus
  source 1..432: mol_type = other DNA
tacatgccaggagttgacactctcaactgtcaaagacaatttcccagtgacaggtgtcacacagagaagacatgaaaaaaaaatttttttttttggtcagtatgtcaccatgtaaccctggtttaccgggtatccagtttgtaaaccagattagccgccacatctgaccccgagggggagtactgaggactgaataccaccactgttaatctgttgttcattagacatgacagaaagaggcggcttgcgcaggcgcaatagaggcgcgaggagcccacgcccagacgcatgcgcgtccctcccacaagccccgccccaggcggcccctcgcgagcgcctgccgtttctttgggcgggccggtgggcggagcctaagcgggcggcgcgccgcgggcgggccagtgaagccggcgcccccgacacgtgatctgg

SEQ ID NO: 31976 - DNA, 366 bp, Mus musculus
  source 1..366: mol_type = other DNA
aagggctaggcaggcactttgccttgtgcctctcatactccagtaactggggccaggtatgtggagaattccagaaggaaagctcctgagggccaggagatgctgatctcagcccctgaggtgttgttggactcctacgagtgtgggtagctccccagaaccccatttccggaaaagaaaagtgaggaaggaaaagtggggcattttcacctcttactttactaagggtctgtaggatgccttgggccaccctagggtggcctctctagcggccgagcgcggcacccggtgggtaacgctcaggatccgaagggtcccatgctcagcgcaggctcggtgcggtgccccaggcccaactgctcggcg

SEQ ID NO: 31977 - DNA, 325 bp, Mus musculus
  source 1..325: mol_type = other DNA
gtatttgggtaattcacagacacagtccatgaatccaaccaatgaattcaattaaaagttccaactctgttgtttttccttgaggtaacttaggatcttaaaaccaaataatttggatatacaactaatgagactctggagaagcataattaggccaccagggctccagtgagttcttaaagaagcccttgagagcccagccgtccccggccgggggcacaaggaagggaaacggtctccaaggagccggcgatagggctacgtacgggctcagatccggaacctctgcttcccgccccgcgtccgcccggaagaagagtcactg

SEQ ID NO: 31978 - DNA, 414 bp, Mus musculus
  source 1..414: mol_type = other DNA
gaatgaaaagaagctttctatttcccagtgtgattctgttgactgaacataaaatcaccacagggtcattcaatgactgaataatttaattatctggaccgcttcatgatctacatctatatggacagtaaaacgttatgcgtctcatcaggctcttatgaagtccaaggtgcctagtaaatactaaattgatgtgagctacaattattttggactttgagtctcaaaagtttttgttacctgcgctcaaagacaatttcatcggaggtgctgccacagcacggagggtcgcccagcccctgagactcggggaggtctccgtgctgccccgacaccagaccctggctgcagccgccgccatgttccttagtgtgccgactaagtagccggagaacacagtgactcttcttccgg

SEQ ID NO: 31979 - DNA, 553 bp, Mus musculus
  source 1..553: mol_type = other DNA
acatcctctttggactcctaagcaaacacacacacttttttttttttagctacatagccaggttccctgctcagcagttccctgtttagaggagcctctctgctgagcctcctccttaggggtcacggcccctccctaaggtcaggggttggagagccggccctgctccttaggcagggtccgcgcctcgcggcgcctctcctttggagccatggctcctgttccgggatccctcgggcagggccgggactccggggactcagctgaagagtcgggaggcatcaggtggccctcagctctcgtcctccgcgtccttctcgcggtggctggtcgcgagccccggggccggtggctggccgctgcgcctggcggggtggggcgcctcgccactgcgcctggcggggtggggcgggatggcggcctccgcgtggctggaggccggcctggcccgggtgctcttctaccgacgctgctctacacagtgtccgggggagggtgcgcggcccggcgcaccgcgactggtaccaccgcatcgaccacacggttctgctgg

SEQ ID NO: 31980 - DNA, 413 bp, Mus musculus
  source 1..413: mol_type = other DNA
taagagtattttcttgtggctggagaaatccagggaaccctggttacatcctctttggactcctaagcaaacacacacacttttttttttttagctacatagccaggttccctgctcagcagttccctgtttagaggagcctctctgctgagcctcctccttaggggtcacggcccctccctaaggtcaggggttggagagccggccctgctccttaggcagggtccgcgcctcgcggcgcctctcctttggagccatggctcctgttccgggatccctcgggcagggccgggactccggggactcagctgaagagtcgggaggcatcaggtggccctcagctctcgtcctccgcgtccttctcgcggtggctggtcgcgagccccggggccggtggctggccgctgcgcctg

SEQ ID NO: 31981 - DNA, 328 bp, Mus musculus
  source 1..328: mol_type = other DNA
aggatctcatacatgtattaatgcactttgataaaaacgagtatttctttgataagaataaaatatatctcttttttaaaaggaggaaaaagatgacaggccttaagagtattttcttgtggctggagaaatccagggaaccctggttacatcctctttggactcctaagcaaacacacacacttttttttttttagctacatagccaggttccctgctcagcagttccctgtttagaggagcctctctgctgagcctcctccttaggggtcacggcccctccctaaggtcaggggttggagagccggccctgctccttaggcagggt

SEQ ID NO: 31982 - DNA, 589 bp, Mus musculus
  source 1..589: mol_type = other DNA
atatattttgctttaggaagctaagtgataagaaataattgccaactcatgagtaatttgtaaattgatggttcactgactttgtgtaataaacaacacacttaatgcgtgaatccagcatgcaggttaggaataccgaatcaaaagtctcttaatagaatacttaagcatgcatgcagttgaactttccatcagaaggaaggcctggatacagttgtctgtatgctgagcacccatcattcattcattcattcattcattcattcattcattcattcattcattcgatattagctgcgttgcttgcccgccagaggtgcagctagtgcggtgctcctccagtgcagctctgagacaaagagatgcacccctacagctcccagggctgagggctccgcccgcggcccccagggttgagcgactgctccttcactccccggccggagggggcgctgcagcgccggccctccgcccgcccctgcgcggcgctcggctcggctcggcgctggcgggcggcgccgcggtggtacgttccccttcgccgcccgccccctccgcggcggccctccccgccggtggtaggtgccgg

SEQ ID NO: 31983 - DNA, 271 bp, Mus musculus
  source 1..271: mol_type = other DNA
gcagaatattactattattatataatataatatataatattactgttccttttaatttctagtaaagattcagaagagtaaaaacccagggttttaaaaggccgttcaaatcacacaggacaggtgtgagtaatagcaataatttgaaccctgtttattgcagtcttcaaacacatggagactaagaaaagtgttttcaccacatgaggtgaggctgacagtgcacaaaacaagcctggtgcatcagcactttcattgtgtgctgagctga

SEQ ID NO: 31984 - DNA, 391 bp, Mus musculus
  source 1..391: mol_type = other DNA
gttacccgggctttctgaaggcccagcctgtacatgtccaaactgcagaggtcaggggttcctcatctgtaaaatggagatctgagaactccgctgcctgcaccggagccaggagccaaataagagaagaagtacttatttactgtaactcagagcagtccagaccggacctggcaaactttgggacgcccctactggactctcggggtcggcagcagattcatttcctgcatgaagggagtgcgcacgagcccctgagggagcccagcgcagcctttctcaacgtcttctctccacccgtggagaacttacgggttctgtccgcgtctccgagcgaatctgccgcaaccgaggctacagggcccgccccgtggctcgccggttgctccgg

SEQ ID NO: 31985 - DNA, 341 bp, Mus musculus
  source 1..341: mol_type = other DNA
gaattctgtctcgaaaaatcaaaataaataaataaaattttttaaaggactagaactttacagcacatgagttgtgtagatataatactttaaacaagagtagaaacatatatacagtacattgtaacaaaaatatttgtttaagactcacagtgtgaccagaatagtagggtttaatatgcagcactgtgatgacaggcatgtgccatctagctctcctggactcactctagaccaggctaacctctcagagatccgcctacctctgcctccagagttctgggagcaaatccgtgaattccaagtttacctgggttcttagattgcaccggagcaaccgg

SEQ ID NO: 31986 - DNA, 188 bp, Mus musculus
  source 1..188: mol_type = other DNA
agccaatgtccttcccaattggaagggaagcccactcagatattgcagggcctacaggaagagccaagcctggcagccttgggaccaacgaagagggggaagccttcccagtttcctctgggcaggggcctggccccctgtcttcccagggctgccgatgtcaccccaaggggactatctcccagtgg

SEQ ID NO: 31987 - DNA, 587 bp, Mus musculus
  source 1..587: mol_type = other DNA
catccacaccttagctccagcttagacatgaggtggccatcgcacgccctagggagaggcctctgccatatgtgtgacatatgtctgaccctaggtcaacactgattactgagtaaatctaacaccaagtcctttgttgtatcctggcttgaaattccagggcacagacagtcctggccttgcggcaggcacttcccctttccctagctcatggaggagccaggcctgctgactcagagagccatagccctgctctcgtcccgggacggagcggtttggcagccgtgcgcgcccccgtgtggccactgctggatgcatcctcagaaggacgccaagccgccctgttgatcccggttcccgcgtgggtgccgccctcaccctagcttaacttggctaaacgcgatgcccacgagggtaccccgccccgagcggaagtgcgctgaccgcgcgggtcccccatggtatgaggcggaagcgcctcccccgccgtcgctccgtctagccccccggagccgcgcgcgtcgggttccggactgtcccgtgtgacgtggctgcacgccgggggtggctccgggctcgggcgaggc

SEQ ID NO: 31988 - DNA, 249 bp, Mus musculus
  source 1..249: mol_type = other DNA
cccatcaactggctaattgttatggtgcacaccttggctgagacaggtagatctctcagtttgaggccatccaatggctcactccttcagtcaggcagatatctgagtttgaggctaccctggcttacaaaacctctggcctaaggcttgcctgcatcctggcagacagcctttgacaaggcttgcagcaggaaccctcgtgaccttgctgctgaaccacgtggctccaactggcagggacagctgcag

SEQ ID NO: 31989 - DNA, 205 bp, Mus musculus
  source 1..205: mol_type = other DNA
ctatctattctagtctagaattccttaatggagaacttgggaggacatttagagggtgggggggactaactcccagcagattccctcccccttgtggtgcagtgtgccaaagctctgctgaccattagctgtgggtgtcacgggccaagagcacctcgacagggaccaagtggctctatcttctccatgaagatacctcagcagt

SEQ ID NO: 31990 - DNA, 501 bp, Mus musculus
  source 1..501: mol_type = other DNA
gtctgctccagagccctctgtcacacaggcaggcctgagattctcctgcctcccaggagttgtcatacaacctcatgagcctccacaggctagagacctctctcttccagtagctgtgaccaggcgggaggatggccagcccttctaccttgggacaagccacggcagacttgcgatgtctgtttgaagagtctgcctggacaggctgagcagcctaagccgccacagccactgtgagaggctacagagggaaggggagcctggcaccgggcgcagccgcccgggggagtaggaccctttagttcctgaaattaaagaaagcacgcagggctccctgggaaccttccggcaagaagggtcccgggttcaactcaagtcacccctctctcaggagaaaggcttccagagacttgcctgaggctcactcagcccaggggcctgcactagtgtcagggcaggcctcgtactctaggctgaccctctacctaagaaggagtctca

SEQ ID NO: 31991 - DNA, 398 bp, Mus musculus
  source 1..398: mol_type = other DNA
cctcaccaattgtggcggctgccgccctgtcagagcaagcctgtgtctgttaggatctgcctccagactcagaggctcctgttcactgggcgtaggagcaggtgctcttcctgtggggggaggagttggacagtgtcttactttttccattggcatctgaaaaagagtacagatttaaagacccagggtgggtacttccttttgggctctgggccctatgggactggactccatttcccagagggcatcgcggcaccgttctcggtttcccctaccttggtgtaggtaataccctggcaggttggccttcctgcctgggcggctgggccttaagcactttcatattgatcaccattttcatcaagaaggactggactgggctggcccggtgcttccca

SEQ ID NO: 31992 - DNA, 225 bp, Mus musculus
  source 1..225: mol_type = other DNA
tgtcaaccctgttatagaccggcccaacgtgcaggaccagctccaagtagagaggctgcaacacacatatgtggaggccctgcacgatgctaatgaagctggtgagcctccgtactttcccttcgcctgcaggacaaacatcgaaggctcactgactgcttcccacgggtggagctaacgttgtatttgtgcagggttcttcagggccccctcaccaattgtggc

SEQ ID NO: 31993 - DNA, 231 bp, Mus musculus
  source 1..231: mol_type = other DNA
atttgtttgtttgtttgtttgtttacttattcaacaaaaagaaacatagtctctgatccccttgggagattaaatcagaaaggcatgatgtattccttcagggctaaatctcttgtcccaggaagcgacaccatctcagatggggctgttccgtagatgctgggggccttcccagaggctgtcgcaattccgggccgtgccgggacgtaggaaggaccccttggcagtccc

SEQ ID NO: 31994 - DNA, 227 bp, Mus musculus
  source 1..227: mol_type = other DNA
cctacgttgtaactgtaacacatttgtttgtttgtttgtttgtttacttattcaacaaaaagaaacatagtctctgatccccttgggagattaaatcagaaaggcatgatgtattccttcagggctaaatctcttgtcccaggaagcgacaccatctcagatggggctgttccgtagatgctgggggccttcccagaggctgtcgcaattccgggccgtgccgggac

SEQ ID NO: 31995 - DNA, 278 bp, Mus musculus
  source 1..278: mol_type = other DNA
aattctgatcagatttgcattaaagcatatcaactctaaggtttggaatcacaacatccagacacccaactggctgcctgcctagttatatgcctgcatcaaaactgatgtagttttctgagacatagtgggtttggtcctcctcaaacatgacgtttgagtctaatttaatttgtgtctaaaaggctctgggatcattttcagaagcatggtaagcctgacctccggcaagtgtccttacgaatgcatccgggcggctgcagcaggtaccgcccaag

SEQ ID NO: 31996 - DNA, 341 bp, Mus musculus
  source 1..341: mol_type = other DNA
agactctcagagctaacataaccgagaggctatgttgaaacagtagatgtgtaaaactactggaggcctgggttcgaaccctcgaggccgtaccgggaccctgcacacgcagcttcttggcttcgggctccagctcctgaggacctctgcgacttttgctcctgaggagcaccgcaacggggacttctgtccagcgccgtcgcaggtagcgcagctaagacacctcgagggctgtcccgccccttggaactgccccgccccctcgggattgccacagtagggggctgtcttgcccccggaactgccccggactgccccaacccctcgggcacggcccgccc

SEQ ID NO: 31997 - DNA, 365 bp, Mus musculus
  source 1..365: mol_type = other DNA
agctcagtgctctttttctatagtatgaggtaaaatacattcatctttttttaagatttatttatttaatacactgtcatttcagaaacagaagagcagtcagtgctcttaaccactgagccatctctccagccctagagacacctattattaatgggggaaatgagaaatatttagaatctttgctgctggcctgaaacgccgcctggctccgcctccagcatgcagggtttacggcgaggagcggccgggggcgggccgtgcccgaggggttggggcagtccggggcagttccgggggcaagacagccccctactgtggcaatcccgagggggcggggcagttccaaggggcgggacagccct

SEQ ID NO: 31998 - DNA, 368 bp, Mus musculus
  source 1..368: mol_type = other DNA
aagcactcaccgtgtcctctcaggggccctcggtgggttagagttcggagtcctaccactcccgggtccgggccaccgcctcctggagcgcttcgggccctcccccgggaagcccggccccccgggcccgccctctccgcggagccgccgccccaaccccaccgacagcatccccgcagcggggactgcaggcatccctgcgccaggtggctcgggatgcgagccataggatctgctccccgggtgcgagagctgtgagctttgtcactccttgtaaccttgaatgagggttagagataccttcagcggtacatgcctacctagagcagctctgcttcagcctctcgggatttcagagcttgtgggtc

SEQ ID NO: 31999 - DNA, 409 bp, Mus musculus
  source 1..409: mol_type = other DNA
taattaatcatttgcagttgtttaacaatcattaattaactggggcacaagctgggttacctgtcagttggtttcagaaaccacatcctcaggtttcaaatctcctatttgagagcgcgcggccagagtcctcaggccgagtggactctactgagcaaagaacagatttagaaacaacacgattttgttatttttaaagttgtcttttaaaaaatccgcgcgcgcacgtactcacacttctaagggcggccggttgcttcccagagcgcgcacggtcccctaaggggcggtcccttgggctctgactccaggacccctgagcaccagaggcctgggaccccgctggcccgcgttccctcctgtctctcgggtcaggggcaccgctgcggggtcacccggctcaggagga

SEQ ID NO: 32000 - DNA, 374 bp, Mus musculus
  source 1..374: mol_type = other DNA
aggggcgactccaggacccctgagcaccagaggcctgggaccccgctggcccgcgttccctcctgtctctcgggtcaggggcaccgctgcggggtcacccggctcaggaggacccacaagctctgaaatcccgagaggctgaagcagagctgctctaggtaggcatgtaccgctgaaggtatctctaaccctcattcaaggttacaaggagtgacaaagctcacagctctcgcacccggggagcagatcctatggctcgcatcccgagccacctggcgcagggatgcctgcagtccccgctgcggggatgctgtcggtggggttggggcggcggctccgcggagagggcgggcccggggggccgggcttcccgg

SEQ ID NO: 32001 - DNA, 393 bp, Mus musculus
  source 1..393: mol_type = other DNA
ccgctgaaggtatctctaaccctcattcaaggttacaaggagtgacaaagctcacagctctcgcacccggggagcagatcctatggctcgcatcccgagccacctggcgcagggatgcctgcagtccccgctgcggggatgctgtcggtggggttggggcggcggctccgcggagagggcgggcccggggggccgggcttcccgggggagggcccgaagcgctccaggaggcggtggcccggacccgggagtggtaggactccgaactctaacccaccgagggcccctgagaggacacggtgagtgctttgggacggactcccgcgccggagaccccggccattggctgccactgagcgcaaggccgggtgtagaaggggcctctgtatcaac

SEQ ID NO: 32002 - DNA, 237 bp, Mus musculus
  source 1..237: mol_type = other DNA
ccaacggccttgggctatctcagggaagaaagtaatttccttctatggactaagagtcaatttgcctggaggcataaaattaccctggactttttaaccgtagcatggacactgaccagtgggggaatcctgctgaggctcccttaggacagtatgtccaaacctaagggccaggccggagtgtggggctttctgcccaccacccaccgtgaccagtctggcagcctggaatctggc

SEQ ID NO: 32003 - DNA, 437 bp, Mus musculus
  source 1..437: mol_type = other DNA
aaaatctggttatttgaaaagaaaggaatagtctttcttcttcagaaaggatagagctgaggatatgtaataaatgctctagtttctgacccatttcctttgagaaatgaagtgactttgtaggaaaataaaattttaaggggcacacacctttaaaacattaaaacctctgagagctgcaggatctcttaaattcaaggatcattttgtaccaacttgaaagagtaaatcctaaaagtgattaataatagataatgagatctccatgatcattattgttagaataaacagaaactatgaaatccagaaattacattcagagaatttaattcacagattctaaatcagactctaagtgactgcttccgcagtcggagactgtttacgtgacaccctcttctggccgcctgggtgccatggcaacagagacaggctgt

SEQ ID NO: 32004 - DNA, 260 bp, Mus musculus
  source 1..260: mol_type = other DNA
gtttatgtcgtaatccaaacgtttcatactgctggaaagccttatttcttgccaggatcagaaagtcaaggggccaacacaacactggtcccttgtttgttttgaaacatcagccggggtcacgcccaggcgacttgggtcagcacgggtgctcctccctaaggggccgggccagagccgggggcgggaccaggcggggggggccgagacgcgggaggcggggcggccaggctcgggacaccccctcccggtcccctggc

SEQ ID NO: 32005 - DNA, 422 bp, Mus musculus
  source 1..422: mol_type = other DNA
ggccagagcttaacccttcctggactgctggacctgaaggccctggagaggtgcccgagcctcctcgggaacatttgggtcccaagtgggaggatccagctcctaaactggtagtgtgcattaaatttgattaagaataaaaaccccatcaagtgttgtgagcacggggtcggcccgtgggcgtgccatgcctcctggtatctgccccggaatttcaggagtgcaatcttggctctctgcctgacgcctacagccagtggtcgagcggtacgtagggtacccgggtccagcaggaacggccagtccacgagccgtcgcccgctcgggctgcggattggccaggcgcagcgcggcgttcactctcaggcccggccctgtcgtgaccggcgcggtgagcctgccttcgccgccgaggattggcc

SEQ ID NO: 32006 - DNA, 405 bp, Mus musculus
  source 1..405: mol_type = other DNA
cattgccattgctttcaatggcctggacttgccctgcccttcccagtgagtagggtcagatccagctgttggagcagggagcacttgctatgcccaccgctggggggggaagagtcctgattcaatgagaaaccttgtctcaaggcataaagttatcagatatttgcacacacaggtatgggcacacatacccatattcatagccagatgcgctgaggaactgtgtacagttcttgaacacagagtcaaggctgtgagtctttgcagctgctcaaattctcacttccaatctggccttgggaggaagggctgttgtccagccagtagcccagtgtctacttccactctgcaggaaggactggcagtctctgcgtctgctaatccaggctcctgtcccttggttcc

SEQ ID NO: 32007 - DNA, 480 bp, Mus musculus
  source 1..480: mol_type = other DNA
aaatgaaatgtagtaaaatagatttttgacaatcatatttcatcaaatgaatcctctccttttcataagcacaagcatttgtgaagtaaatcttgtagttcataatactaaatccttacattaaatttgattttttgttctttaatttaaacttgtaaggaaatttaaacatttacattaaatttgtaaggaaaacataattatcccatttgatttgttcaaaagaagtccaagactacaatttagcattcgagatgtccagccactgggtgacaagcacctgacccgcagccctgggaaacacagctgcgcgcgttccctttaaggccgcaggcggcgcgtgcccacaggcggggtgtgcggcggcccaagcggttttaaacggcttagagcaggcccctcggttctgacccggcagaggtgagtgggcagtgggtctcacctgccggcctggaccctggggacccggcgtcgcgcgcg

SEQ ID NO: 32008 - DNA, 385 bp, Mus musculus
  source 1..385: mol_type = other DNA
tctggggacctgaatttgagttcctgaagccatataaatgaaatgtagtaaaatagatttttgacaatcatatttcatcaaatgaatcctctccttttcataagcacaagcatttgtgaagtaaatcttgtagttcataatactaaatccttacattaaatttgattttttgttctttaatttaaacttgtaaggaaatttaaacatttacattaaatttgtaaggaaaacataattatcccatttgatttgttcaaaagaagtccaagactacaatttagcattcgagatgtccagccactgggtgacaagcacctgacccgcagccctgggaaacacagctgcgcgcgttccctttaaggccgcaggcggcgcgtgcccacag

SEQ ID NO: 32009 - DNA, 343 bp, Mus musculus
  source 1..343: mol_type = other DNA
acttgctggtgctggaatcagactgttttgtgactttggaaaaacccaaatccatgtttgcatttcgtttcacaagaaagtgagatgaaatatcaagtgactctggcttggcctatgccttgcagagggagggcaggaacaagttgtcttctcattgaagagacccaggccctcgggcccaattcggctccgagatgggaatgggaaccgccccctcgggggcccccagctccccccggaccaaacaaggctttctaggttaattagccgagatgcaggaaactagcgggcctctgaaatcctaggttgagcttaaatttgaaaatcaaggactgtttccggg

SEQ ID NO: 32010 - DNA, 280 bp, Mus musculus
  source 1..280: mol_type = other DNA
taatgcatgtgatatatgttttatatgtatattatgaaaacaacataggaagacggtgggagccccagcttagacccaggactaatatttaccttgtaaataggacccagagacttgggccagcacctgtgctggggcaccaagaggccctggacttggctcctcccagtgagagctaccctgtctcacagtgcaatgagagagcttttcccatggagggtgacgccaccgctggttccaggagaacctgtcctctaacccagaggagtcaggacaatcc

SEQ ID NO: 32011 - DNA, 291 bp, Mus musculus
  source 1..291: mol_type = other DNA
tcgaggggcccacggccaagccctgggggaggccagggctcgtacccggcgggcaggctttgaggcccggagcaaagccttttccggaagggctccatcctgaatcctggcccaggggtggctctggggctgccccggaaacagtccttgattttcaaatttaagctcaacctaggatttcagaggcccgctagtttcctgcatctcggctaattaacctagaaagccttgtttggtccggggggagctgggggcccccgagggggcggttcccattcccatctcggagcc

SEQ ID NO: 32012 - DNA, 284 bp, Mus musculus
  source 1..284: mol_type = other DNA
cttttcaacccgctttcaaaacagtgggcacagggtttgcctgtgaagcctttggctatctgagatcaaacataaatgtatttaaaaagtttattcctttaaaagccgtgtaagtgtccagcctgtaatgttagcatttctccaccctcggggccgaagaaggcccgcctccgcggctttttttctcctaaaaggctttaaaattaatcatatgatttatttctggaaataagccgcctttcttgaagactagtgcagctgaatttaggcagctgcatttcctc

SEQ ID NO: 32013 - DNA, 365 bp, Mus musculus
  source 1..365: mol_type = other DNA
gttctccaatagatctttttgacataactcaaagagaccttgggcgtccccaaggtggtggccaagggaacacagatcagtgacctcccactcggggggttattaccctcacagctagagagtggctccgggctctcattccggaggccggggcctggggccggccaactgcacctcccagcagagggttccgcgctcccgggcggtagatcccagaaaaagctgtcggactggtgtggtcgctgcccggcgccgaggaaatgcagctgcctaaattcagctgcactagtcttcaagaaaggcggcttatttccagaaataaatcatatgattaattttaaagccttttaggagaaaaaaagccg

SEQ ID NO: 32014 - DNA, 321 bp, Mus musculus
  source 1..321: mol_type = other DNA
gggtctgccccgatcctgacctctgcctagggccttaggctcacagcgcctggggcggaagcagtcccctccccctggcttgtactggggggggggggggggatcgtgagcctgaggccccagggtgactgtcaggagccatctgaggtcccaggtacccagctgttcgcgggtgcggtggccgccccgagcctgtgacaccaggacatactcccggggcccgcggtgggcacgcgggagtcccggctcggcgaggggcgcgggtccttccacgggatgaggggcgggggcccatgtgaccggctcagaccggttctggag

SEQ ID NO: 32015 - DNA, 130 bp, Mus musculus
  source 1..130: mol_type = other DNA
ttggtacaggaactttcccttcttcttcagctctgaggggaaacctttttcacttaaaacaaggtctttggccttgactttgaactccaaatcctttagttctctaaattactttaacactctcctcgct

SEQ ID NO: 32016 - DNA, 369 bp, Mus musculus
  source 1..369: mol_type = other DNA
gttcaaggccagcctggtctacagggacagccagaattatttcttggcaggtgtcacaccggctgatctgacacaggaccagaagagccaggctctggagtcttggctcagctactcctaagacaggagtcacagctcccaagagcctcaggtgcaccatctgttcagcagggacagtgcctccgaaacactcaatagataattatttttgtggttcataggaggacagtaagcaattgtctccttttccttaaaaggggggcccacagacactgtggccaggaggccaggctcctgtgcttagcgtgtgcaccggctgcctgcctgctatagggccaggagccaccatcggttaccaattggggcgga

SEQ ID NO: 32017 - DNA, 363 bp, Mus musculus
  source 1..363: mol_type = other DNA
ttccaattggtctcccttctgaaggagaacgtgtttcaaacatgaaagacagtttcattcaagggaacattgaacactgtgctggggaaatttccctttgtcagagggacattgaagttctttgtgagtgtgtgaaggtcactgaatgactgacagccgccctcgccagtcccatccaggcaggctggcctcggagctggaggggtggtgccctcgtaagtcccgcccccaggcctcctcgacggccttgcgacgtggcttgaggccagcagagggcgccgtggggcgagtgcggcggagcggccgagggggcgtgctcggcggcgggcgggcaggcagaggcccggccagctatgcggggtc

SEQ ID NO: 32018 - DNA, 314 bp, Mus musculus
  source 1..314: mol_type = other DNA
tcacatgatctgctctcatgattcatttgagtctgccttctaggttctaggttccatgaaggtacaacaagatgtaccaaattatttcctaaattgtctatgctataatccattctacagattacagaagaaactgaacatgatctggcatacaagagagctggacacaggctggagtcagcctgtgtatggaaaataaaggcctggagctggggtgcaaattccagcccaggcaggtctgccccagtcagcggaaggcgccgacaagccctgtggtcctcggcttgagcctccagccggcctctagcagcaag

SEQ ID NO: 32019 - DNA, 433 bp, Mus musculus
  source 1..433: mol_type = other DNA
aagaaggagaattaggcgaatttggcttcctagtcagcgtggcttgtaaagccatctttgagcactcagagagctgagcacgtctctttaaaggaccctctactcattaatattgagttatcgtgaatattgcgtggcgcccgggccagctgggttaaccagccccgggttcccagtttcagactccggaaagtgacaggaagagacccagagagatctctgcgactcggcacctcgggggagcattgagctcccccgcccctggctcccgcccggcctggggggctcctccagcatcggccccacccccgggctccccatggaagccagctgcgccccgggaggagcaggaggaggagtcggctgaaagcccacggtgctttcggcgccgctgccctaaggccccccagcgcccctcccccggggctcgccc

SEQ ID NO: 32020 - DNA, 572 bp, Mus musculus
  source 1..572: mol_type = other DNA
tcggccccagcgccgccgccgccgctgcaccggagtttggctgctgctgccggcaatgggtgccgcagcacaccccgttccttaggcaagccagtccgcccgcccgagcgccgccgcgggcccccgccgccgccccgtgcccccgtgggggtccccggcgcctcccgcgagcgacgggctcgcacgcaggggcgcggggcggcccgggaccgtcgcggtccagctccgcccggccccccgcccgcccgagctccagtccctctcgcccggctctcgggagcggcgggggcgcgcacggcggcggcggcgggccggcggggccgcgcggcgggctcccgcgcgggcgagtgtgtctgggcctgggcggagggatccccgggctgaggcggcggaggtgctgcggcccggggccctcgctgctgctgctgagaggaggaggaggcgggtcctggaggaggaggaggctccagttcctcccccccaccccctcctccccacccccccttgcctggggaagaggaggaaagagcagcagcagcagaagcagcagcggcagctccagcctcttccct

SEQ ID NO: 32021 - DNA, 455 bp, Mus musculus
  source 1..455: mol_type = other DNA
aaggctgcctgcctagcaagtagccaaaggctataggtagtgagtaaagacttggcaaacacttagctcagggcttgctccctgcacccctacagggcaaaaggcgtgccggaggcccgggggatgcctggccctgccccagcggcaaggaggctcttggccagcaggaggggaggtggccttcaaaagggcacagtgcccgaggacgcctgcaggctacaggtggccccagcaggcccagcctcctgtcgtctcctccccttaggaatggagtcccagagccaggaggggcaggtagtgggcacaggaccaccctgggtagccggaccgtgcggtgcaggggcggggccctgccgggggtctccccgccccttccagctcagctaagcaaaggtgaaacctgagcccaggttgggggcggggctagttcgcgattctgaccgggacctgactgc

SEQ ID NO: 32022 - DNA, 402 bp, Mus musculus
  source 1..402: mol_type = other DNA
atgctatgcatatgtcgcatacatgtctaaaaatactccatagttatacattttagtaatttagaatactttgagtttatatagcatacagcagtttatttaaaaatagagccatgttgctagaatagttaaaatgtcagatgaaatagtttaataatgaccagtaatgtgccaactacagttcagtgcattctatatagattagcttatttattgctcataacaagctaaagcatcgtagctccagtgtgtctgctgtcattgggaggctgaagcagggccctaagttcaaggcccactggaaaagcatggtctttgcttttcctttataacactggtttcatattaatggaaatctaagacatcagagaacgaacaacgttctgatagatttccgtttgt

SEQ ID NO: 32023 - DNA, 556 bp, Mus musculus
  source 1..556: mol_type = other DNA
caatcttttttaggttagaatattctgattttacataacatagtgtataaaccctagaggtcattgatgttttataagtaaatataatgaaaactagaaatcctaagaatatactttttagctaacgattccatcaggctctgtgagcttaatcttacaaaaggcttcgggacgcgctagctaaggtataaggaagaaaacagatttttaataacgtttaaatttattcagacaaaaaatgcttttgctttaataaataaccccaaatcatggtcacattttagaaaaaaaaatttaaagaaaaattagccatttggtgtcccaattatgactataaattcagacttttgacatctccacatacagttacacatacgtgtgtaagtaagagtgtaatcacctgtcctcagtgtgagcacacagtgggtggaagtgtgctatagaggaatgcccaaaagagcaaaacccagaaagttttggtactgaattgttttttttttgtgtgttacaaaatataatatttctaatttaattataaaagtttcttcattccaca

SEQ ID NO: 32024 - DNA, 439 bp, Mus musculus
  source 1..439: mol_type = other DNA
ggggcgccccctcgggagcctgggcgctgagggggcgacacagagtccccgtggggggtcgggctggggggccgcaggggcggggggcgcgggccgaggccgccccccgcgagtgcctgcggccaggggatggccgcctgggccccttccccacccccaccccctgggatgctgtcggggggaagtttttattatggttatttaattttaaaaaatatttttttgggaaaaccatcttgtttggtgactgagagatctggtttaaactccccctcaccctggggcggccctcccgccgtcgccgccggccggccgccccgggaccccgcgcgggccggggactcgcaggcccctcagagaggggccgcggccgcccctcccccccgggccgcggggggaggggcgcgcggagtgggactctttccgtttggtccagccc

SEQ ID NO: 32025 - DNA, 271 bp, Mus musculus
  source 1..271: mol_type = other DNA
agctttgtagtggttggcaacaatgggagcctggctccacgaccaggctggcctcgaactcagtgagaatttttattagtgttttattaattgtacaaaacaatgtgctttgtctcttgtgctggcacatgcccagccaggggttcacagtgagatcaaaataatgagcttcattatgacattttcgtacatgcacgtaatatagtggatggggtaaagataatatctggtagggtattaaatgtattacaattctttatataccataaat

SEQ ID NO: 32026 - DNA, 305 bp, Mus musculus
  source 1..305: mol_type = other DNA
tgagaatttttattagtgttttattaattgtacaaaacaatgtgctttgtctcttgtgctggcacatgcccagccaggggttcacagtgagatcaaaataatgagcttcattatgacattttcgtacatgcacgtaatatagtggatggggtaaagataatatctggtagggtattaaatgtattacaattctttatataccataaatcagcattgcagctcagttcatgaatggaaggagccaaacccggcactggcttttgtgaaaaactcgagactggatcttctgagaaagtctgaggctc

SEQ ID NO: 32027 - DNA, 259 bp, Mus musculus
  source 1..259: mol_type = other DNA
aatggccttcctgacatgcttgtcacatgattctgagagttattcaatgccatgcaaggcatgaccataactgctaagatgtggcaggtgcctcctgcagtgaccatagctgtcagataaggccactgagggcatagggactgggtggcctgaggccccagagctgctgaccttatcttcagcacttcccaccatggggactccatgtgggtatggaggactggtggcatccagtagtctagaattggcaggtccctag

SEQ ID NO: 32028 - DNA, 198 bp, Mus musculus
  source 1..198: mol_type = other DNA
aaagataatatctggtagggtattaaatgtattacaattctttatataccataaatcagcattgcagctcagttcatgaatggaaggagccaaacccggcactggcttttgtgaaaaactcgagactggatcttctgagaaagtctgaggctcctgttcagccccgtctaagtcctcctgggctgcggaagttcaacc

SEQ ID NO: 32029 - DNA, 405 bp, Mus musculus
  source 1..405: mol_type = other DNA
tctgccctccgggagaaggacagatgatgggtgcaccccacccagctttgtagccaggatgggtaggacatctctgatggatccaaccaggagggcttcctgaaggaaggcttctctgagcactgttggggcccagtgcccacctttgggaggcaacttgctctgtgtgcagacgccagcagagctgggggcatctgaggacacggacccaggaactgccttgctgtctgagtcccagaccttacaggcaggctgcatttaacgttagctacagggccaggaggccagactgaggatgatgctctggcctctggaccagccctggtagccacacccccatgcctgggaacctgctaccgtcctggccctgggcttgcagaagcctcgccgaggcggtgtggaggc

SEQ ID NO: 32030 - DNA, 286 bp, Mus musculus
  source 1..286: mol_type = other DNA
ggaggccagcttgggctacacatttttaggccgggtgagttcgaggccagcctggtcacatgggagacaagccttgtggtcttaggtcacctggccccatagctgactgtggaaggccaaagacggacttggggagcaggatcttgccatccgctgatgccctcgatctaggtccagctctgaggagagcaaagctttgccgaggggacccagggccacgggcgccggggcggggcggggcgggggcggggccacaagaccccagccggcccgggggcgcgcgcgg

SEQ ID NO: 32031 - DNA, 553 bp, Mus musculus
  source 1..553: mol_type = other DNA
tgcaacggttgctgcacttgttcaatcagcaaactctgccaagttttgtgcaaaataactgcacttgagaacgtaaaagaaatgaattcatttgagggcataattacataccaagattctctgcgaggaagtggattttgaaatcggaagattctgagtggaatcttactattcatattgcgcaagtatcaaactggggcgccctaagcttacttcatcagagtaagactaacaagcatctgttttattcgtgtttatgaaaactgttgggcccggtaacaggtctgtcagccaccggccggagtcaccgcaacccctgtctttcccggggacgcgaaatgcgtaggagatccgaggtccctccagactcagcccacgcggggcggacgcagcgcggtcctgcgtcaccggcgggtggctaccaagcgggaccacacatggtgggaacgtgagggggcggagcctgcgccgacgctgctgaccgaacagagggagggtcccaccgggtctcacccagggcgggcgctgggcgggaccaacggggcggtcgggc

SEQ ID NO: 32032 - DNA, 381 bp, Mus musculus
  source 1..381: mol_type = other DNA
ccttgcccaaagcccgacgtggcgaagtcgtactgggggcgcgttgcaagttcagccgagggtggtgctgcaggtgcacccgagggcaccgccgagggtgagcaccaggtccctcagccaggacacacatggcttctgacttcatgtcctgactccattttcatgcacctgacctgaaatgggagaggctatagcacttgcaaacccttccctgatctccggggactcccggaagaagagggcagggtgcagacttgccggggagctcttgacggccgcgggaagtggcaacggcctgcgagctggccctttaaggcggctcgtaggcgtgtcaggaaatgcgcgcagggcccgccctgctcggtaagtggcccgggaccc

SEQ ID NO: 32033 - DNA, 302 bp, Mus musculus
  source 1..302: mol_type = other DNA
agcactctaacactgagctatataacactgagcttgattttgaaacaagtccaggctgtagaccaggctggcctcaaactcatctcaattgggattacaagccctttaccatcaggccctactaataaaatagtaattgaaatactttactgtgttagcagttccctaggggagtggcggcatccgcagttctcccaaccacgcccttctggaagcaccagcttggacccatagggccaaagatgcaccttgcccaaagcccgacgtggcgaagtcgtactgggggcgcgttgcaagttcag

SEQ ID NO: 32034 - DNA, 248 bp, Mus musculus
  source 1..248: mol_type = other DNA
cccttgggtccttgggcctacatggccctgaacatggggcaggtccttccaaaggcgggaaaaccccaggtacaaagagctttaggtcttgacacacagtgtcactcaatctagggacaggcagaagctgcaggccactcctgttagtggtgttcgctgaggaagagtatctccgtaccagttctagccactcctacagaggtctctctctgttagaacagactctaagggtaacaggtaactagttc

SEQ ID NO: 32035 - DNA, 373 bp, Mus musculus
  source 1..373: mol_type = other DNA
atggccagccacactgagggctcagaccactgtagtgccagggctttgccgctgtcctggtcccacaagtgcagcttgtggactttcctcagcccctgctgaaaggtgaaacatttcttgccctggctggggaaaggagccaggaggctttggctgcatagatagagccatgccaagaggtacccgtgctgctgccgcttggcctcctcaactcgggctgcctcggcccgccggtgggttggctccggagccctgctagtgggggtgtcccggcgctcccggcctgggctgcgcggggggggggggggcgggagggcgcgcgcggcgggcggcgctgggggtggagccgggaccgcagcgcctgccacccgct

SEQ ID NO: 32036 - DNA, 221 bp, Mus musculus
  source 1..221: mol_type = other DNA
gctggatactcagatgagggtccaatgaccttgtctgaggtcattcattgcatggaaagtgtgcagggacttaaacgagcccataaattaattatctagttcagaaaaacctgcagtttctggacggaggtagctataatatggaagaacctttctgcatacagctgacgtgacctgatttgagctcctgtgtgctgtctgcagtccagctcggccctcca

SEQ ID NO: 32037 - DNA, 317 bp, Mus musculus
  source 1..317: mol_type = other DNA
tctgctgatcagatcaggtaatcaaacagccttcttaccagctctggggaagggggaatctgatgaggtgaccagctacccagagtgagttccaggtctgggcctgtgtgtgtacacatgtgcacagagcattaatgtgtctatacataaatgtgtccatacatgtacgtcgtgtctttgtgtgcatacatgtgtgtacacagagttctaagtgtgtatacatgtgtgtgcttgtgtacatagaacacacatcctggcaatagggggcgggggagggggtagcggttgacgcgcctctgggtcagcctccgcctctg

SEQ ID NO: 32038 - DNA, 457 bp, Mus musculus
  source 1..457: mol_type = other DNA
aaagcatcctcaggagtacttgaccggtggaagctcctttccctgggtaatcggctcccctgaggtgtgggcaggccttccaagatctaaggtgaggccctccttcggccagggaacccaccctgcagcagcctccccttccattttgcagatggatacaatgctttgtattcagatttggtactgtacttttgaacagcaagtgacactcacccttaatagttaatttttctcacaggccccagggcccttgtaagggttaaaattataaacgcatttatcgccctcttcggatgggcttgcgcagcgcagcccgctcctcctccgcagcgtcgccctccccgtggggcgcgcggcggggacgcgcgagctcccgcgcggggccggctcgggggacgcggggctcagcgaggctcggctccggccccctgaattggggggtccgcgtctgccccaa

SEQ ID NO: 32039 - DNA, 252 bp, Mus musculus
  source 1..252: mol_type = other DNA
acatggcttgccctacttcagggacaggcttgcctgccagtgccctcgctctttataaggctcctttgaaaacgggaagtggagtgctaatgaccatatgtgattcacacacaacaggtgggcacctgctggacagcttcaagcctgcaggagccagcccctaccatgtaagggattgtcactgagaccatgggcaggccaccctgtcctccaccatagccctcactatcctgttggtcagcacaaggattc

SEQ ID NO: 32040 - DNA, 419 bp, Mus musculus
  source 1..419: mol_type = other DNA
tgaggggcagctactctccatcgtttctttcagcaggaagcagggccctgggcatgagctgctgcagtagaagtctcagcgggtaagagttcttgtcatttgggattcacaccaaaggagatgggtgacctgggtgacagaacgactagtccaaacgatgaattgtaaattgcttttatgtttcacccgtgggggaccctaacagacaccggcctaggcctcccttcagaacttccgacggtggcacagcggcaggttgtccccgtccggggatccccctagccaagcgagggtgcgccctccgcaggcggctcccggtaggccctcccctctgtgcccgccccggccacctcgggggcgaggcagcccagcgcgtgggaggggacggcgcgccattggcttgtgcgcggcactagagg

SEQ ID NO: 32041 - DNA, 337 bp, Mus musculus
  source 1..337: mol_type = other DNA
agtggttcaaaggaacagccctgagaccttagacaaaataccaagtctgtccacactgaagtcaaagatgtcctgggtgtttcaaagctgagacactgataattgctgccaacgatttgagccttctcatgagagcctctcactggtctggtccttagcagtgctactatctggtacttccctggcagtaaacggtgtgatagcgagaaatcctaaattcagacattctccggtgagagagcggccgtggaccatgagagccgtgtccgccccggagacgcgccagcaccgcggcggcagtagtggcgacaggaggccggcggcggtggcgggtgag

SEQ ID NO: 32042 - DNA, 133 bp, Mus musculus
  source 1..133: mol_type = other DNA
tctttggaacaacatttagtgttggtctggaatttaccatgaagatcaggctggcctcggggtcatagggatgcccttgccttcctgacaatggaaagatccttgtgacatgagctgggcccaggggtgccca

SEQ ID NO: 32043 - DNA, 359 bp, Mus musculus
  source 1..359: mol_type = other DNA
gacttgtccaggcatccctggggacctccctgggtaggcagtgctggggagggtatggcagcttccctacccagaaggcagggtgctgtaagccagtcttcagctggcttgtgtcctcacacagggaccccaccagctcagtgctgagcactgggctctctgtggctgaggggagagggcctgtgccaaagcctcacttctccattcatgcgagggctgccctgcttgtccgacaggtgccagcacacttgttgggtgtgccatgactgccatgcagccaggctcaatgactggcatgcataccagtcgacccacttctcagagcccttgttcccagaaagtgatcccatgactaagag

SEQ ID NO: 32044 - DNA, 343 bp, Mus musculus
  source 1..343: mol_type = other DNA
aacagctgtttgagcaaaagttcaaccactggtagctgttagtattttcagaaagctggtcttggaacgcgaacgctgccattcccctagaatgccagcgtcggggccccaggcttatagccctgagccaggttgctaaggggctgagaatcccccgggaagggcggagccggggagttgcctcccagttggactggagcggcagacttggggtcccaggtcggccttcgcgtacgtggcctcgcctctaatctggagctggaaccaggctgcagggctgggcagctgtggtgggcggagcctggtgctacctcccgcagggcccagagggcctgacaaggcc

SEQ ID NO: 32045 - DNA, 304 bp, Mus musculus
  source 1..304: mol_type = other DNA
taccaagaacttcagcagttcacaggttaatggccctgcttgttaacctggtaacctgcctgaggcagatccagtgatgtgtcagacatctggagatctttggcagaccactttcccatggaggtctcaggcccagcctgctgtaccacagctggctggaacagctgtttgagcaaaagttcaaccactggtagctgttagtattttcagaaagctggtcttggaacgcgaacgctgccattcccctagaatgccagcgtcggggccccaggcttatagccctgagccaggttgctaaggggct

SEQ ID NO: 32046 - DNA, 198 bp, Mus musculus
  source 1..198: mol_type = other DNA
ccaggctggcatcatttttttcccagaaaaatattatactgcacaagcacattttaactaaaagtgatcgtagaaaagacagggtttctctgtatagccaggagatgtcctggaactcacttcaggccccggctggtgaatgttatggctaagctaggctcacgtgcgctgactcctcctgtccagcagggggcgcgg

SEQ ID NO: 32047 - DNA, 197 bp, Mus musculus
  source 1..197: mol_type = other DNA
gctgggcttttgaaacctgctaccttgtcactagattatgctcctgactctgggaggcttatagatctctaaaaatctatttagtatagactggaattcaaagaagtctgttcccatggccatatgaatatacatatacatgtcgatacttttctatatttcttttgtttttttccgggccttgagagaagccttta

SEQ ID NO: 32048 - DNA, 444 bp, Mus musculus
  source 1..444: mol_type = other DNA
tctctccaaagtcttgggaatgctacccttagcattagcctccggagtctagtggactagttaattagcaatactaattatcccacccggctgagcttgctagcaagcttgaataaagtataccagatgggagctattcagaagccctccccctggctgtggagactggcaggagaaccagcaactgccctgtggccagtgtgcctggaaaggtaccaagggggaagagcccggccactcggatctgtgcagacttggggctggggtaatcccagaacctacagtggtggctcggttctgtgggtccagaagcagcggggtgctcttgctggatgggccgcggcaggcggggcgcgccttccggagcgtggctggcgggcggtgccggggaagggaccgttactttcccaagggcgcggggcgcgcacgctttaaatgggcggc

SEQ ID NO: 32049 - DNA, 358 bp, Mus musculus
  source 1..358: mol_type = other DNA
agactaaagagttaaatctgaaaaatgtcaactcttttttttttaactaaaggaaatggagttgtatatttaacttgatattttttattcaacatcaaatgacagttaaagagcggtcaccagtgagttggaaagattggtactgtcatccttccctcatggagtgatgctggaggccgtcacgttcacctcaagtctacttgcagagtgtctgaaacacaggtagcaaagaaatagcgcgtgacaatatttttgaactattatgtatttaaaaacacccaagggctgagcttgggaactctgggagcagagtattctgggcctgtctactgatgtcacagtgtgtctctaagcagca

SEQ ID NO: 32050 - DNA, 374 bp, Mus musculus
  source 1..374: mol_type = other DNA
ttaaagtactaataagtccacttatctctttagtgttacttcagggacagaatcaggcttatttgaaagatctccacaatgattgtgttttggtaaattttagagaataatatttgacagaaaataagagacatggcttaacctgatctctttaaagaagcttgtgaagaggtcagcactttagctatcgtgaattattagatttctaacttgccccaaatggtggcattagtaaagtttccttagcactgacgttgagaacaaagcgcaccttagactctcactggtttcgggaactagtttcctaggacctaggcctaggaggttagttgccagggatgcggggcaacccggactccgggctacccaacgcg

SEQ ID NO: 32051 - DNA, 296 bp, Mus musculus
  source 1..296: mol_type = other DNA
ttgttttgattgtcttacagtaaaaagtataggacacaaatatctctttaatatcctcccacaaaacaaaaataaaatgattttggtttttactggaccaggtccaataaaaaaatttacaactgttaacgctactacacagtagagttttctggaattccgaattattgggaacaagtagcggttattactaagacgtaaatgtgagctcgtaagggccgcctctgccaaatagacacatggatatgactatgtaggcgggtctgcgtcttcgccgtcacggcggcaccgcctcc

SEQ ID NO: 32052 - DNA, 423 bp, Mus musculus
  source 1..423: mol_type = other DNA
tttttaaaagaagaagcacttctggttttgcaatctaatttggtcccctttcttaaggaaaaaaaaaaaatcccatcgatagcaatttccatacaatctgattctatttggctaaattctggagttttatgagctgaattaatttgatactatttttgaaagtcagtgtttctaagggagacctaatgacgcactgacgtcaatgggtcgccagggctggagcctagccccaactctgcaaatatcccagctttgcaggggaccggggggagccagggttttgtaaacaccgagacccccagagtctcttcaaaattgatgcacatacctttcaaaggaatcatatgtcattagggtgtgtctataaatagaccccaatgtgtgtgcattgagagagtgtgggagggggctgcctcctctctt

SEQ ID NO: 32053 - DNA, 439 bp, Mus musculus
  source 1..439: mol_type = other DNA
gcagacatttgtttcctgcaacacatctatgtaggtgcagggcacaatttttttttttctcaacagaaaaaaaaaaaagcataacagtaagctggttaacagctactgtacctgttgctcttaagcaatatgcaaatcacataatggctgagtctaccctcagggaagcaatacagtcccctccccggagatgccactatctgggttctacacctaggttctggagtcgatcacatatacataacttgtaatgagctgatattttgtatttgataataattcgatgtgtgacatgcattacagcctctctcagatagttgaaaagtataacttttattgccctaccagaaacaatacttactttttaaattggggatcttattccagccctgaggtgtggcaggaccggcttcgtctccgaggcactccgcgggaggcg

SEQ ID NO: 32054 - DNA, 587 bp, Mus musculus
  source 1..587: mol_type = other DNA
cgccaccagaggcatgcatcttctggcattccttcagaaggagcaagaatgggttgtctttaaagagcccctaatgacgccaccctggctgtcaccggcctgggacgcgcacactccccggcactgccacctgcctacttcctcggggagaggtggtggcgcgcgggcctaacccgggagctcaagtctcagctccccggggtcggttccgggacggcgcgcggccccaaggtggaaggctgagaagttccccacggcggagccggggcgcgccaggtcggagcgcaggaagcctcggcccgtgggccgggaccgtgggaagccaagctgggggcggggccgcgcggagccacccaggggcccggctccgggattccccctgatcgggcgcgggcagagagggggcaccctggccgctacctggtgacgacccagtgcgtagtggccaaggcccctcgagccaccacgctcagcgctgagaagccaacccgggccggagcgaggtagcagctcgaaccggccgcggacccctattgccgccgccatcttgcccccccggccgggctgctcacaccggaagcggaagc

SEQ ID NO: 32055 - DNA, 434 bp, Mus musculus
  source 1..434: mol_type = other DNA
ctagttaattttcaacaagtaattgtatataacacatatgtgaagttctccacatgtatgctaactagaggactctagcctgacttatcagaaatgagctcactaaccagaaggctgtataatgcagagttaaggctgccgccatcagatgtgtgtgtgtgtgtgtgtgtacattcaaggacacttgtacacaatgcttaaatgggcaagcacattgaccctttgataaatgaatttggaatttccaggtttggctgagagaaggcctatttctagtaaaagtaagaaattttccaagcacaaaagcaattggtttgaccagaagctccctcgcggcttttcgtaccgccgagcggtagggggcgacagatccccagctcgagggtcgcctgccggccgcgggccgctcccgacgcgccagtctctgcgtagac

SEQ ID NO: 32056 - DNA, 316 bp, Mus musculus
  source 1..316: mol_type = other DNA
taataataaattaaaatgaatctgcaatgatagattttatattcacattttaagtgaatgaatgttgggtttcagcactcattggatccagttataaagctggtttttgaaattgctttgtatttccatttaacagctaggacagcagcatgttaaaaacctgcctctggtgagatagtcctctccagcagaatgcaagccatctctcctgctggcgggagatggattcgccacatttactgtactgcgtgctgacctctggcaatcatctcctgccttggggacacgaatccggaatctagtttccatcccccaa

SEQ ID NO: 32057 - DNA, 370 bp, Mus musculus
  source 1..370: mol_type = other DNA
acctaggtttttaaccttcttatgaccattaaatctgaaggcactaaaaaaaatttatgaaatatacatcatgaaatccaaagttttccatgtatgaatattttatttattatttatcgatttatctatttattgtttcttcccctctgagaggatgggaccctcattctactctgagagggagggtatccctccactgcccactgaggtcacacaaggcagccttgttggggaacaacagatttagagaaaactgtccttctatttcttgcgggaatcacatgaagacagagttctgaggaccggaagatcccgtccaaagtttggcctcatatctgcaagcatatcagagtatcactaatagtgtcag

SEQ ID NO: 32058 - DNA, 280 bp, Mus musculus
  source 1..280: mol_type = other DNA
gcgcccgaggacgaatctcctccaggaggaccagcgggcgtcggatgagatcaaagctgcagtttcattagagaattttttctttaaatatattttttgaatatttttttttccaaagaaataaaaggcaggggccgctggcgagggaccgcatcgagcgtctctccggtgatccctgccctgatcgcccagttcagctatacctggaggacctgtacccagtgctgggttgtgattctaatcgaggatgtaaagacaagacttttttgttcttctttct

SEQ ID NO: 32059 - DNA, 547 bp, Mus musculus
  source 1..547: mol_type = other DNA
aacattttcaaataaaattaagtcgctatgtatacaaatatacctatatgttcagaaacattcagatcttatcttggagataagaaaattgaagctcaaaaataacagcagaaaaggtccttttatactcaatgtatgcccacacagctattagaattgtaaaggagggacagttcataaattgtcatgtaaggtaacacatttctttattaggcttgagggttaagtaaaccctgtattcacaagcatcatctccaatatgccttactccttagtctgcactaaggcaaaccataaaagagacattctgatctctgcttcagaacagataatttcccattattcacttaaaccaagcttaagatttgtgggttttctaaaatgtttttaattttaacaaatcgagtttcaattagaccttgtagacttaacattttcaatctgtcagtaatgaaaaggttaaacttgagaggaacaccctggtgggtttctgtctccctcaaccatcacaggggtgcagggagggggaaggaggtcagttactccc

SEQ ID NO: 32060 - DNA, 492 bp, Mus musculus
  source 1..492: mol_type = other DNA
aatggtatctactatatactgtgtacaaggtctgttctcagttcgttacaagtcgtaaattactaatcataattgacatcaatccatgtgggtaaaatcacctcattttacagaggagaaacgagagttggttaaacagtttgctcaaagccatgtagtgactaagtggcagccaggatttgaatctagtctgatagtgttgttatgatgctttttaaacaacttacttttaaaagtaaattttattttgttccaacatttagtgccaaaataagaaagagtagtacacttcatacctctctaaggtaggtaataataacttaccaagcttacaggaggccctctttgtattcaatataaaattactcgagtcatctcacagttcatgagctgaaaagtgaactaaaacgggataattttatttctctgtttccctaagaccgcaattctgagtctcgtttctatacatccagtgcagagtcagtagagaca

SEQ ID NO: 32061 - DNA, 347 bp, Mus musculus
  source 1..347: mol_type = other DNA
gaaggcatgtatgaacgtcctccaaagagaacacccatgcttttcaaagtaacttttttagacatgatataaatcagagaagattgcaggcttcagtttgagatgattttgttttatatcaaaatgaaagactccagtaggacaggatctcttaggccagcctttctggccaaagaagaaaacttgtcttttatctgaaaggattaaaaaaacgcaataacttagaatatcttttcatattggtaattatgcttagattcttcctcatacaaaaggcttgtttaaaagaaaagtcattttacatgcttgtcttagagtcctagggcccaaagaactacattcccgga

SEQ ID NO: 32062 - DNA, 529 bp, Mus musculus
  source 1..529: mol_type = other DNA
tgtgtgtgtgtgtatgtgtatgtacgtgcacttgcacacatgtgcattatgtgcatgccattgtgtgcacttgtagttcagaggacaacttttggcaataggttccgcatatcgtcaggactaaagtcatgtttctttacccgctgagacatctcactttacttatataagtggaggggacagctatacgcagagtattgcaattcaacttgcttccttctatcatgccttaaacatttcaaagcactttttaaaggggatagttcttatgtttgaaagaatccttctactaagatgtcagcaaaagatagtattattgatatttactgcacatattatttcctagatgattttaaataacttatttacatgtatctacttacttcatatcagatggagaagatgagtcaaattttcagatgagggtgaaaatctcaattgtgaagaaatgtttcatgcatgagaggaccacagacagggggcggcctctcccgcggggcctctttgtcccggggcgcgctcccctccc

SEQ ID NO: 32063 - DNA, 440 bp, Mus musculus
  source 1..440: mol_type = other DNA
tctatcagctaggtacatgggctaatttttctataacttgaaaactttctctagagataatactatcgattgcatatgagttttataagaattacttaaactgacagtgtttaagtatctaaaacctaagtcatttatatccaggtctcttgattttaagaaatacaatcatgtttaaacttagttctctttctagatgtatcaaagattttcttctaaaaaatgtatcacctgacagagatctgatcagggtttataatatacaataaataaagatgtatgcttttattaatatttaaaagaaaatttactaagaacaggtaccattccaaaatttttttatccattgtggtccattgttggctcccattgctggctaagcacggagcctcatttccctgaagagccaggtgccagctggagctggggatacataatgc

SEQ ID NO: 32064 - DNA, 363 bp, Mus musculus
  source 1..363: mol_type = other DNA
actcattgtgtagagcacgatgacctaaactcttggtcttcttgggattctaagcattccaaaggccgtgactctttaaaaccataaaattattttgttgctaccacttaactgtaattctgttatgcattgtgtgtatatctgatatacaagatatctaatatgtgacacatagtaaggaatttccaaagttattttacatttttaaaatgttcgaactggaatcggtttgaaaaatctttccttaaaacgcattcgcgcgtgcgcgctctctggactcctggagacgtttctcatcccgggtttaacagtggtggatttcctgaaattgttgaaatgaatttaagcgctccgcctactctt

SEQ ID NO: 32065 - DNA, 391 bp, Mus musculus
  source 1..391: mol_type = other DNA
cagttcccgaggcccaggagctctgctgcattatacagtgtgtgtctgaagtcacacaacttggaggaagctaaactcagaaccaaagtgtgtgtgtcgtgtgcgtgtgcgtgtgcgtgcgcgtgcgcgtgcgtgtgcgtgcgcgtgcgcgtgtgtgcgtgagcttaaggcatgccaggcaattactctgcagaccccttttttacttaaaacaaaggtttattcacttaaagtatatgtatgtgcatgtgcgcatgggcataaaatcttgtggacactatatatatatatatatatatatatatatatatatatatatatatatatacttcttttgagttaggttgaccttgaactcacaatgctgttatttagaaatgtaagtgggaca

SEQ ID NO: 32066 - DNA, 331 bp, Mus musculus
  source 1..331: mol_type = other DNA
tgccactttcagactctctgaagagctgcatgaccctcaagttactaagaaccctaagtgacttagcttgactgtctggataagttacaacttacaaacagagaagaaactatatgccttgaagcgttgttttttgtttttgtgaattccaagaattcaaataggcaaagcttcatttaaatcctctgggcatctaagttgccaaggtgtctgccaagtctgcaggtgcattcaccaggttacaggaggaagacttcctggttctttgcacgccggccagccacggtgaagactcccagcatgtcctgcgaggggtcacgaggcacgctcc

SEQ ID NO: 32067 - DNA, 307 bp, Mus musculus
  source 1..307: mol_type = other DNA
gcctcagcagactgcgggaggctgggtggctggcacagactctcccttagtcaggacagaaacgggcctcagtctggctggtcgagcaatgggccagtgtttctggctaagtcttttttattttttaaagaattatttatttcttttatgtataatagtacagagcagtcagttcttttactagaaacaggctagggcttgaccacatgacttggcttagccaaagcactctccaaagatatatactaacacccattggggctaggagtcctaggtctgcctgccaatgttttgttcacccatcact

SEQ ID NO: 32068 - DNA, 433 bp, Mus musculus
  source 1..433: mol_type = other DNA
gtgccatcctcctgcagctttctggaggatgctataataaatgttatcgccttgtaacaaaagactttttggtgaaagcaataacccagtgaatgcactcagtcttttggttagtaaccaaggcaatcatggcttcctcgaaggtctaaccagagaaggtctttccttaaaaaacagtgtataatgcccaaacaatggaaaatgcataaagttttggggatttaaaactctcctcagtgttcttagatctccgtatttcactgtcaacaatgaaaaaaagttttctcctaagaaccggttcttcaaacgggagatggtgactctctcatccccgcaggatgcagggcggccacattggctgagctctctggcctgggagggcgggggcgtggctgggccggcgagagggcgtggccggcgccgagaggcgggg

SEQ ID NO: 32069 - DNA, 466 bp, Mus musculus
  source 1..466: mol_type = other DNA
ttgtccatgattaccaaacctttggcactttaacattgtttaatggtgactgggagttggcatctcagcacagtattgctttggatcaaaaatgttgcgtgtttgctcagtcagactgagatgggggctttattgtgataaagagccttggggccttggccccttgaaaatccgggggctgtgatggggcggggacatctccagagtgacataagtccgcagggactgggagaggcggggcccgtcgccctgctctgcgaggagagattgcgctcgagcttctccttccgggggggatgctcagccccgcgggaaaacttgccgctttaagtgactcaggaagtgaaaggccagtggaaccggggcggcgtgggcccgcggcggccgcgatcttgccgggcaacggaggccgggttgcgcggcgcaggggccgacggggcgcaggctgccgcgccggaagtggcgc

SEQ ID NO: 32070 - DNA, 527 bp, Mus musculus
  source 1..527: mol_type = other DNA
tgtttccaagagatttgctggtaaattaaatccaagaaagtctatgcatcagttacactaaactagtaaaacaattgtttattttcctttgtttggatgacaacttaaaaacaaggtgagaatgttgacaataagtgtttatatctatctagatatccctatctctacatattgaactttctttaaaatgggaaagccaagtggcatgcgaccaggggacctgacttggctgtccaacttgcacagcaaggtttaaagttaacctcattgctctcaagcctgcaatgatcggctacagatggttcctctcccagctggagtcacatcctctagggctcgagactttccgggcctgacccctgcctgtcggtggggggctgtctgaagttttcagatcagacaccgcacggacgtccccgccccgaagtccgggacagaacgtggggccacctctcgctcctggaaggatcgcagaggagggggagggggatccccctcgctcccacgtggtccgggcgcctgtgaat

SEQ ID NO: 32071 - DNA, 279 bp, Mus musculus
  source 1..279: mol_type = other DNA
taccgtctgtggatctgataatcataggctcaaacctcagagctgtgcccctcacttgtgtgagagacaccccaggtttactctatcctcccatcgcctgttgggggagggcatactctatctccttctatggatttcaggaggccagtcagtgctgccaacaaaggttgagcgggctctggtatcccgctgtcccccgtagatcgctgtgcactggcctccaggcgtggtcacgactccccgggcctgaggaaagctttgggcggtgggagagcccgg

SEQ ID NO: 32072 - DNA, 361 bp, Mus musculus
  source 1..361: mol_type = other DNA
gctgagcagaacttgtcattattatgcaaagctgggcaggagttggactctccctcgcagaaggccccccacgctcagaggcctgctgagaactgagccctgggtgggtgaaggagatgcgtctccagcccttgtgtgtgtgtgtgtgtgagagagagagagagagagagagagagagaaattatggcatccctcacaccctttaatattaatctagacgaatgattgaatgtccgggatttattcgggcccgggtaaagaaggacccgcagctgggtcgcgtttccttcctgcagcttcttggggcatcccgggtctcagcgcttggcccagcacagggtgacccagggccaagaagtcg

SEQ ID NO: 32073 - DNA, 421 bp, Mus musculus
  source 1..421: mol_type = other DNA
ctgcagcttcttggggcatcccgggtctcagcgcttggcccagcacagggtgacccagggccaagaagtcgccccaggctgcggcgccctcttcggccggcgccgagccagggcgcagcggcctctaccgcctcccccggctcggtgccggccactcctggtaccggtctgccccgcggcgaagcaacgcacacacacaggtggctgctgggaagcggggagtgtgttcctgcagccctgcggccagcgcgacctcgcagcagccggtgcaggatccccgcagcgcccctcggagcgctggccgcgagccgctcacgggaccgcgcgcggtggaaagccgggacgtggattagcgcccgcagcagcctcccgcgcgcgccgaggcgctaaagggctgagaggctgcccgttaaataccgct

SEQ ID NO: 32074 - DNA, 231 bp, Mus musculus
  source 1..231: mol_type = other DNA
accactgcacctaggtttgcatgggtgcaggagagctaaccccagttgatgagattcttcacagtggatcttttcagacccagattcacattgtattgagttgtattgatacggggccaggcaactttgctaggctcaggagcctgggtctatgaagaagatagatctggctcttgttcacagcatcaaaggccccaaatggtcccgatgaggcttctgctttaaaatacc

SEQ ID NO: 32075 - DNA, 158 bp, Mus musculus
  source 1..158: mol_type = other DNA
ggctaaggacctggtgatctgccctacagtattctcaatacttacatactggagtataagtcacagttatcttttatcagataaattacagcattgtaatttgattctcttagacatatacctcccctcttcagctcttgacaagagggattgataag

SEQ ID NO: 32076 - DNA, 125 bp, Mus musculus
  source 1..125: mol_type = other DNA
ctctcagaggttcctgggaaaaccagtctttccctagccggggcgaggtcttagaactcagtcatttaggctggtaggctgggccagggcggccattctcttctgtccaagagagcagggcagga

SEQ ID NO: 32077 - DNA, 427 bp, Mus musculus
  source 1..427: mol_type = other DNA
tctccatatatagggatggccaccagggacatttcaaggtttataaagaatttgtgaaaagccacttattcgacaataatagttcagatgctctgcattaaatatttcctgttttattttaaattgagaacgaaaggttagtaaagatatcgtcctgtttaactgaaagaaaacccatgttgccgggcccattttccttaaaaaagagtgccctttggggtgccagcagtcctactagcacagaggggcagccgcctagagctcctggccgaagccccaccccgccgctcgttccaagtctgagcggccggcagaacgccgtccctttggagaatctgcggcggcgcaaaccggccggtgggcgtgctcctccagtcggagcgtgcgctgtgggcggggccagcccatgcaaggcggggcctggacg

SEQ ID NO: 32078 - DNA, 441 bp, Mus musculus
  source 1..441: mol_type = other DNA
actgcttaagaacaattttatgtaataggctgtatgaatttcatgccacatattttacttgaaacattctagcaattgtatgctgcatacattaagtgcagtaagattaaagtttaattaaagaaatttgacatgtgatttaaaatctgaagacagttcttttgccgcatgccataggctaagtcaagctctgtgctccaacttgctccacggtcgacaggccaagcagcagcaccctgagccagtcccaggcttcgacggctgcagtgaagcctccaggaggccgccatcttcccggctttctccgggaaagctcttggcggcctcaaggcccgtccaggccccgccttgcatgggctggccccgcccacagcgcacgctccgactggaggagcacgcccaccggccggtttgcgccgccgcagattctccaaagggacg

SEQ ID NO: 32079 - DNA, 261 bp, Mus musculus
  source 1..261: mol_type = other DNA
tggccagggtagtcgctcacctgtgcaggttgtgcacccttagctcagggggtggggatctgtgaaatccgagacaagctggtcctccagcccttgtctggctctgaggtgccagcaggcccttttggggagcgagattttcacctgaaactgcctctaagctgaaacacaggcataacctggttagacctgttttgtttgaacaaagtctgagttggccaaatgcaaagcttaacatcctacaaaatgattttaaattat

SEQ ID NO: 32080 - DNA, 241 bp, Mus musculus
  source 1..241: mol_type = other DNA
taacagcttcttcagggaagcatttccggaagacagaattctggtgtttgaggcttaacagtgcagcctgcggggcaagagtctctgcaggctctcagaatcatccagaacttctggtgcgtaacaagagaagaaactatagtcctttggctttcttttccccagggaggaggggcccggccctctcttgatagccaagcctcttttaatcctttggtgattaacacatggaaataaacag

SEQ ID NO: 32081 - DNA, 343 bp, Mus musculus
  source 1..343: mol_type = other DNA
tttcaggctgaaagacgattcttgtgtaatttaatccatagaactaacataccagggcaggagccagaccctgggttctggcttcccttagctgttagctctaatcaaatattgcttaggattgggaccaattatgtgcatcttttatgtgcacagggaaaataaatctgaaatataagactcattgtccatgctgggaccgataatgctcaggactcttctgatgtttagtagccacgtcaggatcctgttggaatcagaaagggctgtttcttagggggcactaatattaatatttgtaataaccttgattgtagctaatgcgaatcccagagatactatc

SEQ ID NO: 32082 - DNA, 545 bp, Mus musculus
  source 1..545: mol_type = other DNA
tgaaacagattccttctctggaagacttctcagaagctttaataggctaataggctttgtgagtgccaagtagaaattgtgggtgacagtctcccaaggaaagtgttctttgaacagtagctggggctattgctctctggagtaagcctgcctatggccatccccaaaggcctggcttcacccaagctcctgtggtgtttagccctgactgaaaatggggatgaaaatattgccctccctctctcagtggcacctggataatttctgtctgacaccttgggacgcggagcctcacctccctaggaggcctgtcgtgcaccagggagcatgtctctccctgtcttatgaagctccagtgagagtcagagtcttgcctaaccctctggcttgcgggagccagctggaggctgccattccaggaccctgctaccgccgggctacccagaggaggtgccacctgcctggaagcagtatgcagtggccatctccctgaggaggaggggcccatgcccatccagccagggccttcacagggcagggacatg

SEQ ID NO: 32083 - DNA, 332 bp, Mus musculus
  source 1..332: mol_type = other DNA
aacactcctcccagatgactgcctaggccgtcatttagatttgagagaaaaactgggtagttctcagtgagacagctgacagcttgcaagccaacatggctcctgtattcaaacatggcgccctttgggtgcttagagtggaaaggccagtgaaagcactgcggtgattggctgacattaccaagtatggccttcccagcaacccaaggacagattccattattgcattaatctgatggatcccttggccagcccaggctgaatttccttccctccagcttgctcaacggagattatccccccgggggcaagaattgtcacaccgtatgtca

SEQ ID NO: 32084 - DNA, 409 bp, Mus musculus
  source 1..409: mol_type = other DNA
tgaaaatgatggcatctacatatgtgtatcaaggcatttaaaagagaaaaaaattcaacctgttaattaaaattcaaaaaccaaatatttacaaacattagtaaatgttttactttctagttttttttgaggcgaaaatgatcttggaggctgggagtaacagcctgcaccgctcttccggggagaactacagatttcacagaggaggagatcctctgaagtaagattaaacactttctgagtgtttttacagtaaattattggtatacagcttggtaaattctgagctgtgactctcagaggtcagagaacaccagcccggggggtccacctccgggagcccccacggccgtccggcggtgctgattggtggagcctgaagtcaccactccagcgggcctggccaaca

SEQ ID NO: 32085 - DNA, 378 bp, Mus musculus
  source 1..378: mol_type = other DNA
gtagctctctagcgagccgcttggggtgcacctccccatgccagcagggaacacctgcatgcacgaggtgttcagtaggaggaaagccgttcattctttaggtttggactcctggatacaggggtgtgatcacaggcctctgagtgccgggctaagatagtctgtttcgattggagcctaaagtcaatataaacaaaactaagaagagaagcagaggtgctcccctgccctccaaataaatagcttttcatttctcaaaagagaacaagaaaggtgagtcgggtctcctcccagttttcttgctcacagctttacaaggagctgcctgcctacagcacataggggcttgcatagcccttgcccggcgtggctggcccg

SEQ ID NO: 32086 - DNA, 463 bp, Mus musculus
  source 1..463: mol_type = other DNA
attccagttttttgttttcattacaacggaaataccatatctgggctacttaagcagaatcgactagccttatttcctatattggttcctttaaaaaaaaaaaagtcgagtactcacaagggtcattatttctaattataacaaagtactggtagttttattttcttaagtgcatttagaaccttagtattaagtctagggctgtattggtgacttaaaacaatatggctaggcatcatgaagtctttaaagtccattgaaatttagattgatattgaagttttggggaaggaattcgttttagataacagaacttgtgcccaaaaatgttgctacagacattctcaacaattactgggctagtttcatgccttgtacaaccctgctatagaggttttttttgtctagccaggttacccgggcgaaatgccgaagcgtcgaagccatggaaggtcccatagct

SEQ ID NO: 32087 - DNA, 578 bp, Mus musculus
  source 1..578: mol_type = other DNA
ctcagctccagagcctgaggcttgactccgtgagggtactttccagatatgcaaagggacaggaacctggcgccgaggacacggcccgacgggaggcgcggtccgaggcattccagtcgggcagcctcaccggcttgcagagcgctggctggctaagtccctcccgcgccggctcttgtcccactaggagcagctcagagccgcggggacagggcgaagcggcctgcgcccacggagcgcacgtctctccagcggctccgcgcgcgcacggtgagcgccatcccggatcaagccttcggagcggtccgagcggctgggagggctcgctcagggcctccccacccccaccccaggcaacgggtgccacttgccccgatggggaccgttgccctggcggttgacggcggccgtgccaggccccgcccccggcgcgagcttggtgccccggggaggggggaggggcgggcggcccggcgccccgctggcgggtcgcgcgcgtgcccgtgggccccttcctgccggcggcgcgcgccgccccctccccccaccgcgcgcgcgcgtagccgcctgcccgcccg

SEQ ID NO: 32088 - DNA, 326 bp, Mus musculus
  source 1..326: mol_type = other DNA
acctaaatttccttttcatggattttaaattataaattggtcatagtctttaaagttttgggtaaaatcttaaacaaatcgggtaaagataagtttcctgatatacttatctatcgccatgaaggatgttcattctccaatgctctccatacagaaggaattctctcagctccagagcctgaggcttgactccgtgagggtactttccagatatgcaaagggacaggaacctggcgccgaggacacggcccgacgggaggcgcggtccgaggcattccagtcgggcagcctcaccggcttgcagagcgctggctggctaagtccct

SEQ ID NO: 32089 - DNA, 452 bp, Mus musculus
  source 1..452: mol_type = other DNA
aatgtttattttcacttcagatagaaatgaaagtagaataacaagttatgtatttatcatataatttaggcttgcctaaacattgtaaaaaatttgttttttaatttagaaaaactaaggacttaaatagaaaatatctttttatacatattccctttcagtatacgtgtcaggacatggagagaggaatccgggaattcatttctgaactgaaatgcccctgaagactgtcatcatcacaaggaactcaaggcccagggggacctaggttttccttctagaacttgtcttcaagcttgaaggagaaacctgcccttttctttgttttatataagacaaaataatagtaagtaataactgaaagtctttttatcggaaggaacttcctccgggagagggccagcctcaccgctggagttcgctctttgaaagaggcttgctcaggcgcacct

SEQ ID NO: 32090 - DNA, 491 bp, Mus musculus
  source 1..491: mol_type = other DNA
tgcccttttctttgttttatataagacaaaataatagtaagtaataactgaaagtctttttatcggaaggaacttcctccgggagagggccagcctcaccgctggagttcgctctttgaaagaggcttgctcaggcgcacctagcgcgtgaggttcctggtcaagctcgcccctctctggagagcagtcgcagctactagcttgccgccagcagagccgcactgtctcgggcatcgcagctcgaacccgagacgagcgcgcgctagccagccgcaacgcttttcagcctgaggcagaggggctcaggggagactctcggtctctgccgcgggccctttaagaagccaagtcagggctgccgctgtcgccgttgctgctgctgccgctgccgccgccgccgccgccgccgccgctatttggacttctattgtatttgaatcgtgatcaggaaaaaggggagcctggggagagccgcgcggtcagctccccgc

SEQ ID NO: 32091 - DNA, 336 bp, Mus musculus
  source 1..336: mol_type = other DNA
catgatgtttttgcaagctgaacacactataataatatcctgtttttctcagacaacctgattgtgtctagacaagacaaatttatgtttatcaaaaagaatcaaattccttgtcctaaacacaagttttatagcacttggtggaaaatactcacatttgattatttcttacacttaagtagttggaagaaataacatttgttggacaagggggtttgggaccgacagcagcgcccccgcagggctgaccgcggggtgggcggggcatcccgggggcggggagcggccgccgagcggttcgggcggcgggggcgggggcggggccggggtggtgcc

SEQ ID NO: 32092 - DNA, 341 bp, Mus musculus
  source 1..341: mol_type = other DNA
ggccttagataataagctattgggtaagggccttaaatacttttaagaaaaatgacaaagttatagcaataaactatttcagatgaaatacatttgagctggccaacctttcctacagaaaaactttctgtgtgttagttttttggaaagacaaatgtacggcaggaccatttgtccctcccctggtttctgaaagaattctcgcatgcccggtgttaaggtaactgcagtcaccttatgctgcccgcgatcacgatggcatcagagtcagaaggtcgcaggccttctcgcgcgcgttctacctgcccacgagggctctggtcatcagggaccccaggcgc

SEQ ID NO: 32093 - DNA, 330 bp, Mus musculus
  source 1..330: mol_type = other DNA
cttggcacaaagcaggcctgcgatgctacagcttgctttctggcccctggccagtcattccaaacaaaatagatggcatctggaaagatatctatgatttgtcaagagatagttctggcacaaaaacagttaggaaaggtttttggttttgttagccctggctgtcctggaactctgtagaccaggctggccttgttgttttttttttttttgtttttttatttaaaaaagaaagggaaaatcaggcagaagtaaatgcaagcctttcctgtatcctaggtttccagagagtctggtcctggcagccaaatgctctctgacagagccagt

SEQ ID NO: 32094 - DNA, 356 bp, Mus musculus
  source 1..356: mol_type = other DNA
cccaccaggaaatgttcctgtggccaacagagcatttcttgttccctttttaaaattaagacagctacataaataagtaaataaatattttaaaaaaaattattgttcccctttctggcccctggccagttgtcttcattccaaacaaaatagatggcatttgtgcctggaaagatatctatgatttgtcaagagatagttctgaaacatgggcacaaaaacattgtggttttgtttgtttgtttgtttgtttgtttttaaagaaagggaaaatcaagagggaaatgcaagcctttcctgtatcctaggtttccagagattctggttctggcagccaaatgctctctgacagagga

SEQ ID NO: 32095 - DNA, 469 bp, Mus musculus
  source 1..469: mol_type = other DNA
atgcttttgcatttatgattatcagtttgtaattccaaaagttaaaagcaaataaagagcttgttaagaaatgcttctgcttttgacatatgttgggccatttaaaggggcaagtcaaattgatgagagatggcgacatcggttaccaagcctgtggaccggggttcaaatccaggggcccacctgaccatacatgtatcatatctcatgtgtgtacatgcatgcacacattaaaaaaacacatttaaaagtgaggtatgatgtcatgtagagattatgatgatcttagaagataaaatggctttttttttcatttttgaaattaaaataaaaataaaaaaccctctacttaaaaaaagtacttgaatttccaagtactgcttctattagcctagcatgtcctaagttaacataaaggctgattttcaaatgaggccagagctcatccctgggataacaagctttagtg

SEQ ID NO: 32096 - DNA, 453 bp, Mus musculus
  source 1..453: mol_type = other DNA
aactgcttgcccaagactagcagtctgcacatatctgtatacacaagttcggagtaagcagcctgaaggaaattgacttcataaaaatgagctgtacatgtctcttggacagaacatccgataacttatgtgttcagaagagaattaaactgcatttcataaaaaaagaaaaatttccttttctccctctgtagagaatgaagtcagcacacattttttttcagtttctaaataatgagtggaaatattttccactccctgataaaaggagaaagctgaatttctctctcagcctcggccgccttctgccgagactacagcagctgcacaagctgactcgtggggcggggcctctgctctccagagctccgcctcctaggggcgtagctagagcgaagggtggggccacgctccgtcggggcggggcctgtactcctagacacggggctttgg

SEQ ID NO: 32097 - DNA, 339 bp, Mus musculus
  source 1..339: mol_type = other DNA
agccccagctgctgcaatggagaatatctccatactaaagctttgctctccttgtcttagcataagagtttggatttcctagtttccaggagcgaagaaacagtgggcagcttctcaaccactgtggtggtgcacttggaaaacttccaagttctctttctgcgtttttagactcctaagatgccaagaaacagtggaatcctgcttcggcccggattcagaacgctgacggaagcgatccgcgcgggccgcctggcgggctgcgagcgtcaagggcgcggctgcaggcggaccctggggaggggcttcgcggaggcgccgcggccctacccgagcggg

SEQ ID NO: 32098 - DNA, 359 bp, Mus musculus
  source 1..359: mol_type = other DNA
ttcataggcagagaaataatttatcactcctgagttcatattcccaactgagaagtcatctccaattgatagccacttgcaaatgaaaatttagtttcctccaagggcatctcactggggaagcaaactactcttaaaggtaagctgtatgctggcatcttcggagattccttgtctcataatgtccttatttacattttattataattttattttatttacgcgaaccagtaattttaccgtattatattattatattattccttagaagactgctaacacacacacacgtatatatataatttttcaagatttattcagttatatgtatatctgtacatagccagcatgctctactg

SEQ ID NO: 32099 - DNA, 305 bp, Mus musculus
  source 1..305: mol_type = other DNA
cacaggcctttagtcctagcacagaggcaggtagatctgtacgtatgtgtttaagaacagcctgctctacgtgaattctctcactgtgacagccttgggctttattggttcacaaaaaaaataataaataaaagcaaacgctttctttcgtaagtatcagcaattaaatagtcactaatgcagaagccttaatggattttgtggcggggtttgtcttcagagaagactcagtcatccttgagggtacttacaaaagaaagagtttacttatttattttccttgtaccgggagagcacaggtggct

SEQ ID NO: 32100 - DNA, 479 bp, Mus musculus
  source 1..479: mol_type = other DNA
tgagggagacttctgaaatattcagactccattatcaaatgttgcagtgactcaatatatgtacatttgattcatgcatctatttgcttaaaaagatatatgcatctcattgtatcaaataagagcttttaccttttaagttaaatcttagctgctgttgctattcctatctttaggcaaggaaacagagacgtgcccagtctactcctctatagtaggtgagaagtctggatgcaaagcaacattccttcgccactatcaacgcaattttgcagataagagatcgtggtgagatgtgttcctctcgaaccagcagggaggagctcggctctgcaactctcgtgaaattccaagaagcgcgggagctcccaggccaatcgggtggatctttccggccggcctcggaaatctccgggcgtgacgttagctcacgcactgagcccgccctctgggagcgctctgcgcttgccccctctgcc

SEQ ID NO: 32101 - DNA, 398 bp, Mus musculus
  source 1..398: mol_type = other DNA
ctagcctggtctacagagtgagttcctggacagccaggactatacagagaaactacaaagtagcaaagattcctatcttttatttaagatagagacagctattatagcgccccaggcttggattcttgtacaacaatgatcatgcccgccccaactttatggacccagggacatgatatttaggggaaatgatcttcctttctggaacgcaattctaaggcgccctgcgctggcgcctccctgtgcggccggagcgacttcgagccgggggccaccgcactccctcggccgcccccctccagcgggagagccggccgccggtccgtacaggagcatggcgccgcccacgctgggcaggcgcatcccgcctcccccgccccgcactgagcgcggccggc

SEQ ID NO: 32102 - DNA, 306 bp, Mus musculus
  source 1..306: mol_type = other DNA
tttataaaaatgccttttagcccagggtatatagaaagaccctgactttattcaaaagaagaccgtcagctaggttaatgatctccaacatccagggttaatttagaatcaacacagatttccttggcaggaagccccatgatcggacaggaaggaaaaaaactccaagtatttattatcctgactggtcctaatactagcaccttgggactcagcgggtctagccccgggctagtaccgactcgcccgcacgtgatcgccaggggcggagcccgccgggagccccgctccccgggagttaacccg

SEQ ID NO: 32103 - DNA, 490 bp, Mus musculus
  source 1..490: mol_type = other DNA
tggatcacaagccaaacgattcatatgatccctgaatttcattactcataaggagaaatttatcttgggatagaagattctgaactccagagaaaattcgtttgaatttgaatcaatttgaatagaaatacagtcccttgtctgtggtttaaagaaatcattgagttcccaggcacagtgctggcaagccctctcctgtccgcacccatgcgggtgctccggcgcgtaggcagggcgtccacggagcagccctcgtccggcccggctcccgaatccgcagccagcagcgcggggcgccgaggggggcggggcgacgagctccaacaacatggggcgcccgggctgcgggcgctgtggccgcctcgcgtcccggccgcaggcgccgccgctctcctgacgtccgagccgaggcccgcccgccgcagcccggttcccccgcccaggcgcccccgccccccggccgcgccatgtgaggggcagctcccgccac

SEQ ID NO: 32104 - DNA, 587 bp, Mus musculus
  source 1..587: mol_type = other DNA
tgccatgcatgctgtttggacatgaagagtgtggtgagacactgttctcctatcttctcacacctcgattatttttaattatatctctcacacaacatttttaaatagagaaattttcaaaatttaacttcatctcatgactgcttatgctcttgctgtttcaaaaaaaaaaaaagaaaaaaaagttcaagatctaagattatttgttcaagaaggatgaactttttagcttagctacggccaaagatatccagaaatattctgagaacaaacacaatttgtcacattttgtttaaatttaccacaagtattcatccactggaggcttattagttagcagagtgatgatatcatcacatgtttggaaacaattttgactcggggacatatttgaaagtatttttaaatacatctgagaactttgtaattgctattaattgatttttggtcatgtgacaatgcaaatcactaacaaagtatattttctcggatgaatgctatgttgagaacagctgaccgaaggtaacctcgggagggcgctctgatgggggaggtggagcgctgccaggtgacctcctcgtccggta

SEQ ID NO: 32105 - DNA, 427 bp, Mus musculus
  source 1..427: mol_type = other DNA
tcacctgtgaaccatcaataagattagaatttctttttctctaaagttaaaaattatctctttcctgttcccttctccctggcacaggaagcgataagtggtagcaggtgacttcacctgctttccttttctatgtaatatttcgcttaaaaaacaaataaacaaaaaactacattgtcttcttgatgaataacatattcatgaacatcaaacattattagttgttcctaatcaataacactggttggttttgttattgtttgcttttaaattgttccaaagactatttaaaatgaacataacagaacatggtggcatagtcctttaattccagcacctcccccgcctccaaataatacgcagggcggcagtgagatctccgttttcgaggccagcctggtctgcagagtgtttcataacaaacagg

SEQ ID NO: 32106 - DNA, 577 bp, Mus musculus
  source 1..577: mol_type = other DNA
tggcttttttcaatgcaactcagggccacctacccagggtggcaccacccacagtgggctgggccctcccatgtaggaagaaaatacctgacaggccatttctaataaagtctgttttatggctccaagttctgcatccaggttcaatcaactgcagactataatattctggagaaatatctgtgctgaatacgcagaggacatagaatttacattggattagctattttaagtgccctggagatgacttaaagtacacaggaggttatatagattctggaatccttagaggagggatcctggagtcaatccctaacatacactgaggcactgtgtattctggataagtccttattaattaagtgggagcattctttgaaaactagtcacccttacttagcaaggagcatggcctagcaactagctctcagaggcagcaagagctctctaggctcccgaagcttttccgtgacccgcagggcaggcgggcagaggacactttagcccaacccacctagtactgtgggccccgcccacgaggcccgccctctgtggctgacccggaagcggttgtgcg

SEQ ID NO: 32107 - DNA, 451 bp, Mus musculus
  source 1..451: mol_type = other DNA
atgtaaagaaagcatttgttcacttcctgctttacaaatctttttctaagaattagttaagtttaatgtttttatatcattcttgctgacaaggctctattcagcccctggccttgctcctgcctcccagccgcctgggccaccgtcgcctgtggccgcggaaggcccgcattcacacgctcaaagtgctcctgcgggctgtccccgaaaagttctgggtcgtcatcgacgactgcggacgagccctggcgcccaccgggcccgcatccggaccctcggccgcgcacgcgccgagacccaggtcaggagagcgcgctccccctcacgggctccgtcccgggaatcccccgcacccgttgccccgggtcctcgctgatatcgatgaaggccgggacgctcggtgccgtacagggttacgcacaaccgcttccgggtcagccacagagggcgg

SEQ ID NO: 32108 - DNA, 675 bp, Mus musculus
  source 1..675: mol_type = other DNA
ggtcgcggagccactaccgcgcgtggaggtcgcgctgtccggcagctgggcaggtagggcgcattggggaacatcctggcctggcccgaggacgcctggctgggcgggggaggaccgaagggtccgtagcgacaggccccggctgtaccggtggagaagtgcaaggtgaaggcgctcaggcactgctcctcgtgtggctcggcgccgccccagctgggctcctggcggagcgggaggaggcgcgggaccgcccagcgacccgtaagccgaggcgcccggaggcgcgaagtccaacacgggcgcccactgcgctgcgccgctcacagggagcccgcagccgccgccgccgccgcccagcgaagacacagcgggcagcagcgcgttcaggtcccgcacgtcggaacccatgaggtgcggctcggatgcggacggttctccgctcctgcgatcctgcggattctcggcgctggacttggcccaggcgctccgggggcctcggtccccaggttgctccggctgctggacgcacccgggctcccggcggagcgtgtgctgagacgccggctccgggacacacgtggaagccggctcctgcgacaggatcgcggcgaggaggcggcgggcccgggttcctgggctgccgtcccccagcttcccaaagcgctcggccgctca

SEQ ID NO: 32109 - DNA, 259 bp, Mus musculus
  source 1..259: mol_type = other DNA
tgtgtttggagacgggcaaaatttcccccagttaatttaaggtttgtaagtgtcatctacactgtaggtagaacccaggagagttctctgggctctcccttgcctcaaggcgcctacactcgggaaggccagctcgagaggagggtgtctccgagatgaacgctccctcgggcccgccccacacccccggtgctagtaaccgggacgagcagcgcgctttgctgagctaggctagggctgctgtgagcggccgagcgct

SEQ ID NO: 32110 - DNA, 323 bp, Mus musculus
  source 1..323: mol_type = other DNA
gcataattttgtataaaaggatctttgaaacaaggcgcattcattccgaagcagcttctgggaggactccataaagaacgtcaaaactcgggccaggtctagtgagtttcaaagtacagtgaaatctcacaaagcacgtgatgaaacgtgtccaccttaatccagcattggggtaggttttagacccgaccctattctgaaacctaacgccttaggtgttccattcatactggaaattcatgagcctcctttagagcttttataaccgcagggcaaggccgcccaggctgccacgtcacctgcaacctgacctcactgggtcc

SEQ ID NO: 32111 - DNA, 472 bp, Mus musculus
  source 1..472: mol_type = other DNA
ctttaaaagattgtcgaccctctgacatgtttgttagacactagccacgcgtggctatttacatattgggctccatgtcaaagaaagttatataatacagaggtatcattatttcggatttaatacgctgataggatttgaaggtttgtaaaaatggcttgccaacattcagaaacgaaagctttatatgatatctctgcttctttgttcatctctgggccagccttgggctgaagttcgggctgtcagctggaagctgagtggaagcgctgcttttctggacccgcccctcgcaacgagatagcggggaggggccgaagcccggagcccggcgcccaccaccctggctggcgacgtggctccgcggccccagcctcccccggcggcgccgtggccaatgggcgcgtgagtggggcggcccgagcctcctcgagccagccgggcgcgcccctcgctggggaggggacagcgg

SEQ ID NO: 32112 - DNA, 338 bp, Mus musculus
  source 1..338: mol_type = other DNA
tcaaactgattttccagtcccatactgccaaggcagtgtatgacattaaaaggatttatttagaaagtatataaaaataatgttaggttcctaaatcaagtacatttaagtgtaaggaattatttattgttgagtctcccattggctcataggaaaatgccagaagccccatatacttattgattctaattagcctactttgagtcatgtgactgtgtgagtcagaatttcagaatcattttgatatgcatttccccataactgaggaatttgaacatttctttaagtgcatcatagggttggtgaaaatctttccccatttgggcagttactgctct

SEQ ID NO: 32113 - DNA, 478 bp, Mus musculus
  source 1..478: mol_type = other DNA
taggtatctattccaagatagacaggcttagcaaatctaagccgtcctctgttccacagagggtgtgaagaccacgggatcagtatctggcgaccttgcccctcgaagggaaatccctctaggccacaaagtcacatcatctacattttctacatgaatggagccaagcgagggaagcccgggcactctggctttgggacttccctaaggaaaacgccaatggagccacagtctgtgcccagcttgtctctctagagaaccgcgtactggatggcccctgaactccgcaggacctcagccagaggcaggctgggcgtgtgcagttaccggccagacccctgaagactcttaggatggaggagtcagactctgcctgaagagagggagtctcccgccgggccagagagctaatctgccgagcttctggccgccgtgacgtcatccgcgcccggcaaccaatgagggcattgctggcgtg

SEQ ID NO: 32114 - DNA, 370 bp, Mus musculus
  source 1..370: mol_type = other DNA
cgagcctctccaggctggggcagtgcgtccgctccgctgagcacgggcctgagctggggtgaccgccgggcctcgctgagttctcggcctggaggccctcttcgggcctaggcatgttgtgccaccatcgccggagtgggggctgctgggatccagggacactcccgctactttgtgtcctggggccaaggccgaggtgttcgcggccgcagcgctggccgccgaagcgcatggagcgggagacctcggcgagcgccagagccgcggggggcccagcgccccaatcggctggcgcgaggccccggcgctgctttgcataaagcaatcgaaccgtggctcggcctcatttcccggccgggcgccggcacac

SEQ ID NO: 32115 - DNA, 261 bp, Mus musculus
  source 1..261: mol_type = other DNA
gttcgcggccgcagcgctggccgccgaagcgcatggagcgggagacctcggcgagcgccagagccgcggggggcccagcgccccaatcggctggcgcgaggccccggcgctgctttgcataaagcaatcgaaccgtggctcggcctcatttcccggccgggcgccggcacacccatcaccaatcagcataggtgtgctggctgcagcctttaaaataccgtcatttcaaaccgttgtggtctttaagcaacaacacctctt

SEQ ID NO: 32116 - DNA, 343 bp, Mus musculus
  source 1..343: mol_type = other DNA
atatgaaaaaaaaaatcaggtctgaattacatggttttttttctaccacaaataaaactcatagtgtagtaggattagattcaaattactagaaaaataaggtacaaatacatctaattccactcagatttaggggagagaaacttcaagtagtttccgttatttgcagctgctacaattaagttgtcagagtaaaaaaagaggcgtctctctgctaaacagcaggggagagcgccagcagtggctttagaagccctgggggcgagagaggccgcggacctgcaaggaaatctcagttctattggctgccgggactttggggctagctctgacaggccccccg

SEQ ID NO: 32117 - DNA, 392 bp, Mus musculus
  source 1..392: mol_type = other DNA
tctactaatactttcaactttttctaaaggaacccttctttaaaactctaaaaagttttgtgggttagtaaccatgcttatggccgggccaagcacaggggtgatgggctgcccaggagtccctcccccgacctaagagctggtccagggctgggagcccggttgacaccagcagttgtccattccgcaccgacggtcgcgtgccagcaatggacagcagccgagggccccctccggggcccccagaggccttgcccttcctctgacccgcctcggacgccacagaccgggagctgagggtacccgcgccgcaagtgtctgccgccggggggcctgtcagagctagccccaaagtcccggcagccaatagaactgagatttccttgcaggtc

SEQ ID NO: 32118 - DNA, 624 bp, Mus musculus
  source 1..624: mol_type = other DNA
catatgggttgtctatggtcattataaatgagtcattcttattttcacggaattatttttaaatgaaagcttaaaagacattaattgatatgaagaaaagatttataaaaagcagcttactaataatttacaaaattgatctctttgtttttgccaaaatcctggactatactaaatgcttcagctacttatatgttgacaaattttgaatataaacaattttgttgttatataggaaaaagaattatggtcctttataaacccagacatatttttaatttctctaatgcactggggtataacatacagaagtatcccaggaaggatatatctatttttaaatctacattttcactgcaacatgaaaagattctgaaaaaaaaaatctgtatttactataaatgttgacatatgcttgtaattcttgcaagtctgattcttgggctgaatcaggagaatcaccatgaggttgacgaaactaacagtgagacactgtctcatctggttttgaagcatcattttgcagcttaacacatcatgaatccctttaaacttgaagagacttaaaaacaacatcctattctgactttagcaaaaacagtttgggaaggaaacactatgttt

SEQ ID NO: 32119 - DNA, 385 bp, Mus musculus
  source 1..385: mol_type = other DNA
ctatccattggagaacccaatctgtgcttttatatttagattttaaagtcaactgtatcattcgtttttccttacgtcatgcaatgctcattacagtaaataatttatcctattagaatatttcctacctaattttatctttggtgcttcttgaattgatatttggaagaaataagactactttgtagggagatcatattaaggtctcaaaactaagatgattctcttctgttaagctacaaaatagttctagcaatgcagttaaaaaatattttaagtcagttgttcaggtttaacggaaattattatcaaatcccgacgcgttaccatagcggccgcgtctggactggaggcggggcccttccggcggaaaagaaagtgggtt

SEQ ID NO: 32120 - DNA, 303 bp, Mus musculus
  source 1..303: mol_type = other DNA
aagagctctgtagcactgctattggtgtaggataagatcatctatcacctctgccaattatgacaataagaatacaaatggtacattatttctgagagtctgtttggcagcattatcaaagttatattttcaaaaggttcacatttttaaaattcagaatgcccaattccagcatggaaggtacactgatgtaccttgagaaatgttcatttcatcacaaatctgcagggaaattgatgaggttggaggggccacagcaagactgaggctgtgacaacttgcaagtgcctccttgactaccaa

SEQ ID NO: 32121 - DNA, 301 bp, Mus musculus
  source 1..301: mol_type = other DNA
cacagtcagctagtcggccatgtaaatgaagaaaatacctaattaaaattttaaaaaggtatttcttatctacttaataagtatgtaagaaatgttaaggacatacatagttcctgaatttccctggttcgcttctttcttctagagtaaaaataaagacgcacctgaagcagccgcagcttggcggacacgcggcgtccacaggcaggcgtccgccccaccgaggctgtccctggagcaggagtccacttgctgcggcagccggacggaaagcggaacccactttcttttccgccggaag

SEQ ID NO: 32122 - DNA, 417 bp, Mus musculus
  source 1..417: mol_type = other DNA
aatgtaacaaggaagattacttagtttatagaaaaatgtaatgaataaattaaattctaaattagtacagacctaatgattttatgtcttcgtggggatatatacatatatacaagtcattagaattatgcataactataaacagtcttaaaatgatagatacataaaagttggccatttaatgaatgtattcgtccttaagtgcgtaggcttatattggtattaaatgcagaattttgtaatgcctgtgggaccttttttcttttcataaaaaattattctgtcacacactgtgcctgtatctgtcattttatctgaggagaaacgaacgcgttcgaggccgccagcaaggaggcctggagccttgaatgctgacagcctccattagcgttaatgttgacaaggcctcagcggtca

SEQ ID NO: 32123 - DNA, 381 bp, Mus musculus
  source 1..381: mol_type = other DNA
ccgtgccaaccaagttttctaaaaaagagaaaattggagtaacttcgatttatttatttgaaggtgaaaaaacaccagctgggttggccttttctttctcaggaacaacattacagagccaaagtggagggaccctggggtcgcccctctggagctgtgccaggacctctgacagagcctggcaggacgaccatctggggggctcgctcagcttcctgccgcctgcttgacccagggagcaccagcagcctgcgggcctcgctctcctggaaaccccgcggcctcggggcgtgggtggggggtgcgtgcagggcgcggggtcccagcggggagctcacagcaagcggcgcctgggcggccctgcttcctggagctgtgctc

SEQ ID NO: 32124 - DNA, 401 bp, Mus musculus
  source 1..401: mol_type = other DNA
ctctacatcttcctctttgggacaacttaaagattaacaaattgcctcttgggttttctttttaaaatgttttagtttattcttttattaataaaactaagatcccccatatgttgactctgcagggacacccaaaaatttcaaaaggttaatttcctgtggtgtaccttttactcaaagatctagactttttttttttttttacaatatataatagagagagcgttttagaatatgtttagttggaatggatcaaaaaataaaatgtgagactttaaataaaaggtccattccttgagttgcatttaactctgtttggtgtcctgcacagaacagatttgcaaacgaagtaaagaagcaactctccttcctcctccggaggcctccgggctggcttccgc

SEQ ID NO: 32125 - DNA, 467 bp, Mus musculus
  source 1..467: mol_type = other DNA
ttcctttgaagcagattataaactctctacttacacacagagtgaaaattgaaatacttacattgggctcgatccttgtttctaatcatattattaataaatgaatattacaaattaataaatgagttaaacagcctcattctctatagagttcacagaatcctgatagaaatgggtatatgaataactacaatcagaaagagattataactctccttatcataattagggaatatttagggaattacaatttctgatgctcttcacaaagcaaacaagatgcagaagtacttcctatttgttcaatcaattaagacatattttggtttaccttcgcaatggagccaaagcaatgtgaaagaatagtctagactctagagtcacatttaaatcagattcggtttgtacagaaaccatcatcactgatagttaacacccagtaaatccacagggttttaagtttgtat

SEQ ID NO: 32126 - DNA, 306 bp, Mus musculus
  source 1..306: mol_type = other DNA
aaagtttatctggggtggggttgccttcctagagacacacttagttgcttataggataggaaatttcaaaagctccagcctaggccattttaacatatggtctaatatctgtgccaactgggccagcagctgaagctgcagactctcagtgtcctgcagtctgatacccaagtgctcctgggatagcccgacgggtggggtcgcagcgtcgtgactgtgcccgcccagccatgcggggaggcacccctagtgacagccccaaaggccacaccctcggcccggccaggccccgcccccgcccgtgcg

SEQ ID NO: 32127 - DNA, 599 bp, Mus musculus
  source 1..599: mol_type = other DNA
ttaaacattaccttactttattctcaaaacagactataagatataaacatattgttttgattttattaggagaaaactgaagtgttagaaaaacttttatagggaagtatttctcttgtaaaagaaaccaagtcaaaattagccatttgtttttaaaatactttctaggtcaagtgactataatatattttaatttagtttgaaaatatgtttatcttgttatcttgaaaaattatattggtaaatgactaagtaggcatgtacattccatcttagtgttacaagtgtatttggttaaaacagagaggttttaacaatacaaccaatactattattgtgcagttgtcaactcatgaatttggcagaagtaattgctttttaacaaaaagaaggttgaaatttccacctttggttagaaattggatgatgcatggagccattattttatagtagacagaaaattgaaagttacatttaaactttcgccagatgagatcttgtttttccaggatgatctacaacaccctttcaaagtaggtgctgggagcaaaggcagacacacttcagttgctccgacggaaggacgagggccgtctgtc

SEQ ID NO: 32128 - DNA, 329 bp, Mus musculus
  source 1..329: mol_type = other DNA
aatcattcctgctgactgaaatagttcttttcatacactgaattcaatagcaagtactatttattagctatattataatgcagcattggctttttttgtactaggcaaggcaaatgagctcctgctgaaaaggctgcagaaactgcaggattagaggctgcttcacagacagtcagggccggttttgcttgaggctacaactgggctccaggaactgtgagcgtcctcagcgaagcctagaacctcggtgctgacacactcggtagctccgggtctttccaagccgcgctgccgttcggatgacgtcagcacgtcagacgttttcctga

SEQ ID NO: 32129 - DNA, 480 bp, Mus musculus
  source 1..480: mol_type = other DNA
tagattaaaggatatgctcctaaaatctgcaagtaagagttgcttactaaatagagtcatataaacaataacaatgtaattcagatcgtactactaaatttttctaaagggttgagaataaatataaaataccctgccaattttttaatattccctatgtttttaatgcatttttctttctaatgtatacattcagaaataatgcaatctgataatgtgaattggagcatgttaaatgctggcaaatagcaaatattttcgcaaataccaaatatttttaatcagtaataacaagcctgagtcctaatccttgggaagcaccccagaccctaggacctccgcccacctccgtcacggctgccggaaacgaccgcgcgcgttgccacggcgacgctccggcatctgaggcccagcctctggcgccaaactgcgagtcgctcaggaaaacgtctgacgtgctgacgtcatccgaacggcagc

SEQ ID NO: 32130 - DNA, 121 bp, Mus musculus
  source 1..121: mol_type = other DNA
ttttaagacactgagtctccttattgttgtgcttgtctgacaaccgtatgatatatgtgggcatataattgacatccgcattaatttcaatctaaaaacaataatgttattagttttcact

SEQ ID NO: 32131 - DNA, 276 bp, Mus musculus
  source 1..276: mol_type = other DNA
aaaaagcgtgagccccagtttggtcccctcattgagctcgctgaagttggcttcaagtgtttatcaccaggatctagccccggggcggggaccctgcatgtttaaattgacctaggtgagaacctggggcaaatcgaggtggaggaagctcaatcttcctgcggatataatgagtttagttaacttggaactgcaaatatctgattcaaatgtaagatttcagtagattcattactaattatgaagctttttacacaaatctctagtgaggaggat

SEQ ID NO: 32132 - DNA, 483 bp, Mus musculus
  source 1..483: mol_type = other DNA
ttcctctaggaaatttaatgtttaagcattcagatacagtcatacagcaatgccttaacaacgtggggtgcaagagtctcggatacccatttttgagtcacatatgccaatttttcacggtgacttgaaatttattacagtgctaatcactgggccctgagaagaaggagcctctcttttaatcctcagacaggtctcttgttcttttatatttttttctaaaaaaaaataaaataaaatgaataataaaggtctgccctagcctttacttattgctctgctctagaggaagggggcttagtgagctacccacccctcaccctaaatcctggttaagtatatatacatatatatattgatgtgttgttgcatctacaaagcatgcaatgccctggaacggaattcttctaataaaagatgtatcattttaaatgcgcggaattctgattctggtaattcgtgcactagagggagcctctcgtg

SEQ ID NO: 32133 - DNA, 440 bp, Mus musculus
  source 1..440: mol_type = other DNA
aggtgttacaaacttaatggactatgatctttgcaaatccaagtttcacaaaaattatttcattgaaattagtgactaaaaatatttgggtccaccaagtctttccaggggtcctggggttagattcccaacacccagttccaggggaatagattgttatatacattaatataaaaattcttacaaattacaaaacattcacaagcagattttgaatcggctaactaaaaacaatcttcgtgtatttctgctcaaagagagttttagataaaattcgaattgtaaattttttaaattagatcaagctaggatattaagaatttagccgtcggtcgggtaagggccggaactaaggtcctgacttccccgaggcagggggttcttttcaacctcaggttgttggaaggaaaggaggccacccgtcggtcgcaaagcgtccc

SEQ ID NO: 32134 - DNA, 290 bp, Mus musculus
  source 1..290: mol_type = other DNA
cttaattaatcttcattgttacattatgttctattgaaataattttccccaagggattgagaatttaactcagtgttaaagtacaagtttgcagtaaacatcagtagagttcctgctaaggtccaataataagaaagtattttaggtgttttttttttttttatgaaacgcataaacaaacagttcttgctgtgtttattccaataagattggaactcactttgtagacaggctgtcctcgaactcagaaatcaccccactttaaatctgtagtttacatttgatgtaaa

SEQ ID NO: 32135 - DNA, 299 bp, Mus musculus
  source 1..299: mol_type = other DNA
ctgatgactgagccttaaacataggggtctttgtggagcattttatcttcggagccatgatttcaaaaagtagagcttcagaacttcagaagctgggactttgtgctcacataaaagcaccgagttacttttatgttgccacctagctaattacattatctctttagatgctcagttgactcagatgtcaactgtgcacttggaatgtgggtgctttccttatcaggatattacccataaatcattaagtatataaaatgtatcattagaagactcattggtgtaacagtaatgagaca

SEQ ID NO: 32136 - DNA, 428 bp, Mus musculus
  source 1..428: mol_type = other DNA
ccctcccccttttaactgaagagaaggggatatccggggttattcattaataaaaaatactgttattatcttgattgaattctatcgatgtgtttaaggtagcggagtaaaccataaccccgcacactctgtgtagtttcattgcctgggggtgggggtggatgcacgccctctcccacagaactttttgaacgtgtgagactcacactcgcttcctcctactctagagcacattgcggggagtagggtgcctaggaaccgggattcgaccacccctcctgcggagaccgcagagggcaggcacagagctttgatcagggataccccgagggcttccgagggcttccgagggcttccgagggctgagcccccgcaaggaaaaggcgcgtcgtcccctttaagcagccaccccaatgggtatcggtggc

SEQ ID NO: 32137 - DNA, 312 bp, Mus musculus
  source 1..312: mol_type = other DNA
gttaactttatacagtatagatattttaatgctcttctctaatgtaatgggttcattaaaaatgtgtacaaagaaaagaggcactgagaatgctgatttttttttttctataaacattatgtgggaaaaaggaagcaaatttagctcaaaaatttggatcagatagaaagaaatgtttctccctccttaagaacagcgaagagtcatttgacacgtctgaaaggcagactcctggtcttaagtcagggcttttacttcttgaccaatagcgctcccggagcggggttgcataacccggcggccaggggctcc

SEQ ID NO: 32138 - DNA, 364 bp, Mus musculus
  source 1..364: mol_type = other DNA
tgtgattcttacactaatgtaatgtacattagccaaaagctgcgtttttgtatgcagttcatcacagttcaaaatttcattttaaaaagaacgatggatttagccagggctacagagaaactatgttgacagatgctgcccatacagtgagaaactatgcccacagagggttcatgaactaaaaaattcaatcacgagtgctagatttttttttttttagggggaataaccatggcttcaggcttctgccttttccttttaaaggatccgctttagtgacactgataagtgtcaggaaccttcctacctggactgaggatggctacaagccgctgattggtcggacggcgcgcgcggagcctgc

SEQ ID NO: 32139 - DNA, 265 bp, Mus musculus
  source 1..265: mol_type = other DNA
tcataatataaatatatggaatgcaagtcattataaaaattaaatgtataaaatttaaagaggagatattatagtaaaatataacaaaaggctcctttgaaatttcaacttagttgtaacagcatggcttatgctgtgtagtagaattccattgcatttcaagggttgggccccctagtaaaggtattccaggatctgtgttattctggtgaacactgtgggttgatgtgtccccaagtcatttgagaatcttccaaagagcctt

SEQ ID NO: 32140 - DNA, 535 bp, Mus musculus
  source 1..535: mol_type = other DNA
gttagaagagctaatggtcctatgaaaacacttaaagcattctggttttttcatgtaaactttatctttttactaatgtctactctttgaatatatattgagaaccctagataaacatgaaaagttaagtctataacattccctgattcctgaatgtcaggtatacggtcactaatgtgcattgctacaaatttgatggattttgtaataaaaaggagccataaaaacaaacccagtaagcttttaaaggactttggtatttttatattccagtgagaaatatactgtgcaagtaaaaagtaaaactagaacagaaatagtaccatgttctaagtctcctttaagcaaactaattgcattaatattcccttgatggtaattatgaatcattgaagcagtttttgtttcaaaagccagatgcctctgtcattggttaaaacaaacagagaggcaaacttaacattttccatttgcgtagccttgtttcttattttataatctaaaatttctgttaaaagaacaaggaattctcttc

SEQ ID NO: 32141 - DNA, 735 bp, Mus musculus
  source 1..735: mol_type = other DNA
taaaccagctgtggtaatgtcactatttgtgaattaattaaaataaaaatattttctttcaaagcagtacggtttttttaacttaaatttaaatctttgtaccttaatggttgaatacaatctatgagatgctcactggaacgttatctaatagattacacagaggtcccagttgtcctcttattgattaaactggaaacttttatttttatttttattagtaactatgcactatgaatataaaaaatcggttatctatattcattttgtttcaaaagtattgattttaataacctttaaaccatttccaaacaaaactatttccaatacttcaaattttttatttaaaaaataacgttttgaaaatgagtaaaaaaaaatacatttctcatctggtatttaaatgtctgaaatgccatttctctgaagcaatcacctctttcctaaatatgctaatagcagctggattttatgtttataattatccagggtctcctttttcaagattgaaaaaaggagaccctgtacctttaataaaggaactggtgaaagctttctttccaaatttgttccttggcttccaagtgacgaaactagctgttcctgcaatcctcaggatatctttaggggaaacgctgcattccccaggggttgaaacatagctactagctccgtctccctggagccagagggaaagcgcctggagcagcaggtccccagtcggtgggcggcttc

SEQ ID NO: 32142 - DNA, 387 bp, Mus musculus
  source 1..387: mol_type = other DNA
tcatgcatccatttttatatcatggatccttattaaatcatggaattttttaaacaccttgcttatgtcctactaagagatgattccagcaaggatacaaagaggagaagctggaataccacactaacttagtctttgtatgctagtataaaaaacaaatgtgggctccagatgatttatcaattactggttaatccattcctctatttaaagttttctattgtaagtgcagagatatcagtaacagagctgtgaacagatgccactgacagttgtgtttggttccacttcaggaataatgaaatgctgaagtagtcaaattttatcacctccatggttcctaataatgtttaactttcattttaaaaaaatctaggagataataaa

SEQ ID NO: 32143 - DNA, 324 bp, Mus musculus
  source 1..324: mol_type = other DNA
atccttttaggtgaagtttcatttaccactttagccattggtgttactaactaagctgcttgatcaagagcgctcctgggtcattctcaggtaagccccagtgattccctaaatttagtactggacattatttctatagtaaccccctctacagagctgtgtaaagatgactttctacaacatcagtttctccggagttgtcacagcttccttgcctgcaaacaggtacccagcaatgtaagggctgagaggaggtcagtcaggttcttggctgctctattacacaagcaagatactgccagccagccagcaggccggccagcc

SEQ ID NO: 32144 - DNA, 383 bp, Mus musculus
  source 1..383: mol_type = other DNA
aatgcattttaggagtataatttctaatcaaactctgggccaacattttaacttctgaaaatttaaaatgatagcattacctcatttttttttcttgaaaccaattaagtgcatagattctgtacaatcaaatagctcaatgccttttaggtgaagtttcatttaccactttagccattggtgttactaactaagctgcttgatcaagagcgctcctgggtcattctcaggtaagccccagtgattccctaaatttagtactggacattatttctatagtaaccccctctacagagctgtgtaaagatgactttctacaacatcagtttctccggagttgtcacagcttccttgcctgcaaacaggtacccagcaatgtaagg

SEQ ID NO: 32145 - DNA, 266 bp, Mus musculus
  source 1..266: mol_type = other DNA
caaacacaggttctttttataatataagattatttttatggctttttaattatgattatattgattagaaagaattaaacctttcttaaatgttgcatgctagaacttagttctctcccacatgaatatttaagaaggaaggatggaacattagtgatagctctaaaggaatgcttggatttatgccttgctcactgcagcactgagaaacagccgggatgtggggttagtagccactgaggggagccggccacggactgccctcc

SEQ ID NO: 32146 - DNA, 244 bp, Mus musculus
  source 1..244: mol_type = other DNA
atgaaatgcacattttagagcatttgaaaagttcataagtacttttgaaacataagtagcatattatccatcattttgtaatggggctaaatttaatcaaagtactttccagaagtgcatttctgctttaaaaacaccttcagtgtgctttaagatataattcagaacattgaactatcctgttgtaacatgaattaataaaatttaaaaaggaaataaggcacaaggaacgcccttgcgcaca

SEQ ID NO: 32147 - DNA, 583 bp, Mus musculus
  source 1..583: mol_type = other DNA
gggcaaacatccttagctctttttttacctttcagtaagagaaggaagacaaggtgaattgaactcagcttattttcataaattttgatagtgttagcagctatgggtaggtgacctccatattccatcccgagccgggctttgccgtactgggggacgtacacgcgcgcgggtgacggtggtccacgcagcccggcacgctcggacgccaagagctgcgacgcgcagtacggccgcgagagggcgcgggctccattatggcggcacgccgtggggccgaggagcggcgggaccaggggcgcccagcctccttccgcagctgccggcctcggcaacctgccctgacacagggctccaccccgtctgcgctcgcagggtggccacagctctgccccgcttccagccggagaccctgggaaaggggcagccaggtcctcggggcgccacgctccgaatggcgcgaggggccgcggagaacgcggctgaacggggacgccggagagccgcaagccccgccccgcggccggcgccctgacaacgcgagcggcccgggcggcgccgccgctctccgcccctcggccgg

SEQ ID NO: 32148 - DNA, 117 bp, Mus musculus
  source 1..117: mol_type = other DNA
taactggtcaaaaatcaataatcaattaattaaaatcttttttaatttagtaaaatctttcagcaaataacagtgaaaactacagtgtaatgtttctaatttttgcttgcttacaaa

SEQ ID NO: 32149 - DNA, 545 bp, Mus musculus
  source 1..545: mol_type = other DNA
acttaaaaaaaaaaaaaaaaactttacgatttttctggctacaagtttagtatgctactatatttttgccactataagtagtgctgcaatgatcattttgcatatagccctggctgtcctggaactcactctgtagaccaggctggcctcgaactcagaaatcttatgagacttttcagtcttttaaaaactggaaataccccctcaccatataagaaagagctgaacttgtggtcaggtcccgagtttgaatcttggttcgatccctaaaacaaccgccaatatcttaacttcttccctaggatataggaggttgagaatccttgagtccttgtttctccgtgtgcaatttgaaattaaagataggactgatatcaacagtgaatgatgcatcaacattcaacccggcaagtggctggcacacagtgggcagttccatggatcttaataactttgcaaggttgctgctagctggaacagcaagatgactggagaaatggactacatttcccaggatgccttggagagacttccgtccaatctgg

SEQ ID NO: 32150 - DNA, 526 bp, Mus musculus
  source 1..526: mol_type = other DNA
agtgcaatgcagagcaatgaatgatgatcgcattcattctctagtcagcattttactgagtcttgtctggcagaagacatttctaatgacaaagcaacatggaaagtaacataaagcttgatttactctccctgcccgtttatcagctgagcacttgataaagctattcaatgttattgtggagtaaagccttaaggatacctttttctttaaaacagttatgttgaagcttcctttacataccaatttaaaactttaaatacagttttctcttttaaacttgtgctttttgtttataaaatatgatgtgtcattaaatattggctaagagaagcctttcactgactcttgcaaggttttcccatatgctttgaacttaagcaacaatggaaaccgtccttttgttttctgagttgacagtcttcattaaagagggtagtttgtgaaagtgttccctgatctttctcgtgtgaagtaaaaggacagagtttaagccggaaggcgtgtcttcaagcgtcccactccc

SEQ ID NO: 32151 - DNA, 350 bp, Mus musculus
  source 1..350: mol_type = other DNA
agaaataaacaaaactactgtatttgaactgataatttaaaagtaggcatttaaaatagtaattctttaaaaatgtacatactcttagatgtagcaattccactcctagtacaataggaacagatgtcctccagtaatagactaaattacaatacagatgagccattgaatattaaactcctttctaggaatgataacgcttaatgataaaaaaaagttagaaaaggagaccagataaatcctgaactcagcttatctttgcgagttaaaagtactcagaaaggattaaaacaacatttcaatttcgtgctcctgagagacagaggttcaatgcgccggaagtgcactgc

SEQ ID NO: 32152 - DNA, 285 bp, Mus musculus
  source 1..285: mol_type = other DNA
ttacagtatttaggcctctgctcaatgactgagttatctaaggcaggttctgcaaccttgtttgttaaaaaaccaaagcatcgaacttaaacatggatcaccattttttgatatagattttaaaaaactttttgttttcgtctgaatgttgttagctacagacacagttacgcccattctctccggggcgtggacaagctccgggccggatccggctcgggatgatgacgacatcggctggcgacggtggcggcagctttagcggccttgcggcggggtaggact

SEQ ID NO: 32153 - DNA, 490 bp, Mus musculus
  source 1..490: mol_type = other DNA
gaagacaaacttagtcttatcttcttaacctgagcaggctctggtcaagggaattaaaatatgtccagaaccaattctaactctgtagaccaggctggcctcgaactcaggttcccaaccgaagaagactgcatttgtctgaagactgttttcggttttttttttttttttaaataataaagttgataaaaattgttaaaagagattgtcagaaattatgtagtgtttaccacatactctccaaattactttgtatgttttcctcatttccattttacagatgaggaattcagactcgtccaaagtggcacagttccagagcctggtggtttaaatgaaaatgaatattcatcttctcctgtgtggcaaagcgtcggacgcacctgtggacacgagggggcgccgccgccccgcaccctggtccccctccggcaggcatccgagggggcggagtctgagctgggtggggcccggctggccgcccacgggg

SEQ ID NO: 32154 - DNA, 310 bp, Mus musculus
  source 1..310: mol_type = other DNA
ttattattattaattaattacttttacttttacctgacccctggctctccagtgctgggattaaaaggcctgcaccaccatggctggcttccttaagacaaaattaacctcggcttctgttaacctctcttgactttaaaatgacttatcttctttaaatcaggttaactaaaaaactcatcggacaccttaggttttgtgtcatgcaaacactcatatgactatcacacaaagtgactttatggcgtcgtggtccccgccccggccgggccccgcgccccgatcaccacggccggcgctcggctgcttc

SEQ ID NO: 32155 - DNA, 476 bp, Mus musculus
  source 1..476: mol_type = other DNA
atctgatttccaaattgaggacagcttcttgaagctcccaggggctagtgaagctctaggggtgtagtgtccttatcagattaaaaaaacaaaaacaaaaaacaaaaccaaaacgtttattgagtttgttctttgccctctccttatcaaattttaaagagtgaatgggttctctaaagaagtgagtggtcagcgccctgctccagatgtgcaaagtggacaaatctagagggtttgtgcccaatttgggggcactgaatctaagcaactggcctttgtgtaagagccatcttcccgtcgccgcggggcgcgcgtctccaccgaatgtgcggtgccgtgcggtgcgggggaggttccacggctccggcccgggtccctagctctgccccacacccgcccggcgcgcgccgcgctgcgctgtccgcggagtccgtggctgccgcgcacttgggaggggtgggcgggctgctcgcctg

SEQ ID NO: 32156 - DNA, 388 bp, Mus musculus
  source 1..388: mol_type = other DNA
gttgaagaatcagccatactttgtcagtctgattatcatgtaaaatatgtatattacagaggctcatccctgcagctcagacaccattcctttgggtaactcaacagagatatacattttgtgtttaacagcaatagaatgattataaccactgattggtctatagacttgggatgtagatatatggtttatagacttgggatgtagatatatggtctatagacttgggatgtagatatatggtctatagacttgggatgtagatatatggtctatagacttgggatgtagatatatggtctatagacttgggatgtagatatatggtctatagacttgggatgtagatatatggtctatagactcgatgtcattatcccactatgac

SEQ ID NO: 32157 - DNA, 501 bp, Mus musculus
  source 1..501: mol_type = other DNA
ttatgacaaacagctttaatttctgttttaagaactctgggagaatcctttcatgtttcttcaggactcttcatatataaaaatatccctcttgtttaatagcctccaagaaattctcgaagaagttttcatattcttctgagaaattctaaggatcttggatttggggaaaggcccactttgatgactgtcaaggaggaaagtagggaaataaaaatatagattaatatctcggattattcctctgctatccagaaaattacttttgttgctacttcataactgtaattttgctatgaattgtaatgcaaatatctgtgtttttcaatggtcttttgggagtcacaattaattcacttcatctaaggatgatctataaggtcaatgagcaatttagttttcatccagctgggggccacacaacttattttttttccaaaccagtgttttggattaaaaggcactctagaggcttgagcctccttctggaggctgagatgc

SEQ ID NO: 32158 - DNA, 351 bp, Mus musculus
  source 1..351: mol_type = other DNA
ttctgttgtttaaggaaaaaagtagatccattatatttgataacttaagttcgcattggaaattcgagtataactgtactaaataccctagaaattcaagtatttctactgtgtttgctggtgtggagaaagatataaaataaacctgaattaagtgaagcaaagtagctttactaatgttaattttcaactggacaaaagacaaacctcttcgaagatctgtgaggggttacttaaccacctgtgacagattctgtgtccaccatgtccttgtggcagactcctggactgtagcaccagcattcactgcattctgcttcttggttggtaccatgtgaccagatgcattgc

SEQ ID NO: 32159 - DNA, 352 bp, Mus musculus
  source 1..352: mol_type = other DNA
tttttttttttgctattttcaacaaaataggctccatttaatttggttgcagcaccaaagcaaggttggtccaaccctgtttgtagaacacccaggtacagcagccgtaacgttgttgaaaatctgcattccagatgaaacctgccagcattaactgctctcagagttgtgtggccaaggcctttgatcaccagggggtggttcagggctgtccggaccagcttgccggctcagcacttttaaaaacctcaacttgctcaccgtaggctctggggcggagctcctcctgaagtcctgggctgggattacgggacaggctgactttgcctgtgacaaaaagccttttgtcctg

SEQ ID NO: 32160 - DNA, 459 bp, Mus musculus
  source 1..459: mol_type = other DNA
gatacagcttgccatttgcaaaaagtcattcagaacgtcctaatttttgagatatgtgtgtatatatatgtcaaatatatatttatattatatattccatatatatatatgaacagtacctgttaggtgttcagtattgataaaaaggactgagtgctggggtcgcatctggggttaacaccagctcaagggttgacaccctttattcagcacaatggtgaggcacgacccgctccgttgctctgctcagcgcagccgggactcctgagcgtggagccccatgcaggcgaagttcagcctcccatagaagccggggtggggggatttcctccctcgctcccctctccaacgggagcggaaaatggtgacctctcccacccagacgggcaggggcaggggggtgcgggtcccgcggcggcgacggcgcctgaccaatggagagacgcagtccccggcgct

SEQ ID NO: 32161 - DNA, 454 bp, Mus musculus
  source 1..454: mol_type = other DNA
aacatgaatcgtacagtttttgtatgtttctgtcaactacacagccagcaacctatttttccaatattaagttgaatataactgagctatgttgaagtcaacttgagagtaaacagtattcattagtagtaggtagatgtctggctttacttctggctgacaagttttgctgcttctagctgcagtaagaaaaaagaaccacaagtttcttgatcctaagatcctgggtcccacctgccccgaaagtgtcctgcacgttcactgctcagagcctccgggtcccctggggccttaagggagggtagcactgtcaccagggcttattctaaaatctagaggatgtcaattaaagatgccatctacttgtggcaatcttcagttggagctgagcaacattccaggcctgagacgcaggcgcctgcaatgccttccaggaattctgggaaggcctctt

SEQ ID NO: 32162 - DNA, 302 bp, Mus musculus
  source 1..302: mol_type = other DNA
cacaacataagttatttttatagttatgactgaatctctctctctctctctctcatgtgtgtgtgtgtgtgagagagagagagtgcagtgttgtgcttaattaccttaattaccttatgtaagaaaatttaataatactaagaccttgggtccgggtccgaaccgaagagcaaagcaaacatatttgaacacgtttttgacatttttcttccaaagaaataggcaaagagaaagaggaactcactctcttcactgtgctttcggctttgccggaaccttttagacaggcagctcctggccac

SEQ ID NO: 32163 - DNA, 538 bp, Mus musculus
  source 1..538: mol_type = other DNA
ttttaacagagaacatggtctagcttaataaatatctgttaaagaatggtgcatctgctgtgatgagcaaatccatgagggaagtgtgaaccccctcccccctgtggtgctttatagccaagggccgcccgacgggccgctgacggctggcttgggctgctgcaccgcggcttccagcagcctccaaagactgggcagtaccgggcacgttcttggtcctggcccctccccgggtcctgacagggagcgaacaattaaagaagcaaacaaaaattgttttttaaaaaaatccacgaggccctccccctttattgcacttaaaagaggggagtgggggctggcgcggtgcggaagagctggacagcacctcggtgccgtccgggggtcagatggactcccgcagtctcccggcgaggggcggggctgggtggcagcgtgcaggtggccgagctcctgcccgcgggagaccggtgcctgcgccgcggtccccgcgatcttgcggtctgagggagggtccgcgcacggaccccggcgcctg

SEQ ID NO: 32164 - DNA, 361 bp, Mus musculus
  source 1..361: mol_type = other DNA
actttggtgcctcctaaaattgatgggaccaattaagaactgacatcaaaatgtaaattttaagaccgattctagaatctgtcaggctggaccatgctgacccgtgctgggagaaatgagcacgcattagggcccctggctcgctgctagggcggccaggtgaggttacctgggcgcctcagaagccccaaggggcgctgcagttctccgtctccccatctccggcgcagcggggggactccagaccgtctcctccccccgcggcgcgcggccgcggcccctcgggctccgacgctcggcgacagcggcacgccgcgctctgctcccctccgccgacctggcgtgacgcaggcggagacgc

SEQ ID NO: 32165 - DNA, 313 bp, Mus musculus
  source 1..313: mol_type = other DNA
ttacctgggatgaagaactttatcaaagcctgtttaaaagatgcccatctatctgccagcaagtaactgagatatttttggtatcagtgaaatctgattttgagcaaaactcttacagagtggatgactctgggctggacttggctagaccatgagcatagtcaaaggaggaagatgcactacccaggtgcccctttactggaagatgagaagctgctgcagccccagcccagctgacccttctccaagggcagggcgccggtctgggagccccctggctaggtggcagatcaggggccccccacccctgccc

SEQ ID NO: 32166 - DNA, 488 bp, Mus musculus
  source 1..488: mol_type = other DNA
cttgagacatttttaaaactatgttttatggtccattgagtatattttaattttttaaaaaatatttattgttattaggacccacttggttcatctggttttagtcttttaacacttaaagcaacatatattttcatgttgttatatttatactaaaaaggaatactttttctcaaaggtttatgacaactgcattcaaagctcttcttctaactttgaaatatagtatgcatcaacaacacacaaggaccagcctctagtaacagttagaacatgtggctggtttatttcaccttaacttaataatctagatctgataatgacagaatctctctctctctctctctctctctctctgtgtgtgtgtgtgtgtgtccagatcatatgagtattactgtaataaacactgcagtgcaaacatctccttaatgtacagacattattgtcattgaaacatatgatagctataatttaaagttttcaaaatt

SEQ ID NO: 32167 - DNA, 471 bp, Mus musculus
  source 1..471: mol_type = other DNA
aaggggcacctgggtagtgcatcttcctcctttgactatgctcatggtctagccaagtccagcccagagtcatccactctgtaagagttttgctcaaaatcagatttcactgataccaaaaatatctcagttacttgctggcagatagatgggcatcttttaaacaggctttgataaagttcttcatcccaggtaatgacccaccttaaaaagcaaatgtttttgtggagaagttcataagagaatttaccaacgtgatttagaaatacagtatccctgagcataagcattgctacaaacgggagtcatctccttcgtggagaacactttgaaggaactttgcatttttttttttttcagaatgaaacagaaagatagcaaaaatagaaaactctcttgctgagcaggactgctgattagacttcaggggccgggcagtgctgggtcctcccctcagagcttctcaaccat

SEQ ID NO: 32168 - DNA, 432 bp, Mus musculus
  source 1..432: mol_type = other DNA
atattcaacagtaagatgaagattgttgactacatctgccttttagaattatggtttttaaagaaaatttcatatagttaggtgcaagattcttatggaagttcagatctaaaattgttgtagttcggagtaatccatttccttctccctgatagaggaaattgaaagaatctgagtgttaaaactattagactagcaatcatatatgctgtgactttgtctattggatgacgtcattgattagataagtaattatcaatggaaaagagctttgcttttacagttaaacatggaacatgtactgcatgtactggcgttccatgcagattttatggaaaaactcaggctgatctctgagtgccagccttaggtctacacatacacgagatggtctggtgtcatcctttgtaaaagggaaaacattgccactgg

SEQ ID NO: 32169 - DNA, 448 bp, Mus musculus
  source 1..448: mol_type = other DNA
cgcatatcaacatattactaaatttatggattgtagtatgtctgaaaagttggctattatttagcaatacaactgaatcagtgactgatatgaacaacacagatgcatctcaaaataattttgagtgaccaaaaaagaacatattctaaaatgtatgtaaaatagtttctttttaaattttatttttacttttatgaacccaggtcatctggaagagcacctggtgcctctgcaaatttgcataaagtttatataaaattctgtagttaacagtgacccataatctcattgccatgattctggtgatacaataatagatagacaactatttcaaagtgtattaagttttacacttggttacttccaggcagtttttgaagtcacacggtgcctcaaattcaaataaagtatctttcttccttccactagggggcaataaagagactcc

SEQ ID NO: 32170 - DNA, 404 bp, Mus musculus
  source 1..404: mol_type = other DNA
cagcctggtctacaaaaaaaaaaaaaaaaaaaaatatatatatatatatatatatatatatatatatatacattctttacatatgaataatattcaaagatgtatatgtttaagttagtttaactcaccaatttttcactttaacatacaattccttgttcatggatgtaggtagttagtacattcaaataactaagtactggcaaacgtattttaaattagattttcgttttttcagtttctgtattgggaaaatgcaaaaacacagtagagaggagagagactaaatcccctttccaaggtagtgtttcaaatcttagaacttgtgactttgaatccatgtatcagggaacagatgctgagactacctagcctctacacccgggtgttcagcaaggtgctga

SEQ ID NO: 32171 - DNA, 465 bp, Mus musculus
  source 1..465: mol_type = other DNA
attttctaatgataaactttgagtcctgcatcattaatgccttgatttcctttatcaagaacaggcctctagacctagtctatcagcttaaaggtcactttgtctagatagcctatatgttgcaaatgttgtaaatgctgcaaatgcacctattccatagaaaaacctgatgcttgctcccatcacagatttgtatttggagtgtgcattcaataaatcatccattccgtatcatttcacaaagcttttgtaattttacatgcatgttgtccaaagacatcttacataaatcatcaaagaacaaagagttttctatattgtaaatgtccaaaatacatagatgtacctaatagcttacaaaaaattatgaatgggctttgaactctaatcatggattccaatagtcctttctgggactgaaagtgcatgcatccatttagagtcttcctagagcgcgcctgaacg

SEQ ID NO: 32172 - DNA, 231 bp, Mus musculus
  source 1..231: mol_type = other DNA
gaggatcaccctctttcttttttcttaaattattcagtgtttgagatttagatagaaaaatctctgtagtagtaaattaatatgtacatataacataataggatgctaagagatgatctgaaccctagttcaaacatccctgtaaattatttcttctgagaagcaacttgtcacaaatcaggtcgatgcacgtgggtcgtagcctcttttcaatatttatcagagtgacaa

SEQ ID NO: 32173 - DNA, 286 bp, Mus musculus
  source 1..286: mol_type = other DNA
tctgcagaattagttcttccaaaacaatactaaaactgagcagtcgtactttttacaactctgaaatgagcagtcataatggactcgaaagtttgtttccatttgtcaagaaccagagggtctgtttatatgtctaagtacctaacaaattgtaaagtcacttccaagtataagtaacttgctgaaaaagtgtttctgcaaaccattcttgcatggaaggaaaaaaaaacatggaagagcttatgcaatgttatgaaatatttcaccactatgagcattttaaaat

SEQ ID NO: 32174 - DNA, 477 bp, Mus musculus
  source 1..477: mol_type = other DNA
cttatttagtcttaaaacctgcctcatgaattacaaatttttataggtaaagtaattgaggctttgatgaactaaagaatttacctttacaccaaatgaaagcagtaaaccgtttaaacgtgctaaaacctaagcagattttcttccttttgctcaaaatgggaaaatatatagatgctctaatatattaactcagaagttcgtatttctacacattattgggcactcactattgtgggggaattgacattctactgccagttgttttaagatgcagaatttaagttctcaacaaaaccagcaagagaatttaatgcagaatttaagttctcaacaacatctgctcagagcggcagaactggtttccaactccaggctggaaatgttgctggggacacctgccagccgccacttcctggtatggcggctagttgccttcggcccggcttactgcggctgctcagtacactctgctgg

SEQ ID NO: 32175 - DNA, 244 bp, Mus musculus
  source 1..244: mol_type = other DNA
gacggagtaggggttcccgcttccatgtacggggccgcacgcagcactacggcgcgcacgccccgcaccccaatgtcatgcccttctctgctcccttggttcgccgggccttctccccaaggacacgaatcctggccaaaaggcacagggctggttgtctcgggctgcctaacacaggccttgattaagaggaaagttttctgcagccgagaaaaaacttccagttgccgcttacacacacagc

SEQ ID NO: 32176 - DNA, 293 bp, Mus musculus
  source 1..293: mol_type = other DNA
ctttctttgaacaatactttaaaaagagaggatcatacgcggagttttactccgggctttgattgacagcttctttcttttctttttttttttcaactaagaggaaaagaagagaaagaaaagaagaaatatcactgaaaaaaattcttcgttttcttgactgggctttccccaccccccaaaaaataacattggaaaattgggagaagtctccttggtttggaaaaaaaggactcttctgggatattaaatatatggcggccagtattttaaaaaatagtaacaaaattatt

SEQ ID NO: 32177 - DNA, 224 bp, Mus musculus
  source 1..224: mol_type = other DNA
gccggcggacagctgaactcggagcatagtccctcggtgcgctgcagagtgtgtgtacgcgcgcgtgcgtgcgtgcgcgtgaccgctaggttttgtagaaactagttctggccggggtcccgcccaatccctggccggagttccagctggtccccgcggctgcgcgtcaatcaccgagagacgagagctgggggcggagctttggtcacccggcgcgcgtagcc

SEQ ID NO: 32178 - DNA, 367 bp, Mus musculus
  source 1..367: mol_type = other DNA
ttaccctaggaggataaactgagatttaacttccaaaaaaaaaaattctggaggccaacttttccttttcttttatagtccttcgggttccaaactgctctcccgaggccgccttccctgctttggccactggagccaaaggcgcgctctccgggccatgatggctcatttaatcaaactgtttaattgctctggtaatcactatcatcatcacaggtgctcaatcattcatcatttttggagggctttattgacctccggagctcgactccgctgggatgttcagaagcttgctaggaaaaatgggagaaaaacctctctctctctctctctctctctctctcacacacacacacacaaaggcacc

SEQ ID NO: 32179 - DNA, 564 bp, Mus musculus
  source 1..564: mol_type = other DNA
aaagttgacaggtttctgtgactcacatacagaaattcactgacatatacgtgtgctcaggtgtaaaaaaatgtatattatttgttttatgtgaatgactttccattaaaggagacataatattcgagataatcacaggaattactgtcaatatcaaaaatctctagtaatttcttagtctttggtgggtgattcttagtctctgaaactcagaccatagctcatgtccatgaatgaagctgcttcacgcattctttctttggatgaaataaaatcaacctacacacacacacctcacaaagataagtgttttgggtaacttttacttcccaattcccatgggatgaatgttagttgggcacatggtggcatcactgtggccacaagaccaatcttcatcccacttgggcaaaggaagtgctgtttgccacaggcataataaggaatactgttgctttatactgcctagaaaccagactccctgaagtatgtccatgcttagggcagacttaacgaaccagttgccaatggcaccacggtgacatgctgtagattctattggat

SEQ ID NO: 32180 - DNA, 277 bp, Mus musculus
  source 1..277: mol_type = other DNA
gaggctccagcagcgatataaaatctgctgcatatgaaaagcttctatttacaggctgaatccatctcactttctctctctactgagatgaatcataaaaggtcagaatgtcgcctgggtgactgtgggcaatgcacagggtgcctactataatttgcagggcatcttatgcccagtagcactgctacaaaacttatttttattactaggtgtctctgcagtgactcagaagacatgtaagggtctgtccctgtccacagcccacttccgactgcgg

SEQ ID NO: 32181 - DNA, 568 bp, Mus musculus
  source 1..568: mol_type = other DNA
tcgcagcgggagggcttcaatggaagccgttctccattaaagccgtgcttccagagatgcccagcattgcatgcgcggaggagctcgctttgcagtcctggcctgtactcatacaacacacgcgcgcgcgtgcacgcgcactgagcagtacggccccgagcacacggtgtgctgcccgcttgtcccggcaacccggatatcccaggccgagtaacggggacttgaagcagctcctcggcgtgccaagagtttggagcgcgcgcacgcacacgcgcgcgatgcagtgcagcgaccaccctcctcgccccgctcccgctgcccgacgatttgggaagcgaggggaggagggaactactttcctgaaacttgttatgctgcccacgatccagagctgcagtgggccgcccgacccctcagaggccccgcgcctccggcttgcagccgcgccccacgtccgcccagccgcacccgcgcgagccccggcggcccagaagtcgcgagggactacttcgcctgcctctcccgcgggcgcccccggttcgagcggcggaaggagcgggcggcgtga

SEQ ID NO: 32182 - DNA, 335 bp, Mus musculus
  source 1..335: mol_type = other DNA
attgaacttttgttgctaatacattcataaatgaccagcaacacaatacaaaatcttgaatatgtatttgaagtggttctgcagatagatgaacacaacaactcacttatttggttctatattcataatgaaatgataccctagatctcttcttattagagcaatggacttatgtatatagacatccccttttgggatttttgttataaaaagcaaggtagtattcacctacagtagaatctaacacaaagatgcttatttattttttaaaagtctattgttgcaaacacctccacggttgccacggctacaagtcccggaaccttggcgtgctg

SEQ ID NO: 32183 - DNA, 255 bp, Mus musculus
  source 1..255: mol_type = other DNA
tagagacgccaggcagagctcagtctgggcctggccaggtctgctggcacgctgataagtcttctctttttttaaatatgccaaagagaactaagttctcgcagagcccccacccccacccccctaggggactcgtagccttgggtggaggcaactcttcgcaacctaactcttgggctgggagacgcaactcctcggggcgagggcgccccacgtttcctccagcctgatgataacattgtgcgcgcgcgggag

SEQ ID NO: 32184 - DNA, 487 bp, Mus musculus
  source 1..487: mol_type = other DNA
taggttttgtagaaactagttctggccggggtcccgcccaatccctggccggagttccagctggtccccgcggctgcgcgtcaatcaccgagagacgagagctgggggcggagctttggtcacccggcgcgcgtagccgggttcaccctgccgccaccaggcagctggcagcgcgacccagccacgcactgggagcgcgccctctccctcgccctgggttccgggccccaggcccagagaatagcaagcagcgcctcctgcaagggtgcctttgtgtgtgtgtgtgtgagagagagagagagagagagagagagaggtttttctcccatttttcctagcaagcttctgaacatcccagcggagtcgagctccggaggtcaataaagccctccaaaaatgatgaatgattgagcacctgtgatgatgatagtgattaccagagcaattaaacagtttgattaaatgagccatcatggcccggagagcg

SEQ ID NO: 32185 - DNA, 335 bp, Mus musculus
  source 1..335: mol_type = other DNA
ggtagagagtaatttataactctacgggtatcctggagccattcacgttaagaaacacgagtgggcacaaaattgtttttcaagacacaatttcaattttgccttgagggagcgggatataaattcgcttccttcggtcctgctggccgcaacaccgtgctgacaccctgagtctgtcatggaattattcaaggagatgtgctttaatgaaagcctccctaaagggtcttaggtggtccccaaagaagcatcgcgtctgggtcactttcagcccgagagctgtgcgccaagcagcagggggcggagaaatgaacccgtccgtccccgtcccccgc

SEQ ID NO: 32186 - DNA, 393 bp, Mus musculus
  source 1..393: mol_type = other DNA
tagttggactgagtctaaggctctgcttagagtctgggagggtgaggtcagacatcacctgtcctgtctaagcaggtagtaattgaatctatgaatccacccatgtactgcagtggccagctttggcagaagcttgacagtaatgaagtatacttttcatctcttagagactggtacaggaaaatctccctcagctctagagcaggctgttctctagagcaggccgttctctgaccactgcgctcagggtagatggtatatgtgtatgtgcacaaataaaggtgtctagagtgtgggctctaaaaccaggctctagttcctggctgttttacaccaggaaccttaccactgcaacattaaagaagatgtgtttaaataaagttgtccacacat

SEQ ID NO: 32187 - DNA, 271 bp, Mus musculus
  source 1..271: mol_type = other DNA
gcaacaccgtgctgacaccctgagtctgtcatggaattattcaaggagatgtgctttaatgaaagcctccctaaagggtcttaggtggtccccaaagaagcatcgcgtctgggtcactttcagcccgagagctgtgcgccaagcagcagggggcggagaaatgaacccgtccgtccccgtcccccgccaagccagccactgcctggagtcagccagcccctctgcggagatgatcagcgctactatcccctggaaagaactttccggagct

SEQ ID NO: 32188 - DNA, 280 bp, Mus musculus
  source 1..280: mol_type = other DNA
tcatacttatttgctctgatgaaaaaagaccagagaaacactgtttgcactgtacagctgtggaggtatatactgccatcataatccttctacaggacgtatatgtatatatacgcatatgtatatatacactgtattatacattatactttatgcacactgctattatatacacatgtatgttgcacatcagtcttgcaactgtataccaggctggcctcgaactcagaaggcgtgcgccacacgcccggcttcaatacccaattcttgaaggtacggg

SEQ ID NO: 32189 - DNA, 693 bp, Mus musculus
  source 1..693: mol_type = other DNA
agggcccgggaggctgggctccctgcccagatggcagtggcagcctgcaggctgaccgctggggcagtaaccacagcagcaaacgcagtgcatccttcagctcccacgcgccccgcgacgaagtcacgctccactggggcaaaatggcgctacgtccctcaccagcagcgtgagggggtgggtcgtgcgtcacgtgacctcgcctgcctgccgcgcggccccgactgccccaggcacgcgctgggagcccggctgcagagcgggcggcggctctgccccgctaggggcatcctacctggtccctgctaggtcacgacaatctgtccaagccaagatccgacagccggctccaggggttcaggcagccctggggattagaccccggggccaagctgtggacactcagggcctgttgcccagccttggccactaggctggggccccagcttcgaagctactagcggcattggccaaatgctcccatcccactagggagagaggatcagagcgtgcgcggggtcctccgcagccaccgatgtgtgtgctgggtgggcttggccgcgctgcccgccccctccccccccctcgggaggagggcccagcgatgctctgtgaccgtgccgcctcgctgagggcccaggggggagcaggcatggggcgcggccgcacctccctcccacccctcctcgcgga

SEQ ID NO: 32190 - DNA, 406 bp, Mus musculus
  source 1..406: mol_type = other DNA
ccttaagtatgtaaagtagggtgcaacattttacatgaatgtgaatgctcaaatttacattaaatgaactggtcggataattctctttgtgggatttgaaaatatgcatgagacatttaattaatgattcaagggtggaaacagggtttacggttttttcctcccttttcctctctctagccaggcagggtgaaggagctacttgttttgtgaaaactaatatgtgttgtcactttgacctaagagactggctctagaaggcaaagctttcccctactcttgttttattagaagtcttgggccattctccggagtgggccgagtcagccgcggctgggccgagcgctggagatccgacccgactccgactcgaggccccgccctcagttcggtcacggcgcgggct

SEQ ID NO: 32191 - DNA, 360 bp, Mus musculus
  source 1..360: mol_type = other DNA
gtatccggtgaccatccccagtgacctgccagctgaccaagacttcctgaagatgctttcctcctgtacagctgaggagcggggagggcgaattcctgcccagggtttaataattgattctcaaactacttttgggaggctgcctggaatactctagaatttttttcccattcctatctagaatcctctgttactttgctgctaagtcctaggagctgactcgtcctccaatgaccaggtcagaggaccaacacctgtttctagacagaggatttttcacttgtgaatcacaagtgcataatcgttacaaagccagcttttaaaaagtaaccttaagcctaaactatttgtccactggag

SEQ ID NO: 32192 - DNA, 375 bp, Mus musculus
  source 1..375: mol_type = other DNA
tcagcgaaatgttctttgatatacatacttgtctgaatttaagatttttaaacatcttaaatccaggggccctgctaacggtggcaaaggccccgtgttttcccaccctctgaagtaggatagaaaaacaaaaaaaaaagcacctttttctggggtcttcagcactgccgatgaaacagtgccttcagagcaagtactctttgtctaaagatacctaagatactgaaacagcgaactctgctgttttagccatcttcatcagcaagttctgagaaaccagatcaggtgtagcttgacctcctcatcctggatagacgcgggaggaggcgccgagcgcgcaggcgcagtcccgcccgcgcgagcgagttttccggc

SEQ ID NO: 32193 - DNA, 350 bp, Mus musculus
  source 1..350: mol_type = other DNA
aaattcttagcagtccaagaacagccttctgctgctgccatagatagggctgtccgacttttttcaacagtgatcttccacagtctagaagagaggacatggcatttggttctagatgcagacacgcccaacaggaaagagggcagtttacaaggcgcgtctgaaaactcccagtctcctcctgagccggctttttggaagtcctgcaacctagtagaaaacctagggactctctgtcgtttctggggcttgcattaggaaccgaatcctcaccctctacagcgctccaattgcgcttctgacggaggtcagaaatgcgcccggccccttataatgtttccaagggaagg

SEQ ID NO: 32194 - DNA, 290 bp, Mus musculus
  source 1..290: mol_type = other DNA
cctagattagatcttatggagcaggagaataaaagttatttttatagcctgatcaaggcttgtttaaaaaacaaaagcaaactttttattgtgaagtagctgaactataggcctgcattaccaagcctttagctccagtgcaggcaaagcgcttatcctggggccctaggcgtagcacagttaattgttcggagcaccatcaaagaacctcttgttaataaagtgtctctccgcagtgctaggacaaccattggtccttgcacccattgcgcagcgcgtgcttaaacccg

SEQ ID NO: 32195 - DNA, 335 bp, Mus musculus
  source 1..335: mol_type = other DNA
tgttcacaatggggcagctaccacatttgggcacttcccagatggacaaaacgtgcagcccaggtgtggccacgcctgccagggctgagacccacagctgcaaacctggggcgaactacagtaggctcagtaagaaacgtgtttttttataaatagctccagccccagctgatttgtaaattcaggggcaacgttggagctgctcgcgccctacaggagcaggtcgctgcctgaaggaggggtgcgccgcggccggggctgccgggccctgatcgagaggaaggcgggagcggcgcccggccacggccagctcttcctgacagcagcggcagacc

SEQ ID NO: 32196 - DNA, 454 bp, Mus musculus
  source 1..454: mol_type = other DNA
cagtactgtttgagtgccaaatagaaatacagttttctctgagggtccaaggaaggacagagaaggtcttttctattccttgtttgggggacaggtggtcactgcttcccccaagcactcctgcagggttctccaaagaaatcagaatcccttgagctggggaacttgtccagactggcaagcaagccaagatgcacatcttggggagtggatccaggtcctggcttggcgccgcggggaggtcgcggctggcaggcggtggtcagcggggctgccgagctgctggggcatgcagctgccccttggtcgagcccggagcgcccctcgctatctctccggagctcccgcgccctgcggtccaactccccgccaggtgaagcgggcgtcgcaccgacgtgctgccgcccctccttgccgtgcccgcgccgaggtccctcccgcggagggcgggcct

SEQ ID NO: 32197 - DNA, 468 bp, Mus musculus
  source 1..468: mol_type = other DNA
gaaaaaaaactttctagcgctctgtggcctaaagatggttttgtgctcaagagaacccagccctgtcaactagcccatctttgaggagataggaggtagtgcctgccaaatgccttaaggcacctgccctccacagcgaccgatcaaccgtggagctggcacgcgggcgcgctgcacccccgcccttctctgagtggcagttatcagccagactgagcgccctggcaggagctcccgccagtttctaagggccccgccgggtgcatgtggcccccggcgagcagcctccacccccgccccgcaaccgccgccgcattcccaggggagcgcggaggaggagccgctccccaacttcgtggcccacgaaggggtgggggtcaggggcggtctcccttgccctgtccgtctctgcagtctgcttccagagcagccattgccatggagacccctgaagctataaagccaggt

SEQ ID NO: 32198 - DNA, 385 bp, Mus musculus
  source 1..385: mol_type = other DNA
aaccctgaacagggggctagagcaggctctggtctgcctctcagaacccaggatctgtgtgtggtgctggcggcagcaaagggcctcttaggctgattcattgaaaggttcaaactgcctcacctggctctcagactttgcacactcagtgccagctgggacccggcccatccctctgaggacagaacccctgcacccccctccatgatatatcactttcttccattggcggggggaggaactcccaggaggggagctcagcccccttgggcagctactgcagcccccggcttcaggaggaggaggaggaggaggctggcagatcaactgggccctggcctgaagctctgagtcccgacttccggaccagtactgggcgggtgcc

SEQ ID NO: 32199 - DNA, 467 bp, Mus musculus
  source 1..467: mol_type = other DNA
catcctgggagatgtcctccaccagattatgctggcaggtcagcctaagaaacaaactcaacctttggctcttgtccctgtggctcacagtagtctgactcaagggtcctaagagattcgagtggtctcggagtccagaccgcgggcgccaggttcccagacccgaaccaggctctttggggtgaagggatctgggacactatcccctcactattctagagctacccgagagcacaagcttagtgttctcccacctaccatctcctagcctgggccatgtgaggagacgcctgagttgacagctttctacggagcgtcccccacggggcccacgatcccgccgcagccgcctcccagcgcggcacttccgggcccctacatcgcccttttaaggggcagccccccggcagcgcgcggccccgccccctgcaccggcgcgccccgcgggggagccgggctagagccgg

SEQ ID NO: 32200 - DNA, 360 bp, Mus musculus
  source 1..360: mol_type = other DNA
ccagagtttgtgacactcatgtcaaggcctggaagtcaggaccaagctgacctaggcacccctgggcagagactggcctcggctgtgtcccacttctgctgggttaaggaccccatagaaagacccagagagttaggcctccaggagtccgagggagggccgtcagccatcgtgtctatcccatttgtgggcacacacaggcgggcggctggggctcaggatcacaggtgaaagtgggcccttcgtgcctagatagaccagccggctgctggtgccccggtcctcgccctctgcgagtggaagggtgggggtggcggctaggcgttcctggctgggagcccagagcgctcttttgtaatc

SEQ ID NO: 32201 - DNA, 246 bp, Mus musculus
  source 1..246: mol_type = other DNA
cttttccagaggatgtgggttcgattcccagcttctctccagttccagggaatccgggggatccttcacaggcactgcatgtatggagtgcacaggtgtacatgctggtaagacacctcctgcatctgaggtgcgcagagggctcctggtctacccgggggagcaagcgctggggcatctctcactttccctctcccacgtgctggggggagatggtggtggagaactcacctgtgacctcaactc

SEQ ID NO: 32202 - DNA, 220 bp, Mus musculus
  source 1..220: mol_type = other DNA
cacagccaggcccaaaacagcctgcttgtttcgggggaaaggggctgggcatccctcctcccctctctgcttccctgcgttacaaagtgtggagttcctttttagtttcttgtaaaaagtacaaggcgtcctggccatatccatgctgcggctctgccgcaggccccgcccagcgactggcctctggagctgacgcatgcgcaagatcccaccgctgccg

SEQ ID NO: 32203 - DNA, 474 bp, Mus musculus
  source 1..474: mol_type = other DNA
aatctctgatattatctgatgacatacttagatgacatacaagatgttcttggtttgtacaagttagtagtctgctaaatgaataaattccaggtgggtgttatccacttatctcttttgagttcaaagagagatcctgtctctgattagtgaactaatttaaaataaaatttcctacagatactcaaatataattttggctgtgaatctgcaaaattagtttgcagaatcttcactcaagtgatttttttcagggaacataacaaagcaaattttgctgtttagattctttctaagatagtcttgtgccgttcaagattaaaatcttaacacgagatactactatactttcttgtatgcaagaaagacgccagcacaggagccagggctggctgccgcctctcggctgattggcttgcatggttgcaagggcagcaaggccttcggctggcttccgagaggctactgaagatt

SEQ ID NO: 32204 - DNA, 361 bp, Mus musculus
  source 1..361: mol_type = other DNA
ggaccgaccttgctaggaaggccctttcgcgcgagtcggggccggggcagcagcctgagggtgaggtgccccctcgaccctcagtttactgtaggtcaggtcaccatgggatactggctcaggctcggccgcctcgtgctgccccctgcgtcgggacgaccgacccacgccggattggctggcggggccagcgcagggcggggccgaggggcgcgccgcccgcggggaaccgcgagcggcgtagcggatcccggagcccggcccccgctgctcgcccgtccggccgcctgccccgcccgtccggccctagccgtccgcccgccccggccaggcgcgcccgccccccccgacggccccgccc

SEQ ID NO: 32205 - DNA, 370 bp, Mus musculus
  source 1..370: mol_type = other DNA
aatctactgtcaagtggctgatgactataggaaaaaaaacgtgatttgttttgttggggccccacacgaagtcaagcttctgttgccaacatcttggctccaagcaaagaggccgcattgctcagtagataagcactagtccctaggaattactaaagggagacattagccagagcttgacagagtggccctgccctgggctgggactgtcaggacagatctccgtcctgcattcaggtcacagctaagagacacgggatctcagtagctcctgctttccgggctagggtccgcctgcggcctcccgcccgccccacaacgtgggcccgccctcgcgcctgtatcagggaggggcggggagagaagagcg

SEQ ID NO: 32206 - DNA, 436 bp, Mus musculus
  source 1..436: mol_type = other DNA
gtcatctgaggttgacctatacaagtgcatgcaactggcacaataaaattttgatccatttgaagttctaatgtgcaagtgagttcttttcatgctgttagcatatgtctataatacatatgtacatatacaattatatataatatgtaatatataatatatataataatagctttatcaaggtatgtaacatactataatatgcagcctttaagtcatacaatagcagtactgggtatacttaaatgaacgagtgcttgatactctaggattctccatggtactaatacagtcatagctgtagcaactttcattctgatttgtattcgttttttaaaacaataataattactattcttttgcttgcacttttaggcgttttttacagacccaggaaaatagcgcttatctatttgttcctttaggaaacttgtga

SEQ ID NO: 32207 - DNA, 425 bp, Mus musculus
  source 1..425: mol_type = other DNA
ataagacgtctttttaaaaatatatatttattttatgtatatgagtacactgtagctgtcttcagacaccagaatggttgtgagccaccatgtggtttgaaagagcattcagcgctcttgtgttctgaattcacactcacaatacctaattttttttttaactaaatgaagtctcaggagtcagtgaattgaggccccgatatcctaagtcactgacatgctctaacttgagatagtcacgaggattgtttgggagataattgaatctgtattttcacctaatattgggataggggatgcgcctagagccttaagcagggaccttatttcagaaggactttagaaatcaagatctctggggaccaagctaaactctggacaggagattccatcgtttcctggcaaccactagttccgcccaccga

SEQ ID NO: 32208 - DNA, 483 bp, Mus musculus
  source 1..483: mol_type = other DNA
gtggcatttgtaatgcaatatggtacccccaaaatagcgattatggggggctagactgctacacagtaaaactgaaagcattcatctcagagctaggacatttcatgttccagaccaccactgaacatgtcctgttattttactttgtaagaaattaaattcctagaaaaaagtctctttatctgctttttaaagcagcctttcaaatatctcaattccttcagctgatttcaaatatcaaattccacgatgctgagactaattgtgttagaattaaaaccatcctgtggattataaattcacattacactaattagcaaggatgggattcgaacccatgcgtgcagagcacaatggattagcagtccccagaagctagtttcttcctggtagctatagggagtagacacagagcgctgtaacagtgcgattgtttactctgcaaagaaggggtggggtctgcgcggcgcgcagcactgagca

SEQ ID NO: 32209 - DNA, 252 bp, Mus musculus
  source 1..252: mol_type = other DNA
tcgaggccagcctggtctacgatcttgtctgaaaacacctagatgtattgctcctacttttctggagtaaccactacaaagcgagagaagaaaaaaaacactagagagtgagttatttcgctttagtttttgtagttttatgaatgtatatatttagattatataagtccacatccgctgtgcaagaagttttgcagaggtgcttccgcagcagtgcaagccgtccggcatgtccgtcaggttcggatttcc

SEQ ID NO: 32210 - DNA, 311 bp, Mus musculus
  source 1..311: mol_type = other DNA
aatttagaaccgagctctttgttaaactcagaatgagtcggttgttgacctgtctacttctagatgagggcgtggaccagctagttgtgaactaaggctccctgcaggaggaacaggttccgcgcctttacagccttgcaactgcaggacctgtcgtgcacttaagttcacaaggcacgcgtcctggtgaggacaggcacccgccaccgcggggacacgcccgcttccaggtctctggggcggcgggaccgcggcgcgcgctcctgattggctcgtgcagtgtccgcacggccgccaagcgccgcccgcgg

SEQ ID NO: 32211 - DNA, 485 bp, Mus musculus
  source 1..485: mol_type = other DNA
agtgggattatctaagtcctctaaaacctgtgtctatcttaaaatggtgagatactttatattatattcatttatatatgaatacatttggaggcagacaaatctgtagtcttaagcttggctttatgacaaagaccatatcccagcttttggcgggttctctctgtgctacagaggctaacttcagcaacttgaggtctggtctcaaaatttaaaaataaaaaaaaaaaagtttgatgatgtggttcagtagtcgggctatatagtgatcccctgacttagaaatggtatgtatcagaccgtagactatacagtcctgtccaggggccctggcttgaagaggatttttgaaaacttgtaggagtcccagggacatctaccgggtaaagtccgccgatgtagccccgcccacagaacccgggtgggaggcagagcctcgtgcgtcatctccacgcgcgtctcaccgtgcgcggagcaggtggcgc

SEQ ID NO: 32212 - DNA, 163 bp, Mus musculus
  source 1..163: mol_type = other DNA
gaggccagcctggctgccagggagaaaccctgctccacaagaaactgaagttgaccttaaattcctgcccagcccggtgggcattacttttgtttaacccgctaggcctctaggttctaggcctcttcctagccgtccctcgctccgggtccaggatagggcg

SEQ ID NO: 32213 - DNA, 344 bp, Mus musculus
  source 1..344: mol_type = other DNA
ctgcgggggggggggggacaccccacactgctgccctcccacaggagcagcagggcactggcttctgctggtgaagcagcagccacgtcccagctgtgggggagggcagtgctccttccgcatgcccccagcaccttgggcggagcaagccctgtacaggcatggggctgttccccgttggctaatgagggccatgctgggggctgagtcacccacggctcctcccagagacatctggggctagggagccaagcaggcccactgaggtcagaggaatctgaagcgtcctactgccctggggtgttggtcacagctgccccaatcccagcctgtagatgctgcaa

SEQ ID NO: 32214 - DNA, 232 bp, Mus musculus
  source 1..232: mol_type = other DNA
ttgtttaacccgctaggcctctaggttctaggcctcttcctagccgtccctcgctccgggtccaggatagggcggagagccaggcgcgcgcccagcagcgcgtacagatccatttgtaagagctcttttctagtccaaacttgaacttgcgtgggcgcggggcttactcgctccgagccggcccaaaagaggagcgcgctgcgccccactccgccccgccttggtgagtgca

SEQ ID NO: 32215 - DNA, 431 bp, Mus musculus
  source 1..431: mol_type = other DNA
attgtgccctggggagaaaaaaaaaagtgtagcttttggaaactttacaatttctagggtcataatttattatttctttgtgagtgtatgcgtgcagacatatgcatatcatggcatgtgtgggtgggcatccgacccactttacagagaggttaaccgggttcactcgcctccttcttgaagagggtgaactagcacctgctctccatagcagttctcggcgctgcagaattggtaggttagcctctcaccagcgcagggtaggcctctcagaccctcaggttgtgcagcccagtcccacacgcccatcggcgctgtccaggggcggcccagcgcggagaattcttgcactcaccaaggcggggcggagtggggcgcagcgcgctcctcttttgggccggctcggagcgagtaagccccgcgcccacgca

SEQ ID NO: 32216 - DNA, 305 bp, Mus musculus
  source 1..305: mol_type = other DNA
atctgtttttctgagctgttcattaaaacgaaaaacaagacaaaatgaaccacattaagttatttaaattttttcttataaaggactgaataatgaaagtacttttaaatggcaagcttgtttaccagtccaggattcctatacaggtcttgtaccctcctcaccttgaggaggaatcctacccctgcgcctgcaatagactatctagttcctagaagatcaggtgggagccccacacccttcaagcagctctgaatgccactggctggcagagagaggctaggaagttcattcccggcactaac

SEQ ID NO: 32217 - DNA, 422 bp, Mus musculus
  source 1..422: mol_type = other DNA
ccttcagagagctggagcctccctcactgggatgaaacagggaagccaggataccaggaatcacatcagtgaagcacggacagcgaaatcgtttgcataagctttccccgacgcacctgcgccaccttgcaggggtgtcgcggcccaatgtgagggacccaacgagtggctggactccgtggagccagggtagagccgcctccagggcacgcgggcctcacccacgccgctgggcgttcggaaaccacgggcgctgcggctgggtctggggtggctgagccgcccggcgggtccagccggaagttctgctgggcaggaccggtgggagtacaaccggcgtgggcggggccggcggcgcaggggttaatgccagtcccgccccgcgcttgcagccagagccgggcggaagccgggcgggatcg

SEQ ID NO: 32218 - DNA, 535 bp, Mus musculus
  source 1..535: mol_type = other DNA
agggaagccaggataccaggaatcacatcagtgaagcacggacagcgaaatcgtttgcataagctttccccgacgcacctgcgccaccttgcaggggtgtcgcggcccaatgtgagggacccaacgagtggctggactccgtggagccagggtagagccgcctccagggcacgcgggcctcacccacgccgctgggcgttcggaaaccacgggcgctgcggctgggtctggggtggctgagccgcccggcgggtccagccggaagttctgctgggcaggaccggtgggagtacaaccggcgtgggcggggccggcggcgcaggggttaatgccagtcccgccccgcgcttgcagccagagccgggcggaagccgggcgggatcgtcggcggtcccaccccgttcacctgcgcaggtagctggggcggacggtaggcggacgcccagcgggctccgggcatgtttggcggacgtccgcgagctcctgagcggtgctctgccggacgtcggcggtccggtccgagtgtgcgtgggcg

SEQ ID NO: 32219 - DNA, 420 bp, Mus musculus
  source 1..420: mol_type = other DNA
agggctcgacaggcactcagcccctataatatatgtatgtgtatatatttttgttgagtttcactctagtcctaactggcctagaacttactatgtagaccaagtctgccaccccagtgctgggaataaagccccatgccatggtatttgtttatttgagacagggtctcacattatagtccatctgactctgtatcacagctcagcttcaatctcagtatattaacaaaatagtttattagtaaaattactattctgatgtttagtacttgtacatatatatatatatatatatatatatatgtatatatatacatatatatatatgtgtgtgtgtgtgtgtgtgtgtttgaacatgcagtattatggattctgtagctgcatcttcaataaattgtggatttaaatagggacccaact

SEQ ID NO: 32220 - DNA, 248 bp, Mus musculus
  source 1..248: mol_type = other DNA
ctatagagcagcttacttaactgtatggttttctttttgcggtgtaaggaaaaaaaaaaaaaatcagggacactcagactgttctgcctgcaccgccggcctttcagtgacagtctggacgccgctgggaaatcccgggctgcctcctagcgccaacatgaggaactgcagcagcagggtggcccgcaagcgctcctcccccgccgcgccgagtctccgacaacgcctccttgtggaggctcaggtgc

SEQ ID NO: 32221 - DNA, 486 bp, Mus musculus
  source 1..486: mol_type = other DNA
tgtgaggctcatagcaggcctctagtcagggccatctggctctgaccctgatgtagatggcccctaggtctctaagccatacgacctgggttcccatagtagcagggaggccaggcgaagcctcttcgggcctccttcttagctagaagcctacaagcgctccccagggccaccagcgcagctcggagaactgcacccggctgcgcccgcaggacaggctgggggcggggaagaaggcctgcccggggcggggcacttaagccctgctgcggtcgctgcggagaaggggccacgtgctgcgagccgcggccggggagctgcacagaaggtgccacatggctgctcgatccattcacattgaaatgaggccggcgcgtgcctcatctgccgcagggcgctgccacgcgtcaggctggccctccgcgtgccaactggggcagtggggctggcagagcctggcagccgtgggggcgcagctctggcctc

SEQ ID NO: 32222 - DNA, 441 bp, Mus musculus
  source 1..441: mol_type = other DNA
tccggcagcccggttcgcaggactgcccattggccagcataccgcgctggttgacgaactcctgcagccgcagctggaagatgccggagcccgcagcgcgctgctgcacagtcaggctcagccggggccggggcgcaagcccggagcgctgcgggagggggcgggccagcagcagtagcgcccagcgacaggcgctccgggacgcaggcgtcatcccttggggttacccaagtgactttggctgcagctcttggctcgggttccgcctgcgagcagcgccgcttatattgctcttcgcagcctgtcagtcagacagactcacggtcactctggcctctagtggctacagtcccagcacccaccggagggggcctccgcccccgccgctccccctgtcagccagccagtagggcgcaggtccccgcccctccagctctgcgc

SEQ ID NO: 32223 - DNA, 433 bp, Mus musculus
  source 1..433: mol_type = other DNA
ctatgggaaaaggctgcaggtgcctgctttgtaccacaggtactaacagtcatcctcaatgtgactactctgcccaaggctgtcccgggtgtagccgtcacgtgaggcctgcatgcttgtgccaaccagtcttctccagctgttcacgtgggcaacgtgcgtgcttttaggcggggccccaaaggcaagaattcgtgccgcccaaagtagcactggccactgctttggtgattctgccaggtgcaccggctggactgcagagagggccttcccgggagacggcgggtgcccgcgcccattgcagcttccctgccgttgcatcactcctgccaggtctgccacgggaggaggagccgaaccaatcagcacgcgcgttggccctggggcgggctgctctggtacccactcggagggcggcgcggttaacctgcct

SEQ ID NO: 32224 - DNA, 410 bp, Mus musculus
  source 1..410: mol_type = other DNA
ctggaattaagaaagtttcctccctactccagcggagctaggggacctagtcctggctctagcacgagccgggcacgccctgctgcttgaggccagagtcctagacgcttggccctttgccttgcttggaatagccagggaaaggttaaggcgggcttcccggaaagggagatccaaatcccctggtccatctaatgcctggatcaggtgcaccgcctacggggaccccttaaaggactgctcgccgggcacgcgcagagctggaggggcggggacctgcgccctactggctggctgacagggggagcggcgggggcggaggccccctccggtgggtgctgggactgtagccactagaggccagagtgaccgtgagtctgtctgactgacaggctgcgaagagcaatata

SEQ ID NO: 32225 - DNA, 462 bp, Mus musculus
  source 1..462: mol_type = other DNA
gattcttgcagaaaaacaattctcgggaggctgaggcaggagacatcccgagcttgacgctagctagcctgggctattaaccgccccgcccgccccagctctgcggttgctcgagtgtgggcagggcgactcaccccagtcgtcaggaagacgaccaggagacgtctccaagttggctcttacaaggatccatccccgcccgagctggcctcggggtaggccagcactacgttacttccggaaaagtaacctttctgtggcagttgcagggccgctgagctctcgcgacatctcctcccgcgagatctagggtctcccccagaaccccggtccgcgcggggcgtcgggcggcggcagcggggtacaagctgcacgaggccgcccgtagcggcacggtcggcggacacgggctagggcgtgggcggggcagggctaagccggccgagtacctgctcgatggcc

SEQ ID NO: 32226 - DNA, 416 bp, Mus musculus
  source 1..416: mol_type = other DNA
aggccagcctggtctacaaagtgagttccaggacagccagggctagacattatgcccagttttgctttcagtatgaacctgcttagcttaatctatagatacagatcactatacttagagatattgagatacatgccctatttaacatggacatatataacacatgcatgttgttttagttaagaaagttacatagtgacatcatgtagtacacatggtgcctattgttttttcttaaatgattttttaaaagattttaaaatttatttatttatgtatatgaggctttcctggaattctagatcaggctggcttctaacagtgctgggattaaagttgtgcactattactaccccaatagtgtctatatatgttttatcttcagtaaaaggaaaaaggtttgaggtctcaaaacc

SEQ ID NO: 32227 - DNA, 339 bp, Mus musculus
  source 1..339: mol_type = other DNA
cataaccagtgaatcaatgtagcttgtgaatttattattattcaataggttctaacattctaataataataacgaataatgtaattattattattattattattttattagccaatagattcaatagacaactgtgttttgtctttgtatggcatagcatccttatcacattaataaatggcctagtgataaccccgtcatttaagaacgtgtgtactgtattgacctttaaacaattactagtaacagtatatttttacagtaacgataatttaaaatagtcatttggccttgtagtgctatcttactctcggaggcggggcggagcctttcgcgcct

SEQ ID NO: 32228 - DNA, 479 bp, Mus musculus
  source 1..479: mol_type = other DNA
taatggtgagttccttgttatcccggcacagctttgacgcaaatcagcgcgcagcctcgagcccattcccagcgccccctgcggccggggtagagagagtgccaggagccatgcaaaccccaggcggctctcagcgccccctgcggccggggggaggagcgcaggcgtgctgggccacagtggctgtggactccctattcttaggatgcactgcactactctggagtgagtttgcctctggtttgttcgtggcgagaccgctgccgccacagcggtatcgccgctttaagtccggcggctgccctggttccgcggggcggggcctgcttcccttcggactcccgcagcctccgggctgcattccgggctcgagagccaagctttgacgttagcgcctgcgcagggcgcggcctcgctcccgattggctggtgtcgggccgccctcctttctctccccgggccgcaagagaaacagtgcc

SEQ ID NO: 32229 - DNA, 301 bp, Mus musculus
  source 1..301: mol_type = other DNA
ttactgaacagtaagtagagtttttcagaagaagtcgtttaaagtagtttttcttcaactgcctaataactggcatggaaattacacgcatttccattaagaagtctttataagagcagcctggtctacagagtgagttccaggacagccagggctacacagagaagcccagtctttataagttcaaagtaacagcctcggcttttctttccacggtaccttcatgttagcccggaggcccagccttggccagctcctctgcagatctcggtgatttagaccgctattctcaacattgtcc

SEQ ID NO: 32230 - DNA, 422 bp, Mus musculus
  source 1..422: mol_type = other DNA
tgtcacaagacaaagtttctttcttgtttacaacagttacatactcttcactgtcattaaatcgggaaatatatagacaggaattctccacacggctctaacaaaacgacgttgtttgtgacttctggaagacaaaacggttttgagaagaaatacctgccagcagattcatctgccgggctcagccaagggcgctgggttagctcaggcgacggcctgggtttgggagaaggccagggcgccgagggaccgcgacaggtcccaggcgaggtgcagggtgtcgccgagcaccgcgtagcaccgcgcgcaatagccgcaggtcgacaggtgacgccttcacccccttccaccacctgagtgtcccactccatggaggagggcgagagagtcggcgcgcggacaatgttgagaatagcggtcta

SEQ ID NO: 32231 - DNA, 278 bp, Mus musculus
  source 1..278: mol_type = other DNA
gtctctgggaaacagattttcacagttcttataagaaaaaaaggctgagactgttttattggaagagtgaggggcctcaacctttcctttatacctatatacctatacttagatagctaccaggaaattatggaataaaggtatggaggttgtgaaccccaagttggaaaacattttacgaagtgtgccaggattgatagctatctaggtgtacagtggctctccaaaggcagttaagtggctttctaaagtcagatttgaggacctgaagcctccgg

SEQ ID NO: 32232 - DNA, 358 bp, Mus musculus
  source 1..358: mol_type = other DNA
acttagtcgagaaagatttgaattctaaaaacttcaaattgtaactgttaatataatatataaaaatggacctttttgtcagatgacttcaaattcaacgacataagcgagtttgaaactacttagcatagtcatattctccgattatcgctggaataggaccctggaactcctgggcagcctacaactccaacactgcagaagcttccggacagctagatcagggagcgttggtccggaaccctcgggcgcgtggctccgcccctcgcgctgcgtcggaggtggggcggggcggggcgccaggcgccggcgaacggcgtgcgccaggcggggggcggggctaggggcggagcggagc

SEQ ID NO: 32233 - DNA, 403 bp, Mus musculus
  source 1..403: mol_type = other DNA
cgagacactggctgtctatctaaaaaacactcgcatttttggagcaccaagactttttcgttttactctcagagcaaccctgcagctccgctagagtcagactccgccgggggtggggagcagtctcagctcgaccctggccacagactctagtgggcacactcgctgacggccttgaactccgaattaaggggcccagttcttccccccgcgggagggcactgggctcaggtgcggggcaggtcccttctgccacctggacactgcaagcctcctgcagcagcgagggcccccggaggcccgcgctttctcagaaagtgaaaggagtgggcggggggcgcggccggggcggggcgcggccgggcgggcgttgccgaggctccgccccggggcagtcccaagc

SEQ ID NO: 32234 - DNA, 357 bp, Mus musculus
  source 1..357: mol_type = other DNA
catgcctggcttaacattagcattttgaacaaaagaaacagagacagggtttctctgccaggctggcctcgaactcagagatctttttaacatatctattagctttttgagtccaggctggcatccagtttgaaagcagaagataacagaacttcaaatgtgagcaacactgtccacatttttcaacacccaaactcagaaagtcatgattctgaggtactggggccttatcatactttgatgctacaaaagctgatctcctaccaggaactcactagtttgttggtgtgccataggtggggactagagcccttcagctcagcaaggctcctcccagaagcctggggacctcgctgt

SEQ ID NO: 32235 - DNA, 394 bp, Mus musculus
  source 1..394: mol_type = other DNA
agactgaatttgaggccagcctggtctacagagtgagttccaggatagccagcagggtctcactgtgtaacctaagtagacattgagaagcctttcatatcacaaggctgaaagaacttctcttgtgaaaaggtaactactaattgcagcagtctgctccatacaagttcagaccatccaagtttagaagttcagagcgggtaaccttgatgacagctctctgggagagttgccacactggtttttacatctgccgtgctgtggaaagacctgcatcaaacgcgtgtgttcccaaggcttcgccgcttgaggttcagagacacaacgctgagctgggagccctcgagctcccgggcgagccacagcgcggcaggcggggctgctcggcggaagc

SEQ ID NO: 32236 - DNA, 366 bp, Mus musculus
  source 1..366: mol_type = other DNA
accagctctgcatcttcctgacaggatgtctgtgggcaggccacctccagtgatttcttttaacaaggatctgcctatttatggagtgcctactgtgcgcaaggtggtctactaataatagcagatgtttcactagctagtatgaagacaatgccaatgaaaatcacggtgattttgctttggccgggtgcctgtccagggagcgaggcaggtcctccgcagcggcagcggagtggccagggcgcgggtcccgctgcgccttctgcgggcggtaagggctgaggttagcgctcggctctcgccaccggggctgcgcgggggagggggagggcggcacgagctccgcggagggcgggcgggcgggcc

SEQ ID NO: 32237 - DNA, 399 bp, Mus musculus
  source 1..399: mol_type = other DNA
gaaaatcacggtgattttgctttggccgggtgcctgtccagggagcgaggcaggtcctccgcagcggcagcggagtggccagggcgcgggtcccgctgcgccttctgcgggcggtaagggctgaggttagcgctcggctctcgccaccggggctgcgcgggggagggggagggcggcacgagctccgcggagggcgggcgggcgggccgggaggaggcggcggctgaatcagcggcggcggcggcggcggctgtggaaggagcgcggtggcccagccgcagccccggggactcctcgctgctgacggcggtggccgcggctctaggcggccgcgggtccgggacgcccgggccgagcgccgccccccgcccctcccgcgggcctcccgctcctctctgc

SEQ ID NO: 32238 - DNA, 462 bp, Mus musculus
  source 1..462: mol_type = other DNA
tttataaacttcaagtttaacaaatatcatattgtactttttatttaatgctttggtttcttagtcagaaattatttttgtaatatttaattagaaagataaagtaccttatacacttaactaacctttagtctataaatatgagctttttttcaagctgatcagccctttgagacttataaaagttttgacatcatcaagctgggaagtatatctcaaagcagataaggttcgaataattctacagtggtaaatttgtaattcctacaaaaccaactagttgtaatgtaccagctgtttatcttaaaacaaaacaatttctccaacaataagcatattgcaaaatgttcgctattcctagataaattctaagaattacaaccattcgctattcttctacaatattctcaaacggctttcagagggacaccaacgggagaggtggctttcccggcatgctct

SEQ ID NO: 32239 - DNA, 426 bp, Mus musculus
  source 1..426: mol_type = other DNA
agcaacaacaacaacaaaaatatacattgttggttaatgttttctttacatttttaagcttcattgtcttgaagaagcaacaacaacaacaaaaatattcttgaccatttctttttaagacattggcagcctagcctactctggaacgtgaactcactatagaattcaggttagcctcagcaatcctgcttcctcagtgttgagaatataggcataaatagtgttctttgttggcgaatattggaaaaggctacggcttcggctccgtgggcggaacccaagggtcctgacgctgctccgggaggggcaaagaggtgctgctcgcgcctccctatgcgcctgcgcggtcggctccaagctggtaggagcgcgtgcgcagtgacgtggacatccggtgcgtgcgcaggctcttcagctgaagcggac

SEQ ID NO: 32240 - DNA, 297 bp, Mus musculus
  source 1..297: mol_type = other DNA
cttcgcacgcctgggcctggctgggccttacgctgtggcgagttgcgcatgtgcgggcggggtgagaagtgcctacggcacggccctgccctcgcgtgcgtggggtggagttcagctctctgagtttcaactctccgagggaaacaaccaatgtctgtttctccaaggaactggatgcagtgttttgacacctattcaagtcaaattgaggcaaggccccgaatttaatgaacaggtagggaacaggtggtggttcctttttcgttcgcgtcgccgaagccaagcttgcgtgtccaa

SEQ ID NO: 32241 - DNA, 476 bp, Mus musculus
  source 1..476: mol_type = other DNA
ttaaatgctaaggaaatgatggattattaaggctctattttgaggcttgagtcttccatcactgatagattaagttcaaaagtgtgtaaattgagttactctgggaatcagaaacgattccaactgcgttaaatcccagcacttggaatggaaaggagttcttttggcaggaattaaattaagaggaccatgcctaattctaaagcaatattacattgacgcgcagctcggcccaggagccgctggtgccaccatagctactgctgcggctgcggcagcagagctgaagccgtcgatcgcgatgccggagggcgctgtgagctgggccccagcgaacgggggcgtcgggtgcgggagggagcttctcgcatcggctcgggccagcgtgagcccggcggccagctcggtgctggccccttgcccagtggcttcggaggcctcctcccttggacacctcagttaccatgggaacactt

SEQ ID NO: 32242 - DNA, 361 bp, Mus musculus
  source 1..361: mol_type = other DNA
agccaggctggatggcctatgggtcacctggcgccctcctttcctctgcatcagggaaggcagagtagtgacatttcaccaggtttagataacacaaaccagtgttgagtatacccaaaccatgtgaatacccaaaccacagtgtgggggttagaagtcggcccactgccctgacctccatagagaaagcgccactaccctgcatgggtggggtcttgtaggccactggcaattgctgcccatgtccattcgtttgtacggatgtatgaaattgtcaataaacacaatcatttgttaacctgctagcaaattctgagaagagcgccgcttgttgcacctcctagagggcggaaacgggggg

SEQ ID NO: 32243 - DNA, 397 bp, Mus musculus
  source 1..397: mol_type = other DNA
gagtatacacatataataaataaattaattaattaaaaaaataataatatacctacttaacagtatgtaaatgctagaacaccttcagtgtttgaactttttcttaaagctttaaaatgtttgtttaaaggggcctttcctctcaccaggcatacatgaactgcagtccctgaactctgagatcttgtgcctggagtactctaagccagacacaggtaaggcctaacccatgccctagcagggtctagctctggcacagccccaggcactgataagggccagctagattcttccaaccccaggtttgaaactgctagcatcggcaagccgggaccgtctgatccaatgctggatgagcattcattcactgctgtcacctaccacctacatttatgag

SEQ ID NO: 32244 - DNA, 475 bp, Mus musculus
  source 1..475: mol_type = other DNA
gatctttaaaatgcaattttacaactacttgctgaatcagctctgcatttccaccaaatgcagacaagaatcatctgcaggcatttgttgagctgcatctccaagtctgtatcaagaactagagacctgcattttaacaagcctcttgggttattcctatgcagctgggtcaattatttctactagtgtctagcagaaagaggccttgcgcaaatagattgaagtccattttctctccaatgaaaaggaacttgtcgtccggagacttgggctcagacttgcccggaagccaacgccacctggccagaaggatgtacccgggtagacgcgcctgtgtcaccccgcctggaccattggctagagcttccctgagatcgctgctgaataatgagcgcgcgcccgtgacgcagcggctgatgccgcgcggacccaggagcgggcggcggcgagagctactgtcgggcacagagagcga

SEQ ID NO: 32245 - DNA, 349 bp, Mus musculus
  source 1..349: mol_type = other DNA
ataatctggctcccagagctttaaaaggtgacacttgatacacttgttaggttcaggatgaccgctttcttccccctgatccagggaagctgggtgaagggacaggaactgtgttcctcctgagctgttctctgaggaaagagttgatcttgaagagcagggagagcccctaccccagctccaggtggaggcagcccgtattcctgtcgtactggcactgggaaggggggaccactgtgctgtcctgttcaacctctaacagcaagaggagaaccccctcctctcagttagggctggttggctagcctagctatcagcgccaactccaggaggtatcactgactccaca

SEQ ID NO: 32246 - DNA, 304 bp, Mus musculus
  source 1..304: mol_type = other DNA
ctcggggcaactcatcctccaagctgtcccaggagggtggccgtgaggacctgaatagtcccaggtatcttgagaagcctctgcccacagctatgcatccatcttcataaactgaagagatagggctttcctacatcttggcagaaatatgccaaaagcccagaatgttctttcttcttttcacctatggccgtagcctggtcattctgaacaaccgacttatggctcctttggtgctaagaccctaggtccaggtacctgagacatcccagccactgcccaggggcggccaggagggtggagc

SEQ ID NO: 32247 - DNA, 260 bp, Mus musculus
  source 1..260: mol_type = other DNA
tctgtaaaagagatctgatgccctcttcttacagtgtactttaataaatataataaatattaaaaaagaaaaacatgccctgtagcaaatgtgcttctcccgcctctgaggagataatatatagcgtgttgtgttactgagaggcagctcagcttctgcggtcaggagcgcatgctgctcttctagaggacttgtgattttaaacataataccatggtgcattctctttcatcatatcatttaaccatcagctttgtgcg

SEQ ID NO: 32248 - DNA, 230 bp, Mus musculus
  source 1..230: mol_type = other DNA
ctttgtagaccaggctggccttgaactcagaataccatgttcagtgaataacgggctgccacatgtacgtgcacatgcctgtgccttcactcatgcatacacacatgcttgggaggaaggcaagccagccccctatgccccctacactcctagggaggtgaggggctgtgatcatggcgcccagaccccacctcagcactaaactgcagctctaggaaagatgcgctata

SEQ ID NO: 32249 - DNA, 367 bp, Mus musculus
  source 1..367: mol_type = other DNA
tggtctcacgatgctgagttcaagtgagccgtaccactacccttagctatatgaaagggttatggttaaagagatgaaaagagtctcctaggaacttttgctagccactgtggtccacaggaaaggacaggtcatggacactttaaagcctttatctctcagtttaaggatagagaggcctgcctctcttcttcatgaaatgaatcttttcagggtagacatacctctcttgccctacccatacatggcaagggatgggagacaactagttcagctaagcagggcctgagttgctggaaagggagcaacttgcctattgcctagggaaagcaggctccactcatttcctggagcaccctcctggagc

SEQ ID NO: 32250 - DNA, 300 bp, Mus musculus
  source 1..300: mol_type = other DNA
cctgactcctaactctcaggccacagtctcaggctgacaagcaggcttgctatctaaagcaccaccaataagggtcagtcttagtggctgtcactctaataccgaaagctgacctgatctctcctcacttttagtttcgaatggggagtacagtctggatcactgctggacgctggctgcagctgccccacagtttcagggtcaaaagggactttggagctaatgaatcgtttcctgaaaagcaaagccttggccgctgcactgagttcctttaagcaaagtttctggggcgctctgagc

SEQ ID NO: 32251 - DNA, 416 bp, Mus musculus
  source 1..416: mol_type = other DNA
cagtcccgtatgcaatccctaggggattatgcccgggctaaggaacattagcaacttacttgagttcatactactctccaaagtttgagtaaagttggaatgagaatttttcaaactggtctacagctttaacaatgtaaacctaaggtacaactaagaattagctgaaatgtactgaagcaatctattgactggctagagtgtgtcagacttgacagatgttcacgattctaagcaatcttattttgaagaaggttttgcagagtatggtcctgggatgtcaggctgccatctctcctgaagagcactgactgcacttggtggctcacaaccatcacagctatagtgtactcatataaataaaacaaataaataaatctttaaaaaaaaaaaaaaaaagatcagtttctcttcta

SEQ ID NO: 32252 - DNA, 281 bp, Mus musculus
  source 1..281: mol_type = other DNA
gctcagggcaggtgggatcccgtcgtttccaggtgccggacctgcgctcagagcgccccagaaactttgcttaaaggaactcagtgcagcggccaaggctttgcttttcaggaaacgattcattagctccaaagtcccttttgaccctgaaactgtggggcagctgcagccagcgtccagcagtgatccagactgtactccccattcgaaactaaaagtgaggagagatcaggtcagctttcggtattagagtgacagccactaagactgacccttattgg

SEQ ID NO: 32253 - DNA, 300 bp, Mus musculus
  source 1..300: mol_type = other DNA
tccatgaagatagcagctgatgtaaatgtccctggaaactagcatggtacctggaactcaatctttattgactagaagaaacaattcgagatagacacataaatgcacttgacacatgtatctccagactgcagagctgcccaagctcgcgagagaggatgcgggccaggtatctcttggctacgtagcaagaccttgtgaattatttgttcagctcagccttacaaaagctcacagtctggtgatcttaagggcatccaaagggaaaggagccttttcagcttcctataatgatactca

SEQ ID NO: 32254 - DNA, 307 bp, Mus musculus
  source 1..307: mol_type = other DNA
tggatgctctggaatggctgcaagctgggtcaagcctctactctgccagatatcagataaaagccctgagtcttcactagacacgacatctaaggacgtgtagctaaatgatctagtcaacaatctactaggatacacattatgtagtcgacttgatcgaatttccttgactggaaattctgctgagtggcattttctacccagttggactgaaaactccagaacattctagaaaagatactggctctaaaatactgttttccaccagcggctgctgcttcagtagcccacgcaccagtctgtggct

SEQ ID NO: 32255 - DNA, 286 bp, Mus musculus
  source 1..286: mol_type = other DNA
taatgacagtgtggggaagccaggtcctgggtttgatcccaagcaccagcccaggtaatcgtaaagctgagcccctaaggtctgcagtatgcattcagcagcctgtataggattagtgtatacagcatgtttagaagcatgctatatcccatgtgtcaaaggctctttttaaagccaaggcattgcccctagaccatgggctcaggggcctctggacaaagctgctgactctgaccacagcctttctctggaccgtgttcactgctgagggtggaggataggctct

SEQ ID NO: 32256 - DNA, 408 bp, Mus musculus
  source 1..408: mol_type = other DNA
tcagtttcaaggacttctgttaattcatgtctggagatttatataggcagacagatgtagatacccacattggtgtgggaatcacagcacaagcacttagactaagtttgaattattgcttagaaacagttaaattattgatctgctacatattaaagaggatttaagattttgattcttaaaaagagcactgaccgctcttcctggctcacaaccatcaatgggagtgtctgaagacagctgcagtgtatgtgtatatatataaaagaaatctttaaaagactttttgctattgagtcaaagcctgctgaagcagtgtgtcacatgtatcatccagactaagaacatttgctactactgtctcttgccagggtccggactctactttcactggaagagcactttaga

SEQ ID NO: 32257 - DNA, 303 bp, Mus musculus
  source 1..303: mol_type = other DNA
caaaaacctgtcaatgttaacttagagcaaagcctcccttaaaggggtagcagaccttaaatgctttaaggacttgtgatgtcacaggaatctggatttacacataaatgaaggtagctgtttatttttctgtagaccaggctggcctagaactcagaaatctgcctgctaagatttaaattgagttctgtcctttgtgaaacagtatcactctaacttggaatctatctgttccaaagtttcacaaggaaggaatagttttgaaatgtagtcaagccaattggtttgtgcagttgcgtgcgc

SEQ ID NO: 32258 - DNA, 622 bp, Mus musculus
  source 1..622: mol_type = other DNA
cagctttttatttatttatatatatttttatttatatattatttatttagaatttttggcaagttgtttaaaatccttcagtaactcaatgggtataaaacgaatcctaggtttattattccaaattttacaagacctttaaagatctagcttgatcctcagccctgatggcggtggtctcggggctaaaagggctcttccattctcccccccaaaaaaagtgatcctccagcctcagtttctgatagcctgaggattacacaatgtgatctcagaaagcgaactcttaaacttctaacaagaaacttccagaaggcgctgcgttgttaagagtatcagacattcctcaaaataaatgttttgttcattgttggccaataactggcatctatttccctggtttaaacgggccaaaacaccctgtagactttggcagtcgcgagtttttcctagtctttcaaacactaaagggctgccttcagggatgataggaagaactcctcccggggagaatcctgcgtggcaggagatttaacaccctctccgcggcgattgctgccccgcggcgccctgcgactgcgcaggcgcacaagtcctccgggcgcatgcgcgcgagggagcg

SEQ ID NO: 32259 - DNA, 315 bp, Mus musculus
  source 1..315: mol_type = other DNA
ctatggttgctatgagaacagcccacaggattttacaaaaagctctggagactcggggtcgactcccctgcctccaatatattgcaacaagaaggattcttcctggactagagtaggagtccccatatcgggggtcctccagccttaggaacacttgttctagaggtagtgtcactagtgctcagtcactcagtgcagtcgccaccttgatgacaccaagtgcccagctgcagtctgcgaggacgctgggtcccacgggttggcggccgccatggcttccgcacacctctgcaggcgcgcggtttgatgatgtca

SEQ ID NO: 32260 - DNA, 347 bp, Mus musculus
  source 1..347: mol_type = other DNA
attaaagaggcttttatatttaattacaagagattaaagcttcaatactctaacatttattccatactcagtttgttgttgtcacctcggtcagaccacggtctttaagctgaaagacaccagttttctgctcagttccctgcaggaaaagactacttccctggggccagcccaagagtgagcgctaccacaaggtcctgatgctttggcagcagagctaagggagcctccgatagctgctgccggaacagggagcgggaacaccggggacccgcgctcgcctgagacgcgctcccagggcttccgcccgggcaggaacgccctgtgacatcatcaaaccgcgcgcc

SEQ ID NO: 32261 - DNA, 275 bp, Mus musculus
  source 1..275: mol_type = other DNA
gtatctctttataaagtgagttaacagccaggcatggcggtacacacctgtaatgccagggctatggttgctatgagaacagcccacaggattttacaaaaagctctggagactcggggtcgactcccctgcctccaatatattgcaacaagaaggattcttcctggactagagtaggagtccccatatcgggggtcctccagccttaggaacacttgttctagaggtagtgtcactagtgctcagtcactcagtgcagtcgccaccttgatgac

SEQ ID NO: 32262 - DNA, 403 bp, Mus musculus
  source 1..403: mol_type = other DNA
tttattcttaatttttaatgtctatataatggatagtaaagaaagaagagggacttactcttaggttttgttttgttttttgccacctctttatcaaaaagccaatgaaatcttttttcgtgggttgtgattaggttaggggacagcgcccatttcccagatcctggctactgaagtcggctctcagaagcactgcgccttacatctctcctcaggacaggccggccgttgcagcggaggctggaactacgagtcccagaattcccaagcacacgcgcactgtcattgtgatgcggcaattctccggtggggggcggagacactctcggcccaattctccgcccccttctccaatcagcacccgcggcggagaggtgggcggtgcgcgctggcagggcgggtg

SEQ ID NO: 32263 - DNA, 631 bp, Mus musculus
  source 1..631: mol_type = other DNA
cctctctgctcggtcctggtagccagaagagtcatgagcagcttcatgaacctccaagttcagggtgggcataagaaacccaggggtctcgggcagtctcccctccacgcctcggttgagctgaacgagggatgaggcgggcgcagggaagcttcttggagacgccctggggctcgggggtgtgtcctacctgggccgcggcggacgcaggatctctgacggaggacgagggtctagctcagggtccgcaccggcaggagtcaccgctcagcaggcgggcccgccaccgcctgcccatcccccgccgcccactgcggcgggaccggagcgcggcttagacggccggcggtcccttcggatgccgtccgcgtctaaaggcggcggcagcggctgcgggtattgctgcggattgtcccgggccgctgtccctaccgctcccatcgccgctgcggcgactactgcagcgcccgctgacccggccacccgccctgccagcgcgcaccgcccacctctccgccgcgggtgctgattggagaagggggcggagaattgggccgagagtgtctccgccccccaccggagaattgccgcatcacaatgacagtgcgcgtgtgcttgggaattctgggac

SEQ ID NO: 32264 - DNA, 433 bp, Mus musculus
  source 1..433: mol_type = other DNA
ggtcttcctttgaatgagaggaacagaggaaactatagatcctatatcttgattaaagcctattatatttttcaaaatactgtaaactctttaatacaatacgtaagggattcaatacaagtctgatggacatttgatgattttataacatgcctctgtcctcaattgtcagttgatgaaaaagttggccaattttgccgggcgcacccctttagtggccaggctatcaaaacacaaggttactcactttattttgagtcatggtctaaggctgtgcttatgacaggctccaggggccaggaaatcagagaaaggcgcctcgccgccctgcaggcctggctggctgggcagatcttcccgggccgccagagcccgccccgtcgtccaacggtcgatcccggtcgccggctccgcccctcccggctgcccgtgg

SEQ ID NO: 32265 - DNA, 371 bp, Mus musculus
  source 1..371: mol_type = other DNA
ctgagttcgaggccagcctggtctacaaagtgagtccaggacagccatggcaggtgagaagtatatatataaatttaaaaatttattcgtttcgtaaaaactaaaccaaactatcgcactatgcatagatgcacaaatgcaggaatttgtagtctgtggcaacaccacccctgccccggggttaagggatggcgacaagaggtcttccctcggggatcagccctggtggagcagggctaactcggaaacctccggcttggcaggtcggcagcctgcttccgggaagccgaccggaagccgctccgggtgctgcgagtgtcgtccctgtcgcgtcgggccggccacaggtttccgctagctggcggccgggg

SEQ ID NO: 32266 - DNA, 497 bp, Mus musculus
  source 1..497: mol_type = other DNA
taaagattctaaaaaatattttgtagatggctcagcagttaagagccctgactgcccaccatggccctcttctggtgagtctgaagagggtgactgtgtactcacatacataaaatcaacatgtaaatctttttaaaaattgtaattaattttttggggcttcctgcgtttgttaatgctggcattaaaagtgtgtgccatcacacccacctaaaaatattttatttttgtactaattatatgtgtgtgcaacccagtgcattctctatagagaacagaaggagccggaaccacacttcaatggcttattacagtccagagatgttgaactgattgaaaaattacaacactgacaatatatcccaaggaaatattgtttaaagcacgatttgtataaaaatgtttattcttaatagcaacacatattaaagaaggccacgactagactctaattctgcttcaggcaatagaaaaagttaatttacaagtatactaca

SEQ ID NO: 32267 - DNA, 291 bp, Mus musculus
  source 1..291: mol_type = other DNA
atttgaccttacagatccagcacctgagttcgaggccagcctggtctacaaagtgagtccaggacagccatggcaggtgagaagtatatatataaatttaaaaatttattcgtttcgtaaaaactaaaccaaactatcgcactatgcatagatgcacaaatgcaggaatttgtagtctgtggcaacaccacccctgccccggggttaagggatggcgacaagaggtcttccctcggggatcagccctggtggagcagggctaactcggaaacctccggcttggcaggtcgg

SEQ ID NO: 32268 - DNA, 311 bp, Mus musculus
  source 1..311: mol_type = other DNA
gaacttggagttcaggatgtcattttcttgttttcaactaatcaaataaatgaatgaatggtagccatggttatgctcacaactgcctgtaactctagctccaggccagagccactgtgggcacctacattcatatgtgcacagacttacatgtgattaaaaaataataaaagataagtattaatatcacaaacggatctgcaatgttgataaacgcagttaagagtgctggctgcagtgtaactccgggcactgccacggacatatttacctagtaggcgtggctgggtctccaggccgggccagcgggg

SEQ ID NO: 32269 - DNA, 440 bp, Mus musculus
  source 1..440: mol_type = other DNA
tgtgtgttttccaggtaaaaaaaaaatcaaataatgaaaaatctgattcttcagttcttgaggttaggaggcagtagggcttccttccttccttccttctatagttaaaagttttaaaagctgtccacaggaaacagtgctcactcatgtggcctgttctgtgtccttccacgggcacctcacatacccccctggacacattggcaagcccagacaggagaccctttcctgtgccttcatccttaagaaccaaggaggaagcctgtctctgaaagagcgtgggccctggcccagatggtttcctgacatgcatatggtaagcagctgctcatattgttcggacccactgtttatacagcagcatctagagttgtccagaaaacggcctgcctaggcctcctgcctccaagacacctgccagcaggctcacaggctttaaa

SEQ ID NO: 32270 - DNA, 289 bp, Mus musculus
  source 1..289: mol_type = other DNA
cgttcctgtgccttgggtattgatggaggattactttatcaggaagctacattctctttttcattcatttaaaaactgttttaattttatatgtatgtatgtatgtatgtatgtgccacatgcatgcctggtgcctgcaggaggcgagagggggacaaccaaggacagtccagagtggcttctgtttgtgcttaaactccagaaacattgggagtaatagtctcacaactaggaccccccgagagctatcgaaaaccagttgtgctctgccctgtcagaggtggcagtg

SEQ ID NO: 32271 - DNA, 410 bp, Mus musculus
  source 1..410: mol_type = other DNA
gtagaaactttaaaagtccaacctgggttgcttcctttaaacaacaacgtctatagcgattttcagcagacatatacgaatcacagaatcttggtgggttaataataatcagtaattatccgtaatttaagatctaaatggagcaactgttacttttgtaggatctacacaagttttttttttccctgcagaaaatgcctgtgctagctgttaccgaagcagctggcgtgttcgggttttcatgggcccgcgaggccgccagcgccgggcgggaacggtccagtcgcttgccgcacacggatacgtgcgcgacccctttgcggcgctgctggtcccgggacccgtgcggcgcacgccgcttatccaccgcggctattacgtgcgcgcgcgcgccgtgcgtcactgcgtgc

SEQ ID NO: 32272 - DNA, 333 bp, Mus musculus
  source 1..333: mol_type = other DNA
aacattttccaataaccaaatcttcatagaaaatttttcttgatccagttgtcctttcctaatccaagcagacactaaattagtaaatgatgaagtagaaactttaaaagtccaacctgggttgcttcctttaaacaacaacgtctatagcgattttcagcagacatatacgaatcacagaatcttggtgggttaataataatcagtaattatccgtaatttaagatctaaatggagcaactgttacttttgtaggatctacacaagttttttttttccctgcagaaaatgcctgtgctagctgttaccgaagcagctggcgtgttcgggttt

SEQ ID NO: 32273 - DNA, 591 bp, Mus musculus
  source 1..591: mol_type = other DNA
agagggcagaggcgtggccatatcgcttcaggcttgactaaaactggagtttctgacagaatgtctcctagatgctgccaggatgaaataatgtgaacgttcaagcgtctcaacccgctggcgctcttctgccgagagaaggcggcgacaggtccagggcgctgcaggcagtccagccagcttgaaggaagcgctggcgctgggccttcacgacgggaaaccataccgctgaaagtgctgcagcatgatctgcatcccccggctgcagcactggagggctccaagtaggtcagcaccgcctcggccaggagcagcgtgggagaggtggcgtccaggccggcgccatccagggcctctcctaatcgctggagctcccgcaggtccgcgcccaggatgcggtagtccgcgctctcgaagcaaaggaccggtctgcgcacgcagctccggggtctccagccgagacacgtccgggaagtccacctcccagacggcagctcgggccaggaggcccctgagcccaaggacaggatctgggctctggtccgggacgggagcgcgctagtgagttcgaggaaggcgcgcacgcagtga

SEQ ID NO: 32274 - DNA, 604 bp, Mus musculus
  source 1..604: mol_type = other DNA
ttagtttcggcaaaatattgagtatcacaacaactaacgggtacattcctgttatactcttctaatttcttcacctggtacagaaattttcgaagaaaggagggaaacaccatatgtttacaaattcatttttttcatccaacacaatttactgagtattgtgtcttgagcgctttgtatacatttccactactttcaaaattcaatttgaatcaatgctaacaacaaattcatatgcagtgaaaagaagtgtggttctatccactcctagtggttctcaggagtcgcgggaccgcagggcccccatagccggagctccgtagggttggccctcggtccccgctcgcgggcgccggtcggttggagttccccgggtcccgccccttcgctgcggctcagctgcacccgccgcgcggcaagcgactcgttgaaaatggaccctgggtacccactcagggccaagggcggctcgggagtccctagatgagccgcgcgccgcatcccggaagtgcgcgcggcccaggcgcccaccgcctcgctcccgccgcggagccgcgaggaggcgccggtgccgtcgcgcatgcgtcctgggctccaggagaag

SEQ ID NO: 32275 - DNA, 352 bp, Mus musculus
  source 1..352: mol_type = other DNA
gtatctttacatgtttaaaaccttgtcagagccggcttctgaggcagtaccttttcaggacagataggcaaggtgaaaatgaccttttaaaaactgcatttctaggtgacgttttgcagagaaagaaccaccgagccccggtgctgcgagtccgtgggcttcgagcacagctccacagcggcggctgcccggccgggtcactctgggagacgtcggcagtcggtcaaagcgtcctgaggactcccgccggccgctctcaagccggaagtccgagcgggcttctcctggagcccaggacgcatgcgcgacggcaccggcgcctcctcgcggctccgcggcgggagcgaggcgg

SEQ ID NO: 32276 - DNA, 421 bp, Mus musculus
  source 1..421: mol_type = other DNA
tagggtttttgttcaaactgttttttaaatggtaaatcttaaaactattattttcttttctgtgtctgaatgttttacatgcatatatgcatatatttaagatggtgcccatggaagccagaaggggtactgggtcccctacctagggctatctctagtgacattgcctcaggttacctaagagctagcctcacactatatagtagataacgtaaccctttagttaaaaatctattccttaggtctggtttaacctacatgggccattgacctggccggccggagacgggcccaggcatggaagtccagctgaggggtgttagcacccactgtgggcagagccctcccacagccactcatggaggcatgagtgaggttccatcctctgtgacgactctgtgacgttaacttaaaacaggca

SEQ ID NO: 32277 - DNA, 454 bp, Mus musculus
  source 1..454: mol_type = other DNA
aactaagttgccataaagcttcttcttgtaacagttttgaaacttgactatttcaggtggacttaaatttttaaaatacttgcttatctataaataggttaaaaaaaagaataaataaataaataaattgtgtgtctgggtgtcttactgttaggacagcatctttctgaaccaagagctcactgtttgggctggcctggctggccagggagccccagcactccctgcctccctgtctgccacttgcttagcaaggttttttagtcttgttaggcttttattaagattaataaactagttagaaccagcttttcccccttaatttaaaacatactaacttacacatttagaaaaattatatataaatgtaacatctgggtacctgctctccattagttcatgacttataaaaaaagaaaaagaaaattaggctttctgactgccaactccaggc

SEQ ID NO: 32278 - DNA, 162 bp, Mus musculus
  source 1..162: mol_type = other DNA
tagaattcagatccaacggctctttaaattaaaatgacagtgaaaccacatatgattctttgaaaatccaggagactctccttttccacggaagtgtgagtacccccgtccttcaggcaggggccatgctaccatggaaacacgccgccgatttgcgtgacg

SEQ ID NO: 32279 - DNA, 279 bp, Mus musculus
  source 1..279: mol_type = other DNA
atcatctctgaccctaagagtactttatgttagagtgttctcctggcgacgatggtcctggaaggcagagccagtactcagaagcaacgtgtgtgggtgctcttacagccaggctgcattagcacagacctgcatgaagctcccagggtccctgtgccccaccccagtgggggactgctccagctccccattgctgcgatgcagaacagggttgcagtgactgaaggtcactctccccttgcctcacagttaagtctctagtgcctcgtcacggaccag

SEQ ID NO: 32280 - DNA, 321 bp, Mus musculus
  source 1..321: mol_type = other DNA
atcgatgagccctcttggaagagctattgtttcccataggaaggcattttccaaattgggtaaatatacaccatcccaagtaattatattcacttttttttttccctctccaaaaataaggaagttccaccagtagatctctattcttggaaaatgtgttattttaccaagagattctttctaaggatactcaccaatgtactgtcttctggaacatcaggaagctgaaggtagacatattaatggcaatatgtctgctttgctttggctggcccgcacccaaacctcaagcacgagtggttcgggagacctgtgcctgcc

SEQ ID NO: 32281 - DNA, 328 bp, Mus musculus
  source 1..328: mol_type = other DNA
tattaagtatttagtttgggaagtcaagtgactttcccgtggagacagaatccagttttctcacactttgttttgctttacaggaaaaaaagactcggtttccccccccgcctggaggaggtgcaacgtcacaaactttgcctctagagagagcagcatcaggttgcattcccccgtgcggccactaggcgcagcctgactgttgccggtgcgcgccctctgcggattggcgggaccgcaaagaagtcgcggtcgctgccggcaggttcggctgcgcgagggctcggcgaggggctcggcctgcgctcggggccgtgggtagtcccgg

SEQ ID NO: 32282 - DNA, 190 bp, Mus musculus
  source 1..190: mol_type = other DNA
gagtggttcgggagacctgtgcctgctccagtccaggaactgccagctgcagaggagccaatagctttctgattcttaagggatcctttctcaatctggatttcaccccacccccgcacacctagcgcggtggcaggcgggaaggcggagcctgagtgagccccacccctggagactgcggctggggcct

SEQ ID NO: 32283 - DNA, 518 bp, Mus musculus
  source 1..518: mol_type = other DNA
gccatgccatgaaccaactaatggcctgtctcaagaaagcacttaggatctttctgcagctacagagtgaccttggttaaacctgaggacgtggccctaccctgccccgggcggagcgcctcccggttccccaccgactggcaatgaggcagccgcagccaggcctgctggagggcgcccgcgctgcgtaggcccaaccgctcccgcgcccagccggtcctccggccctgatgagccccgccgagcccgtgtcggagacgcgactctcgaagttttcgtccgtcagttccaacggaggcggcggcgagacgggccgaggcgagcagcagcgccacgcccgggagcagagctaggcagcccgcaatctgcagccgcttgcctgcgctcgcgcgtctggcccgggcagacccgctgccgaggtcccaaccccctaggcctgctcggggcccgcagtgtggcagccgccgattggctgcgtcacgcagcgtcgggcgggcggaccactgccgattggcggg

SEQ ID NO: 32284 - DNA, 440 bp, Mus musculus
  source 1..440: mol_type = other DNA
cttaagaccttcgcggattacagtatgaagtcaaggccagcctggacaccttggtgactagggatgtaatccagtgttggatcacttgcccagcaatgtgcaaggaggatgtagacttactacgccctatcgtgtcgcggtgcgctcaagtgcgtgcgcgccccaatgccccggagggagggagccggacagacagctcaagctccccgcgccggcgcccagagcttcactcctccccagcgggtggcgctcagggccgctccggcttcgctgagcctccgccacagccagaccggcgggcgttcgcctaagcgtccgccccgcctcgccccgcgcgcccgccaatcggcagtggtccgcccgcccgacgctgcgtgacgcagccaatcggcggctgccacactgcgggccccgagcaggcctagggggttgggacctcg

SEQ ID NO: 32285 - DNA, 334 bp, Mus musculus
  source 1..334: mol_type = other DNA
tttctcttacaaaccaaatgtaaggcacattcaaagtagtagtggagatgtgcatgcaggagctctggactcaagctcttgggaaatgattgttttcagacaacctaaactgtcccacatgaggtcactttgcctagtcacgtgcccggccccgtcggccacgtgacccggcctagtttctacaggctgggacccagcgctccggggaagccccgccccgtgccagcgctccgcccgccgagctccgctcttcgccctccgggactggcgcgtggcaccgcactccacccctgcccaatgaagcgggcgcccgggcgtgaaggggcgggggtgg

SEQ ID NO: 32286 - DNA, 215 bp, Mus musculus
  source 1..215: mol_type = other DNA
aatgacggacataaccacgtggttttcaggtattcacttctcaggaccaaaggactacgcctaatttcgtgcacatgagatctatttaggcccaatctctatcgaattcgactgggtgggtgctgtcgcttagccccaccctacaaccggtgccgcataggctgccgaaggggcggggtaggcgtggaccacaccagcaaacattgttcctaaga

SEQ ID NO: 32287 - DNA, 236 bp, Mus musculus
  source 1..236: mol_type = other DNA
ggtgtggggttaaccaatggtcaaattcccaaaccaagcactagtaaggttttcattgcaagaactttaaactttggtgtattttaacttttagacctattacccaggcaaagaaccaggtttgtgtgcaagaccctgggtgatgtagatccagtattggaaaaactgacgagaaacagcagcttctctcttaggaacaatgtttgctggtgtggtccacgcctaccccgcccctt

SEQ ID NO: 32288 - DNA, 266 bp, Mus musculus
  source 1..266: mol_type = other DNA
ccccccttaatttagatgggagggtaatgtggttataatccaataaacatttttaataataacaacaacaacaaaaatatttttgtctactcactaaagtttgtcaatttcctgtcttcacaggtgaaaaaatttgataattatattaacagaaccttcaaagtcctatataatattgtaaacaggttttcatgtaataaataaaatctttaactgtcagacaggaggaccttccagttcttgagcggttgaagacctttaagcga

SEQ ID NO: 32289 - DNA, 300 bp, Mus musculus
  source 1..300: mol_type = other DNA
tacactgagctcagaacagggctcagcaacataacttcttaggctgatgagtttgtaatataaaatttctgtgaaaaataacagaaaaaaagatttctgtctactttagactttatgaaataatttaataattattaaccttcaaagacctatgtaatactcctagaaagactcctttttttttttttaattttacaaaacactgcaacgttatactcagtttcttcaaaacataataaatgaaatctttaaggaggaccttccagttctggaaaatgtcgaaggcgggaaacttgctcg

SEQ ID NO: 32290 - DNA, 353 bp, Mus musculus
  source 1..353: mol_type = other DNA
ttatttatttattatatgtaagtacactgtagctgtcttcagacatattattatcatcatttgtaaggagctatgtgtatgtgcacaaggtactggcagaagccagaggtgtcagatctccctagacttggggtcccaggttgttgagtcacctgaagtgactgctggcaattgaacgagagatctccactaaatcgatcaggtagatgcaagtggatcccgctatcccctttctcagggccagccgagctggcatggggagcccgtacctttctcgtttcgaactgggacggccccagccgtagactggatgggtgacggctgccgcgcacaggctgtgccccacacagctg

SEQ ID NO: 32291 - DNA, 344 bp, Mus musculus
  source 1..344: mol_type = other DNA
acctcagcctcccaaatcctgagattgagtgtgaggtacagcactttaaagagaagcccaggccagcctggtctacagagtgagttccaggacagccagggctaagccctcccgcctggccttttgcaacaaccccaaagaacacgcttttggctgtgaagtcagctcatttgaaggcacatcacagaagccttctgacttttctagaaaagcttcatttgctttcttttaaaacagtcccagaggacactggggaatgtcagtttcctttacccactgtgtctggacagaacccttccctctgagagccggggccacgcggggcctcggggaatgagcaagca

SEQ ID NO: 32292 - DNA, 406 bp, Mus musculus
  source 1..406: mol_type = other DNA
taagtgttcacaggcacacattggtattattaataataaaatctttgaacacaaaggaaaggaggcatttcccccccccctctgaagatgtaataattctttctaaaagtacaaggaaaggtccaccagttcctgttcccttcagccttcttttgtcttctgaaaataaaagaagggttagagcgtagggttttctaagcgctaaacgcgggcgcttacaagcttctgtggttgcaccagagtaaatagctattgtaaaacagatgttcccccaagagagcaagaaccgggtgttgcagggtgcaagtcttgactcctgcccgcgaagggagcgagccagggcttggggcgctagggggctggccccctacctaggccccgccccatgagctgggcacgggcagtg

SEQ ID NO: 32293 - DNA, 360 bp, Mus musculus
  source 1..360: mol_type = other DNA
gtaactttttattgtttgtttaaacaactacacaagcaggaacagtattacgagttctgttacttggctttaagcccagttcagaagataagccgtcagtaacggcgcattagctgccattcactgggctttctcctcagctaagtcgagggaaaagctttaaaatagcgcattttgtttgtttttttccacctcggtggcacaaacaacacggtcctgacagaggacactctgccaaggggcccgctgatagcaggacctccctaaacctggccagagggggcgtcggcggaaacgagctaatgcccccctgggcgccccggccccagccggtgggcgtggaccgaggaaacccgcccc

SEQ ID NO: 32294 - DNA, 406 bp, Mus musculus
  source 1..406: mol_type = other DNA
tccagggtttttcacaccctgaggacaggagaagaccctgcttcctctgcagtgggctgaaaggacttccgaatcagcatttcttatagaataatgagatcagcttggaatttcagtcaaaatgtgggttgcaacccttaagaggtcaaaccacatgaagtaacaacaaagataattttatggttggtggggtcatcatacatgaggaactctattaaaagcgtttcagcatcaagaagattaagaatcatccagattctagatggatttgaaagactcgagctagcaaagtgacctaggaagagaacctcggggacactccgcgaggaccaggctgggtctggccatcgggagcgcaaggcactggctcccgctccagcgcgccaagccgctagtcgctaaccct

SEQ ID NO: 32295 - DNA, 494 bp, Mus musculus
  source 1..494: mol_type = other DNA
atgaagtaacaacaaagataattttatggttggtggggtcatcatacatgaggaactctattaaaagcgtttcagcatcaagaagattaagaatcatccagattctagatggatttgaaagactcgagctagcaaagtgacctaggaagagaacctcggggacactccgcgaggaccaggctgggtctggccatcgggagcgcaaggcactggctcccgctccagcgcgccaagccgctagtcgctaaccctggccgctgggtgcgcggcgcgttcttaaaccccgcctcccaggccagggcgcgctctccttgtcgcccggctctaggcggttccgttagcggcgggagggaaaaccgcccccggcgtccccgcctccgagccccatcggaggctgagggcggcagaaacttccttccctcccgcctctccggatcggggcgggcgggggaggagggagccagagcgcctgcgcagggaggccgctttccatc

SEQ ID NO: 32296 - DNA, 392 bp, Mus musculus
  source 1..392: mol_type = other DNA
agccagcctggttcaatatattggaaaatcagacaatatctcaagggggcagtttacctgttagaatgcactcagtgtcgaaatctgtttacataactattttgctactgttttcgccaaaacaatcaccgtgttcgggtgatctgctcgcctgctgccggctcacgatcagccagcactgccgagcaccgcccgactcacgcgtgcgcacttcctttctcgcttggggggaccaggctggtccgcgtctcccagcccagcgtcgccccaccccgcccgccccgcccctgccgcgcgcgtcgcccgtggggcggagcctctgccgggcgcccagtcagccactgtcccagcctgccctgcgcgggccaacgagagccagcccagtgactcac

SEQ ID NO: 32297 - DNA, 378 bp, Mus musculus
  source 1..378: mol_type = other DNA
gtatcagattgtactttcctgagaaaaacagaagaaattgaaaggtgaactatttcaccatctcaaaggatatcgtttgacttcaatctccatgttaaccttcatgtggaggaccacaaagaatagattgtttgacctcaaaagatctattggtctgagaagtttacactcccaaataaaattagttttgagtcagattgatttttcaaactctgggatcccaggcatctgttctttattagttctagactttaaaagactgccttagaaatctttggtagtccgtttagagccgcctccacccctctctcgtgagagtcacaaggtccgacactgcgcaggtccgtgaggaccgcccaggccaagatggctgcccag

SEQ ID NO: 32298 - DNA, 281 bp, Mus musculus
  source 1..281: mol_type = other DNA
tggggacaccgctgatgtaatatacattctgagtaaaactatggcagcctttgtctttatctcctcatccagaaaaaataatttattcggggattcttcacttggtcacttagtttaccaatggccctgttctaacaaagaaaattacctaaatttttcaagggtaccaagttctccatccaaagctctaaatatttctgggctgagattataaactaacctggctttagttttcaagaatgcaaacttcaggtcaaatatcacgggaatgcccttggagc

SEQ ID NO: 32299 - DNA, 199 bp, Mus musculus
  source 1..199: mol_type = other DNA
acagtgctgggaccaggactcaaggccttagaaacctaccatcatgatgcttgatcacatgtctcgatctatgaaaaaagaaaatggagacaaaactttacttttatacgtcttgccaaggccctggaacaggggttacagaccaaggcctgtcctacctggcatgccctttgacacttagccaccacgtttttaaaat

SEQ ID NO: 32300 - DNA, 407 bp, Mus musculus
  source 1..407: mol_type = other DNA
atctgccaggtgctgctgctgcactcttggcaggaggggcagcctgtgcaaagccagagaagccatgctaaggctgaacccgcgggctcccagacttgagcatggtctagggacgagcgtctaagctaaaagtgcttacttagacttttagagaaagctgtgtgaacagcatcggtccagctccagaccctgctacttgatcaggtctgcttcaggaggagccaaacagctacccctgaaaggctctgtgtctagagaagccgctccagtcaggggtacagctgatgctgaccagttcacaactacttgtaactccagctccagggaagattaaacatttaaaaattagattacaataaaaggggttggcaggtcattccaatcaatgtttgtctatctcagacgcg

SEQ ID NO: 32301 - DNA, 329 bp, Mus musculus
  source 1..329: mol_type = other DNA
tgggattaaaggcgtgcgccaccacgcccggcttcaataaaacagcctcggcgggttttctagtgcaccaggagttgctgctagagagctctggtgataattccaaggccagcctggtctaaagagcaaattccactaaatgtttgtcaagagaaaggcttgcaaattctgccctacagcatcttgatgcagatgcatcaggaccacgtcctgcgagtggctcgcggcgtcctgcctgcagcagcgcactgttcccgcacaaatcccccacgcgcctcctggctgtcaagtgcgcaggccccgccccgggcccgcgcttcgccttctct

SEQ ID NO: 32302 - DNA, 332 bp, Mus musculus
  source 1..332: mol_type = other DNA
ctcttgccaggccgggccagaaactttgaacagtatgtaaactggacatagtgacataggcctgtgatcacataagtctttcagttgaagtggctcaactggtagaaagctcttttcaccaatatgatactatcactacatttaaaaataattcttaggattgaactctgtggcctgccctgaaattccggcagtctacattatatgaaactgttttttaaaaataaaaatattagctcgaggccagcctggtctacagagtgagttccaggacagccagggctaatacataaataaatactcaggatttaaaaggcctcatcttaagcccc

SEQ ID NO: 32303 - DNA, 288 bp, Mus musculus
  source 1..288: mol_type = other DNA
ggccctacgtacctgctgggcccaggggtccagtcagcagagcgcccaggagaacggtggggggtagtgtgtcaagagcgcacactcccacggctgtgggagaggagcagagaggtactactcaggtcccgcacattaacaccctggtcaggagcgtcctcatctaacccaacctctggtgtaagggatccggtcctgctccgctcctgggagcagctccgagaatcttaggtgtcgctcgcgccaccgctagcaggtacctggttggcccacgctcctataaaagga

SEQ ID NO: 32304 - DNA, 332 bp, Mus musculus
  source 1..332: mol_type = other DNA
gtcttcaggagcctggactgtaggctttcaggccaaattgttgaagtagccatgctaataacgtctcgtaacccttaacagtttacacagccacttgggtgtggtaacttcccaaacaatctggaatcagagtcttagaatcatgactcgtctctccttggcataatgtgatggtgccaagaaaccctcctagtttttcaaagtcagtgtgctgagctcaggccttagcaaaggctacaattcctgttccgcagaaaaggaggaccaccggtaccccgggtgggccaggagaggcagcttctccagctctgagtcggggcggggacagcgcg

SEQ ID NO: 32305 - DNA, 391 bp, Mus musculus
  source 1..391: mol_type = other DNA
gtctgtttctattctgtcacagacagattgacaagcacctgatgtgcctggggactcatcttcccgcgtctgaccgggctccctgacgacgagccccgcccctcccgccggcgcagctccgccccctctcgccccgcccccgccgcccgcggtctgctcgctcagttgggagggccccatgctactgagcggagctcctcctacgggctccggcccggggccgagggcgcagggcagcgcggggggcggccctgggggatcccgccgcggggctgggggtgcggggaccggcccgggagggggcgctgcgggagcacctgggctttcgcgggggcggcggtggagggggcgccaaacccgcccccccagagcccgccctgcccggccgcgc

SEQ ID NO: 32306 - DNA, 379 bp, Mus musculus
  source 1..379: mol_type = other DNA
aggatggagatgtggaaatggaaatggcacctcatcagcatccccaaacttttgctttggactccttccccacaatggaggtaaggaagatcatatcaaatgcaagagatctgcactgacccttcaagagtgaaggcattggtcagtgttcagactatgtttgaatagatagatgcatttattaatcaaatatctgtgttttaatactgctatcagtcgttaaatgttcttaaatttatcttgtcatagttaagccataggacaataaacttgccaattttctgaggaaaatacagtgcattttcactggtagtgagataactatatagtttcaaagaagctcctcccctagaggtggcccttttcagtggtaaccacc

SEQ ID NO: 32307 - DNA, 348 bp, Mus musculus
  source 1..348: mol_type = other DNA
aaacccaccagtacaatagtggttgtggttaggttttttctttccacactggtcagtggtgtctgaagagatacaagtgctcaaaacaagtgaccacttatttattgtccagcaataaatgagacatctattaagtcacatacaagactcagtgagtatcgtatgccagacgagtataacattagtcctgtacggtcaatattctatttagggaacaagaatgaaattcactgggttgttcatatgcacacccatgaaaaaataatgatttccatcctctgtttgtaattgatttatgttaataagaacatatctctggttctacaaaaaaatgcagttatatagcca

SEQ ID NO: 32308 - DNA, 363 bp, Mus musculus
  source 1..363: mol_type = other DNA
ggatggagatgtggaaatggaaaaggtacctcatcagcatcgccattgagccaccagctaaacttttgctttatgacccaaaagcttatgctctgttggcctagagacccttcaagagtgaaggcattggtcacttctatgtttgagtagatagatgcatttattaagaaaatatctgtatttttattccttttgtaatactgctatcagtcgttaaatgttcttaaatttatcttgtcatagttaaggcataggacaataaacttgccaattttctgaggaaaatacagtgcattttcactggtagtgagataactatatagccctcccctagagtgggtagcccttctcagtggtaaccac

SEQ ID NO: 32309 - DNA, 516 bp, Mus musculus
  source 1..516: mol_type = other DNA
gttaaaacatttaaaaaccattattaaattaggcttttaaatttttaagccaacatataaatataaattttaaaataaagacatttctttacgtgataatgtttcagtggaaaaggcatttgccagcatacagataaacagtaggaagcacatggaagtctttcaggttgttccacacacacacacacacacagagagagagagagagatttttgcattgaaaatgtaaagagccctagggagccagcagagagccagcagccccttcttggctatgggccacgcgcgcgggcagaccccaagcccattggagcagtgcctgggctctgcggcgcatctgcggctgctcgcgcaggcgtccgctagggggagtcgacagtgcccaacccaggtaggagccagcgggagcgggtcagcgggtcggtctcagcccgcgtctggccccgccccctgctgctgggccccagggctagaggcgtcggctggggcatagagccgggccctggcgctatttac

SEQ ID NO: 32310 - DNA, 291 bp, Mus musculus
  source 1..291: mol_type = other DNA
gggttgtgcttccaagctaggaaccatcatacgactcttaagagttgcctagacttatcgtggaccagggactatcaatgtcaccgttctcagtttctagaaaacaacagattctctagttttagttctacaaatccagattgaaagaaaccttttaagatgtgcctcagaagcagaagcgttttcataactgagtttctcaaagcaggacagtggcccatcccacggacgccgaggccacctgttcctggcagccaatgggccaggccctgggcgcggctacaaaagcag

SEQ ID NO: 32311 - DNA, 432 bp, Mus musculus
  source 1..432: mol_type = other DNA
tcctgtgacccataggcccaggggccataggctgaacgttctagcacatgcatgtctttttaaataacttaacccaggcttgttttcacttaaagagaagtgtctggcatacagccaccggcctagtggatgcagcagaaataggcacctggaatcttctgcagttgaattttggagttaatctgaattttaccatttacttttaaatagtctctatatatgcagcgtgtcgattttgttcaaatttacccaaggtggcagccagcgctggagcctctgctaaaggactcccagacgtttgtggtcgaccgcaggtaaggaccgcggtcagcggccgtgctgcactatcgtcctgcaggggcgacgcggtcggatcggtccccgcgtgaccaggacgcgcggccctccccgagcggttggctgcatataagg

SEQ ID NO: 32312 - DNA, 334 bp, Mus musculus
  source 1..334: mol_type = other DNA
attcagatgtatggatgactgaaacaatacaaagataatctatagtaatgagttgagggcccagaaacacaatcccttcctgatatttgtgacacaaggatggccaaggtcagagaactttatagtttggccctgaacttttaaatcagtgctgaaacatattgaagatggttattatgtcttattattaatgtcttccatttctagacgctccaagtctttggaacgaggataaaagatctttcataagatgcatcttgtttatatcaactttttttccttaagaaatctttttacttcacaaaatgaaaactctcttggcgcatgcgcgccg

SEQ ID NO: 32313 - DNA, 303 bp, Mus musculus
  source 1..303: mol_type = other DNA
ttaagcatttatttttaattattatagtcagcctcggtgacaggcacattcacaaaaagcaaaactctgataacatttaggatcttttataccttcatgaagcaattgcaatgaggaagtacatgcatttacaaggaacgaatgtgcctcttgaatttaaatgctatcttagcaaattaataatcttgaaacttgtcccgagacacctagagacctctgtgctttgctttctgttttcaaagcttataaccatcaacagatgattgctcaccactctagtggaaacatttctgcacaaactag

SEQ ID NO: 32314 - DNA, 531 bp, Mus musculus
  source 1..531: mol_type = other DNA
agggatcactctggaatacacggattctaaggtgtcaacagaatcgttaaaattgcctcgttttattgtatttttgtgacctgaaattttggtaagatataaaaactttttaaaatattgtctttgtaaacaggcaagatgcaggtgtagccccgtgtctaacttgcatgagcccctggattagatcctaaggatctcaaaaggaagggatttacactttaaaatgaattctaccaacagtgttgcaagataatcggcaattttttgccgattgggtagaattcccgagacccatctccagtggagggaatcagagcagtgacacccagctccggggggaccttcccgcggcacacccgggggctcagagcgcacaagacctcagagcccgagaggcggggccgggagggcgggggcagggggcgacgcgcgaccacgccccctcggcgcgcccccaagcggcggcctgcgtgcccgcgccgacccctcccctcgcgcctcgcgggcgcacgcgccgcctcgttcaggggc

SEQ ID NO: 32315 - DNA, 672 bp, Mus musculus
  source 1..672: mol_type = other DNA
tcctgaatacaagtagaggacggcagcgatggtcagcctggtcttcacctactcgcgtcgcttgctgcagtttccaataaggagtcatcgtcggcctggagggccgggtgcgccccgttcacaggcctttccggggctgaagtcgaaggcgctggtgtcatttaagaacagcggcgttgaggcgcttccacgcgccggggccggccatggcagcggaggggcggccggcgactccgccttcaccggcgctcgggctcctcagggcagcgcggcgcgtccctgcccatcgtgaggagaacgagaccccgctcctgtcgccgcgccccggccgcgcgccagctccggactcggcggtgctcggctacctgcgggccgacgccgccgcgcatccccgcccggagctcgcgctactgcgacccgggccagggaccgaggccgagccccagccactgcacccgcccgccccgtgccgctgggaggccggccgcggggtctgacaggcccggcctcctccggcccctgaacgaggcggcgcgtgcgcccgcgaggcgcgaggggaggggtcggcgcgggcacgcaggccgccgcttgggggcgcgccgagggggcgtggtcgcgcgtcgccccctgcccccgccctcccggccccgcctctcgggctctgaggtcttg

SEQ ID NO: 32316 - DNA, 404 bp, Mus musculus
  source 1..404: mol_type = other DNA
aagagtattactaacttctctcatatgaaccaatgctcacagaaaatgatttgagtggtgttttcattcatgagtagacactattgtacagtttcctaaaaatctactctctctggcagactgatcgccaactcgcgggaccagggttgcctggccaggatgctctaggcaggagggtcgcctgcgctggagtcccacccactcgaacccggcccctgtgggcagtcgcccacagccgtacccggcgtgggctcgccggcctccaggctgtcggaaggccccgtaaggaccccgtctggaggcgactcatatccccgcactgggcgctgcgtgaggcgagtgctgaaacctcgctttccgcgtgtcagcgccctaggcgcagccgtgcgcgtgcgggttcggtt

SEQ ID NO: 32317 - DNA, 215 bp, Mus musculus
  source 1..215: mol_type = other DNA
caatttttctggaggtcacccaccatccagaataattgtttactttgtaatcaaaaatggacattctactttttttgagatagctttggctacaatatggaaaactcatcttcagcatgtgcttttggtaatttgacttaatttgtccaaatgatgaaccgaacccgcacgcgcacggctgcgcctagggcgctgacacgcggaaagcgaggttt

SEQ ID NO: 32318 - DNA, 440 bp, Mus musculus
  source 1..440: mol_type = other DNA
atacaacaattaactgtcctgaggcctgaacatttttttctcaagtatgtgaaacattttattgataaaataaattcagttttagtttagagtatggcagacattaaggattatttttacatagtcttaatacgctgtttccagcaatagctttatcagtaaatacagatcacttgcaggtgcaggtgccagcaagtgccaccaggcttaccatcaaaagtccctgttttcagagtgaagacagtttgaaagaagtgactcatagttatgcttaaaaaaaaagttggtctgaaggtctctggcttgccttccttagaaggggcagataggagccagcaggttccaggggcttgtctgcaccccaggcggtgtgggggtggtggctgtccccgcccctggcctttgcctccccgccccggcggccaggcggggctatgcga

SEQ ID NO: 32319 - DNA, 401 bp, Mus musculus
  source 1..401: mol_type = other DNA
agaaaaaaaaagtaattttattttaaagaaaggagacttagagtccagtctctaaagaaagcttaaaagtgtcacatttatgatccaggacctggtgtttgggatacagatagaaaatgaccaaagtttgtcatcataattgaaaatatatactatatcttgaggattatactagagtctgctgacagagttaagagtaaataataagatatttattttaaaagaatacatacatacatacatacatacatacatacatacatacatacatacatacatacatacatactggccagtgattgctcagtgattaaaacctgggaataaacctaggtgggcttgtgggagatccaaacacctaccagcctgagtccagaggttcccaggagggcggggaccag

SEQ ID NO: 32320 - DNA, 489 bp, Mus musculus
  source 1..489: mol_type = other DNA
cttgggtacacaaaatgaagcttggtggaccagatttaaataccaaagttttgccaacttgctgcccaagcccttgggattcccttaaggatggacactcacatttagggagtttaactctattaagcaagcttagtgtccttttgcaagtctcctttatgcagaatggcaagcagccactggcttctgctagtgtgtgttccccacacatgaaggggaacctttcttctctagaataacagacaagtcctttaatcttctatttaaacctcaagataatcagagagagactaaatatgtggagatgtactccatacatggaaatcattagtcaggagttgtaaactttaacatttaaaaaacaaaaacaaaacaacctaaaccaagtaatggcactaaattttgtccatttttttttcacaattacacagagaaccaaagaagatgtatgtgcacagagaaatcaagttgccttagattagctgtgac

SEQ ID NO: 32321 - DNA, 500 bp, Mus musculus
  source 1..500: mol_type = other DNA
gtctccatgagtcaaactctgaaattgttttagagacaaacactctattagagcccaaactgtaggtccaatctataagtacagatttatctttcatccaagaatatattgattcttgaaaaaagtgggtgaccaatactttgacatttcattgattcaaccaaaaatggacatatatatcctttgtgtgggtaaaattagataggatttgcttttatttttcctctgaaaaatatgattttgaatcccacatatacgagaagctgcatttaaattacattattttctgcatacagcaggcaaggaggcacaggggcgtgattctgggttctaagttgcatctggatagagcacacaacatatacatgtagcaggacctgcatgcccagccctggccaagcattaagtcatcactgcatatttagaggaaatcatatatctatagttagaaataaaattaagtgtgtgtgatgatttttaaatatattttcctttattct

SEQ ID NO: 32322 - DNA, 436 bp, Mus musculus
  source 1..436: mol_type = other DNA
ctctctttccatggtaattaaccacactcaaaggaaaatcttctttctctctctttaagagagggcatcagggttgattccagccatttgaattaagatcctcttgtttgggaataaatgattcttttatttcatttatgacatgatgtaaccggctcattagcctgcaaaattacactgtactgaatggctttcattcaaagtggaaataagatttttagtaggcaatttctcccatggcaccactgcggctttgctggctacagaggcggcgccagctgggcgacccggctccgggaggcgcgggaggagccgctcggataaggtgggagagcctgggcgcgcggccgtgcgcgatcagggacgcggcggccaccggggtcgaggccgcggcgcgcgtggggctctgggcggcgctggccgctgtgggagctgc

SEQ ID NO: 32323 - DNA, 407 bp, Mus musculus
  source 1..407: mol_type = other DNA
tgaattaagatcctcttgtttgggaataaatgattcttttatttcatttatgacatgatgtaaccggctcattagcctgcaaaattacactgtactgaatggctttcattcaaagtggaaataagatttttagtaggcaatttctcccatggcaccactgcggctttgctggctacagaggcggcgccagctgggcgacccggctccgggaggcgcgggaggagccgctcggataaggtgggagagcctgggcgcgcggccgtgcgcgatcagggacgcggcggccaccggggtcgaggccgcggcgcgcgtggggctctgggcggcgctggccgctgtgggagctgctgctcgcgctgggtcccgccgccgccgcagccgccgccagggctggagcgagttaaaag

SEQ ID NO: 32324 - DNA, 243 bp, Mus musculus
  source 1..243: mol_type = other DNA
tcttggcaaactacagaatgcatttgaatgctgtctgccttgtccttctggcaaaaagcacagctgatctatgatcaaacagcatccagtctgtctctctggctctaactgtagatgaacatccaaataaaattacaaggcagagtatatatacactgcctgggcctgccacctgatcagagaagccaggctgtctcccttgcacccccctccccccgcaggcactggggaggaaggagactg

SEQ ID NO: 32325 - DNA, 517 bp, Mus musculus
  source 1..517: mol_type = other DNA
aacagcattgtttttatcgttaatgttttaaatcttttataattatttgatgccatccttaaaaatttgaatctaaattgtcacagtatttgaaaagtcaaattggagttactcttcgtgagctactgtatcattttcattaaaggtgtaatgtcaccagtcagaaattggacttaaaaccaaactccatgtccaattccagtttcatgtaagctaatatgtatgtatatgtagtcattatgtaagaattgtattcagactgtaaaatgataatgctctcatgcattttatagtattaaattaatatgtttaaccaaattacctgtgaccattgctgtgaagagttgaaaaaatttgtctagtgaaatggaacccatttaaatgggctcgtaattgtgtcttttcaagcatggttggaaccgactctcctagtaaaagtcatttttagtaatgttgtatgcttacaaatgctgtaaaaatgaacttttacaactccaccgctattaacaggatagtg

SEQ ID NO: 32326 - DNA, 593 bp, Mus musculus
  source 1..593: mol_type = other DNA
tgccagcgtctgctaactgcaaccattaggccccaggggtgacagtacagaaacacaaaagtatctgttgtgtttaggacactaggtagaacgccaaactcagaattttgtagatgactctcatctctaataaactgtgcttatgctgttcactttttttttaaagaaggaaacatttgaggaggtcttagctttttttttcaactgaaaaaggccattttagtgtgaagtgtaatcatgacactcaggtttatgaatctttagtatttaggggtaaaatctataatccaaaccaaaatatgcatttgtagctagtcttgtataagacttcttttaaaacaatttgtttttttggtttgcctgcatgtatatctgtgcaccacagacataccagcctccttgggtgctgggaaccgaacccaggtccttgggttttcttaagaaagctgattgctaaggtctacaaaaatctcgctggcggcccccaggcagcccgcgctccctccgcaggtggccgcgccggagccccgcccccactccgcggggcctcgtccgctctcgcgagatcccggccgccgagcgctcggggcctt

SEQ ID NO: 32327 - DNA, 241 bp, Mus musculus
  source 1..241: mol_type = other DNA
tctcaaatattaacgactgaagagttcataagatgagcaattaaatgtgaatattcaaccacgttttagaaaaccgcactgcggaccaccgtttttttcctttgtctgatcaaaggaaacataaaaatctatttcgcaatgaattaattaaatcctcgagccctggtctctgctttttctgacggacctgaaaaccagagcaaatatttacacatacactcgcgcacgggtccttccgcgg

SEQ ID NO: 32328 - DNA, 408 bp, Mus musculus
  source 1..408: mol_type = other DNA
ttctgatcctccgcgaggagaagccatttagtagtaccactggttaaagcggagtctgctcacttcctatgcagagaggaggcaaggtaagtaaggtcaaataatttcaggtaacatttcctaaccacaaaatattgagaccatctcttggtatttggtggcagaggctgcttccagctaactaaatttatctagtcccaaacaactgaagcaatattttttgaaggatttgttgttgtgcaatctgtaaattaaagaaactttattttgtttactgcctaaaaggattaatgatttactactagttactagttgatgtgatgactgaaaagtcatcgctttcaagaaagtttttaaccaatgagcagaagcctaaggttgtagcttaaactctaaggccccatatat

SEQ ID NO: 32329 - DNA, 483 bp, Mus musculus
  source 1..483: mol_type = other DNA
atcaacaggttttccttcttgtttatttatctagcaataacatcataaacattaaatctgaaatagttatacttggagaagatgattgcactctaatgagaggatacttgtaattttatgaaacaagacatgcaaaatataaaggttgctaaatcctgtttaaataagcagaggccacatctgtacacagctatcatttaggaatggatgtgttggaatcaaaagaaaaccttaaattacaaacccagtcttcatcatgctgaagtgcatgcattttggtttcctagagttccaaaacctcggatcttaggtcaaccttgagagattttccttaagagaacaactgcatttaaactgcaggaagctgtatacacacaacacgttttcagcatcagcagctgcagatttctaaaatccaagagaaaaaggacaccttctcctggggacgggcttccatgtttggagatgaattccagccagtag

SEQ ID NO: 32330 - DNA, 243 bp, Mus musculus
  source 1..243: mol_type = other DNA
ggcaactctataaagacagcatttaactgggggctttcatacatgcatgtgtttaaagtatttctataaaagtgccttgggccttctatttatcttgaaaatcgaagtgcaccacaacttgagttccacgtgtttatggtatagtccagataaaaccggagactccagaaagatctttaattatcctctctggatcccaaaggaattttaaaatgccctgcaggtcggccgctaggcggagcg

SEQ ID NO: 32331 - DNA, 524 bp, Mus musculus
  source 1..524: mol_type = other DNA
tttaaagtatttctataaaagtgccttgggccttctatttatcttgaaaatcgaagtgcaccacaacttgagttccacgtgtttatggtatagtccagataaaaccggagactccagaaagatctttaattatcctctctggatcccaaaggaattttaaaatgccctgcaggtcggccgctaggcggagcgcggggcggggcagcggcctcagggcctgcagggcctccagcgccatgcctctcctaagcgtgctgctgcgcgcccgcctgcaggccgctctgctccgcgggcgtgcgctcgggtcggcgcggagccggagctgccgaggaagccgaggagctccggccgggagcgcgcgcgctggtgaggggtaacggtgagccagggcctggcctgcagcgcggggagaggaggggagcctggcgaggtcggtgcctcctctaggccgcgctcgagccctttgcggaaggccgcgtcccctgtcctgcgcggtgggctcgtccaggcgggagattttcggc

SEQ ID NO: 32332 - DNA, 529 bp, Mus musculus
  source 1..529: mol_type = other DNA
ggctcagtggtggtggcctcaccacaagccctgcctgagctcctcccagccagacagcagaagactgggctgagaagcgagggccactgccacagagcccctttccagccagggcctcctgggcctcgttggccaaggtgtccagcatgcgtcaggtggcccagggcaggcagatcggtccaccctgggacggaatatcccaggccaggcaggactggatcacctccgcctcctcccagggcactgatcctgcgaatgagggaggcccgggtccggcttttttttaaaaaagtatttctctcgcgagaaaccgctttggggcagagactgtgggtgccacaggcggccacagctgggacagctgcggagcagagcagccaccgccgcctgagagtccgagccgctagtccagtgggtctcatggggtcccgccagggtcgggcggcaggcgggtggctggagggccgtttgcgcggcatccagggcaggaggccgtctgcagctggccctctctgcctgacggggcgtc

SEQ ID NO: 32333 - DNA, 443 bp, Mus musculus
  source 1..443: mol_type = other DNA
cagatgcatgtgtgtgtatgtgctctctgtatagtgtgtacacatgtgaaaatagggttattttaggaaaccccattcctaactgagagttgggcgggacacagactgagactttggagggcatgcccggctcagtggtggtggcctcaccacaagccctgcctgagctcctcccagccagacagcagaagactgggctgagaagcgagggccactgccacagagcccctttccagccagggcctcctgggcctcgttggccaaggtgtccagcatgcgtcaggtggcccagggcaggcagatcggtccaccctgggacggaatatcccaggccaggcaggactggatcacctccgcctcctcccagggcactgatcctgcgaatgagggaggcccgggtccggcttttttttaaaaaagtatttctctcgcgagaaaccgct

SEQ ID NO: 32334 - DNA, 291 bp, Mus musculus
  source 1..291: mol_type = other DNA
gtatcagacccctagctggtcaccaagttcttggcatgcactcgtctcgaacatgcatatttatccattgtgtttgcgatctccaagttcgatgatataatgggatttaacgacttgggagctcctccagtttcccaatggaggctccgggaagcttcccgccgccactggcgccctcttcgaacagccgcgctcttgcaactgcgggcgaggcgccgccccatagctccgcccagccgtcaggcccatcgagcagcggcggcgattggaggaggcggctgctcgtcgagt

SEQ ID NO: 32335 - DNA, 510 bp, Mus musculus
  source 1..510: mol_type = other DNA
tggcctctgtagagagatcaaattgataaaacttaagtttacttatattaattccataaaacaatatcaaacactattggctacagtttaaggattatctgtatatatttaaaatatgtatagcctattttcacacatgtatgtggtttagtttccccatggtatatacgtgtggacatacacacaatttatctttggttaggtcaacttcaataaattcagaagaaaaaaaccgaaaagttaaattttctctgtgacagaaggccagggctttccatctaggcacagcacttgggagctggtctccaggtgggtcaccagcggaagcggggtgggaagggaagagctcgcgcccgcgcccgcgcccgcgcaccacgcccacgcacgccatgctggcacgcgcaccacgcccgcctacccgtttgcgcacgtgaaacgtgctccgcacgcgcatcacgcatgcccactctgcgccttgcctgcgcacgcgcaccacgcccgttcgcgcgc

SEQ ID NO: 32336 - DNA, 311 bp, Mus musculus
  source 1..311: mol_type = other DNA
cgttctgagcctaagcacaaaagcttggcggcggcgaggcgcctttgtctccttcaaacctgtgtttggatggccctggagttcaggctaagtcctgagcactcgagagcccctctgcccagctggggctcaggcttcctgtgggccgttgatgggctcaggaaatttctaagaaaaacgaatctgtttacattaatgtccatggaacaatatatcttaacaagaaaggaaatcgatttttaaccttctgattcccagcatactgacgatccatattcacggtgcatgactcatgaagctgcagcctgatt

SEQ ID NO: 32337 - DNA, 342 bp, Mus musculus
  source 1..342: mol_type = other DNA
aaggctttatgaacatctcccaaagcgtgatgacgaagcagatttcttagatatcctgaagtatatataattcccgcaaactctagtctttaaagcagaggagaagataatctcttcttggcaataacattaattaatcattatttgtggagattttttttcttttcattcttttagagtactgacaggatcacaggactagtgagcagctacaagctctttttgccttctgagcagtctctgaggtgcaagtgaacagttccaggcagcccaacctgcctaggtgggagtcggccttggctgatccctccccggggcggccgccgcctcccccgccttgag

SEQ ID NO: 32338 - DNA, 355 bp, Mus musculus
  source 1..355: mol_type = other DNA
agtctgccaggcagtgtgtcaggtgctgaggacagcttttcttagcccagcacagtaatctctctctctctctctctctgtgtgtgtgtgtgagaaccacagatggtgggtgtcttatgaaggcctacctatgcttgcatctagaaggaagagcaaagatattcacatctattttatgttgcttgctttggaaataaatttgaataagaagcaataggtgatcattttatggtctttggcacatatctgctgaatgtactcctgcttacccagcgaaaggtggtggccacggttgacagctgttggcgggacagcctgaaaggcagccacttctgcggacctgcaggatttccgc

SEQ ID NO: 32339 - DNA, 413 bp, Mus musculus
  source 1..413: mol_type = other DNA
caaggaaaagagaattttaatgtatgtattcttaaatattcatttagtgtaagatacagacagtcacagtcttgctcttgtatccattagctattggccttattattcctggaattagaaaccatttttctaaaagaatgatagttttgcaaattatgtgtcctttgcttgtgtgtcatcctttgaaataaatcacaagacaagcagcagctgagggatccttcagggggagtgctctgaatttgaatcatctaacatttaagaagcccttatatatgttgtagggacatatgtttttcacagactgtacagcttctgtgtttaaaaggtcagaggtctgtttccacagcgtgaatgcccacttgtggatcaatttaattgcttccaatggtcagcaaaggtatttattgaaa

SEQ ID NO: 32340 - DNA, 595 bp, Mus musculus
  source 1..595: mol_type = other DNA
tgttaatgctgaactgtgctcaacatcagctgtgcatgatgaagataaaatcaggtaattttgtttgatttgaattcatctgtatagataacaattgggcctaaattctaacctatatctactttataactttatagcatttgtgtacagaatttggaaggtttctccaaaaagggggattgccttatttattttctgcgacaatgcatttttaaaaaatctgtcaccaactgttactttcatttcatcctaaaagcagttaatgcacgtttgtgattcattaaataattgaacaattgattagtgcatatccacagaactgtttttgttaactacaaacataactttactagacaattgtgttgctgtaaatacaccactgtaaaaacaggtagaggcacgctacctttcagataggtcgggcatgtttcataattcgaagcccctcagataggtttcgtagttgctacgcttagttgctaagacacaaactgtcgctcaggaagagccggctgtgccctccctttcttctcctggagagcgaggagactccttctgggccgcggagcgtgggaggaggctgtctctaatttct

SEQ ID NO: 32341 - DNA, 544 bp, Mus musculus
  source 1..544: mol_type = other DNA
gaatattctttaaatttctcctattttgaattgtggacaaattcaggaccagataagactgttttcaatatttgcttgtgaagtactaagaactgatcgtataattgtcttggaaatttttgcatttggagttcaatcataaacaagcaacgcaaagtgttactatacttgtctcacattcccaagaaatagacacacaagaaacgcgtctgcttatcggctgacggtaacagcacacatctggtttccttttcagggagctggccttgccaggagtgagcaacgccgactcgggaagcctaataaggcttcatttagcacgccacacgcagcactagcccgcagtgagacctccgctgggcctggccggcgtccggcccgagccacccgacccgaggggatgccgatccacgcgctcccccccggagcgctttccgcagaacaccggagggcggggcctggcggttgccagggccacggggaagctgaccacggcgcatgctcagagggcaggaggaactggttcggaagtcccgccttcgct

SEQ ID NO: 32342 - DNA, 551 bp, Mus musculus
  source 1..551: mol_type = other DNA
accaggctggaaatgggcctttctctatttttctgttaaaacttttatataaattctgcttgtcattcgtgattacacacggttaatttcataattctccactcattaaacaaattgcttgatatatgacagttttgtttctaatttaacaactattgtttaggttgaggtggagcatagaaaaataatttaatcacttatccacatatattagactttaaaaaaaaataaaagaaaaatacaactctgcgtgttgtaagcaaagcacaaaatgcataaacgttttacaagtctgagatctcgtaaatatagtatttggggaggtaaagcggtgttactagctcctcactcagaaactactttcgaaaaggctgttccggaacacgtccccagttgcgctgggggcccacaacgggccggttccttagcgaaggcgggacttccgaaccagttcctcctgccctctgagcatgcgccgtggtcagcttccccgtggccctggcaaccgccaggccccgccctccggtgttctgcggaaagcgctccggggg

SEQ ID NO: 32343 - DNA, 221 bp, Mus musculus
  source 1..221: mol_type = other DNA
atgtattttttcagaggaaagactaacataaagaaatttctttgtattctaaaagcattctttgattgaaatgcactacttatgtgcttataattgtcaaagaacaaatttaactgacaagaacactcctcctgacggtgcttgagccctagctaaaaggggagggcccttcagcatgtgtaggatgttcaaaggcatgtgtcagatatcaggaacacagt

SEQ ID NO: 32344 - DNA, 156 bp, Mus musculus
  source 1..156: mol_type = other DNA
cccagtggtgcaatggtgacccactcagtgtaaacctgtggctagtgaggtcacagaccttctttttcaggacatatatatgctgcgaggctgtgtcatttatacacgacagggccagggacctgctccctgataggttgtatttaaatcgataat

SEQ ID NO: 32345 - DNA, 409 bp, Mus musculus
  source 1..409: mol_type = other DNA
tccagggtttacacaggaaacctcctcagtatgaaaggatcatctgagaagacctctgagttcaagacaagttatcttacaacaataatttacttggtagcaagcatgctaaccttgtacaaacttcttgaagaaatgacttttgagatatgccatccacaattgttggattgctcgagttccggagttcccgaaacaggcctggcaggtgcagctgaatgcgaccacctctaaggtacttgattaagcaaaggcactgcgctgtgtgataagaataactaaccacagcagaactagatctcatctgggccacccaggctgacaggagcggccccctgagcgcacgaggagccccacgagggggcgggacccacggccgtcccgcccgcacagcgcgccacaggcacct

SEQ ID NO: 32346 - DNA, 329 bp, Mus musculus
  source 1..329: mol_type = other DNA
aagaacaaaaagctcttggtattcgggaaaactccgaaggatttttgttgttttgtggcagtgttggggttcaggacaaacacaccacccagttctcaaaagctgttctttcgtaagagatggtcagggtcaccagaaagatttccatctgacaaagtggcaattcttaatggataaaaagaatccttcatctgagctcagcctggctagctatgggcttctctgagccggctctgccctcacctcatagagaagccagggcaggacttgggaggctaggtgccccaactggtctaaaaacaccatgttctctgattctgttgatcaaa

SEQ ID NO: 32347 - DNA, 477 bp, Mus musculus
  source 1..477: mol_type = other DNA
aaatatatcaaagtggaactttgaaaatcgcatgtgaagtaaatttataaggcttttccttcaactcttggttcattgaaagaggtcaggcagggctgttacagagaaactccgggtaccaggacggtaagttaaatcttaggtacccggctgcccttccgcctgccgggtcccgaaatgccggcactttccatcccgccccgcgacgcggcgcggaacacccagccgcgcacagggccaccgcagcgctcaccccgctgccgcgcaggcgccgggcgagccgggacttgcggtcgccccgcggatcattccgcccctctcatccctttctcccgccggaacggggctgggggagggcggcggcaggctcgctcccggggccagtggggcggaaacgggcgcgggttggcgaggccgccgcaggcatgctgggagctcggccgccgtgtccctccgcgccgacggggacttttcggt

SEQ ID NO: 32348 - DNA, 298 bp, Mus musculus
  source 1..298: mol_type = other DNA
ccatgagcccagcctggtctacagagtgaattcaggcagccgggcgtggtggcctttaatcccagcactcggagaggcaggcagatttctgagttcgaggccagcctggtctacaaaagttccaggacagccaggaagtgtccttatctgaggacagaggatctccacgggtagtggacttttcggtgaaatatatcaaagtggaactttgaaaatcgcatgtgaagtaaatttataaggcttttccttcaactcttggttcattgaaagaggtcaggcagggctgttacagagaaac

SEQ ID NO: 32349 - DNA, 418 bp, Mus musculus
  source 1..418: mol_type = other DNA
tctagccctggctgtcctggaactcactctgtagaccaggctggcctcgaatacctttgcatgtagctaattgtaatggaaacgaaactaaggtttattttaaaggttggtatactactctttaacgtttattttccaaacacgtctgttctttaaccagaggcttggctttggagaatgtttattcccaacctaatgtccgatctgacgggaaaaacgaggacaccggaagcgcagcacgcgcgcttccgtcccgcaccatccttccgacgcatgctcaggccggttcggcgctcacccttccggagagggccgccctgatgtccctccctacgggacagaaaggcggagttacagggttcactggaagctccgccctcgccgtgacgtttcgagacgcgacccgtcgccacgcaat

SEQ ID NO: 32350 - DNA, 370 bp, Mus musculus
  source 1..370: mol_type = other DNA
gctgacccagtagatctgctcagagagcagaggcaaggccccagcacgggtgctttcccaggtcacctccagtggaaaagtttatgcccttgtggtcatggctgtccacagcaacatgtgtactatgggtatgtgcccatatccagctggaataaacaattctggtgacctcactgtgtatgcatcgggatgagaaaaatctcactacctcctccataggggaagagatgtccctctagggttcatgggagcagtgttgccacacactgtccccaaacatctctgtgtgcttgtgtgtgagaaacccagaaatagattctcagaaagttgatctttcagaagcatttcaaaaagttagaaccttggtata

SEQ ID NO: 32351 - DNA, 464 bp, Mus musculus
  source 1..464: mol_type = other DNA
acctaaatgtatgcttatttaagaatatgaattagtatataacttaattatgccactgtattgacttgtagtttttgagataacaatggataagataaactaacaaaaatatttaaggttttctttttattctttaacttgcttattaatcatcctgatcttttgttgataagaatggaacgaatccagatggctttgtaaaccagttgtaatgtaaagccaacacatcaaattttattcaaacatctttactaaaaggctgcccgtggccagcaggagacagaggagggcaggctccagcggtcactagcagcttctcaatcaggtccacgtgtgctagcagcatgcggcggcagcagtagcgctttaggcccagagcgtccagggcatcccgcaccgggatgatcatggcggcgtctgacatcctgatcattactttgcatctgaggtgaagtgcagtcccc

SEQ ID NO: 32352 - DNA, 399 bp, Mus musculus
  source 1..399: mol_type = other DNA
tccccagcagctcatgaagctctgaatactcaatgggttgtcaaatctaagtaccaatttctgtcttaggacttctattgaagaaaccccatgaccaaaagcaacttgtttttcttttttccaggctggcttctcaggtcatactctaccaaaacttgtttactgacttggtccttagatataaaccaggacctgctgcacatggacggcagtggccccagtgcattgggcctcctatattgacatgcatgcatgtgatatttcagttactccaatattaagaaaattaatttgccttttactaagttgtgcaaaactgcataaagagtgagttcagttttaagtttaagatgacttttaggtatgagctaaatgccagacagttgacatgtgacatga

SEQ ID NO: 32353 - DNA, 263 bp, Mus musculus
  source 1..263: mol_type = other DNA
cctttgtagggaattggttccaagactctccatacccataattgctgatcccagcagtggtctgaaattccagttctggaggatctagcacggtcttctgagagcagctcggcgtttcccggccggcggagcttaggggcaggccgcagtaagcgcgcccttcacgtgacacgccctccgcgcgacgcactcgacggccccgtcacgtggctgccgcggccccgtctccggcggaggcgggcgcgggcgcgtccctgtggcca

SEQ ID NO: 32354 - DNA, 232 bp, Mus musculus
  source 1..232: mol_type = other DNA
aacaggaacaagtgtttggtattaaatagtcatccaacaaatatttgacaacctagtatacactggatattctgtgtgtaaggaggatccttccattaccctcaggcatggtgacttatgcctatgatacaggaagatctctgagttctaggccatcatctattccccagagactgcccgcctggagggtcccccggcctagcaggaagtcggggctgcaccctagaggtcc

SEQ ID NO: 32355 - DNA, 247 bp, Mus musculus
  source 1..247: mol_type = other DNA
ggtccagttctgtagttctgcctagctgaaattaacttgcacagaaggtaatagtcaacaggaacaagtgtttggtattaaatagtcatccaacaaatatttgacaacctagtatacactggatattctgtgtgtaaggaggatccttccattaccctcaggcatggtgacttatgcctatgatacaggaagatctctgagttctaggccatcatctattccccagagactgcccgcctggagggtc

SEQ ID NO: 32356 - DNA, 416 bp, Mus musculus
  source 1..416: mol_type = other DNA
tccccagcatattttttaggtggaagaaaaaaattgggggtataactcaggtttgtttgtaagttttctaatttaaactagtgaaagggcctaaagtttacgtaggcataaaatattaaattctaaagaaaatctgttttaaataatttaaatattgagatttttcaataaattaaacttttttaaaaaaagatttatttattattataaataagtaccctgttgctgtcttcagacacctttatctttgcataactattctgtcaggcaaactttttcttttgttgaggtgtaggtacaagaacaacttcaagatttaagaaaaaaatttcacttatcacagacaaagtttcagagataagagctcctacaggtgttaagctagaatgatcatgaacttataaagatttcttatt

SEQ ID NO: 32357 - DNA, 349 bp, Mus musculus
  source 1..349: mol_type = other DNA
tgctctgcaggttctacagcacaacaagtgttctgacttctcagaactccaagttaggcttgtaattgtgctccatgccttgtctggagtgaggacatttatctcacgagaaacaaagatgatttttcgtcgccaccaaccctgttagtttcatcgcccagggtgagaccaggctgttcctgggaaaatgctgtttcctagccctgaagacagggaattacaaacactggttttctggaatcctcgctccttacaggaacaagtttttgtgtcagatcaattatgtttgagccgcaaaactcatgggccgcgggactcacgggattgcttagcagcgctctgtctgtag

SEQ ID NO: 32358 - DNA, 338 bp, Mus musculus
  source 1..338: mol_type = other DNA
agaggcccttcacagtctattaaattcagttggggaaatacctccacgagatccagctgtaaggcattttctcaattagtgatcaagggggaaagaccccaagccagtaaggaatatccctccatggctctgcatccagtatggaagtatgttcgtacaggaatcaaaaccctgagagactggaggaaggcagtttcctggcttgctttcctggcttctctataaagcaggctggcctagaactcagagatgtgggtgtgacatggtcatggcaaatctgatctggggacctcagctgacgttccttctccaaattgcaacatttcctccaaggggga

SEQ ID NO: 32359 - DNA, 608 bp, Mus musculus
  source 1..608: mol_type = other DNA
acatgaaatgaaatatttttttaaaaagtagctttcaacaaaaggcagagttttggtcacccccagcctctttttaaaaaaatgatggtaggtaaatgatttccaaaaagctctttacaagaatctggacaaaaatttagttttaaatgtgtgtgcatgcatgtgtatagatatatgaacacaatgctctggtgcagatacacatgcctgcacaatgttctggtatgtccatgtataagtaagagcatacacaatgctctggtatgtgtgtgtatagacatgtacacacacacacatacagaaaactctttggaaatgtacacacatatataaaaactactgggggtataaacataagtaaacacaatgttctagggtgtgtgtacacacgcatacacaatgctcctggaagagtatacacatgtaaacgcaatgctctggggcctgtgtacacatgagcacacacaatgtccttgtgggtgtatacatacacaatactctgggtggagtctacacgtgcatacaccgcccagcgctcggcgccagcctagttcagcgcgtacccactctgatcagccagccgcctaggcggcctgcgcaggcgcacc

SEQ ID NO: 32360 - DNA, 408 bp, Mus musculus
  source 1..408: mol_type = other DNA
tatgtgactagtaagtgacaaacaatgctccaaggcaggtctttgagtgacagatgtcctttcctaagagtcactttgattagggtgcatatacctgtgcatgtgtttagagatctctactttgagacaaggtctcttaataaaaccttgggcaacaggctctgtacccaaatgagtcatttcatttcctttttcaccttgcatagagccagagggaagtgagaatggcttttcccagtccttatggcagcaggcacttcagccttgtgccaccagaatagctgtgagcgcgtggccacagatgctctgctgtcccccatagggaggaagggccccatagggagggagggccccagctctggaagagtccctgccttgggccccgcctcttggcttcgagcaaggggt

SEQ ID NO: 32361 - DNA, 269 bp, Mus musculus
  source 1..269: mol_type = other DNA
agcagaaaatgccatggcaatggcatttcctcttcagactcgctccatgactgtggcatagaaccctctgtaagatctttgctgtacttttacatatctctttggaaacacacatgagcatgatgagcatatttcttgtcacggtgttgctctcagtgaaatgaacagtaacaggagaaaagccactgtgggttgtgccagctctgagttgtctctgtgatgtcactgagagccattgtgaggaatcactgacagctgatcatataatg

SEQ ID NO: 32362 - DNA, 210 bp, Mus musculus
  source 1..210: mol_type = other DNA
agtaaaactactgctctaatgctaaagatgggctttacattagatctcccgtcggccggcgggtccgaagatttgagttctgaaaagatcatactttatcaaaactttgatatgtatagttttgaatcctgttattacagtgacagcaggagcactattgctgtcgcccacatttgggtaaaatgttgggcacgggcagtcatcgcttcc

SEQ ID NO: 32363 - DNA, 342 bp, Mus musculus
  source 1..342: mol_type = other DNA
tcactcgtgcttattaaatatcaagggaaagcagaactcactgttttgctttcagtgttgtgtagagaattatgaaaagactaaataccacctttacataagaataaaactgaatagtaattccatacatattatttatttttcatatatttctttagtaaaacattcgtgacaaagttatacatattgtgacaaaagattgggcacaaatagttcttcctctaccgtcagtcagctgacacattactagaactagtagaccaggctgggcatgtctgcctgcctcacaggatggctggtgtagagatgcctggaaccacaatttgcacgcgcgtggaagcg

SEQ ID NO: 32364 - DNA, 449 bp, Mus musculus
  source 1..449: mol_type = other DNA
cgcgagggcagtgcacagcgctgtgatggacagggcgccaggcagggccgaggccaggctccgctccggctgcttgggaagagcgctgcttcccgggcttctccgccggcgccctcccggcagcccggcacctccaggggcatacatgcccggggctgcccgctgtagctctgcggtcgttggtggtggccgccgacctcagcggggcgcgcagagcctgtctgtacccaggtggagagcaacgcaatgggcggctggcccggagctgtcagggcccgcaccagagactgcggggtgggacccagggctgagcacagaccaaaggagggccgccgagatcgggaatccgcactttggggtgcgatcctcaccggtcagcaggcctcagggctgggatggcgccgctccgcccggtcacaggcttcttagctgcccgggccagactgtcc

SEQ ID NO: 32365 - DNA, 266 bp, Mus musculus
  source 1..266: mol_type = other DNA
taaactgcctggcagatgccagtgcgctgatggccttcagaaagaatccagctgtcacctgcaagcagaagtagtactttaagtgggaccctgttgatcaagattctgaaactgttaaactacaaagccaagccaggccttggtcgcctccgcaggaagccaacagggtccccgaggggttccaggccaggaaccagcagcgggaatccgggtgcgccgggacgcggctctgcagtaccagctgggtacagcttctgcggacagtc

SEQ ID NO: 32366 - DNA, 566 bp, Mus musculus
  source 1..566: mol_type = other DNA
tttaagactaaaatggacagactgattcttcacttaaggggcagctattatttccatcttataactggacagagaatttttatttatttatttatttatttatttgagacacaaattttatttatttatttatttatttatttatttatttatttgagacacaattttatttatttatttatttatttatttatttgagacacagcaatgctcctgcctctactgatgtatcctgagactccatgtagtaaccattaggttacatacacgtggccagacaggttttgggaaacctggttaagtcagagactgctcaggggccctaaggatggaccaccctctcggagccggaacccagaaccgcgtccctgccgcacggggtcacgtagggcgtgcaccgcccctcccgggactgtccggaccgggtgagacgtccctaaatggctgcaccgccgggtccgagggtcactctccaggcgcccttgacaggccctcccgccacgccacctagcttgctaccaggcagcccggagcaagtctgagatgcgcccaatcagagtgcgggc

SEQ ID NO: 32367 - DNA, 478 bp, Mus musculus
  source 1..478: mol_type = other DNA
ggggggcccacgtgcagctgggcctcaccacatccgggaggggggggcgggaccagggcctgtcccagaggggttcccgccaggcctggctatgccctgggagagcccagcatttccctgggcccctggggaaagaaactgcacaggccccccagggcactcctccacctgggcctgggcctgacatgggagaatacctaatagtgtatcattatgggtagcaacaggtaatttgtccatttttgctatcgaaattcctagaatgaggctcggtgcagctgagagctgagttcctaagcacttagtggcttgaagcctggtggggcctctagactccaggccgacacttcccaccccctgtccgctcagggagccccgggggcggcccagccagagtcccacgtgaagccgcgggggcgggcaccggcgccttcctgcttggtgacccgaggggccagccctcgagtatttaagcccg

SEQ ID NO: 32368 - DNA, 290 bp, Mus musculus
  source 1..290: mol_type = other DNA
tccctgaaacgggagttacagttttgagctacctgttgtggctgctgggaaccgaacatttaactttttttttgcctttaatggagaaaaaggaagcagcaagtccactagtcgcttctcacagcctcttgcactcagatggcagcagagggcgctcgcggtgctctgtcctagactcgcagacagaatgctctctagactcggccgcgcagcggcgggaagggatgtgcgtcgcaggtccatgtcccgcaaagcgcaccttccacccacccggtcgggctctcctcctc

SEQ ID NO: 32369 - DNA, 210 bp, Mus musculus
  source 1..210: mol_type = other DNA
gatgaaggaacccatatgtctcctttaaaaaaacacacgtctttattttgtgtatacaaaatttattttgagacagagtctcactatgtagttctctgggatgagaggtgtacactatcctccccacttaggacaacaacaaactctcaacacttgcagcgagttgtgggtgatctggcccctcagctgctgaggcgcatgcgcagagcc

SEQ ID NO: 32370 - DNA, 385 bp, Mus musculus
  source 1..385: mol_type = other DNA
ccatctgtcttcactgtgtgcattaaagaaaaaatggtgaaaagctggctacgactttgccaatgtggtcacactagtccatctttggagtcccgacatgaggttcagattctagtctgattgccaaatcaggacacaagtgtcttttgccttagccttactggctcaggagccatcatgggcaaatagcctttatgttttctccacgaatacaacacatatagaactatgagtaggtgcctggcccagaagcagcgcctggtcggatgcgctctctccgagcctgggtatcccagggtcaccctggagccagccacggcaggagggcggacttccgggaggaagcaggtgtcctcctggtggcgacagcttcgtgacgtcacca

SEQ ID NO: 32371 - DNA, 525 bp, Mus musculus
  source 1..525: mol_type = other DNA
tcaatttccccttctgctaaaacagcaagaaggggttgggattggcggcggcagcacttcccacctggtccttctggggttggcggggactcccgaggcgcactgagcccgcggggggctggaggggggggcagcgcactgcgcccagccgcttcgcagcctggagcatctcgacagcaattgcttccgaactcgacagtcatacagcagtcagaatctgaactcagttcagccaagcaggtttccagaactggcgaactctggataccaacttctccatcttcaaagattggtgtatcagcatcaagttgaatctcaagctgtggggaaacatccaggagactcagggcttcccggatcctccgctgagcacccggttccctccagcgggtggggaaaccgcagaccgcgcggcctccccgaggctggcgggggagtcgtggcgaccagccaggttcagtctggagctggaccgtatagggcggggctttgtccctcccgcctcttcctgggctggcaaggagg

SEQ ID NO: 32372 - DNA, 339 bp, Mus musculus
  source 1..339: mol_type = other DNA
tgtgcagatggcagaactgtcccctcccctctggggacagctttcctgcctcgggatcaacagccccagggttttgcccggggagggtctagcagctgccgctaattggctgagcactggcacgccccttgggcattagaaaatgccccaggaaggagccttcccgaggacggtcaggaccctcctccatccccaggtcccacgccaggagatctaggggaggtcccgtggttgcggtgttaggaccccaggtgttaccttagtgcgcagggactggtgggagtaccctcccttctatccctgtgactgggaagggtaggaacagagaccctgagccta

SEQ ID NO: 32373 - DNA, 515 bp, Mus musculus
  source 1..515: mol_type = other DNA
agagtaattttcaaaatcagttaaatatatttttgcatactgttatctattatatataatatatggagtaaacacactatcatgtcacagactgctctgtgataactgtgaggatctatccaggtcacagggatcagtttgtttctggtgccatgaataacgctgctaggatgccattggtgaccagatgggcatggcttgggcagagggcaaccctctgctctccctaaggacttggcctgccagaggtcactcctgggagcaaaacagtgcccagaggaaacagagagagcctggctagttcctctctctgctaaccagccctcaggaaaattctatttgaaattggaccatcctagataatccagagactctgaggtactcctggacggactccggacagccaagggcggctgggccgggccctgccccctatctggcctccgcccctgcccttcctacgctccgggcgggcgacctggtagctccggagcccaaacctgtcgggccggttt

SEQ ID NO: 32374 - DNA, 385 bp, Mus musculus
  source 1..385: mol_type = other DNA
gtcacgaacctgtgacagatttggaggacatagtttaccaagtcttgcggatatccttactgaaaagcctccccagcctgtgctgcaaagacttattctgaacttgctcagagactgcaggtgtttcgaatcatgtgttactttctattgaacaaaggcaacatatgtttaataaactttgggcctcagaactgactttgccaggtcaagcctgctacgagcccagagctagccccgccctcgccccgcccctgcccggggtcctagcgcgaggacccctgagcagctgtccgaggctgagcctgactcagtttcctgtgcgctgaatggtggccctcgagcctcagcacacctctgacaaggcgcggtcgcagctcgttgctgc

SEQ ID NO: 32375 - DNA, 239 bp, Mus musculus
  source 1..239: mol_type = other DNA
gaagtcccagtgctggagctttcttctatttctttaaatattgtaattcatattctgcagtatccagttaattaaaacaaatgaaggtcaaattgagatccagtcacctgctaccaaatctgggattaaacctacaccacgaattcttgatggaagactgcgacagggaaccctggctttcttgtgctgtttagggtcagagcctggtcctatccgtttctggagtgcaaccttgtgcc

SEQ ID NO: 32376 - DNA, 303 bp, Mus musculus
  source 1..303: mol_type = other DNA
ggtcaagttcagaatctgagctggaggttgagaaaggccatttccctttcagctttagccttaccgtatgtaatttaaaaagaaaaaaaaaaatttaaatagtgtgatacttgtttaaatgggggagaactgccccatctccagaaaggaacccccagcctgccggtgatgatcacctgcgtggcgcgcaacacagggaagtgcagcgcgcgagccgctccatccactgccctcaggctgcagtctagggcagtagacccgggcggggcgggtggccggagctccgccctcctctgacccccg

SEQ ID NO: 32377 - DNA, 497 bp, Mus musculus
  source 1..497: mol_type = other DNA
ctggctgctccagaccaggcagagccccaggacaggccctggaattccctgttgctaaggaacaagacacagggctcttgtgcaggacatccctcctgaggaggcttttcaactggcctgctggagccgaagaggggaggaagaaggctctggggcgccaggccttccctcagagctttgggtctggaagcacagccaagcagccagccccaggctctaagcaggaaggaactgcctggtcggaggaaccaggctgctccaatccttcatttagactctgaggacaaaagcagatgctgcttttaggtacaacaaagccacgtggtggtggtctatctgaacttcagaagaacaatctttatcttagcaaaagagcccttgcttacactctgagcagggaagaccctctgcgaggctggtcctgtcccctctcctggctagcacagtgcacagaagggcccccgctctacgtccctccgaccgatgggtgtgtctgg

SEQ ID NO: 32378 - DNA, 393 bp, Mus musculus
  source 1..393: mol_type = other DNA
caagctatgtttgtgagtattgtttggaaaattgcaatacaaactggcctaatgcaattagcagttgctagttagagtttgacacagtactgttttgccaaagttggttatgtttgaactttttttaaaaatcttaattaaggaagcataaaattgtttaaaatgtttttttaaagagaaaactaaacattattatctttattattgcttttgtaggctgctaaatatgaaatgtatactaatgtctataggatccactggaggtacctgcagtatgtaacatgaaacagaataaggaaacatatttaagattttcccttcagtgtgccatttctggatgtgctacagaaacactgaattatcattttgaaaatacaaaagcacggtggggcg

SEQ ID NO: 32379 - DNA, 377 bp, Mus musculus
  source 1..377: mol_type = other DNA
taaatttaaatttccaaagtcaccattttaacatatcttaacctgaaacattgggatgccaggcttatatgggtttaatgatggcatcaaatgacagtcagaactctgtctcattaaagatcctcaggtgaggcctaactgctgacagggatgctgtcactccctggagacacttctggcagtgcagagacacagcggcacatgttcagtgggaggcataggctcccttttacaggagttctttttagcccagtgttcttggacaatgttcttagagagcatggcggactcagaaaggagattcctctgaaacaacagaacaagcatgtttttatcttggagcctaagaaagaaagtaggcaggtctgagaagcagc

SEQ ID NO: 32380 - DNA, 336 bp, Mus musculus
  source 1..336: mol_type = other DNA
gtttccctgaagtaagttcagtgaccagtgttcttggagaacaaggcaggggtttcgtggtccctggtttcccatggacccattgaaattgaccattcttaaatccaaggttgctgttgaaaattttcgagaggcccgcggatttctgtgaattcagaaagctctcatagctaaggttttccatactagaactatttttgaagattagtttcgcagacccggcttcagaaagctgtgtagaacagtgcagtcagggactcccggggacctctactactatccctaggaatccagaggaaaggaaaggacttttttttttttttttttttttcaacc

SEQ ID NO: 32381 - DNA, 378 bp, Mus musculus
  source 1..378: mol_type = other DNA
cgaccgctgctgctgtggcttaggtcgcctccccagccgggtgggcacctgtcctccggtccggaaggtggccggctgtccccggcccacacagggtgctgcctcagcgcctctgtacttaaaggtcattggtctgacaatgtccacttactagtaacttggaagattatatattaaaataccctgtatactggggtaagagaaaacgtattaaagaccatttcatctaaatttgttctttttaagtctatttgtttattttaaaatcgagttaccagaaagcttagttcgaggccagcctggtctacaaagtgagttccaggacagccagggctatacagagaaaccaagagtctcagagcgggcctcaagcgagcg

SEQ ID NO: 32382 - DNA, 388 bp, Mus musculus
  source 1..388: mol_type = other DNA
ctgcaatatcttttttatcaacttgaaggagctgaaaaactcccaggacctttagaaacaggaaggtagtaatcgcatgagtcttttatgttctacttgcttacatgttaaatatttattctcttccggactctttaaaattactatgaatattttacaaataacacacacacacacacacatatacatggctatttgtcttcattcgtgaaccagacataatgattgtggtttcctcatttgtatgccatttctgttagccatttataccgttttttaaaaagtaataataataactctatgccaagcgggactttgtctcccagcaacggccgcagcgattggccagctctcccgcagcggagaccgcgctgcccacgttcgacat

SEQ ID NO: 32383 - DNA, 461 bp, Mus musculus
  source 1..461: mol_type = other DNA
tcaaacaatttgtaaaatgtaagataactctatttgtctaacttattttattgtattttcatgaaactattactttatgagtttattattatttacaatgactaaagtaccagatttctctgttttaattaccaatatggtaaattgctaaatagaaccactttttttgtgtgtatgtgtatggacacacatatgccacagcatgcatgtgggctcgaagtctggtcatcaggcttagtggcaagcccactgagccctcagtagtttttaagtgtaaaggggcttagggaccttagctgcctggtgggaattatttactctaactatatattttttttaaattagttttagtccacttctgaaggtgcttgagaatgaggaaaccggttactaaattctgtcctgtttaggcctcaacaccaacccagtccctattggtcctaaggatcatgacagagaag

SEQ ID NO: 32384 - DNA, 396 bp, Mus musculus
  source 1..396: mol_type = other DNA
ctccatggtcgccagcatcggcggaccgatcctggcgtacactgtgagccccaaacttgctgatctgagtcccccatcgggacgccttctgaggcttccaactggcgcccgcggccgggctggacacagagcagtgtaccctgagcgccccctaagttccgctctgcgaggtggccgccacgggcggacggggagggagcatgcagctgcccgctgggcggcgcacgcaaactgcaggacagccggcggggccaccctccccactacctgtcgcagcctgcacgcgccagcggcctgggggccgtggggggtggggcttaccttccggcttgccgggggccggactaaacgggggcggagcccgcggtgattgggcgcgggggcgggggctcgagt

SEQ ID NO: 32385 - DNA, 624 bp, Mus musculus
  source 1..624: mol_type = other DNA
gatcgtggcctcgcggatctccgaggggccctggcggcgggaattcccgcaaagcgcgcgccgtcccggcctggcccaggggtggggcggggcgcaaagcgaagctgcccggccccctaagttccagccggagctgcggtggccggcacagtctgagcggcgctgggcggcgagtttgtcaacaatcgccttgccttcggctgcctgacccgtaggcgccgcccccaccgcctctgcccattggttacgatggggagcgactgcgcgcgggccaatgggggagcactggcagccggcgccaggggcgcagggctggcggtgcccgcgcggcggcgggagctgcgcgctaggggcggagcgggaggatgatcccggcggcggccggtgcagcgcgggccagaggcgcggcgcgcgaaaccttcggctccccggcggagcgtggcggagggcggacgggcaggcgcggggccctggagcccaggacccggctttgtttgcctggtggcgacgtgcaggggtcgttcgatcggcgcaacacgccgcttcaaaccctctttggaagtgtgcacgcaggagggaccttgcggccgagggcgctcgacccgggcggagctgcgctcggag

SEQ ID NO: 32386 - DNA, 271 bp, Mus musculus
  source 1..271: mol_type = other DNA
gggagagcaggctcaatttattacttcagagaaagagacttcaaccaactttgtttttctttttttaaataaagaaaaatgtattgagcactaggagagctcatctgagtggaagtcttcacctttttgagtaaattgtaggcagggagtggcactcatatctccctcctttaggatattcaaaagtttggatgacatggccggtggtgccacaacagcaccaggaaggggcattctccttatttatatggaaatgatgccaacacttggt

SEQ ID NO: 32387 - DNA, 359 bp, Mus musculus
  source 1..359: mol_type = other DNA
cctgtttaagagactctctggcacacatatctgctcttactgaaatgtacgtttcaaaagtgaaacctctgcttgaagctgcggaagacagccccgccctctgcatcatttgcatggaaacgttcaggattctttcaaagttagagaaccataactttgtttgatttagcctagcaagactaagtcaatagatataatgattttagatcaaaactctgtgcagaagtctcctccctgatgagggtgatcactggctacaagcctggggcttccacacccaaggtctgggaagctgctctttccggaagggtggggctctgagtcagcacgagtcatctggtccagtgacaatgaagact

SEQ ID NO: 32388 - DNA, 258 bp, Mus musculus
  source 1..258: mol_type = other DNA
agaaaggccttttgactcaggcaagcgaattcggcaagccttcctgttgcagtgcagcttcaagctctgtgtatcacaatagacaattacagtgaagttatcaaattccaacaaactgaattttggagcaaaaaattacctaacttagctcaattgagaaggtagttttaaagaggtaacgtcgttaagtgaccgccttcgctactgcgcaggcgctaggtcctctccgctgccgcgcgtccccagcctggctctgcc

SEQ ID NO: 32389 - DNA, 233 bp, Mus musculus
  source 1..233: mol_type = other DNA
agtttcagtaataaatactttaaatttatcatgtgatcttatctccaaagaaaaacaaatcattctatttcctttaagaaacctctggggtggaggttgcaagatcttgacgccagggaggacctgggcagggtgtgctgccacggcggccacagcctctgggacccactaacctttaaaggtcttcaggggttaacctgctggagccctcccgggcctgagccctgggcccg

SEQ ID NO: 32390 - DNA, 223 bp, Mus musculus
  source 1..223: mol_type = other DNA
gaacttaaatgtgcttgaaaaatagttaactattttaaaataaggaaattagaggtataaacaattttttccccttagttgacaacccgggaaggaggccccgccccctccgtgggcgggccaggcctggccctgaagccctgctccaggtttgagcctattcgttcccctcgtgggcacgccccttcaggggcggagctgagccaggtgcggccccggggcg

SEQ ID NO: 32391 - DNA, 448 bp, Mus musculus
  source 1..448: mol_type = other DNA
actgagaaatatttctgcaaccttaggtactggtaataaatcataaatttattttaaagtaattatttgctataaatataattttatcctttattaaaattaaaggaaatttgatatgctttattaatttttacatgaagaattaaatcttggctgaatatttgatattgaagaataagagtttgttataaatcatttcgtaacataagttagtctgagatctgctggacatatggagaccaaggataccttggattcattatatttgattttgaattaattgcctaggtctctcccggcgggcagtggggactgcggacagtggggcagcccagggtggacactggccacccttggtcgcgaggcgtcgcacccgttcgagaggattgggcgagctcccaggcgcccgccacagggctggcgcctccccgcgtcgtcgggacagtcc

SEQ ID NO: 32392 - DNA, 399 bp, Mus musculus
  source 1..399: mol_type = other DNA
gactttgtagaccaggctggcctggaggttcagtccattatcatgaaggaatgagcatggcatcaagtcttaatacttagtactttctattgaatttgcctttaaatatatcttggtcacctgtcaattttaaaggggctcaatagttaaaacataaaggtcttgcgttctgttcccaacactcatgtcaggtgggttataaaaatagcacagctttctaaagaagaatcctaaagattattttaattttttaacgacattgtagtagagttgcgcgtgcgcagctcaggcacacacggtgagaactgcgcatgcgtggtagggctggccaggtcgcgcggagtcgcgcccaagcaacatgagcgcgagcgcgtgcgcgtgcgctgggcggagcgtgtg

SEQ ID NO: 32393 - DNA, 424 bp, Mus musculus
  source 1..424: mol_type = other DNA
ctgcacactccttgtccaatggatttgtaagacccagttaaccaaatagaacattgggagcctcctggcccgggccaggggtatgatgataacttctaaaaagtcctaaaaactttcttgctctttctgatttcctaaaatgagtccctcatagccttgcttaatgagggctcactgtcgcagattatataataatcacctgctagttattagcaccgcacccagatcaaacccagagctcagtgctggctaagcaagaccaaatctgattgtcaccggccacacactgagtggcggggcggccctggtgggccctgcttgggagctcctgccgccgcaacccgcagacctgcccttagcgccgcgcggaatcacggtcgtgggcggggcgccggcggtgggcggggcgctgggggtgggcgcg

SEQ ID NO: 32394 - DNA, 525 bp, Mus musculus
  source 1..525: mol_type = other DNA
aatagctgcattcaactaaataacttttcatcaaagacaaaagacgtcgtgtatttagaaatattggacatttaagcttatcattttaataaaaaaaattaactttccttcagaactaagtatacattactcatcatttcaagactatttctgaaggatatggaaatacgtctgaaggcggacatacgaagaaatgaagtcttgttcttatgaaataaagatcatgttttaattacctcaatagctatttttaatctggcaggcagtcttcctttcggcaacaaagaaagcttttctttctttctttctttttaacaaagaaaaccgccagtcctggtggacacagcaggcctggcggggtgacctgccccgcccgatatcatcagattgctgcctccgctgccgcagcgagcgtattaaaggcccgcccctggaagtgattgacgggcagtttcctccaatggctagtgcgctcggcaccggcgggctgggagagggccgcggctcgcggaggaattccacttg

SEQ ID NO: 32395 - DNA, 297 bp, Mus musculus
  source 1..297: mol_type = other DNA
ttgatatatgcctttaacccagcactcaggcaaagacaatggacctctgtgagttccaggccagcctggtctaggacagccaggaagaaacaaaaataaataaataaatattattttaataaacagaagaaatgacaggttggtgccccacacctccattttaacctttaaagatacgtcttgtatcaggtcctaattaacgaattaagctaatggtttgcaggttacaaaacagcgtgtttcaagacagctctgtgtaactactctgctttgtagaccagactggtctcgaactca

SEQ ID NO: 32396 - DNA, 582 bp, Mus musculus
  source 1..582: mol_type = other DNA
aaggttcatttcctgaacatcttagctaatatgattctccttactgggtaagaacttgtaaccagaatacctcgccatagccggggctcctacggaggtccggcgccgggaacccatggctctccctcagcgcagtgccacagctgggagactcccgagttttcaccgggagcgaggtggccacgtgagatccctccaccctctccgggcgaggtacagatcgggtccggccaagggccagcacacccgctcttccgcgtcgccaccgagctgacccgggcccgcgtgggagagcggcctcagtccccgcgtgtctgggcgagactcccccacagtccccgcccgcagccacccggcgtggccagcgcagacaggataacccgggcgaggctgcagggaggcggccagccagtcccacgtggaccagctcctcgttgggggcggggccccggggacgtccaggccaatcagcgccgctgcccagctcacccggctaggcgcgcccgaccagcctgtggttgcgtcacatcggaggcgggacctcgggcgggcgcgaggctcggcaggtcacgtggcaaatag

SEQ ID NO: 32397 - DNA, 415 bp, Mus musculus
  source 1..415: mol_type = other DNA
atgactcttttgacagcaaccagacaaaaggaaacaagtttcccaaaaatgaaagtgtcactgtatattattcgttctcattttacaactgcgtgctaaggtaatctccatatgaggaatatttagccttacagggaaatgaacttccaggtctagccctttgcctttaccacctatggcaggaaaagattcctttccgtcaagttgaagccactggtagctcagcctgagagggcaatccccactagcagcggcgggcacagctgccgcctcagccgcagcgtgtgccgagccatagtcacgcgggccggtggcctcaactccagccgggaaagtggcagcgcgagcggctgtagatctgacctacagggaaccagctctggtgctctgtgcctggctgctgcttccggtgatc

SEQ ID NO: 32398 - DNA, 446 bp, Mus musculus
  source 1..446: mol_type = other DNA
ttaaatttatataattctgttctttacattttctattaggaaatctttgttattcttttaaaaaaaatatcttttaagcggggcagaggctcctgagctcctgggctgagctggagataccaccttctgaccctcagagctctgtggtttctgggtttccttccaaggggacactgtcccacctcagagctgtgtggctcctgagctcctgtgtcttagcgcgagctgctcgtccctacaagaatgagaacaataactgatacggaccattttcgtttggcatgctattatttgcagccaaagccagcctaactgatagcacagagacttaggctccggctaatttggctaaggcaccgctgcggaaagaaactctccaatcgcagagcctcaggggaggtccccagtgggaatcgccgaatgtgcgaatttcaaagtcgcgggac

SEQ ID NO: 32399 - DNA, 346 bp, Mus musculus
  source 1..346: mol_type = other DNA
acaacactttgcagtgtaatttcatgatttatatatcaattatgttttatgaagttatttttaactgactaaaaatggaagactggaataatcttccccagcctcttgctcaaggtgaggctatgctaggcaggaggaggggcaactgcttatttcttaatttcttagattagtaaatctaaacatgccaaggacagcttctgtcattctgagacaaggccagcctggtctacaaagtgatttccaggacagacagggctatactgtcagctaaccctggagacatctgcaaagcaggtgccctcatttgattatagcttaatcctaatctgaccaggtttggatg

SEQ ID NO: 32400 - DNA, 480 bp, Mus musculus
  source 1..480: mol_type = other DNA
atatctttaaatatccagtcctgttataataccaacggtatcagcctggtgccaagctctttactaagctgtttaaagccaggatttggaatcaagacttttttttttaacccttgagttacaaattgtgctccaggtccctcggaggccagggttcgactgctgtcaaagttctggccaaatgcaggggtgtccccctgcggcaacggagcgcgccgctcctcgccgtggcccgggtccagcgtccttaacctaactgagctcgggggagactgaagcaggcgggggaggcctggcagcttctggaggctgccgaccacacttacccgcggctgcgctggcagtggggccgggccccaccaaaagggcgcgccttgttctagtacgagaaccgggcgcccgtcccgcgactttgaaattcgcacattcggcgattcccactggggacctcccctgaggctctgcgattggagagtttct

SEQ ID NO: 32401 - DNA, 225 bp, Mus musculus
  source 1..225: mol_type = other DNA
ggcctccactctggagctgaggcactatcatggctgggcctttgtactttgccataatgtggctccataaggttattgtttcatactcagactgataatttgagggaagaagctcattttctggagctccaacatgtctctaatcacatggatttataatctgtccttctggccggtatcaggcagaatgaacatagaaagatactaagcagaattgtttcctgt

SEQ ID NO: 32402 - DNA, 316 bp, Mus musculus
  source 1..316: mol_type = other DNA
acaatagaaatatgttctacctatacttataagtagctgtagttctatggcctgtcagattacaaatttatgattttcactggaattgtaagtttcaccccatgggagatcttaagatatgttgcatcttgagcgtggcttctgcctgtagccacacgtctttggccacaaacagtggggcgtctctgcttgagacagatcactggccttgcagcatgccgagcactacagaaacgctggggcccgggcccaacagatgccacagcgtgtcaattcaccctgttctgatgcttccatgatggaattcgagaaagca

SEQ ID NO: 32403 - DNA, 367 bp, Mus musculus
  source 1..367: mol_type = other DNA
gagacttggtctccccagatcttatagaaacaagaattttccaaaacaattttttaggcaaagactatctcttcactttttaagatggactgtgctcatgaacaggaccttttgaaaggcattatcagactgcattgtgtgtgccctgacccacacaagggcaagagagggggtccaatatttttaatattgacaccatctgcacaattgtccagggggaaataatgcccatttccaccacgatgacacacttcgaatgtgtcactgacttccagggattagaaattatttcagggtagcaaaatcagttaacccaagggaaaatttcacagctcttcacttctgctttttaggactataaaacaag

SEQ ID NO: 32404 - DNA, 379 bp, Mus musculus
  source 1..379: mol_type = other DNA
agtgacgtggctggactgacgccatgtggcattagagcgtgctcttcattgtgaccaacatttcagagatcttctgacctgtgtttaggacacagcaggttatttttaaaaatcctaactaactttttgtttatatcacttatttttattattaatctttgctaattctgaaggtcatgctctctagatccagagttcgattagattaagctcaagaccatactgtcttcttagcataaaacaccatgattgccatcagcaagccttggttgccttatctatgtcactgaaagaggcaaagctcagagtctactgtaatgaaaacagatgtggtgctccttatcaatactaaagcttcccaaagacttctgggaagttc

SEQ ID NO: 32405 - DNA, 343 bp, Mus musculus
  source 1..343: mol_type = other DNA
gcaaaatttgctatctctgaacttccaactcagaaactctccagttaggtctcctagtacagtgctctagggcccagcaagaggcactgacgcccacccggaggccgaccttcggctttgggacacacaaagggcctctcggggaggggcagaaagcaaacctccccgcccccgggcagccccgagaccagggggcgatcggccgccacttccccagtcgccgcgccgacctgtttgcgcaaagtggtgcgcggccagcctctgggcagagggagcggtgcttccaccgcctggcagccctgcgcgcggcggcgcaggtccgagcggctggcggggacccgca

SEQ ID NO: 32406 - DNA, 278 bp, Mus musculus
  source 1..278: mol_type = other DNA
aggcttggaagctgggtcctgggttcaacagatgcacctggtgtgtgtgtgcgtgcgcgcgcaccattgcataaggggaaacatcctctttattgagaggatggggcaaaatttgctatctctgaacttccaactcagaaactctccagttaggtctcctagtacagtgctctagggcccagcaagaggcactgacgcccacccggaggccgaccttcggctttgggacacacaaagggcctctcggggaggggcagaaagcaaacctccccgccccc

SEQ ID NO: 32407 - DNA, 319 bp, Mus musculus
  source 1..319: mol_type = other DNA
acacggactgcccagccgcagctgactacagagacaagcatgtttcttgtttgtgagaaccaggggctgccagagaagcagcctctggttgaggaaaggcagtgtctggcatcaactcagacaggtgcagtcacctggcactctcaggcaaatgtacactcatatgcatgctagtgtgtgtgtgtgtgtgtgacctcctggagatgctgaagggagttgagtggaaggacccgggggtctgagcgttgactgctctgccactcccccattggctcctggcagcctgtgctctgtgagcgagcgctgagagggctgagcg

SEQ ID NO: 32408 - DNA, 576 bp, Mus musculus
  source 1..576: mol_type = other DNA
acgcccacccggaggccgaccttcggctttgggacacacaaagggcctctcggggaggggcagaaagcaaacctccccgcccccgggcagccccgagaccagggggcgatcggccgccacttccccagtcgccgcgccgacctgtttgcgcaaagtggtgcgcggccagcctctgggcagagggagcggtgcttccaccgcctggcagccctgcgcgcggcggcgcaggtccgagcggctggcggggacccgcacgggcagagcgggctcgcgcagagccgaggcgggcggcgcagctcgcggggcgcactggggcgcgggcgggaaggtgcgggcgcgaggagggggcgctcggccgggccgccctcgcgctggcctcgcgacggctccgcacagcccgcactcgctctgcgagctgtccccgctcgcgccgccggcctggcccggcgtcacgctcccggagtctccccgctcggcggcgtctcattgtgggagggggtcagatcaccccgccgggcggtggcgctggggggcagcggagggggaggggccttagtcgttcgcccgcgccgcccg

SEQ ID NO: 32409 - DNA, 325 bp, Mus musculus
  source 1..325: mol_type = other DNA
aaaaaaaaagatgagactttactattcttacaccttgtgtgtatatgtgaccacttacatacagaaaagctatagaaattctagaaactcttgtttattgttttacattacatttaatcacactgttctaagtactttcttttaaaatagtgtgtagcagaaactctagttactgtccttcaagtgctccctcccaccacaatgggcggccggggtgaagaaccttggaagtgcggaccacccgggttctcagctgtgaatcaggcgtttgcggagtgcaggcgcctcgcgaaggccctcggtacaaatcgcgggattttggcgc

SEQ ID NO: 32410 - DNA, 408 bp, Mus musculus
  source 1..408: mol_type = other DNA
ctgtgtctcccaaacagccagctacacctggaggtgactgtgagccacgtgagccccctttaaagctgaaagtcagtggacatttctagtgctttacaaagacagacaagtaatcatgttgaattaatgagcatgtgggtaggcttatcctcaaacctaaaccaaagcttccaagcttcagatctgaagagtccagcactttgtacacagagagaaaggatgttgctaagttctagacatctatctccttgttacaaagagcttgggacaagtacctttgtaaataaaacaaggaattgtaagaacaaactattcgactttctttcagcccgtcttgcataagcaggatgtgaaacgtttacaggcactacccacctcattagaattctaattggggtgtgtaggaga

SEQ ID NO: 32411 - DNA, 337 bp, Mus musculus
  source 1..337: mol_type = other DNA
taccagatggtcaaaccctcatcagtatctgctggtcagtaataagaggagtgtgtattccttttgctaaagaattcttcaaaggcccttctagagctcagggctcctcagcagaaacaagacctgtgctgccctgtaagatcataggacctagaggacagctgtggtcatgggactcttctcatctgcctgaaggaaagggacaccctggagtaggtatcatgactcctggactcctctgagctctcatgtacttgagggatgcgaatggtaagaacggctgaccatagtaaccattatggggtgaggaggccacgcctcttctccggaactccga

SEQ ID NO: 32412 - DNA, 539 bp, Mus musculus
  source 1..539: mol_type = other DNA
ttttctcgcataaggcatagactatttaagagagactattcaagtttgggatttattttctctctctattagatattttctgaatttacatttcaaatgcctgtactggggcatatgatcttagcaataccaagggcctctcctcccattgatggccgactaggccatcaagtttgggatttataatcctaacactaaagtaaagtgtctttttattttcttttttaaagcaaaggtgattttaaattatccaccttggtgtgcccacgtggtgccgagcagcgctgggttcttttgttaatgaggccgggtcccacgaggacccggaatatctgggcagcgggaaacctgcgaggcttatcaggaagccctccaggccactctgcggcctgccggcaggagcgacaccattctacagacgcagtaccggctcgcgcagccgcagaggctgggcttggcaggcccgctcgcgcccgtggtagtccaacccgcccgacggacggtccccctctgattggtcaacgcagtctggttccgcg

SEQ ID NO: 32413 - DNA, 339 bp, Mus musculus
  source 1..339: mol_type = other DNA
aagtagccacctcctgtagccaggccggactccgaatttgtcttgcttaaatcccggtttttaaagtcaattcaagggtgccaaaatacacttgcgttaagtgaaaaggatatgcatatcgtaagcgtgctttactccgagtctgggaaggcatgcccttccaataataagtatgtcagatagcaatcaatatttgaaagttgcatttttttttttttttcctagaaagaatggtcaggaaagtcctcaccaggactgtcatttctgtttaagattttgccgcccaaagccgaagctcagacccaattgcgttccagagaccggaactccaggtccgag

SEQ ID NO: 32414 - DNA, 269 bp, Mus musculus
  source 1..269: mol_type = other DNA
gctcatgctggcagcctcaccaacctggccacttggggctgaaaaggccctgttcaggtaccagtgagggcgcctgctcaagggcaacctgacctatacaggccccagggcccagcaaccgagtttccaggtcagcaaattggatgccttccctctctgcgaaagttcagccaagcctggtcaagtcttttgactaaactattgactgaatattcagcttctactacacacgcacacacatctagaggtccccacaagtgtatttgggg

SEQ ID NO: 32415 - DNA, 443 bp, Mus musculus
  source 1..443: mol_type = other DNA
cgtgctccgggtctgagccagggcctgctctagcagcggccccgcggaggagatcagcctgctgctgccgcaggtgggtgagctcggtgggctcgcggagctgcaatgcagcgcgtgttcccacgtggccgaccgcaccgggcccggcggggggggggggagctttcttagaattaagattcggggcccaggcaccaattgctacaacagctggtgccattcatccttctctccaggtggaggaatgtgtgcttaaccttgtggccttggaaaatgccaatgatgattttcttctaagcttgatacagtctagggattatttgagacctacagcattttaaaattaagagcgcgactgctctttctggggtgtctgaagatagctacagtgtacatataataaataaatcttgtaatttaaaaagcacttaaatgctttacaa

SEQ ID NO: 32416 - DNA, 448 bp, Mus musculus
  source 1..448: mol_type = other DNA
atgtcagtaactctttatttccagaagtagtgggagagaaacatgatgaatgagttttctgttagaacaaattcatgagtgatacatggctagaggtgccctgcaggatagttataatcttcatcatatgtacaaaggatactaggtatctgcctatttaagaaaggattaagcaatttagtaaatttaaattatagcatactatacagtggagcaaaagaattagcttttatttttcagcttcttttggccagccttagttttcttatcataaccagttttctttgtaatctgaattattttacctatttaaaagaattctaagtgactaacagtgagtactttcaatacttggccatatatatttggatgttgttttgaattttcaagagaaattaaatctgacggaaaacaaagcaaacagacaaactggttgtgtgtcctgtga

SEQ ID NO: 32417 - DNA, 422 bp, Mus musculus
  source 1..422: mol_type = other DNA
aagcaccagtggcacaggcctttctttagacttggtctcagagttatgtaacccggcgggtcggagaggaagcgccgcctctctttgcacctttttgggtttaatggaggacccctcaccccgcccccagcttttgttaccttggccacgtcaacaaggcccaattatcagcctgcaaactgaagtttgactaagagaccacgtgcagagcgccttgtgcctgcagatgggataggcgcgcgcgaacagaatcagcctgtgtagggccggacaccggtgaggctgcgacattgggtctctggaccccagcccgccgccctcccccccccccgggggtcctcgcggttcaccagagtcagccgcccccgggggatgtcgcggctctccgcagccctccccctcctagggtgtcggattccaga

SEQ ID NO: 32418 - DNA, 300 bp, Mus musculus
  source 1..300: mol_type = other DNA
tttcaaaacaatttgaggtcatgatgttgtaggtcggcctaggttgcactctagaaaagtctattcagcatcccagagttgccccacagccagctgggcttggtggcacacgccttcaatcccagcactcgggcaggaggcagaggcaggcagatttctgagtttgaggccagcctggtctacaaagtgagttccaggacagccagggctacacagagaaacctaatgttctagcatgctttcctgacatcccaagactgggtcttagttctcagaaaacactgatttgtttgtccttaa

SEQ ID NO: 32419 - DNA, 857 bp, Mus musculus
  source 1..857: mol_type = other DNA
taggccgggcttcctcgccgcgcagcctgggccagcttcccggcgcccctccaccgaggccgtggcccccagcccggctacggactcgtcagggtccgccccgccgccgcggccccagcccggccgctcctcccccgtccctggccgcccctcggccggcctcgcgccccgcccccgcctcccctggccccgagtcccctgggccctccctccctacggctcccgctccccagggagcggcggcggcggcgggatggccagggcccgcggccaggccccggggagcggcgggcggcggcggccgcggcggggaggcgcggggaccgggccccggggggactcggccggtctgctgctgctcctgctgcaggtgctgccgcccggggcagcggcaggcccggggcgccggggcactcgggggcctggcggcggctgcgtctgctggcccggcgccggccctgcttttccacgggacgcgcgtctgctgctgttgctgccgccccggccaccaccgtcgccgccgccgacctccacggccgcagcctccatggtaatcagcgccccgcgcgggcgccgcgggcgggcgggggagagacccgggtggggggagggcgggcacctcgcggggcgctcgcccccccctccgacgaccgccgcgctgggcagccgccagagcgcgcctctggggcgcctccgtgcggagccggtgcgggctccgctctcagtctggcgggggaatccctccatctccccgccccgcgccccgggaggggaggggacagcgccggcgcccggggacccgttttctctgagaaagcacccgcgaggcgagcggcactgaggcgccgggactccgt

SEQ ID NO: 32420 - DNA, 391 bp, Mus musculus
  source 1..391: mol_type = other DNA
ggacttcagccaggcccagctcctggacagtatcctagggctggggctcaacggctggcctagccctgctgcgccacctgtcagataggtgtcacccaatgggtcagagccagggggctggttgctcagcctgcaggatgcgctgctcctgctgttcctgggggcctgagggccctcctaaagctgaatgccttaatgggtaaggttgtagaatactccatcatattcagcttgaacctcagggccttctagttccacaatgtggacatttgagaactgtcaaaggcatattacctttgcctgaagcttagggcattaagtaggcttgctgggctctcctgctagcctggagggaccattaagtaaaggctgagccccaccccagtccggg

SEQ ID NO: 32421 - DNA, 415 bp, Mus musculus
  source 1..415: mol_type = other DNA
aacacaaagccatggaattgcctggtgtgatgagccaattgatgagcgcagcagtttgtactttatatcttaaaaagaaataaagccaacgagacggtaaccattgtaatcacgttactagggcactccaaccccggtgagttgccactgcctcgggtccaagactgaaaagcggttcatccccgtggtccgacttcagcagtttccggaaggagactggcactcgctgtcgccgcggggcggcctccctcggaggcaagctcaggcgagccgccatagggacggacgccagcacgcgtagtggccggggcgagcattgctggctctgccgggaggctcaagccagcagcagacaggcagctcaccgcgcaagctcaggccgcacttccgcttccgccttcggggtcacgtgacg

SEQ ID NO: 32422 - DNA, 441 bp, Mus musculus
  source 1..441: mol_type = other DNA
acttacttattcaacaaataaaggaaggggtttgcatagagttctaacttggcgccctaggtctagaagctagatgccaaagaacgctgttcgccgctcgctgcggagcaccgtgtgctgtgcttccatctctagagaatcaggcccagcttgcacatctggaaagcaagagaggaccggtcctaggtactctctctctctctctctcgtgtgtgtgtgtgtgtgtgtgtgtgtgtgacagagagagagagagagagtggtgtcagtttcctcatctgtaaacaaggaaaaaagcccatgcccgggggcctaggaccgtgatgtcctgttacccggagacccccagtgcgcccggggaactccgcggcgcagcggggcgcgcaggggtggggctcacggaggcggagacgcccgcccggcgtcagcgaaccagcgcccgcc

SEQ ID NO: 32423 - DNA, 449 bp, Mus musculus
  source 1..449: mol_type = other DNA
tgaatcggagaagagccctctgggcctgggcctcagttccagctgcaacctcgctatcctgcgaggggcaagacgccgagggtgagcggggccacagatgagcctagcccagcccgctcccggtgctccgtgatggcctgctgcgccttgcgctcggccagaaccccggctcgggcggggaggacgggcttcgagtcagcacccaccctcggccccggcccttcccgaagggcgtctgccctcacacgcacctgagagcgcgcacggtctcccggtactgtcggtagcgctcgtccgcagggtccacggcgggaggcgtctgcacccgtccgaccttgggtcttgcggccgcgcacgggcaggagcagcggggtcgggggccgagtctccggccgcgccgccaggcggttcagagcagccagcgcctgcgcctgcgcccggcccggaag

SEQ ID NO: 32424 - DNA, 469 bp, Mus musculus
  source 1..469: mol_type = other DNA
gttgtgtagcagctgctggacttctgaggcaatggcatctcgttttccaaacgaccatgctgccactgacaccagctgcacctttcgcgcgcgcagagacgcctttgccctgccacgtgtcaacggcggccccgcgcgtgcgcattcgtccgctcgcgccagttaccaagtctctcgggggctccagggattcacgggccagtagggcaggcccaggtgccgtgcgacagcgtctcggcccctggagagcggtgggttctgcaaagatcccgccccacagagcccgggtgcccaggttagctgtaggtacgcagctcgacgcccagcgctcgccatgcgtgcgctacggtggtccagccaggtccactcgggccgccgcgccgagggcaggacgatagctcagcgtagcggccgctaaggcggcctcgtcacgtgaccccgaaggcggaagcggaagtgcggcctgagc

SEQ ID NO: 32425 - DNA, 340 bp, Mus musculus
  source 1..340: mol_type = other DNA
ttaatattgagacagtgtctcaccaagttactcagtcctgaccacaggcatttgtgtccttagtagaaacaatgggcactatttcctgggtgcccccgaaggcagccatgcctggcacagggcagacctttcactgtgcctgctccaaacgtgccagcccttgctggatggggcctggtgacctctgatcgcacagcaccaatcactgtggcagtggctcctgtcacacggtggccggtgacagcctgatggctggctccccacgtgtgtccccagatgcctgaatcactgctgacagcttgggacctgtcggctgagggctcctggggagccactgggg

SEQ ID NO: 32426 - DNA, 518 bp, Mus musculus
  source 1..518: mol_type = other DNA
atccatcctggatcctccagggcccagcaatgggaaccctggaggaaaacctgtcaccagcttgcccccaggactccagagtacactctggcatctcatctccaccaagcctggaagttgagagcagggtttaagcagcctctgttctcttctcagacactcccaagtgtcctggaagtgcaggaccatggcctggtgttctctgcagaatctggtctagacaatactaaaggcagagcttcagttggagaggaaattgtacttcgtcatgaggacaagggtcacctcacaggtcgcccaagttgtcactgatactgagaactctggcaactgcagagctcccccaagaccacagcagggcagtgcagtgcaaggaaatggtttgcaaatctaaagtttaaagtagccaggaactccaaattggggtgtccaaacttgtgaacaaagctctttagcgggcgacgcagcccagcaagctgtgggtctccaaggtgcccctagggacgaggacaggaggc

SEQ ID NO: 32427 - DNA, 211 bp, Mus musculus
  source 1..211: mol_type = other DNA
gtgtgaggccctcctaagggaggtctgggattaaagacgtgcatccctatgccgggatccttgcatacattttctgaaagcattttcactattagaaatgcatcatgattctctttgtatagatgacaaaaggcttgaaaagtttgtgtgacttcttcaaagtcataaaaccatgttctaaggtcagaaactagaaaatggtcatggaaaa

SEQ ID NO: 32428 - DNA, 323 bp, Mus musculus
  source 1..323: mol_type = other DNA
tgggctgcatgtaacacccttcccatgcagacctatgcacaattgattgcaccaaaatgggccaaccattatatgtggccacctgagaagggtatgtagctgaggccacctgttggccacactccagcagctgatggccaccaaacaggagtctaggcacctagtgtggaggccagcctggtctacacagcaggttctaatacagagttttaaatactagtgtaattaattggatatctgtgattccaggtcattagcagagacgatgaccttccctgcaaatgaagggccttagacagtgctccaccatggcagtgcccaga

SEQ ID NO: 32429 - DNA, 255 bp, Mus musculus
  source 1..255: mol_type = other DNA
gggtgcacacctgtactcccatataaaattccagcaaagcctcaacggaaggccttaggtttatgaaagtaatacaatggatgcctaacttgcagtattaataagaagggccttggccatgttcgcaggtatgcatatctgtgtataacctgcgtgcctgacactcgagagggtctgaagagggttctcttcagttaactgaggcccaggtcaagcccagggtgggggcggagctcagcgagcggctgggcaggg

SEQ ID NO: 32430 - DNA, 394 bp, Mus musculus
  source 1..394: mol_type = other DNA
tttagggcagcctcccaggtttggggcctgacaggaaggcctgaagagcactcttcaggccagtggcagggacttgcctgatgtccctacctactggcattatacagatccctagggcaggacagctttgaaagcatggcatcctagggtcaccaatggttgcacaagccccgcccctccttcacccacctgtgggaaaagccaggaggaagtagctggctgctggtgttctagtgctgctgcggccctgccccagcctctgcccgattctcagagagtgggccactctggggccaggcccccatgaggcgctacctgctgcagctatagcccgtgtgttggtctgcactgctcccacccgcgaccttggcgcaggccgcagcggcagctccgc

SEQ ID NO: 32431 - DNA, 415 bp, Mus musculus
  source 1..415: mol_type = other DNA
cggaagcctgggcctagcttgcttcctgagtcaaagataaagtctttactcaatctcaggtataaaatacaaatttcctgtagcgtcaagttttaaattggtcaatttatatgtttgtgcagcacctgcagaggccagattgtaactagttataaaggttctatgctgcacagggaataagaaattggggattgaccccaggactgaggccgagtatctgccacccagccttttgggcaggcgggccggcgctcagcgaccaaaggggaccgagtcccacccccgtccaggattggcgggtcccgggggcgtggccggagggcgggcccgcgtttgccgcagccgctggtgggcgggccgggcgcggggcgggaggggccaagagcagagcccggccgcgccgcgcgccctgtgg

SEQ ID NO: 32432 - DNA, 383 bp, Mus musculus
  source 1..383: mol_type = other DNA
gtcctggatagaccaggctgacctcgacagcaatgcattcccaggaactggagttaacaccctcttcttgaaggggctcaagactgcttggttatgctgtcttaagttcgcagtgaggttcggatagactcttacagcccttgagttggaggtgccggaggggcgccaccacagccgacacccgtcagggcgcgggttcttggctccccggagttgcttagcagaggatctgcgcgctgatagaccgcgcgtcccaagcgcctcagacacaggctgcgggatgctcatctgccgcggctgccacctcccggatgttggcagcagtagccggaggcaagcttcaggcatgctacctacttccgcctccggccggaagtaccttc

SEQ ID NO: 32433 - DNA, 184 bp, Mus musculus
  source 1..184: mol_type = other DNA
acagggtttctctgtgtagccctggctgtcctggaactcactttgtagaccaggctggctaggcgtgcgtgcgctttacttaagcgggcgccagcgggtgaacacgcgggagcgtgggcggcttagggcgctagcccacgggcccgccctggcggtcgcggagttcctccaagcttttaaaaca

SEQ ID NO: 32434 - DNA, 342 bp, Mus musculus
  source 1..342: mol_type = other DNA
cagtcattggttggccattccctcaatgaagttgagactatatatttaaaaaggcattttaagagcatggtgatacttgcccttaaaaatcaggtagatctctgtgagtttgaggcctgcctggtctcagagtgagttccaggccatctaggactatattgtgataccctttctcaaaaagaacaaagttatttagtactgagcatagatgttcatttggacagataaaaaagtaagattcaggctggttcagatttctttttttttttaatttatttaatacataagtacactcattgtagctgtttttagtcagtgctcttccagaatgttatattgtga

SEQ ID NO: 32435 - DNA, 553 bp, Mus musculus
  source 1..553: mol_type = other DNA
gtttcagaagctgttgatagagaggctgtctctgactaaacaatggttacagaaggcaaaattttattttcctttaagtataaaaataagcattttagttccttctctttttcaaacctgcaagagataccttggggattgttaaaatctttatgagtggaagaaggatttttttcagccagtactatttataaataattcaagtgttataatttaccatgaaaagatcatcttgacaaggtcgatattatccagactctggggatactgtgagcacactgatgccagtgctctcaacaggactgagcccggccctcgcgggagcgagaccccgccccgggcgcgtccgcgagcgtggctgtagctcccgcagaaccctcaccgcactgagagaccttagggcccggaggtgtggtgtcccggagcctgcgcctggcggcccgcaccccaagtccgtctggctcctccgcagcacggtgcggcgctgggccggactcacactgacgcccccgctgcgcgcgctcccgccccgcccccgcgtgcccgcgcgcgc

SEQ ID NO: 32436 - DNA, 597 bp, Mus musculus
  source 1..597: mol_type = other DNA
aagtgctgaagaacttcaagccccctgccttgggcctggaacatcaggctgggcctgcactccccacccgcccccgcagtgctggcattgctcgcccacccagcccgtggggcagacgcactggccggtgccagggttgcagcggccgccgttgacacacggccggtcacattccttggcctcggctgcggccgagcccgacaccgccgccgccaccgcagcggcctcggcctcccggggcagcggcagcagcagcagcgaaaagagcagcggcagcagcggcggcgggggcagcgcccgcgacagcacccgcggtagacacagccgggcgcgcggtcccggcctccaggcccctgtcgcggtgcagggtcggtgctgcctgcccttcctgcccgcaggcgctgctgtcgccccccctcagccgcgcctcagtcgccgccgccgccgccaccgccaccatcttcctggggctgagccggcgccgccggctccccttcgcctggccgtgctaggcggggccgggcgacggtggcccggcgggtccatatccaaggcggggctcccgctgtgcgtcgggcaggggcggggctggcatgc

SEQ ID NO: 32437 - DNA, 322 bp, Mus musculus
  source 1..322: mol_type = other DNA
tgtcatctgtgacataagttatataagtcttcactgaaactactgataactctcattgagctgagttagacattaagcctcagtgtcctgtcaggcagaggatagtaggggcccagtagcccctctgtggatgcatgggccatttgtggtggaggctgaacctcagcttctggggaaaggtcaggccccgggtcacgcctatgggccacactctctccccttgggtttgggtaccccttccccaaaaattcaagggtgtggcggaggactgcagcctgcccgcccttcacgtggacgcggccgaggcgtgtacaacgagcgg

SEQ ID NO: 32438 - DNA, 273 bp, Mus musculus
  source 1..273: mol_type = other DNA
accctggttaacaccaaggttcctggtgcagaggcatcaaagttcaacttggcaaatacttatttggggggaatttgttattattatttttactcattatttgagtttattggaattacttacaggggtataattgtcaaaaatcacccacttagaccagggctggcgggtagcctgcctgaactaggagccaatggccctgcctccagtgcacctgtcagcaggtgcctgctgccttccaggcttagctggtcctaggaagagacatctgtc

SEQ ID NO: 32439 - DNA, 389 bp, Mus musculus
  source 1..389: mol_type = other DNA
atgctaaacttctcctgcagggaaagcctggctgtgtgtgcattcagtcagttacacatctattcatatgcaggtgcttaattaacgaatgcagtaagtactacttcttcattcaccaaaatggagttggggttataagctgagctttagcttgtctagcagagccaggcagccactgtaaggaggtactggctaaccgatgttcatccgcgctaagaccctggcattgagcaggtctacatgctgggcacgccggaagaccacggccctggtcccgcccccgcgcatgccagccccgcccctgcccgacgcacagcgggagccccgccttggatatggacccgccgggccaccgtcgcccggccccgcctagcacggccaggcgaagg

SEQ ID NO: 32440 - DNA, 274 bp, Mus musculus
  source 1..274: mol_type = other DNA
tgcatggcaagacccaggaaagtttccttgacactgtaggtctggggctctgcactgctgtggaccacaaattcccaggcctaggtcttcagaaatggtaaagctttctctgctgtggccacaaggactcagcccagatttatgcagcatcctgaaggttgagtaagtttctgagctgccaagttgagaactttgtggcagcctcagcgtgtgctcagtccgagccctggagtaagagagacatgcactgctgatctgccttgaggcttctggg

SEQ ID NO: 32441 - DNA, 421 bp, Mus musculus
  source 1..421: mol_type = other DNA
aggcagggaaacctgctggctggactctcaagcagctcccctccttgtccgctgctggcctttgtggggcacagggaccagaggacttgacagatccctcctgacttaagccagaacctggcatcaccaggaggtcctggtcattcgaaaggttgaggacttctcactgttgaggcgggaggtctccagtcaggcctgaggtcccagcctggaaacctagcttcaggggactagactctgggcagcagatgccaaggccccctgtgctgctgccctctgagcaggggaggcaccgctggcccgctggcccgcagtgctgctgtggtgagggaactgggaggggctcgggctgggccccctcggctgagccccgcgcaggcaggccccgccccggctcgcacatctgggcggcgagtgcggc

SEQ ID NO: 32442 - DNA, 321 bp, Mus musculus
  source 1..321: mol_type = other DNA
tgtccgctctggaggacagaattttctcaacagtagggagaccttgaggactcttacctaatcagtgtatataaggatagagatagtcgcacacggacaggtgggcctgtggcaaaaaacaccctgtcgggtgggtcgagacgcatcccgctgccatggcgaccgcctccttggagaccaggagcagaagctcctgtccccgggggcgcccgcgtacgctcccgttctaatgcttatttggaatagggaatgccaagctcgtgccgctggggtgacgtcgactcgtggggctcaacgcccctcaagggagagggcgtggcg

SEQ ID NO: 32443 - DNA, 435 bp, Mus musculus
  source 1..435: mol_type = other DNA
aagatttatttgtacagatgtttatgtacatacgcatttttgtagttttagatataacacccagatgttaatagtgtttattttcaagaaagtattctgcataacaagaccaggcttaaaattgctagaatttttaaaatgtcattaacaccatcaagtggatttaaatgctatgttgtctttacaataacataactcagcacttaaagtgcacaggctgcgcttgggcatctgcatgcaggagcgcctacacacaggcagtaagacaattgcagccagctaaggtccctgcgcatctgtccaggtggcgcgtggccgaggcgcacagtccgggcctcagcgcccccggcggcgggtccgggcagcggcgcggggtccgggaggcggcgcccagcgtccccccgcttcccgcgagatcccgcgcgcgctccgccc

SEQ ID NO: 32444 - DNA, 342 bp, Mus musculus
  source 1..342: mol_type = other DNA
gcttatacttgtaaattactttccaagtacatctttgggacaagaagatgaaaactgtttccattttacaaaggaaatagggttaaggaattaaatgaccttccctaagaaactggctttaatctgttctccctgggagtctactattaaacagcctttcagaggcggatccagatttggttcttagcaccaacatggtggctctgtcttttgagtgtacccagcacacacatagtacacatatataaataaataatttccaaataaaacctcccaccccaatggtgacttgtgtggtggcgacggttgctatggtttcggaaaacaatggatttgtgtctg

SEQ ID NO: 32445 - DNA, 467 bp, Mus musculus
  source 1..467: mol_type = other DNA
gaaaaagttctcgaaaacgctcattgtaaactaatagcaaattcaaagaaacactaaatatggtgctattaaccccaaattagccaagtggaatctaagcgtctaattctcaggagaataggctcagtaaactctggtgccccagcggagtccctgagggagcttaactggacagggaacgcagtgctcacagcatacttggttgagggctccttatgaggccaccttaggggatgactactccctctgagggtagagggctgctcccacctccaaaccctgttccaggaggcaatatcctggaggcccaggattctcgcgtcaagtacgtgtggggcagggggttaacccaactccccgagtcagaagtagctggtccagcctcagcctcagccccgcccttggtcccgccctcccggaaccggcgcccccattggtggcgtctggcggcgctgccgcataaggag

SEQ ID NO: 32446 - DNA, 464 bp, Mus musculus
  source 1..464: mol_type = other DNA
ggaagagaggccaggatatcatgctgccacagacctctctgccagttctttgctacaatctgctggcagacatgaggcctggccaggatgcagtccttaatgaggggctttcttcagaacccctgagacactagtcaagtgactgtagacctgccttagaaagcctaaggaattcccatgcctttcagagttaaaggaatgtgtgtgtcccaaacacctcttgggccattggttcaaattcagcaggcagacttctagcggaggcttccttggacagttccgcgcacgccgccggggtcctcagcgccccctggcggtcgccctcgcagtggccaggccgcagctgagccctccagggcgcccccgcagccgaggggatcggctggtcagaagcgtgtacgtcctcgggaagtcgaggaccacgcgagttcagcgcgccgctgctgcccgcgcgaggcagtgac

SEQ ID NO: 32447 - DNA, 422 bp, Mus musculus
  source 1..422: mol_type = other DNA
cagttctttgctacaatctgctggcagacatgaggcctggccaggatgcagtccttaatgaggggctttcttcagaacccctgagacactagtcaagtgactgtagacctgccttagaaagcctaaggaattcccatgcctttcagagttaaaggaatgtgtgtgtcccaaacacctcttgggccattggttcaaattcagcaggcagacttctagcggaggcttccttggacagttccgcgcacgccgccggggtcctcagcgccccctggcggtcgccctcgcagtggccaggccgcagctgagccctccagggcgcccccgcagccgaggggatcggctggtcagaagcgtgtacgtcctcgggaagtcgaggaccacgcgagttcagcgcgccgctgctgcccgcgcgaggcagtgac

SEQ ID NO: 32448 - DNA, 271 bp, Mus musculus
  source 1..271: mol_type = other DNA
agcagtggtcagactcagatctctggcttgtgagccatctcaccagccccagttgatatatttttacatgactggaagcgaaaagctttttgtagcttggtgcatatccccagatagatgcagtcctaccagcccagctggtgtcatctggctagcatacttggctagaagatctgaagaactgcagttttctgggtatctggacttcccctgaccgctagaccagccgctccggaacatcaggccctgcgaccggcctagctcagctccg

SEQ ID NO: 32449 - DNA, 303 bp, Mus musculus
  source 1..303: mol_type = other DNA
ccagtcaggtatgtctccctgggaaattgtactgaatgcactactatctggtaccaaagttgaattttagtatgacagggaatgcctgtaataaaacagaaagacttgatgtaaagtcattttatcatagtaaagtaacattgaagtttcctccaccacagttttggaaacatcactcatatggggtagacttgaaatgtgaactttacactcttcagattctcttcctgaagataagcactactgcaagaggtgaataaggcccacctttacagtgctgccttgtagcattcaggtcaagca

SEQ ID NO: 32450 - DNA, 366 bp, Mus musculus
  source 1..366: mol_type = other DNA
agtcacttaatccatcttctgtaaaaacccaggggtctggagctatggcatactgccttcttcaggaaggggagtaggtgaaggatttagaatccacctcctcccgccattccttctggtactgggaatgaagtcatagcacaaaggaagatggctcctactgcagctatagaaccagacccggggacaaaggctaaggttagtcgcagctcagatgttctagggaataggggagcagcttggccaccgctctcgcggatgcacaagagagggcgcccctcatggagtctgggagcctattggacaagacacccgcccctagccagctcggattggctagctgcacgttggcgcaacggaaaaggc

SEQ ID NO: 32451 - DNA, 457 bp, Mus musculus
  source 1..457: mol_type = other DNA
tctaaatagccaggatgttttgtagaaaacaatttaaatgtatatacctcattgaaaattattagagtgtgtgagcctgctcagagccttcaggaccagtcaatattggaaagtatagtattcaagctatggggattataaagacttaaaagcttacatataatgcagactgctcactttgattactgtcttaaagaattgatatagaaaacagatctgtcaggttatgtattacataagggattgcatatggttacatataacctttccagtctcagccaacactgggccttgttacataatggttctgagggtaaggactgtaaacctgatcaaaagtccatactttatgttaacttgacacaggctagagtcatgtagaaagaggaaactatctcagtttagaaaccactgggcaggcctgtggaatcccaaagagggtgggtccacccctggt

SEQ ID NO: 32452 - DNA, 480 bp, Mus musculus
  source 1..480: mol_type = other DNA
agagatgaataaaaaataattttcttacttttgtgtgaaacctgtgggttactatcccgtcagatatttatttatgtttcaattcataacagtagcaacattacagttacgaagtagcaatgaaataattttatggttggcgctaaaaaataattgataccaattaatttttttttgaaaaaaggaaaaagtgccacctagtattaacgttggcttttattaaaagtttgagggttttactagggaaatacactttttaaaaagggccacttcaggacataaggttcctggttcccgccggcacccacctgagacctgcaagaggggccctttcttcttttccgcagcgctctgacagtgccggaagacctcgtctggtggctgtgccgcgggcaactccaggctgggtggcctcgggctccccgcccccggtgggcgggcccggggcggagcacccaggcggggtgggccggggacgcg

SEQ ID NO: 32453 - DNA, 402 bp, Mus musculus
  source 1..402: mol_type = other DNA
tacttcccctttcctaggaaatgtatggtttactaaaatgatgaatttaaagtcacaaactagttatacccacaccctcagtggtagctatgagaactcctgcatgctttcgctgacctgctagaatttaggcaagggcatgtaattaaataaaggacacactgtttcttaaatatatttccttccactgtctgtacaggcgcagcagaagctttgggcatcaatcctctagagcagccagtgcccagcggaagggacgccgcgcctgcgcacttgccgacaatgaagccgcgcgccctcagtgaggaggcgggacttgcccgggcatccgggtcccacaccccgcccccgcggcatgaatgagaggcgcggcgccgcccctcccccgccgggcccgcccct

SEQ ID NO: 32454 - DNA, 278 bp, Mus musculus
  source 1..278: mol_type = other DNA
ccttaaatgctgatagtcttataataaccttatttgactgtcaacagcaggtctcttctggcttttagaaggagttagcttgaacctcatgatcttcagtactggaattacagacccctttattgcaaaagtgaggctgttggtctcacctgttgcatgggcaccctggcgtcattacagctgacgcgttggcggtggctggcagacttccggtggcatcaccacctgcctaaatttagtgcaccaaaggctggcgcccaccttttagtggcctcaag

SEQ ID NO: 32455 - DNA, 417 bp, Mus musculus
  source 1..417: mol_type = other DNA
gctgccagtgaatgcatgtgggctcacccacaatctatttccagagatgggtatctatggggatcacacacactgatcacatcatacagattgatgtttctctctagtaagagaacttcagacacccacgacgatggctagggtcttggcagcctttttctcgcgggaaaacttgagcagccttacggagagcgagctgcgcaaggtgtgccccttgcagtggctgcgccgcgacagtggatcctcagaaccacctcagtgcccgcctcgaggctgcgcgtggtgctgcgcgcgaccacatacacgcggcagtacatgaccaccacctcctcggtgatgccgcagaaacgctcatccgggccagaatggcagcggccttgcgttctgtcataatggctggatacttgagcgagtggc

SEQ ID NO: 32456 - DNA, 303 bp, Mus musculus
  source 1..303: mol_type = other DNA
gcagtgaagaattacattaacaagtgatttttcttttacctttttaataaatgctaatggaaacaaacaacagtcagtgtatcagttactcttctactgctgtgactaaaacactaccacaattaaggccacttagagaagtaagtacttaattgggttcatgtgtcacagctgggagctcacgacacaaaccaatgtcgtactgatgtgtgtgctccaaggtgtaaactaaaaaagctaactgcttggatctatgatcacacaaaccatctacagctgtgctctggggtccctggccacctg

SEQ ID NO: 32457 - DNA, 474 bp, Mus musculus
  source 1..474: mol_type = other DNA
tcttccccaatcactgcccagtggtccctggattccaaactcaggtcctcacgcttgggaactgagccagtgccccagctcctaacttgaacttgagagtctcctgactgcaggctttcacctgtccaagtcagcaggcatcttgaacaagaacatcgcagtgcattttttcctttggacacaataaaagaaaaaagtgattattgaggtcagcttaaattacttagtaggaacaccaggccaaattgggcaatggccaatatactttctaggcctctaattcttttgatgtcgaaaatcttcgttaccaatttcttgttaccaaagttcaacgatgtaaccctacccattatgtaacgggagcattgggtactggatcagtcttccattaaagatggcggtttaaaccccaccccccacccccccgcgagagacgcggcgcggccattggtgagcatcacgccccgcccctcg

SEQ ID NO: 32458 - DNA, 322 bp, Mus musculus
  source 1..322: mol_type = other DNA
ggagggtgatatgcttctcctgttgaccttaaatggcgtctggcttcaacaggccaagaaatcacttattttgactcttttcgctatatagcttaggttaaccttgatgtctggatgacaagaggtcaactggaacatttctcactcacaaagaagcctggcagtgtgatggccaacattatgtacaattgctctctaccttgttgtaaagcagctaacactcccaattcctggaaactgtctgatgttgtaaaaagtttgactgcctctgcctgcatgtaggcagcgtcttgtaacctgtggttttttgcctttataaacc

SEQ ID NO: 32459 - DNA, 491 bp, Mus musculus
  source 1..491: mol_type = other DNA
cacaacttcaatagctcttagttctgttggggtagctacattacaggaaaggcagcttcatttaaaaggccatcttccagtagtgatcacaagaggaacactccagaaagtccctgtgtttaaggccttgggacagtcacaggtacctgtgagcttcctgccatggggccgggggcatgattctggctcccctccccactgcacctgcgccatctgtgtatatagacagatctgtaacctattggccttagggctcctagggggctccagcaacatggcatggaggccccttgtcactggcgactggtcttaagaggcttccttcagcccccttggctgtgggcactggaagctgcccaggctgtagtacatcgagatctaaccttccagggtggaggagtgatgcaggagcccttgattggtcctgctgaagggctaccctatttggagggctggagctcggtagagaggccccctccccctgcagcgcc

SEQ ID NO: 32460 - DNA, 500 bp, Mus musculus
  source 1..500: mol_type = other DNA
catcttccagtagtgatcacaagaggaacactccagaaagtccctgtgtttaaggccttgggacagtcacaggtacctgtgagcttcctgccatggggccgggggcatgattctggctcccctccccactgcacctgcgccatctgtgtatatagacagatctgtaacctattggccttagggctcctagggggctccagcaacatggcatggaggccccttgtcactggcgactggtcttaagaggcttccttcagcccccttggctgtgggcactggaagctgcccaggctgtagtacatcgagatctaaccttccagggtggaggagtgatgcaggagcccttgattggtcctgctgaagggctaccctatttggagggctggagctcggtagagaggccccctccccctgcagcgcccaagcttcagaggccggggatttcccagaccaagcagtggcccttccagccccaccccctcctgtcccaggcagggagg

SEQ ID NO: 32461 - DNA, 282 bp, Mus musculus
  source 1..282: mol_type = other DNA
caagtggaagcttctagacctcacactgttagccagttgatcagaagcacaggttacgaccaggaatctgtagaggacaccggatatccactgtcaagaaaaaaaaaaacattgcttttgcagaaagagtcttggctgttgttttctcacaagagataaagggcctttgagcttccttttataaacatccattgaaaaggcccaaagcctttgggatgcctgagggatgtcgtcttgggcgggcctggccccagccactcacttagccaacccccgctggtg

SEQ ID NO: 32462 - DNA, 389 bp, Mus musculus
  source 1..389: mol_type = other DNA
gtccactgacgcttcagtgggagaaattggacagtggccaggtgtgcagctctgctggcagagccccaggaggggaggtgctccctgcctcacttcgccccacaccccagggactctgccgtggcatcactgcaattctttaagtccactgagctggcagcagcaagggcagacttgctcatctgaactgtctgaaaagataggttttaatttctcttctttgtctgggtttgagaaatacaaccgcagcagctgctgggattctatgacagacccagcctgctctgaagaagcctgctgcaagactggtttcaagacgataatggaggcctgcagtaactgcttgtcaccaggcggtgttgtgtaatacaaatagcattttataagag

SEQ ID NO: 32463 - DNA, 348 bp, Mus musculus
  source 1..348: mol_type = other DNA
ccgtttataacattgtttctatgggagacacattccaagatccaaacaatgagtatctggcttcttggtttggggaccaacctgggtgctccctcctatacactagagttcctcggaggtctaagcttccttcacttgccgtcacgtctgccggcctgccgagtcgaaggggcccacttagccgcattctctaggcgggctgctccctgggagtgactgtcacagagccaggcgaacatggggtgagaggcagcaccttattccctccacccagggagaagctccgccccctagaggggaggggggcggaggggccaggtgggcggggcgcccgccctcaaccgcact

SEQ ID NO: 32464 - DNA, 334 bp, Mus musculus
  source 1..334: mol_type = other DNA
cttgctatatttcagcaggatctcaaaccatggctagtatagaaggcctttaaatacgagctcatgcctagtagctacaactgttcaatactttgagccaattaagaatactgctctcagagaactctggagtgctttatcaagacgtcactttcatgaggatgaaggacacttacctgggtagtgtttaataatcaggtagtaatacccctctggatacccaggactctgctgtgcaccgatgtggccagggcccgcaaaagcaagccgctacccggttgagcatggtggcccatgtgccctggaagcaagattcgatgacacgattaagacc

SEQ ID NO: 32465 - DNA, 391 bp, Mus musculus
  source 1..391: mol_type = other DNA
gagctcatgcctagtagctacaactgttcaatactttgagccaattaagaatactgctctcagagaactctggagtgctttatcaagacgtcactttcatgaggatgaaggacacttacctgggtagtgtttaataatcaggtagtaatacccctctggatacccaggactctgctgtgcaccgatgtggccagggcccgcaaaagcaagccgctacccggttgagcatggtggcccatgtgccctggaagcaagattcgatgacacgattaagaccgccccttccgcttggctgttgagcgagccttgcgagcgcgcctaagcgcagcgcgggtagggggcgggcgcgcgctcccggaagccagccgcgagacctggccctgccaccgag

SEQ ID NO: 32466 - DNA, 431 bp, Mus musculus
  source 1..431: mol_type = other DNA
taaacaattcaggaataaaatctgctttttgtttttaaagatgatcgttacaagttagtatcttagaccacctagaaacttcctggaaatgcaaatttcgacagcactgggggtgggccttttgacagagaaatcaagcctggtgtgtcttctcccgtgctttaaagcgggttacccactgagccgggtacactgcacccctctcgctgtcaccccacagctactgcagggcttggggtcctgcagggtaggaaggggagagcctgcgagcgtcgagcatcctaggcggcccccccggagcaagggtctgcggctcggcgccccggggcgcgcgggcggagccgggggtcgggcggggaggggccggcgcgcggggcgggcggctgcgcggctcccgcccccggcccgcccctccgcggcgccattttgca

SEQ ID NO: 32467 - DNA, 442 bp, Mus musculus
  source 1..442: mol_type = other DNA
atacagttagaagaggcattccaaatggaaactatcaagtttcacattaaagtattacactttcattatcaaatatataaaaaacatgagaaattgaaaaactctatatccttttgtaaatgatgttaatctaagttcttccccatcctcataatcaataggaatgcaaccattttcaggatggggctcaggctcgggttcatcttcagcctaaaattaagatgaaaatactagtaatatctacctttagaaaaatgtaaaaaggaaaataattacgtgatacatatggacttggtatcttctagagtcttacgttagggaaaacgctccgtagtgtttaaaataccctaaggatgacgacagcctacgcgaaccccgtgatgcccctcgcgcagccccgcctttgcatacgcggtggggcggggcgtcatgacctcgcgcg

SEQ ID NO: 32468 - DNA, 493 bp, Mus musculus
  source 1..493: mol_type = other DNA
ggctccataggaaacattcctttcagcccaaaggttttcaaagaattagatgtgggtgttaacttactcacagaagttgtggttaacaagagccaaacctgagggttttttttttgtagctgacttctgatacaccagaagagggcgtaagagtttaagacaagcaatatcttggatgatgttacttgcagatatcataagtagcagtggaacaggttacatagatcagatccacttgcctttgtctcttgagttcggtgcttagacagaatcagtgctcactaagttaccagcgaccatggcttggcaaggcaaagtgagctgaaacaggtttcacctccgagagcaaggcgctgttgtcccccggtaacaggttaccttctggacccagcactcgcgcgcggggacttgcggtaggacgcaaggaccccattggcccccgccaggctgccccgcctcctggcgtctggggttccaggcggagatggcggca

SEQ ID NO: 32469 - DNA, 524 bp, Mus musculus
  source 1..524: mol_type = other DNA
acattgtggttaacaagagccaaacctgagggttttttttttgtagctgacttctgatacaccagaagagggcgtaagagtttaagacaagcaatatcttggatgatgttacttgcagatatcataagtagcagtggaacaggttacatagatcagatccacttgcctttgtctcttgagttcggtgcttagacagaatcagtgctcactaagttaccagcgaccatggcttggcaaggcaaagtgagctgaaacaggtttcacctccgagagcaaggcgctgttgtcccccggtaacaggttaccttctggacccagcactcgcgcgcggggacttgcggtaggacgcaaggaccccattggcccccgccaggctgccccgcctcctggcgtctggggttccaggcggagatggcggcagtgcgcgtgcgcgctggctcgcagcttcccgggaggaggagcgagcggccgctggggaaacagcggctccgctctccgggcaagggcggcggcagcggtgctgg

SEQ ID NO: 32470 - DNA, 154 bp, Mus musculus
  source 1..154: mol_type = other DNA
tcctgtgcagcctattctgcatgcactgacctatgtcctgggcctgggcagatcacactgccctcagcaggcctgtcctggctgcaggctgccagcacccacataggatataagtatgtgcatgatgcacataatacacacagaccaatcccct

SEQ ID NO: 32471 - DNA, 270 bp, Mus musculus
  source 1..270: mol_type = other DNA
gatttttaaaaaatgtatgagaagtagtgtaagctctgtagtatataccatgtccttcttcacagcatgccagcctgtggggccatgagctgagatgcagtcattgctgttgctaacagcagctaagctcagtgccttcaagccaccttgagttcctggagcatgaatgtaatgaggttcgatgagattccagcatattccaatacccgatatttaaaactcttcaggtgttccacatgaggaaacggctggttcgaaacagaatcagtt

SEQ ID NO: 32472 - DNA, 461 bp, Mus musculus
  source 1..461: mol_type = other DNA
acactgacagatttcccctcaaatccatgatgcgcagtgagactctggaagtcaagaaaaggtctattgtcactctaagtcgacattacatttgcactaagtcaaagctgcggcatttaatgagcacagctccggagcatgtggctttggcgcggaaacagagtgggcgccactgccagcgcgggcttttcggaaccgcgcgctttggtgagggctgcccccggcggaagcgggaagagtggggccccgctcccgccacccgctcacctggtgcgaagccttcggagcgcagaggacgccgcccgtcccagcaggcctcattgatgaggtctttgagagcctccagcaccttcttcaggatggagccctggatcaggcgtgcctcaaacatccgcggcttcctaggcgcgcgcgcgaggtcatgacgccccgccccaccgcgtatgcaaaggcggggctgc

SEQ ID NO: 32473 - DNA, 313 bp, Mus musculus
  source 1..313: mol_type = other DNA
ccactttgctttgtacaaaaccaaagcaaaacagcaaagcctttcctgcagtctgggaggaaagaagccaggcctcctgactccatcgtagcagccttttccaagtcctctatatgggtagtttaaattgtcagcttatcggacaggtctcatttagaaaatgttctctgtggccagcacacagtattttatttctgggagaaataaaataactcctctgtctttgaatagccaaggacactaattgaagtttcatgcagggcaagccatgccacttcaagagcttacaaaaccctcggagtcgggcgccggg

SEQ ID NO: 32474 - DNA, 363 bp, Mus musculus
  source 1..363: mol_type = other DNA
gtagtttgactaaatgatgagatatactagaaacccgattacataatgttgtttagaaagcaaagaacaactctagtttggttttatttatttatggcttctagaagtcaacaggctagattccagtgggtgaactcagatcttcaaatgtggtcaatgcctttatccactgagctttcctaaggaattttccagaaaacagctgaccccagccagatgggctaaggctgtcgggccacctcaggtctctgggcagcccttccaggaacacgcagcccgccccccggcgcgcggccgccgattggccaggaccggaccgggcgtgacgtcaggccccgccccgccgcccttcgaccccgcccc

SEQ ID NO: 32475 - DNA, 424 bp, Mus musculus
  source 1..424: mol_type = other DNA
aagcagtaatttgaaaacattcctctaacttgcaggactcctaatgtgtggggtctcaccctatactggacccctcaagactaggagaaaaccgtccaattaaacagaattgttttagactagctttttacataagtgccacttaaatgaacttgaaacaagcttgctttctcatagttcaatctcctttgtttaaacctataaggataggggaatttgggaccaaattccaaaattttagcccgaatagaatccatgtaacaatattaaattattcttaatgctgtctgagagaattttgctagcctaaagcctcgggttcagactgtactgcttaagagactttgcatgttaacagaaggacacttaccgtcctgctgcaggagttcaggcaaatgccctcagttaagatggccgcagctga

SEQ ID NO: 32476 - DNA, 457 bp, Mus musculus
  source 1..457: mol_type = other DNA
gtataaaccttatgtgttgtatagttaattcttttaatctccatcatgattaaggtacaccatagacatttattcaataccagttttctaatattgggcagtattggctgaaaataatcctcaccagtacgatcaactattgatagactgttctaaccctaagaggttttaataaataaaagattcgcaagtatgcaaactaataataatcaaggttgcttgttaggatcctcagggtcctgctttcaggagccccggagcctgcgacacagggctccgcggacactccgtctccggagccgcccggtgcccgcgtcactgcgcgccagaaggcaaactcggacctcgcttgaagttcttttttggcgcgtctatgacgcgctacggaagtcgccaggcttccggaagccgtcccgaggtccggaccggaaagcggaagcggcgtgcagcacgtggg

SEQ ID NO: 32477 - DNA, 349 bp, Mus musculus
  source 1..349: mol_type = other DNA
ggcaggaaagtgtttgctttacagtagacagatttttcccactgggatccagagaataagactgcctacctgcaagccatactatgtgtaagagatcttttttctcttactgagggtggtggtgcgcgctgcccaaggccagcaaccagagcaccacgaagtcaccgtcatgccccgagaggcgggggcggtgagctcggctgctccgcagctgatgcctccatgctaggagcccggcacgaccaggagggacctgcgtctccgccggcaccgcccccacgtgctgcacgccgcttccgctttccggtccggacctcgggacggcttccggaagcctggcgacttccgt

SEQ ID NO: 32478 - DNA, 639 bp, Mus musculus
  source 1..639: mol_type = other DNA
acaacatttaaattcattcagtaactttaaagcttttttcaatgaaccattttcagctattctaaaagaactattgaatattcagataatctacaactttttttttttttcagacatgtatagccctggctgtcctggaactcactttgtagaccaggctggcctcgattaatctacaacttttatataagatttttttttaacaattctagaacaaccacaggatgtatacacatgaatagatcttgcttatcttagacacaaaatcaaataaggtatcttataaataaattattttgctcatgaacacgttttttttttcttgtacagtcttggagtttttaaccaaaaacggtagagttgccatatacgatactgtttgtccaaatgaaacattatatgacattattaattttgttttacatatatgtaaatatgatactgtacatttataaaacaacattcagcattttacacatttataaaataacatttcactattacatcttctaattgatgtacatgtgacagtggctccatagttagtaggtattaagcattacttaccatatagatcaggtttttgaacctcagaccaattatttatggggtctatgtattcataaataaaatgaaatg

SEQ ID NO: 32479 - DNA, 217 bp, Mus musculus
  source 1..217: mol_type = other DNA
aaatgcgtttctatctctatttaaaagcaagcaaagaagaacaggtctgttgtaaaagatttcttccctgcccgtgcctgctgggaccctgcgcaaggccgcacacactggctgtgcttccgcccgctggcgccgcctcggggctgctccgtgacgtcagggctgagcgaggggcgcccccgcccgccgctcgcccccgggtactgcaccccgcgcc

SEQ ID NO: 32480 - DNA, 409 bp, Mus musculus
  source 1..409: mol_type = other DNA
ataaagatgatcttgataaaaagctccttaagacgctgagttcgaggccagcctggtctacagtgagtgtgtgccatcacagactgggctgacatcaccacgtggtgaccttcctggattcaaggccctgggttcactgatttgtttctaattcagacttagaatataacgcatacagtaagcacttcccaagtaaacaattagtgattgctattattgacatttccctttgctctattcatatgcatttagtgctaaggaagcagagtaggtacttaactactttgatgccaacactaatgctttgcgggccacttggcatcaggcaggcctgatataagtggcttccggccagcgagctgttcgtgctcgccgctgccgcgcgggggcgccggtgagcagagcggct

SEQ ID NO: 32481 - DNA, 322 bp, Mus musculus
  source 1..322: mol_type = other DNA
tctccaactgaaatcagctacccatgctgacttcagtggaggcaatgggctgggccacaggagccgtggtgtcgggtttctaccaccagggccaggacccagacctcctggccctggctcaggccgaggaatgcttctaaccaggtctcagccagccgtaatctcatcagaccagtttgaaaggttcctgggacttctcagagatgcccctggtcccagggtctatatacttcttttctcaagcttgggagaagtttagcaaaggcaggagtgtctcaagctcctcctggatggagctggaggaggggcagccgggaacctg

SEQ ID NO: 32482 - DNA, 482 bp, Mus musculus
  source 1..482: mol_type = other DNA
tgtcaaattgacataaaactggcagtatttaccctaaattcttaatgattttattagtaaaatttcttctgtgcatgccgaggaaggaactcagggacaggtgctctgccacggaaccttaataaagttcaaatgatgtctatagctctataccaccgaacttttaattcaaatgtaaaatacttgctaaatattgtgatgttcgaataacaacaacaacaacaacaaagatttggctataaatttcgggatattttaccattgatgcggcatgatgccagggccctgccccaggcctggcacagtaagctttcaacctaatgtacgctgtacagggggagggggggaattacccaaagtctcccacactccactcttcagtctgatcagagggggcttcctcctgcccagaggtgaatcctccagaactctgcatagatagacagttgcagacaggaagggattctccctggccccggggc

SEQ ID NO: 32483 - DNA, 442 bp, Mus musculus
  source 1..442: mol_type = other DNA
tcaggagcagggaggctcatcctgtcttcttgtagaacccgggactattagccccggggtggccccacaggttgtcaaattgacataaaactggcagtatttaccctaaattcttaatgattttattagtaaaatttcttctgtgcatgccgaggaaggaactcagggacaggtgctctgccacggaaccttaataaagttcaaatgatgtctatagctctataccaccgaacttttaattcaaatgtaaaatacttgctaaatattgtgatgttcgaataacaacaacaacaacaacaaagatttggctataaatttcgggatattttaccattgatgcggcatgatgccagggccctgccccaggcctggcacagtaagctttcaacctaatgtacgctgtacagggggagggggggaattacccaaagtctcccacact

SEQ ID NO: 32484 - DNA, 593 bp, Mus musculus
  source 1..593: mol_type = other DNA
tggcttggccacagccagatcgaagtgatcgcttctataaagagaatttctattaactatcactagaagggatgtccactttacaagtgtgtatctatgttcagaaacctgtacccgtatttttataatttacataaataaatacatataaaatatatgcatctttttattagattcatttatttgaatataaatgtatgaatatttataaaatgtaataatgcactcagcgtttgctcacatttttgccaaaatgtctaataacttgtaataaaaacttcaaactcaagttgaatattggccaatgagggaactcagaggccagtggactctggatttgccctagtctcccgcagctgtgggcgcggatccaggtcccgggggtcggcttcacactcatccgggacgcgaccccttagcggccgcgcgctcgccccgccccgctccaccgcggccgccccgtagggcgcgccgtccacacccctgcgcgccgctcccgcccgcccggggatccccggcgcgctgcgcctccgagggggaggtgttcggccacggccgggagggagccggcaggcggcgtctcctttaaaagc

SEQ ID NO: 32485 - DNA, 539 bp, Mus musculus
  source 1..539: mol_type = other DNA
gctgagcaggaagatgcagatgcttatctggcatctggttctagaggatgctcagctcttggttcagaatctttgacctgcttaaagtttattaaacagtactaaacgtacaatttctagcaaaagaaaaggttgtttaatttgcaaattttgaatctgttctgagcattaacaatgttaattgtcaacataacaagcctgttacctgccaggcagggatctcatagtaactttaaattgagcaatttaaagtgattgacacttgcaattgcagttttcatatgttacttactgaaccattggggaatattgcaatatatctatgtattcatccaaacagtaaatcattgataaatcgcctttgatgaaatcaaaattcttttcccaaaacagtttcaagcttaccaccactgggtggctagcctgtaaatgaaatgtcaaagtctaggcatacaatgtttgctcatttgatgtaagcaagagagaattaaatatgaactttggcaaaagtctattaataattgacaaataacggaatt

SEQ ID NO: 32486 - DNA, 520 bp, Mus musculus
  source 1..520: mol_type = other DNA
aaaaatgctacaatgaaaatgatagactttctgtttatgaatattttataagcacagtaaaatactttctaccagcattgtaggtcaatgtgcactgcatagctgtgttttatgctaggaacagaaatcacatttgtaggtatattagctgcaccactgaattttacaatttatgttacacacagattcgtctaatgtgtatctgtaaatccacagaaatcatgtatgactctgacaaagttgtagctggaaaaatggtgtccatttcactgcaagtagcaataggaacagattcattttgttaatacatgtgttttaaaagtctataaaatatttttaaaaattattttttaaaaggctgcattatctagatttataattaatctagttttatcaaatgggggatgggtttatttagccaatggccacgtttccctttagagaaagccgttgccttgggaaactgcagacggttgctttggcaaccgccttcccacagtgcgttgggggcgtggtgccg

SEQ ID NO: 32487 - DNA, 487 bp, Mus musculus
  source 1..487: mol_type = other DNA
ggaacttagaaacttaactaaactttgtttttttagtcaccaagttttggattgtgtgatacacaaatctttaactttattagtggttattttctgaagtgatggacggagattctagatgctctacaacctctaaaacactcaggccctgggccccactcctttcatctttctaaggaataaaagctttgtatttcctaaacactgtttgtgggccatctaggttataggcttcaaactctctggagttcttgagctaaacctctcaagtgcttctctatacaaaataagaaccctttctttgaaaagagagaaagaaagcctagggctctctccccgctggttaggatctgattaaccactaaccttggctaggggcaccgggcatgtgcggcgcaggcgtcggctgcagtggggcccgggagccgggaggtgccgctgcgtccccgcttcccgttgctgacccagcgcgcaaagttgggcagga

SEQ ID NO: 32488 - DNA, 689 bp, Mus musculus
  source 1..689: mol_type = other DNA
aaatatttggacaaaaagaattacatctgtattaaacaggtgcagacttctttaatccagtataacaaagatttatagagtattcattataactacctagaaatgactgtgaacagattataggaaaaccaattcccttatatgtttctgaacatattcacacagacaatttaactgcagctcagtaattaagcccaagaaattcgatatgaatacaatgttgtttagaatatatactcaaagtttgctgattatctcaatgtttttaacacaagctaaagttttgctcagctttacttaacatggaaaagtatatattctgctcttctgtgtcatttatatttttgacaagtataggaaaattgattctaatctgatgacatcaaacattaagataaaaatctttagggtgatttacattttgtaaaacattcttttgtctttactgatatacagctcaattacaagactcagacctcagatttcaatgcttaggcaggtgatcaggtacaatacaaagttaaaattgtatcaagaaatcaatttttatgattcaaatattttctcaaacatgcttgtacccttagagaataaaattgctgattctatagagtaacctaatttttatgagatttccccttagagctaaaatcccagttataatgtagaaaaggatattacttattaaa

SEQ ID NO: 32489 - DNA, 301 bp, Mus musculus
  source 1..301: mol_type = other DNA
ttctccttggatattctcaaatgaagaggcccaggattaaattcatataggctagttgttgtaaaatttgacctgaatgacatgtttactataaagttagcacttacagagtttattttttagcaggagttcacagtgacttcgacacttaggacttacgagttctatgtcctttttgacagatcagagagagagtctgaacaggctttcccatttcctcttgtaatggacactagtttctatctaagaagaatagttgaaagagtccctctcagctgccctgcctctcagtctgactgct

SEQ ID NO: 32490 - DNA, 346 bp, Mus musculus
  source 1..346: mol_type = other DNA
cggaccaaagttggatcagggagggttccagattagcatcctcagtaccatcacagctttgagcccactcagcatcctcagaaccaacaaagctttgagcccactcagcatgcctccttaaaagagtgtgagaacaatggtgtggaactaggtcgagagcttctacttcactgtttaaagaattgtttataatgtgtgatattagtcagtgttccaacattataaaatgtccatataatgaactgataactggtaaacatctcaaaacttgctaggtttctgtcacaccactagagtgggtcaggtgaaccctaaagtttgggcctaaaatgctcattagtgttac

SEQ ID NO: 32491 - DNA, 732 bp, Mus musculus
  source 1..732: mol_type = other DNA
gcatgggccccagtccccagtgcgcaggtgccacgtctccgggttttggtggccgccgccaggcaggagggaagccctcggggagttccggagcggctccagtgtagggtctccacaaagggtgacgctggatgcacatggccaggccgcctcagcaggccacagcgatccccagcatccctggaaccgaagtctgggggggggggtgtgagcccgttgtagtacttcctccggcagattgtttttcgggctgactccgtgtttgttcaatgtaacatagacgaaagcgcccggttgcaccccctcctcccgggccgggcacccgctgagtccgtggccagcggcgcgtggtgtcccgctgctggctcagctcagtccccacgggcgcgcgcccagaccctgcaccgggaaggcggcggcggcgaccccgggacagccaacccccaccccggccggcccgcgcggccccggtccacccccagccccgccgggcgccgcactgggcatgctccgtagcccggcaggttggggctgcgaggcgacggcttgggctccagaggcagcgtcgcggccgggagtaggggcggcgggcccggggccgcacggggcccggctcggcgggagcggcgggcgggcggcgccctgggcagcgggcggccgaggtgagcgcagcggggaggcgctggccggcggaggcggcggagggcggggcggcgccggaggggctcggcg

SEQ ID NO: 32492 - DNA, 274 bp, Mus musculus
  source 1..274: mol_type = other DNA
aaggttcattctgatttattagagcaagaattaaaaagaaaaactgttttcattacataactataggtctttacttacaccatagttctaaaatttctgtcctatcatggggctagctcaggccacatgccctcagagatagatctcactggtcactgggtcccaaaggatatctgaaacaaatctattggtttgtttcaagagcagaattgcttcctctgcagtgtgcggcgggagagccatagcacccagtgcagcacgcgacggatttcct

SEQ ID NO: 32493 - DNA, 417 bp, Mus musculus
  source 1..417: mol_type = other DNA
tgtaaatgtaaaacacgtgattttttttctattttaattcaaactggccatatgactttgggaaggtcattgaatttctcaatgtcttttcatgtaaaatgctttgcagtttgtcctctatgtcattatgtttaaggcgattattatttattgacctagtgcaatattctctaataaaagaaatatttggacatcattacaattaataaggttcattctgatttattagagcaagaattaaaaagaaaaactgttttcattacataactataggtctttacttacaccatagttctaaaatttctgtcctatcatggggctagctcaggccacatgccctcagagatagatctcactggtcactgggtcccaaaggatatctgaaacaaatctattggtttgtttcaagagcagaat

SEQ ID NO: 32494 - DNA, 376 bp, Mus musculus
  source 1..376: mol_type = other DNA
tgttttataaccgacttattcagttataggatcagacactatattctcataaggaagaccagtcagtctcaactgtcaagccttgacattacatcgaacctctcaggttttgtcccaggctcagagaagtcaaagcgattgtgaattgatccaagatggttgcctctttccaggaaaggcatgacatcccaggggacatcctcccttgatatcatcaaaagctgaaggtaactccttaggctgataagtccaccagaccagccgaatggcacgagttgaatccaaatctgtattttaaatcaaaggctcatttagagtgcggctttgcaaaggtcctatagaaaatttgtctccagctcgggcgtgcagacactcc

SEQ ID NO: 32495 - DNA, 418 bp, Mus musculus
  source 1..418: mol_type = other DNA
agaccagtcagtctcaactgtcaagccttgacattacatcgaacctctcaggttttgtcccaggctcagagaagtcaaagcgattgtgaattgatccaagatggttgcctctttccaggaaaggcatgacatcccaggggacatcctcccttgatatcatcaaaagctgaaggtaactccttaggctgataagtccaccagaccagccgaatggcacgagttgaatccaaatctgtattttaaatcaaaggctcatttagagtgcggctttgcaaaggtcctatagaaaatttgtctccagctcgggcgtgcagacactccctgctcctaaaacccggagcagctgagtggtctcagcggacagtcctcctaggggcgaagccaggcggcttgggcaagagtaaaaagctttgactct

SEQ ID NO: 32496 - DNA, 399 bp, Mus musculus
  source 1..399: mol_type = other DNA
ttcaagagaactaaaactttctgaacctttggatgtataaaaaaaatgggtttattttccttttacactgaatcggtactttttttttaatatatattttttattatgtattttcctcaattactaccaggccatctttaccatccaatagctgacagagacagtcaaaccaattctaagaaggggcaaagtgtccacactttggtcttcgttcttcttcagtttcataagaaatatagaattttatacagaactcttgacaatcagcagtctatgatcctagtgaatcagggaataagatgaaccctgtgtttctccttataagatcagtgatgaagcaatggtccagttgggaaatcaaaagtttcatcatattaagtttcccttggtatatacttg

SEQ ID NO: 32497 - DNA, 364 bp, Mus musculus
  source 1..364: mol_type = other DNA
ctgtcctggaactcactttgtagaccaggctgacctcgaactcagaaatctgcctgccctcccaagttctaaccatgaatgtttggggccctcggctacactcctctgtcaagagtagccttgtggagaatttaaagacataaaaatgtgcctgagaatattcagattctccctgtctacttagatgccttttggaaaaccctcatacatgtttcaaattttcaaaatttgcccttaaataaaattatttcgatatttattttcacttatttaataaattattttagggatgaatactcaaaactcatttaattttactcagtatgttagaatgaaagaactgagtcctgttgtgccacttcct

SEQ ID NO: 32498 - DNA, 405 bp, Mus musculus
  source 1..405: mol_type = other DNA
gccctcggctacactcctctgtcaagagtagccttgtggagaatttaaagacataaaaatgtgcctgagaatattcagattctccctgtctacttagatgccttttggaaaaccctcatacatgtttcaaattttcaaaatttgcccttaaataaaattatttcgatatttattttcacttatttaataaattattttagggatgaatactcaaaactcatttaattttactcagtatgttagaatgaaagaactgagtcctgttgtgccacttcctcccgggttggagctaagcctccgctgcggccccgcgatgggcggggcctacgcaagctccgcccagacgagcacttgcgtggttgccctggcagcagctcacagtgggcccagcctggcgggccgcgc

SEQ ID NO: 32499 - DNA, 327 bp, Mus musculus
  source 1..327: mol_type = other DNA
cagagggtcggccactgaaagtgcttgtgcagtgacataattgctctgacgtactttaaaagaaagtgtgagcctgcaatgctgctttaatacaataattttcataaaaatagcaatgtgagtcctcttctctggggaacgttttacatataaatatgtatatgtttacattattataattgtatatacattccaaacacacgtatttacatacatatattcacatatgcatgcacacgtaagcaaacgcaagaatcgctccatttgggtgtttataagcgctcagggagctgagtcaagcgctccgcacctctcgaggagccggct

SEQ ID NO: 32500 - DNA, 430 bp, Mus musculus
  source 1..430: mol_type = other DNA
cactgccagcacctacgatggcgcccgaagccctggaccaaaataaaaatggcggccaaagcggattttttttttttttttaagaggttggaaaagccacaaatacaataatgtatcactgtacgtcaacgatatgtactgatggacaacaacaacaaaagccgtgtttttcgtatcaaaatatttttaatgaggaagattaaaagatacgttgaaaaataaaggtgcctttcacggtggaaaagcgaaataaaatatgtttaaacataatttcataatgcttcagactgggcggaagtttccggcgacaggctctgtctgctctgacgtcactcggaccggcagggcggagccagtcaaggcgccttgtgattggtagagagcagagagccgcacgctcttcctttgcgggagcttcacgcaaaccccg

SEQ ID NO: 32501 - DNA, 429 bp, Mus musculus
  source 1..429: mol_type = other DNA
tgtccggggtcactggactagtagcagaccaagcttcagcagctttggcagccactgccagcacctacgatggcgcccgaagccctggaccaaaataaaaatggcggccaaagcggattttttttttttttttaagaggttggaaaagccacaaatacaataatgtatcactgtacgtcaacgatatgtactgatggacaacaacaacaaaagccgtgtttttcgtatcaaaatatttttaatgaggaagattaaaagatacgttgaaaaataaaggtgcctttcacggtggaaaagcgaaataaaatatgtttaaacataatttcataatgcttcagactgggcggaagtttccggcgacaggctctgtctgctctgacgtcactcggaccggcagggcggagccagtcaaggcgccttgtgattggt

SEQ ID NO: 32502 - DNA, 275 bp, Mus musculus
  source 1..275: mol_type = other DNA
tcatcagatagtcacatcctgaatgtagaccaggctggcctccattccgtgcggggacgcggtgaggccgcaggctggcttctccaccagcggcctggcccccagcagctgcacaccacctttgccctgcgcggcaagaaggcgcatgccggggtttgcgtgaagctcccgcaaaggaagagcgtgcggctctctgctctctaccaatcacaaggcgccttgactggctccgccctgccggtccgagtgacgtcagagcagacagagcctgtcgc

SEQ ID NO: 32503 - DNA, 412 bp, Mus musculus
  source 1..412: mol_type = other DNA
ctcccgcaagagcgtgcggctctctgctctctaccaatcacaaggcgccttgactggctccgccctgccggtccgagtgacgtcagagcagacagagcctgtcgccggaaacttccgcccagtctgaagcattatgaaattatgtttaaacatattttatttcgcttttccaccgtgaaaggcacctttatttttcaacgtatcttttaatcttcctcattaaaaatattttgatacgaaaaacacggcttttgttgttgttgtccatcagtacatatcgttgacgtacagtgatacattattgtatttgtggcttttccaacctcttaaaaaaaaaaaaaaaatccgctttggccgccatttttattttggtccagggcttcgggcgccatcgtaggtgctggcagtggct

SEQ ID NO: 32504 - DNA, 470 bp, Mus musculus
  source 1..470: mol_type = other DNA
aaacaagaaaacttgaatttggtgttgatgtgaaaagttgacgttctagaaaaaaaatgttcctttgaagggttgagtgtgcttataagcacaacacagagacttgtgtgtggtgctcatgggtgagcctagacggctctcactggacattttcagagctgctagctcaggtcaggaaaattttcttcctattgtaggacgtggttctccagccctggaaagttaagacactgagggtctatcaagctgttgactgtgcatcattttcagagtctagtcattttgattagtcataggagtttaggaaactaacaaaagagaaatgatttaactcttcactcttaagtatagagagaattgtgtatctgaggctcagcattgagcaaagcttaagtttcatgatactgtgaattccagatttcagaaggctggggaaagtcctcattttccatagatgatatatataaagt

SEQ ID NO: 32505 - DNA, 392 bp, Mus musculus
  source 1..392: mol_type = other DNA
gcctgggaagttagtgatgtagcatgcaggctccaagcttggtttctttatgttttgtaaccaaagcaggtgtggtttcttcagcaaacaacagaacaacaattgtctgtattactttatggaatcttggactaagggttaaagattttgactctccaagcagcatccagagtattcttgcctcaccattaaagattgtagttaagcaacgtgcctattactcccgaagactgctctggagtctgcaaaatagatgctccataaatattttctatcttccccgcccactactctcagggcccgggaaggggagggctctgcgcatgccccgtatccagggcagcctccgggagcgcctcccggcccctcctggcgctcgggtgtgcgttcac

SEQ ID NO: 32506 - DNA, 465 bp, Mus musculus
  source 1..465: mol_type = other DNA
aaagcaggtgtggtttcttcagcaaacaacagaacaacaattgtctgtattactttatggaatcttggactaagggttaaagattttgactctccaagcagcatccagagtattcttgcctcaccattaaagattgtagttaagcaacgtgcctattactcccgaagactgctctggagtctgcaaaatagatgctccataaatattttctatcttccccgcccactactctcagggcccgggaaggggagggctctgcgcatgccccgtatccagggcagcctccgggagcgcctcccggcccctcctggcgctcgggtgtgcgttcacggtcccggggagcgtgccctgcgtgcgggtgcccgcctcgcccgccgggctctggatccctgagttcctggaccgggcctgcggagcgggcacctggtcggagctgcgagaggcggtagcgtccgtggccacgca

SEQ ID NO: 32507 - DNA, 411 bp, Mus musculus
  source 1..411: mol_type = other DNA
cagtagatgctgttttactggcagctgcaagcaaagagatcttttgccttttaactagttaataggagactttgatcattttaaatagccttacggattctttaaaatttgtatgacaagattaaatgtagccttaagagttgagtgcagtgaatcacagggtttaagcactaattatcagagcatttgaatgaatgctattgtcatatctaccagcaactgtgttttgtgacctgggacacaggtccaaaatccctgttcaaaatacttgcaagtaaatgctgctaggaggaagattgttgccaggaagagagattagacatatgtgttcccattctttcatttgctgtttatcttaattaaatatacagtagaaaagagaaaactgctgctcctttaatatcagagctg

SEQ ID NO: 32508 - DNA, 530 bp, Mus musculus
  source 1..530: mol_type = other DNA
aacaggctatataaatggttggtattacacaacaaaccatagtgccctttgatgaaaactgctgtagagcattaatctatggtcaccatatgccttacaataacagtcaatacttacttcagatatattgtctcattttatatacagaaaactgaaatatagaaaagataaatggctcttttaaggtaaaaaatgattgtaaggttataatatgatatataaatttcttttaagaaatagaatgttctgtttcacagatttctgtctctcctaaattttaaaaatttaatatttaccatggccagtgataagtgttgaccatttgaatcatgttacatgatttagtcaccttacatatatattcacacatttttcagtattgtcctgtagctcctagaagtcacttgcaaatgcaattttctggcacaaagaatatttgggttttttttttaagtttagcttaacaatgaaaaaaaacactgtatttgtaagtactttgtgctgagctgtgtatatctttaaaagtctct

SEQ ID NO: 32509 - DNA, 483 bp, Mus musculus
  source 1..483: mol_type = other DNA
tcactcgaacttggggaaggcaggagccagagccacgctggacccagttcgccagccgcaccacttgcaaggctgagtcgctcccgggagcccgaggctggagcgcggtcatgaggcggtggcgctgttgcagcggctgcgtttcggcagcccccaagtcccctccaggcgcagcacccccaggatggcccccgcagcgcacaccgtgttcttcgcacctgcgcacttaagtagacgcgcgcggattgaatccagggcgctgtaggcgcacggtctgctgcacccagtgatcagccaccctaccccccaaactcgctgctcaaggtcagggtgcgtggtggggtcgcagacaccttggcctgggcgacccccactcgcccgcagccccaagcactagagcgagcagagggctagttcctttgcgagaaggcggacgcaggcgccggcggggcgcccccagttcctcggtgacccggagccagc

SEQ ID NO: 32510 - DNA, 371 bp, Mus musculus
  source 1..371: mol_type = other DNA
gcatgtactggtgctgtacttgcatgtgcatccctgagccatttaaacaaacaggggatgacactcctcagtgttgccacccttactgctgggggacactcagaaatgctgtggcaggacaggctgaatatgaagtgtctgagaggcatttcagagcctgaggcttgggacaagctttaactgtttacaaggaaacctaaagttgtagaaaacttttatttcttcaagaggtaccaactatggttgatacaatgtgtccttgtttaaacaacttgaccttgattgtagtccatttaataacagtaattccttgaacacagaatggtttcagtgaaaccatagaattaaagtcagaacgttttaaagtaatg

SEQ ID NO: 32511 - DNA, 269 bp, Mus musculus
  source 1..269: mol_type = other DNA
ccagcggctccttggggccagtgattaatataatctttattatgtataagcaagtatttcaaaatttgaagaaaagaaaattcccaaatacttctcaagtatctcagacgactaaccattcttgatactagttacaaggattgctactgatcttggacagttaaagactaactaaacctaggttgaaatcgtgtctcagctcaaacgcttaaagagagagacgctatagcctaggcgattaggactcaggctcgcgggccacgtgtgca

SEQ ID NO: 32512 - DNA, 450 bp, Mus musculus
  source 1..450: mol_type = other DNA
gttgtggtctagaacaccaatctcagtcagatagggatggtttgttgaatatcaagccatttagaaatgactgttcatattgatctttaatttgtcaatgtgaacctttgtaaaatttcttaagattaacaaacttcagaacatgttaccgtaaccttgctctggtcatttttctgtgtcaatgattagcagacatattacagtaactatgaaatagatcataacattttgaatgctctgtcacatatacctagaatttacttttagtgtcttaatttgggtaagattaagagtgataattagtctgagtaataaacattactcttcttaagtctgtgaatttgtaccttaaggcacctgtgtccgacttgccggcctcaggtcacatatggccaggtgtcccacataaccacagcttcctgccacggtgtcagtgtgcggggtcgcaca

SEQ ID NO: 32513 - DNA, 266 bp, Mus musculus
  source 1..266: mol_type = other DNA
ttacaagcttttcttgaacagaatggaaggaagaatgaatgattgccccgcatgctatcggagcctctcgtgcttcccggaaaatcagaaaggctcagtcgggtgggtgggtccgccctacccggctccacgctttcatggggtcgggctgccgggcggcccagggacaccagaagcgacctccctgcgactgccgctcgatgcagagaccgctggccggccaagcagtgggcaggcgcatgcgccaacgggactacgactagcgc

SEQ ID NO: 32514 - DNA, 244 bp, Mus musculus
  source 1..244: mol_type = other DNA
caatagtcagccatcaagtggatgctggaaatttaacctaggtccactgaataacattttattctcaaagtgactaaggcctagataggctataagatttcaactttgcaaaaaagtcagaagtttctgtatctggaattacagtactgcagtgcgtgtgatgacagcacttgaaagggagctccaggaactttcggggcaagttagtctctctcgagaagcagctctgaagactgagtgcgct

SEQ ID NO: 32515 - DNA, 277 bp, Mus musculus
  source 1..277: mol_type = other DNA
ctggaattacagtactgcagtgcgtgtgatgacagcacttgaaagggagctccaggaactttcggggcaagttagtctctctcgagaagcagctctgaagactgagtgcgctagtcgtagtcccgttggcgcatgcgcctgcccactgcttggccggccagcggtctctgcatcgagcggcagtcgcagggaggtcgcttctggtgtccctgggccgcccggcagcccgaccccatgaaagcgtggagccgggtagggcggacccacccacccgact

SEQ ID NO: 32516 - DNA, 289 bp, Mus musculus
  source 1..289: mol_type = other DNA
ggcgtcctgaaaactgactcactcaaattgttctctgaccatttgcgcatggcatgtgtatatccacctccacattatccagcctcaagcatcttcatatagtatagtgtgattaagagcactgacttctagaggtgtaatgagatctgatgccctcttctggtgtgtctgaagagagcaatagtgtgctcatatgcataaaataaataaatcttttttaaaaacgataatatgtgtctctattgaattaagtttagccttccaacttcaaaggaacttccaagaagcc

SEQ ID NO: 32517 - DNA, 444 bp, Mus musculus
  source 1..444: mol_type = other DNA
tatttgccaatgcatataactatattgatcctaaattgatgaatagatgtgagtccaaatccactaagtctttctctggcaattggatttccagagaactacctaggatggagctagatctttataaaagacaaccaggcactagttggatttactacattttggtcaccagatcttaaaactcttgtgtactgtgaagcttttgaaacttcacagaattctaattcaggcacacctgctggcaggccacgccctcaggccctgctcctcccgctccccgcaggcggtggctgcacgccccgcctccgtcgtgaagcagcctcccccctcggcgtcgagcccaagcctgcgcctgcgcctgcgccctgaggctgaagtaggggcgcgcctgcggagcagccaatgggcggcggcgctgcctggctgccgggaggcggggcctgc

SEQ ID NO: 32518 - DNA, 159 bp, Mus musculus
  source 1..159: mol_type = other DNA
caaaagtgggctatctccctgtaaattcattcagttaactggagtataaagaacgaccacaatggaacattctgtgtcttccagtctctagtaccaggagtcctcatctcagctttcctagaacccttcaaggtagggtagaatcagacctttgttcgg

SEQ ID NO: 32519 - DNA, 437 bp, Mus musculus
  source 1..437: mol_type = other DNA
tcataaaattatacctggaaattaaagtcttggaatcctgttatttattcatgtacgcaaattaaaatgatttaaacctggaagaaccatttctaacagatattttaagatattgatgactgcagccatgctcgtggcagcaaaaaccataataataataataaaaaagaatgtagttaggctcaacccttttaattttaggtagaggtatactattcattatgtgaaaatgcatgtggaaaaaaaaacctttctacttcccaataagactgcttttgccaaatcaatattagttgggttacgattttaatgtaataaaaataatctgacttttgttaacttatttttggtagatggcatctcagctttggcaaactgaaaggctcatttcggccaagagctgggctaagtcctgcgaggtgaagctttaaacttca

SEQ ID NO: 32520 - DNA, 508 bp, Mus musculus
  source 1..508: mol_type = other DNA
gagaagttctatttctatattgtagatgaaaaatgaggtcatatttgataggtaacaggaaagttcttaataagtccaaatgcaaactattgaaaacagagagaggcttgtttgaacaatatttaaatttttcttttgtatgctaaataggcaaaattacatttgtgtatgatgcattatttaacatagctgaataaatccatttaaatcatttgggaagggcaaagattttctaaaaatcgcctcacaggacaaaattagaatgaaaatgtatacagtgaattcatgtggttaatttataattaatttaggtgaaaatgagctttaaatatcatgttttgctgagtagaaggagattcaagtacttcattaaagcatatttgacttaaataatatctttattaatagtattattttagtctctgtcagcttgcatttgaatgtgaaatggggctgtgacagaatatcagaaaggatttcctctagcttgtaactctcaggttacaaa

SEQ ID NO: 32521 - DNA, 356 bp, Mus musculus
  source 1..356: mol_type = other DNA
gttaactgaatgaatttacagggagatagcccacttttgtaaaaaaatcctcgatcctttgttttcttggtaccctaaattttgtggttcagaacacaactctttgaagaaacagagctctccttcgcttctcaacaagacagatgagttgacgagcaacagcacggtggggctgcgctggggcgtggccaccgaagaggcggggcccagacttccgggccccgccccttcgcgccgtaggcagctgccaaaccccggtgcgtggatcacgcgggccggagccgctctgggcatgctcagtggcctggcaggtgtggccgcctagcaactccaggtcggccctagccgaggggcgg

SEQ ID NO: 32522 - DNA, 398 bp, Mus musculus
  source 1..398: mol_type = other DNA
ttttgctaagaacatactcgatattgtttttataaaagccaaactggtttccatatctatgtaattaaagaacactttttctgtggttgtttaacttcattcaattgaagtgaaaaaagcatataaaattactactctcaaaacactatttgtgactttcaaaaattagaaacctcaggctggtaaaatcaaccaatttggtccttaccccaatttttagcctagaaaaatccaagcattttggagagtaccatcaagcatctaagacgtaatctatagttgacaagtcaatggagacaggctcctgtaaaattgtatcacatctatgcgcgtgcgcagaaagattccgccttggccggccggggcgaggagggctcgattgaatcggttcgactccg

SEQ ID NO: 32523 - DNA, 366 bp, Mus musculus
  source 1..366: mol_type = other DNA
tttaaaaacactattgtctatatactggagtaatagaataatactcatctgaaagctttattcatactgtttagctttatagtttaggctggcaagatatgcctgctgttgcaataaggatttaagtcctgcttcatgagatgaagccgtagttgacattgtcaatgaatggctcatgaatacttagtttcaagctggagagttcaaaagagtccatgctggcattcacagccctgaaaggtcctaaggcatcaatggtcttaccttgcacaatgtgctcacttgtgcaataatggcattactgtcatggatgtaacggccctcttgccaggaaagagtttatactggtactacaacctggctcaa

SEQ ID NO: 32524 - DNA, 430 bp, Mus musculus
  source 1..430: mol_type = other DNA
gaataaagaaagatttaccttcttttcttcagatctggttgtgatattaactaatatattatataatccacagtggcataacttctaagaaacctatcacaaaatatttgtgtaagagttctttatattatgtaaatacatatttacatatacaaacaacacaaaatacattatgcaaatatatttgcatatattatgcaaatctagaattttattagacttactaaaataaaatttgttctcaagacattttgactctttaaaatgtatatatgcatatccagttagcaagcacatgtttgctcataaactgtctcacaggcctctcaacagagccctgctggtagacgccacaagctgtggcagatacagctatggcatgacatttgtgtggaacacagacacagggcgtttgactctctctgaaaaa

SEQ ID NO: 32525 - DNA, 473 bp, Mus musculus
  source 1..473: mol_type = other DNA
ctccagactttgataatgatctttaaataaatattttaatatgataaatatttatatcctggaataatctcatcaaatagttcaatattttcaacattaattttacttttgaatttttcaaagcctatcacattgagtgattgtatatatttcaaagcttgttttttaactccaactgccatttccataataaaagttaaaatgaaacataatgagaatatttatttgagaactggatagtttactaagtccttagactgtaaggatttctgttaagtttgaagcatctaacctcaccattattgtaacgcctttaaaagcctgagcaagctggccttacccgggagctgtatgggcggcttaatcccgcacacaaagcacccgcggctcttcattgttgggcgcccgccccgagggcacatctgctgaccggctctggaacgtcccagcccggccggccggtttatttagca

SEQ ID NO: 32526 - DNA, 519 bp, Mus musculus
  source 1..519: mol_type = other DNA
catgcagccagaggaagccccaaacccagagtctagcgctgactctagaggagtctctgccatcgcaggtggggggagggcagtccggactcccgctggactgccagatgtttagtttctggcctccttggagcaccgggccagcctgggatagcaacagggagcggccggccggccgggggcccccccgctcccctcggggcctctgaagcggcacgcaccgtaattccctgcccggagctgtgcagatttccaccaatgacatcaccgggcgccggcagtgggtggcagcctgggcgcgcagcggtcgggcggagcaaagccgctccgagctggcgggggcgcgggctcgcggcgcccccggggacccgggcagccagctgggcaggggagggcgggggcgggcgggggcgggctcggggcggcccggggcggggcccgccgatcctctggcctccattggccgctggcgggcgcgcgtcacccgggctggcgctcgcctccagccctctagaattg

SEQ ID NO: 32527 - DNA, 352 bp, Mus musculus
  source 1..352: mol_type = other DNA
gtttttaaaatcctctccagactttgataatgatctttaaataaatattttaatatgataaatatttatatcctggaataatctcatcaaatagttcaatattttcaacattaattttacttttgaatttttcaaagcctatcacattgagtgattgtatatatttcaaagcttgttttttaactccaactgccatttccataataaaagttaaaatgaaacataatgagaatatttatttgagaactggatagtttactaagtccttagactgtaaggatttctgttaagtttgaagcatctaacctcaccattattgtaacgcctttaaaagcctgagcaagctggcctt

SEQ ID NO: 32528 - DNA, 582 bp, Mus musculus
  source 1..582: mol_type = other DNA
ccaaaagccttcttagataattaagactttttttatagagatcctgatgttctcgttgcctaaattcagttcaaaagtgaggtgatcatcccacgtcttacgagttccttttcccaagcgcagcggcggggcccggcccacagtcccgggccacgcggcgtcccccacgcaccccccgcgggccactgggcctcctcccgtcctggaataagcgctgactggaaggaggaaaactgtgcagatttttccctctcacgcccaatcagctgggtgtcgcggtccctgagagccgttttgagagttctcgtcgccaagcaggcattcgccccgcccactccgcgccggggccccgcccctagcggcgcgcacacctggccaggtggcgcgcgcggtaggcggggcatcgcgtggtcccgcctccagggcagggcccttcacggagcagcagcccgggcgctcctctgggcggggaacccatgcactccccttaactggagaggggtttccagttgtctggagactattccgaggggcgcgcgcagccgcagtctggctggaactcgtgcccgcccttaataagct

SEQ ID NO: 32529 - DNA, 368 bp, Mus musculus
  source 1..368: mol_type = other DNA
ggtggcatatgcacccctctcttgggccaaaacctcatggtcccaaaagtgtcacaggatggatccacttattcagtaaaatatggaatgcagaatgcagtgcctttacggatagataaggccctgagggtaacattcacggccacctcagcccagtctatcggcctaggcggagccaaatccgacctccctaggtgggcggggagttagagacccgcccccgcgcagagctgagagttgcgctgcgcggctccgcccctcttcggccccgccccccgcggctttggccaatggtcgccaccgcggcgcggccgtccgcggtctgattggtcagaggccggcagaggcggcgatcccggcggaggggg

SEQ ID NO: 32530 - DNA, 451 bp, Mus musculus
  source 1..451: mol_type = other DNA
aagagatctcgctttccactgtggaggtgaacatcacaggtcatagatagtgactttctctgtttccaaggtctaggccatggaaccaatgcccctttgctgaataactaatgtcatccccaaaagtgttatttaattgagaattccaagggtggatgccttcaggcatggctgaaaccagcatgctggcttcacgatactgcagtgagccacgaggatggtgcttccttctgttgtgtgaaggcagccttgccatgcctcccgagactctgagcacgtatagcctgtcctcattactttactaaaaggttcccacccactgtgggaggagcagttttcctaggaggtgtggtcttgggctgcctaagaaagctagcatcctttatcctgtccagacctctttcaaggatgtcctggactctaagtcggagtgatttctctcagcaataaa

SEQ ID NO: 32531 - DNA, 228 bp, Mus musculus
  source 1..228: mol_type = other DNA
atcctaaatttgagaacatcattgatgaatccattttgaatgttctcgaaaaggatttattccatcctttttgattaactctttgccttttagtactattaatgataaaagtattcctagttcttggttaccaaccatggatctaaattattttcacagaaagtgtggaggcaaccttaacaaagttggtttagttgagttggaggtgatgtcacacctggtctgatt

SEQ ID NO: 32532 - DNA, 445 bp, Mus musculus
  source 1..445: mol_type = other DNA
ggactaatggcccggtgcacggctttaatcccagcgctttgagtgtggctgccctgcaaccctagtatactaaggatatactgcctagtagaatagtagtatcaacctgttgcgtcttcaaaaagtaagtattcaaaggtagtgtgattacaatcttgtgattatctcaggtttttgagaagcttaagtaatatctagcttggaaacattttctttttggtctgattttcctaaaatgactttttgttgccaacacattaccccaaacacctatttgcttttttaaaaaagattgtgtatgagtgctatctgcatgtacatcttcatgcaggaagagggcatcaaaactcactctagagggactctggccttaagctaaaagggagaaatggagtattttgcaattatttgaaaatagtccagataactaaaaatttcttgattc

SEQ ID NO: 32533 - DNA, 494 bp, Mus musculus
  source 1..494: mol_type = other DNA
aagagaaccagtggcaacccagtgtttctcagtcacaccaggcttaagcacggagttctcagtgtgagtgcacaatctctaagatatgctcatattattacagtattcatttatttaaaaaaaaaaactttatcattgccgtatatttatctcacatgcagaatccaaacttaagtgtcaaactaagtttctgggtggctcagctcttcaggacctcagactgctaagcttacagcctggctttctggagctccagccgcggcgtggcgagtctggccctgtgcaccttctagaggccccagaaaaaagatgaaaggcattccaataacatacttcattttctcccatattttcaaaatattattccagtatgtaatcaataaaaatgttacgagatcacattcttctttaggagaaggctttagcccatgtccacgtagacaagggctcagcaggcacagggccagtggttaccgctttgcattttggtcccc

SEQ ID NO: 32534 - DNA, 419 bp, Mus musculus
  source 1..419: mol_type = other DNA
ggccagcctggtctacaaagtgagtccaggacagccagggaaaagtgcatacactaaacttttgacgtttccattcccaagtaagattcatgaaaattgtaagtggctttatatgacaccttaaatctgaatgtgacaagtagaccaggaaacttaagttacttgggtggcttgtctctagaaacaattaacagttaactcttactaaatagcccatccaacgttatctgcagcatggctgcgacaggacaagcgtggcccttgaggacggcgttcccgtcgcacctgtgaggcgccatcccctccacgcccccgaagcagaagcgcgggcgccgtcaagccgcgcgttgtcgcgctcacgagatctcgcgcacgtcaccgccgctcgccatcttggactctggctgagccataaattg

SEQ ID NO: 32535 - DNA, 554 bp, Mus musculus
  source 1..554: mol_type = other DNA
ttgtctctagaaacaattaacagttaactcttactaaatagcccatccaacgttatctgcagcatggctgcgacaggacaagcgtggcccttgaggacggcgttcccgtcgcacctgtgaggcgccatcccctccacgcccccgaagcagaagcgcgggcgccgtcaagccgcgcgttgtcgcgctcacgagatctcgcgcacgtcaccgccgctcgccatcttggactctggctgagccataaattgcccgggccgcggtgcgcgtcctttctcgaggcgtgcctcgccggcggagggttcggagcccgcgttcccgtcgcggccctccggtgctggtgtccgcgtggcgcggagcgagggtaggctccccgcgtagcttctatccaagatggacggccgcggggacgggggaggccgcactgggggagcacgtggcgtgccgctcgctggcctgcgcccggggctgctgggatggtggcggagtcccgcggcctccagccgccgtccggcaaggaggccggcggaggcggggccgcggccgcccctgaaagg

SEQ ID NO: 32536 - DNA, 696 bp, Mus musculus
  source 1..696: mol_type = other DNA
gaaatctccccactattttaaacgaaaaggccattttcttaaaaggagataggaatagcaaacgaaactttgatccactttccaattactcaagaagtggggtcccacttgtctgggtctccttgggatcttgctggggtccgagccccagagaagatccacccagcccaaggaggccggcgggaacctccagcccagggagcgaggaagggatctcaccttgctgcggtcctcctcctgctgctccagcaactcgggaaccgcggccatggcgacgcgggcctcgagcaggggccgtggaggctgggccgccgccggggcgcctttcaggggcggccgcggccccgcctccgccggcctccttgccggacggcggctggaggccgcgggactccgccaccatcccagcagccccgggcgcaggccagcgagcggcacgccacgtgctcccccagtgcggcctcccccgtccccgcggccgtccatcttggatagaagctacgcggggagcctaccctcgctccgcgccacgcggacaccagcaccggagggccgcgacgggaacgcgggctccgaaccctccgccggcgaggcacgcctcgagaaaggacgcgcaccgcggcccgggcaatttatggctcagccagagtccaagatggcgagcggcggtgacgtgcgcgagatctcgtgagcgcg

SEQ ID NO: 32537 - DNA, 328 bp, Mus musculus
  source 1..328: mol_type = other DNA
aagctcttctgcggtcttcgcaggcggaggaggggcattcgctttaaatctgcgttcacatgagatgcaattagctttttcttgagtcaagggttctagatgaaggaagccttaagttctcaaccccgtgggggccaactcgtgggagaccccagctcccagtcgggctgcattaaagactttatcctataaagtgcatgtgatagatttgaaaaatgttcttccttttttaaaaagaggaggggggataaattcttttgcaaacattcatgcctaaggaagggctggatcaggcagccccggccgccggaaccggtcggacaggtag

SEQ ID NO: 32538 - DNA, 555 bp, Mus musculus
  source 1..555: mol_type = other DNA
gatttgaaaaatgttcttccttttttaaaaagaggaggggggataaattcttttgcaaacattcatgcctaaggaagggctggatcaggcagccccggccgccggaaccggtcggacaggtaggcgcatgctaaggcataggtgtcgccgagcccggaggctgcgagtgggctccggactccaggagcggggggacccaggcgccaccgccgccactagcggggagcagcgggaggagggggccaccatgcccaaagtcttctctgtccgcagctgggatgagctcccggtgaggagcgcgggggccgggcctgggcgcggggctcccgggtgggggcagggtgactgcggccctcctgctcgggatcagggctgcggttcccacccctactccgtctcggtcggggtcacagcggtgtggggagccaggatctaggctgggaaacctgggacccccggtgctctctccctgggtggaaggcactcggggttcccttgccccctacgggagcgaggagacgagggcacacccgcctccacgggcgcgagaggaaa

SEQ ID NO: 32539 - DNA, 320 bp, Mus musculus
  source 1..320: mol_type = other DNA
gtttgggttcacttaacagagaacgtaatcaaggcctgaatgagtcattggcatcacaaatacttaaaagttctgggaagccaagtgcaaatgacaccatccttagcctcttgtgaactactctgacacaaggatcttacaagcattcctgaaaggctccaaggccaggcatccgcctgcctctgcctcgggagtggtgggattaaacgaagctagtttgagctgcattttagactctaagaaaatttgggtctttcctggtgaaggcacgctcggcgctcgattgctagagcctggcgacgatagcacttgcaacggct

SEQ ID NO: 32540 - DNA, 305 bp, Mus musculus
  source 1..305: mol_type = other DNA
gtttctcagtgaaatccaagtgagaaccgctatgctgtgcacagctctgctcaatctgatcctgcacttgtccacagctcaggatgactgagctggctgtgcaccccacaaaaaagcccaggtttctctggggtgatgtggccatgttggcccaatcttctcagtttattcttccctgagctttggagaggagtctcaacgtttttcaaagcatccaaagacaaaatatatattgtactggcttcaaacccttgtgcagctcctcgggcacgcctttcgagcacaactggtgtcgcggggcatgc

SEQ ID NO: 32541 - DNA, 429 bp, Mus musculus
  source 1..429: mol_type = other DNA
agttaaggcactcactgaacctacttggattcgacgtttcaagctgtcccgctgctctagagcttctgaagagttctactctccctaatcggggcgggggggtcgcccagacacccggcaaccccgctcccgcgtgctcgaccagtctaccccagcctctccccgcgggactgagagagaagggggtcccgctacccagctgactgctcgcttccgcgtccggcggtggaggcgcgcgccggggaccgaggcatccggtcgcgctggcccgtgctgtgcctgctccgccttgctcggcagggtcgccggacaagagcctctggctccatattcttggacacctacaagaaagtcgggtaccagacggaggctgcagccagagactgctgatgtcgatttccctgccaatcatctgctcggctcccgatg

SEQ ID NO: 32542 - DNA, 414 bp, Mus musculus
  source 1..414: mol_type = other DNA
cttgttctggaaagcgagataattagaattaaaagacgaatttaatgcctttttggattcttccagattatgtagagggattcgcctaccttcagatagctgaaaactagatgctcacggttagctattagctgctgcagcctggtgtcagtgtcatgccaccaggacccagaccctgcgtcatgccctcggcctcgcgaggcagtcagaggtttccacagacgctgcgaaccgcgccccgcccatcgggagccgagcagatgattggcagggaaatcgacatcagcagtctctggctgcagcctccgtctggtacccgactttcttgtaggtgtccaagaatatggagccagaggctcttgtccggcgaccctgccgagcaaggcggagcaggcacagcacgggccagcgcga

SEQ ID NO: 32543 - DNA, 302 bp, Mus musculus
  source 1..302: mol_type = other DNA
tggctcaccagggtcacttacttaaaaataaataaataggtaaaatgaggcttgctctcagattctagcagagaggtccctgaagctcactggctagctaacactgactgaatgtggtgacactcctttaatgagttctaggccagtctggtttacatagacagctccaggcctaatgaaactgtcttaaacaaattaaggaaagttcatttgaaaaaaataaaccttccttaaagaagtattggtacaactaataaaaatcaaagataattaatatttgatggtaattcacagcttccgca

SEQ ID NO: 32544 - DNA, 362 bp, Mus musculus
  source 1..362: mol_type = other DNA
cttaaagaaaagtttgcattactctttgaataacatgtcttatttatttatttttgccacttgtaagaaagtgtaaaaatgacacggactctgatagtttccttaagtgtctgaataagaccatcacttccttgctggggaatggtcaccagaaacagtttttattgagcttgctgagctcaaaagagactctctgcgcaggctgagggcctctccgcttcccggtaaaatttcaggatatattcaagaaagtatgtatcctgaggaattctacattctaaagtttgtttctcgggtcagccagagaagcgctctctgattggctagagcatggcgccgcgaaatgacgtttcggagcggtg

SEQ ID NO: 32545 - DNA, 410 bp, Mus musculus
  source 1..410: mol_type = other DNA
tgactgctcttctgaaggtccttgagttcaaatcccaaccacgtggtggctcacaaccactggtaatgagatctgacgccctcttctggtgcatcagaagacagctacagtgtacttagctacagtgtattcacacacataaagtaaataaataaacaaatctttttttttttttaagacaagtttaaagatgtgtgcgggtttctctgtatagccctggctgtcctggaaaccaggctggccttgggattaaaggcgtgcgccaccacgcccggcttgcaaacaccatttcaaatactgtctgacaaatggagggcaggccatctgctccccagcatatagtacacagtgcagttgtcagctgccagctgagcgactatggactacgagtcccaaaatgactgttgcag

SEQ ID NO: 32546 - DNA, 405 bp, Mus musculus
  source 1..405: mol_type = other DNA
caaataacagttctatcaaattgctttctaacaaatgcttttctgaatctgctatttttttttctttgtttaattataaacacatggactaccactggactatgaagatgttattttttagtgatgaaaacttagtacagtaatagctatacagttctttgcagccatctctaacaaccctatgatagggctaagtattagatttgtattaggaaggaattagaattctagactgatagacctattaactattgtgtctaaggtaaatcaatagttatgtagttaaatggctatgttagcagcaggtccttttgtttttagcaacaggattgctgctgaggctaccgcagctctcggagctcttccggtgttgccggtagagggcgccggtcgaggagccaccgg

SEQ ID NO: 32547 - DNA, 395 bp, Mus musculus
  source 1..395: mol_type = other DNA
gcatttttaaaaaatagaattctagagttaatattgcagacagttttgttttaaatctattcaacagggacaactaagtgtggtgtgctaacaaatgtagaatgcttgaattatatcatcatcatcatcttttggtttttcaagatagggtttctctgagaaacaccatggctgttggtgtgtgccaccacacttggtaattcatcaccatggctcagagcaggggctgtggtgaaggatttgtgacttaggcattaggtacttttaaagaaatcagaataactttgttccgaagcctgatgcgccagaatgagattgcagcacacacattagcctcagcctgaggcctgagccttgcctttgatgtcacaatctgacctgtagccattaatgtg

SEQ ID NO: 32548 - DNA, 341 bp, Mus musculus
  source 1..341: mol_type = other DNA
taattataagcacatacaaagataaggtctctattccttttccaattctgggcaaaacaagagtctctttgaacacccttaaggctttggagagtagggactggtgccctgcggcagcacgcgtccgaccccagggtgtggaccgcgcctatgcttgcaggttaggtaaacttttcgattccccctggtaacccggcgattgcccgagggtaggcgggaccaggggtcgcgcaggcgccttggctcgccccgactgggtcccagagaagctgggaggggaccccagaggagatcttcagaggggctgggcggaggcacacaaagcctttctctcctccctc

SEQ ID NO: 32549 - DNA, 296 bp, Mus musculus
  source 1..296: mol_type = other DNA
atgccctggcttgtacatgttatagcaagtgtgtgtgtgtgtgtgtgagagagagagagagagaaaacctgtacagtttcactggctgtacagtttcactgggtcaagacacacctgtctcagccaggtctcttgcgggaaaaaacagagggatttctccccttgcctgcccgggaggagagctaactgagggaatgctgacctcactcccagttctgcgatctgccatatgaaatctataagctttcacagcagattatagtcaagaccttctacgtcagctgctggcagagggg

SEQ ID NO: 32550 - DNA, 615 bp, Mus musculus
  source 1..615: mol_type = other DNA
ggtggagatctgtctaagggctgtgcaccgggctccctccccccctccccgcggtgctggccagcgactcatagcatcccgggcgctgtccccctcccgtgcgcagcccccctgccgccgacccaccgtggggtacgggaagctgcgctagctgttggcgcgctccggccgccgctcggctccgagtcccccacccacccacccccgcgtggacactggagtgcgaccccgagctgcactcccgcagcctgaggtcagggcctgcttcgggtggccagcggccggccctcctctcgccggtccccccgccgcccccgcctcccggccgcccccgccgccgccgccccaggccgaacgcgggcgcggagcgtgggagccatggcgcgcgagcccccgagcgcagggaggcgccgggtgggaacgcagcgaggacgcgcggctgctgcgcgcagggctgcctcctgccgccgtccccgccgcggccgcccgcgacccgagcggacgccgcccgccagggacgccgcccggctgtccgaggatgccgccgccgggcgaccaggactgcgcgcgccgccgcagccgccgccggcggagggaccttctgctgagccagct

SEQ ID NO: 32551 - DNA, 433 bp, Mus musculus
  source 1..433: mol_type = other DNA
tctcaattcaaggctagcctaggctacatggtaaggctggctcttcaaggctagcctaggctacgtggtaaggcctggctcactcaatgactcagttaactgatcaatgaaaactacagctcaggtagaatatttacatagtgtgtatgaggcctgggtttattcctagaatcttgccaaatttgaatttgtaagtactacacacacacacacacacacatatatatatatatatatatattttttttttttttttcctgagacagggtctactctgtagccctgatccttgaaatatttcttttgacaaaaatgagtttggaatgttgagcaacccaagctgggtgtcagaatctttattacaatactgacctctttttaaaggggacttttttcctctggttagaggaaattcacagagccaagatttaaa

SEQ ID NO: 32552 - DNA, 376 bp, Mus musculus
  source 1..376: mol_type = other DNA
atgtaattcctaatggttaactttcaacttagacatgagataatgtttcatttggttattttcatcttgtatgcgagacggtcacactgggttttcgaggcggattacaggtgtaaggcatctttaatcacacatttattaaaatcagcatcgaaaacaaatagttctgatcatttttctctcggattaaaataaactgcaaatatatggaccagatttcaaagtcttattgccaaaataagataagatattcacattttttatacagataatctttcttttctaaataattttaatgtgctagaaaatttaaggtcaattttagggatcacttcgattgttgcccagcaacctctgacccaccccatggcggccg

SEQ ID NO: 32553 - DNA, 333 bp, Mus musculus
  source 1..333: mol_type = other DNA
taactttatcttgtgtcaagctgtcaaaaacttacaataattacatgtggaaataagaacttgtctcaagacaaaatggccaaatcagacttagatttgacacttattaagtattgatgaagtatcaaccacagttggaaatataacaatttactatctaacctaaattttagttaacttttcacaaagtttaccctcaagtccgcggcacagagatcgctgtctcgaatctctggtgcccgacaccgcagatgctgttcgggttcccggccgccgtggaggctgccatgactgcagccgtggaactcgagcgatcctggcaccagtcagggg

SEQ ID NO: 32554 - DNA, 403 bp, Mus musculus
  source 1..403: mol_type = other DNA
caattttgctgtcaattccaaaatttttattttaaaaaattatcttaactatatgctaaatcactgtttttaatgtacttcagatattatacgtactaacatctagcgagtattgagacagatttttttctttaatcttaaggaaatagatacttttatccttttatagctaaggatattaaggataagctgagttcgaggccagcctggtctacagagtgagttccaggacagccagggctatacagagaaaccctaaaaaaaatttacagactaaaaatttgatcagtttctgtattgtttcaaaaatacctcttctgattttttttttaaaaaaatccacatttcaagattgccctcgccgccagagccctactgcggccggcgtttcccctgactggtg

SEQ ID NO: 32555 - DNA, 642 bp, Mus musculus
  source 1..642: mol_type = other DNA
cctgaacctgcgtaacttcagatattcaagttccttttggaagccagccagcaggccagggatgcagcctcgcatccgagctccaactcgagagaagctttcgaggcccgccggcaggttgagcccgtgagcccagacccggcgctccgccgaagcccgctggctcaacgtgtctctctgaagcccgggttcccgcggccagagcacggtcgggccactggctgtccgcgcgcggagctcccgcgcccttctcccgcagcagccgcggccctcgggtcgcccctgccccctcgcgacccgcgggtaatcctcgcgcgggaggggggctggacgggcccatttggcggctccgcgccccccggaggagacacacaaagcccaggcacgtgcgcctccccatagaggagcagcagacggcggggccgggcgtgtgcctgggccaggcggggcggcggcgccgggcgcggcggggcggggcggggcggggcggccgaggggcgcgcgctggggccccgcgccctcaggtacatctgccgcacctaccgggcgacccttccgtcgccctcccgccctcgtcggcggaggagctgcggacgaagcgggaggcgagaacaatggccccctccccccgttaaaagggag

SEQ ID NO: 32556 - DNA, 598 bp, Mus musculus
  source 1..598: mol_type = other DNA
atcactgtgaaaggataaaatccatctatatttggtttcttgccccatatataaaagttctaatgtctgtcctgacaagctgttggaatttttactaaataattaaagaaaaaaaaaactcctaagaactgaattggttgaactttatttatacagaggctaaaatatacatagaaaataacagccatcattatttcaataacattgatcatcatcaactttaaaaataaaaagttaggaaatataaacatttatcatttcatttttttcttttatttttaagaaatgaaatgttttcttagaagttaaaaaaaaaaaaaaacgagaaacgccgagtcccagcgtctccaaaggtcactgaaaaattagacacaattttaaactgggtatgaaatcttcatttcccttgaaacagatttttttcttgtcttagatagaatgctggcagagcgtataaaagaattcaattcacagctgttctactttttttaatgtaagaaacattaatcaaagctttaagttataagcttttctcatgttgctccaacaaagatcaattctctcgaagcagaggcgtgaggagctctgcacctctgcc

SEQ ID NO: 32557 - DNA, 412 bp, Mus musculus
  source 1..412: mol_type = other DNA
gttccccggaccagcggcttgctggggccatacacggagggccgctctgtggtgacagccaagtgctgtacagaatgagcatgctcataatgagagagcaggcgcctctcactgacaggagttcagcctgcagcccaggagccagctctaaggcctagaggggccacttttgaaagattttttctaagagtttctaagggaaattctagcatgactggtgtgactccatccctgaagatacaggagtgggattgttttaagacacacagagtgtgagacatacagaatcatgtttctttgcagcccaagataaaactctgggttttgtgttcatgaagaaatcgcacaatttttcaaaataatcaaaacacatcctttaacttttgcatcagtaatgaggaagggaaaatga

SEQ ID NO: 32558 - DNA, 214 bp, Mus musculus
  source 1..214: mol_type = other DNA
aggaaagtgacagccgctttggggctttgtaattataagaataaacactaggtaccagaaaacaatctaattatgcatattgtgcctactgctgtgcattgctgtgatcactcctgcccacaggctagagtacttggcatagcatgcaaatgatttgttagccctctcaatagtgataacaatataagaaagtactcttagcaagcagtgccaa

SEQ ID NO: 32559 - DNA, 464 bp, Mus musculus
  source 1..464: mol_type = other DNA
aaacatgtgattctaaggtgcctctttaggtacttgctaataagatgataataaacaattatatagtcagttttctggtaagaaatcatttctggccttaaaaagcatgttggcccgagagccatttatttactttagtgtgaaattagagatcagattttgtttgtcttgctccttagtgtgaatccagaagtaaaaaaaaaaaaaaaaaatctagaaatagttttcaaaatttaaaagtcctacagcttttcttgtggggactacagttcccgggagcacttgcggcccatataggggcgggagctcgcggtcctggttgcgcagactcgaagctgggcgcgcgtccccgcgaggttcctagcctcaggctcctacgggatgtgcgcgtgcgtcgcgccggagggcggaccagaggcacccgtggggcggggccgagggtttcgcatcgacaccgcctcccc

SEQ ID NO: 32560 - DNA, 236 bp, Mus musculus
  source 1..236: mol_type = other DNA
gactacaagtacgtgtgtacatttagtgggttttagaatccagttgtctttcttcaggaagccttttgctggaggcaagaataaagactgattctgttctgggtagttcctctgaactgatctaaggttaagttagtcttgcaaacggtttgattcacaaggacctagttagaaaccaaatctttctccattccagcagtgctggtatcaaaacaatcttgggccgctaggcgcct

SEQ ID NO: 32561 - DNA, 582 bp, Mus musculus
  source 1..582: mol_type = other DNA
gccaggctgttatttactttcctgcctgctgcatgcacgtaatctaataaactgctttttctgtttggagaatattttttacactggtgattaaataagaaaattctttagttccttgcctaagcacatcacaggtactcaataaatgctagaacgtgatattagcaaattttggctagactcagcagtaaagcgttcatgcttgctggcagccacagcaggctgaatactgctgtttgtaactagcaggggatttgaaacctctggcccatgtacatatacacacattgcgtaactaaaaataaatcttaaacatatttttaaaaagttgcttatgcaaagcagattttaaaaaaaaattgcaaaacacttgaggatgctttttcattagagtgtagatgcttctattgccacgcctttccaaagtctcggccacacaaggactttgcggctgcgggcctaatgtggccggcgctcttggctggattgccggagaaggcatccgccaggagtcggctctcaaaggccggcgagccaggtctacagctcgcccagccgggtgggacgtaacttccggccgct

SEQ ID NO: 32562 - DNA, 350 bp, Mus musculus
  source 1..350: mol_type = other DNA
actttgtactctaagttagaattaccttagaagaaaccaaaagctttgttttggtgacaatcctagtatatttttgtgttctccaaagacaaattgctaagctgaaccattatttctttataaacattgggagagccacttttcgtaacagacactttgaactgtaggtctatctaattttgggtagaagaggaattagctatttattcacccataaatctgacggtaaaatttgtaatttaacggagaactcgtttaaacgtaaaattctatcgcctatacaaagtatcatttctatttctaagattgaagattgtcaaacctttgaccatacaagcttcgatagaagc

SEQ ID NO: 32563 - DNA, 370 bp, Mus musculus
  source 1..370: mol_type = other DNA
catattttcctttttcatagttgaaaaatgtttgcactgaacaaattaaaacataaatatttagcattttcttataaaaaaagaaatcctctatattttaaagtgttctccacttgctttaagtgacaactctgccactcggggaggcacaggcaaccttcagactcgactctataataataattataataataataataacaaccgtggtaaggagtcctcctcgccaccggcgccgctggggtggggccagggcctaaggcctccagtcttggaggggcggcgctcaccaagtccactgctgggcctggaccagggggtgtgtactgcatgtgctgcagcgactgcgcgctgtgcctgcctggaaggt

SEQ ID NO: 32564 - DNA, 237 bp, Mus musculus
  source 1..237: mol_type = other DNA
ctagagccgcaggctcccgcccctcccttctctagaccgcccgcagagcagaaagtggagggccagtcctcttcctccgctaggaaactggaatcaattacttgacttgtcatttctagtactcatccttaagcaggagagatttcagcggctcagccttcaatttgttaaaacggctcttttcatatgtaaatactgagggagaaaaggctgttggctgggagcgcagagctcccc

SEQ ID NO: 32565 - DNA, 278 bp, Mus musculus
  source 1..278: mol_type = other DNA
cctggcctgtctgaaagagactgtctcaaccattatggtggaagcagcaagtctgcctttcctgcttgttccgtgctcctttcgggtcactgaaatcacctcatgttactccaaaggcactcctgttatgagtaagagtccgctccataagccactgtggcctcagggcagcaggtggtggagatatgactcccctacctttcctgaagtaggttaggaaggccatgccaattcgtgagtctccagcgtgactgtagagattgacgtggaggacacgt

SEQ ID NO: 32566 - DNA, 244 bp, Mus musculus
  source 1..244: mol_type = other DNA
gtgtgcgtgtgtgcgcgtcttcccccaacccccaccccgcaggccgcggccagcaatcaggccttctctttgctgggccaggacacacacgtgcctgaaatgtgtttcattgtacgaatacataaaaaggttgtgtccaagtttaggagctcagggatccctccctcacttcagcaaattaactgaattttataacgctgatcgatatcttggtaaaatattcatttttaaactagcgggctgc

SEQ ID NO: 32567 - DNA, 471 bp, Mus musculus
  source 1..471: mol_type = other DNA
gtacacagtttttctaaataggacagcgctttgcaaattggctggaaacccgagataaataaatctggcttgcctcgctttgcaggccaccaaggcggtacgcgccttccttgatcccaggtctctgggtccacggaagactccaccagggcgccagcacgcctgcttgcaggtcggggtcttggggctagctcggggcgcccagcggcaggtgcggaacgctagccctggcttcctctcagctgcccggggtctggggattggaggccagcgccagcgcaccgcgctatatcaccagccgctagcttcccgccgcctcccggcagctcgacactgccagcctcagcctgcaccggcagccccgggagcgcggcgacagagtgcacgcccgacggcgagtctcgggttccggcctcccagctacttcccgccgcaggccgcgggagagagagagggctgttaaattttaaa

SEQ ID NO: 32568 - DNA, 482 bp, Mus musculus
  source 1..482: mol_type = other DNA
gctaaagagaaaagaaactgaaattttcaatttttataagtctgcaccttggatttaatgccagaggcaaatcgctgcctcccgggtattggctgcagctaaaccagggcggccagaccacgcgagtcctacgcgcctcctgaggccgccccgggacttaactgtaacggggaggggcctccggagtacacagtttttctaaataggacagcgctttgcaaattggctggaaacccgagataaataaatctggcttgcctcgctttgcaggccaccaaggcggtacgcgccttccttgatcccaggtctctgggtccacggaagactccaccagggcgccagcacgcctgcttgcaggtcggggtcttggggctagctcggggcgcccagcggcaggtgcggaacgctagccctggcttcctctcagctgcccggggtctggggattggaggccagcgccagcgcaccgcgctatatcacca

SEQ ID NO: 32569 - DNA, 350 bp, Mus musculus
  source 1..350: mol_type = other DNA
ctataaacaacatgtgcacccctctgtgttcactaggtgaacacgtcagattcaccttcacagatgacacatcttatctgtccatactatgtgcgtttcagcagcaaagggcactgatgttgaaattgtggacacctggatttgggccaactatttcctattttctccatctcctagagagaagagtttgggactgctaggcttaccttagtctcggtcttggtagctaacaatataaatgacatactctgttgttttcactatagactaggtcagcctagacttctctgaggctaaagagaaaagaaactgaaattttcaatttttataagtctgcaccttggatttaa

SEQ ID NO: 32570 - DNA, 450 bp, Mus musculus
  source 1..450: mol_type = other DNA
catgtgtgtgtgtgtgtatatatatatatatgtatatatatacatgtgtatatatatatatatatatatatatatatatatatatatatatgaatgatgggaggcagatgcatgcatgccacagtgaaagtcaaatttcttttcttgtgaatcatagggataaaattcaggtcttcaggcttaagagcaagcacttttatccctgagccatttcacttgcctgaggttagttaaattccatgcagattcaatttaaaagtcagtttccctcatccctggactgagctaaaggacaatacaccggcgagctcttcggggcgcgcgaagggaagggcgcgcgccgggcaaatggagctcccgcggccgaggggcgcgcggcagcgcagggattggcgggtgctcccgggcccccgcgcacttcttaggcggagcggctgagccgagcgtgtg

SEQ ID NO: 32571 - DNA, 271 bp, Mus musculus
  source 1..271: mol_type = other DNA
tttgagactctcaacacgtcaaaaggaaccaagtaggctctattgtagctcatatctgtgggaaaggggtgatctctgagcccagagggttattagaccagcagccaggcttcctgagagtcttgcaagtctcagatacgtgtgtagaggtttaaacacaggctcccgcgggctataccggagagtctgggggttctgtggtggcgcctgcaggccacgcccgagggcctcgctcccttccttccttttcccgaacgtgcaaagagggagg

SEQ ID NO: 32572 - DNA, 239 bp, Mus musculus
  source 1..239: mol_type = other DNA
tccaaagtgttagactctgagtctaaaacgtagtttccttccagtgacaggccttggcccaggcgcctaagccttgggttagggaatatgacaaggcaggccaggttcattttcccatctgaaaactattttcacctttttaaaaaatatatatattctcatggagattgacattgttggaaacccagaaattcccaatacttttcgccatatctcttggatcctctgtgcacactctg

SEQ ID NO: 32573 - DNA, 388 bp, Mus musculus
  source 1..388: mol_type = other DNA
gtgtagcaaaacagtttatggcatataatcatcaatatctattgaagtcatagtttaaactaacttcaccttgtaagaacttttatttcaggtaatttctacttgaagaaagacacggtctgtattaagacagaggaaagcactgtttcgctaaacttcgtaaagctttaccgggaactggtaatgaccaggttttaattaagatcatgagtgggatttacagcaacctgctgaccaatgcctagctgcgcagctggagaccactgcggtgttctgcgcaggcgacggccggaaccgcctttgcagctggaggtgcgcgcgcagcgccttcctagcctacggggggcggagcccactagggggcggggcgcgctcgtggcgaccaatc

SEQ ID NO: 32574 - DNA, 338 bp, Mus musculus
  source 1..338: mol_type = other DNA
cgtttcttaaatctaaaaacaaatgtttagctctttgggttttgatacacgaagcagtttcccaatttcccacgcgaaatggctccatttctatgctaggtatctagacagctccagattaaaaggaaactcaatttgcactgcatagaaacactagactaaaatttgttctcttataagttctaaggttcagtccaggcatcaaccagtgaagctccacgttgaagcttcacgactagcaaagacagatatctcttatttctaggatagtgcctaacccggaacctagctcgcgtagctgcccgtcgcggggaggcgggagtcgacgggaaccggga

SEQ ID NO: 32575 - DNA, 475 bp, Mus musculus
  source 1..475: mol_type = other DNA
ctctgaaaacaggcttcattttcttagacaaatcatgaagagttttaaatcatcagaaactctcattagtaattctatttgctgcaccacctaagaattagaagtcttcctggcagacaggaattttgtcagagttcactggcttatagccatttaatagaattcagtcaataacaagagatatgcaatccatttttcttaaaatcaactctgaatttatattggggtgatgatgcatttttaatgtcttgctgtcagaaattaaaaatagcactaaattgagctgaactgctgcattagattaaattttgcagtattgaagtctacctccaagggtccaaggcccaagccccgccccttccccctcctccagggagtccgggagaacgcccggccctgcccagcagcctgctggccgaaaggccacgcgtgccgcgcctgcgtgtccgcacctgctggagggagggctaagtcg

SEQ ID NO: 32576 - DNA, 275 bp, Mus musculus
  source 1..275: mol_type = other DNA
tggcacacacctttaatcccagtactcagtaggcagatctctgtgagttccaggccttagcccagaatctcccagctggagcatgagacatgtgtgttgcatgactagttttagtttttaacgtttaaactttaattttgaaataatatgaaacttacaaatagactaggtctctcaatgaacctagacttcacagcggggcaaaacattagggtactgtaatgacctgcagcggttacctcacaaagctctgctgggtcataacaggattacaa

SEQ ID NO: 32577 - DNA, 253 bp, Mus musculus
  source 1..253: mol_type = other DNA
actttataactgtaattttgctactgttatattttgtcctataaatatttttggataaaagattgccaaaggggttgcaacccccaggttgagaaccactatgtaaaacatggagtcagcattgcctggaaacagtatccaagaagaggctagcttgacttccagtaagggaagagcagccacaaatatgtataaacgtgtgtgtgtgtgtgtgtgtgtgtgtgtgtgtgtgtgtgagagagagagagagaga

SEQ ID NO: 32578 - DNA, 395 bp, Mus musculus
  source 1..395: mol_type = other DNA
aaatattctagtgtaagatggtaactctatttgactgatgtcaaatgtggcaccagagactctctaaaagcagagaattactatgtgcaaatttaacactatgattacaaaatgaactgttctaaagcagagactattgtccatatttaacaataacaatacaatagatattctatgattatggtctactgttttgaaatcagctgagattataaccaaggacccccgccccaactgttggccttgaacttggcaggtggtgtgtgcgagcaacaactgattccatttcccaggaatgagttcaccagatttccaggagttcctctgactctgagaactctttaggctagtggtctgtctaggcaaagcttagagggcctggtcagggcctaaag

SEQ ID NO: 32579 - DNA, 427 bp, Mus musculus
  source 1..427: mol_type = other DNA
cactgtctccttcaaagttcaaatgttctggtctcccaagaggtggagaaccatttgaggtgaggcacagtgtggagcatttctccagagaaatctgccacagggacaaatggcagatccgggtgtggatgcatatgagcagatgcccctttcaatcagcttctatgcccatgggtactaggctgcaaagcacaggcactactggggtcccctgaggctccaaggtcatgagcatctgggttttaaatccaaatacataagattgtgtacagtttcagaattcagagtagtaagtgtaaactggttgaatttataatcctgaactctacatgcttaatacccatgagcctctggcttatgcccttcttaacactccagggcctctggtgggcagggccatgtgggatgcatcaccatctgcagctgc

SEQ ID NO: 32580 - DNA, 447 bp, Mus musculus
  source 1..447: mol_type = other DNA
tttgattatttaaagatgtattcattttattattttaaacaagtactcttaagttttttttttttatgtggagttaacattagaaaaaccatgaatacattcttagtggctagagctttgacaatgaattgtaaatgtacatttctcttctttgagtgatttctcacagatactaaagaagcattcagtacattactgttggccacaggtgtttaaatagagtctagtgtgtatactccagtgttatacaacatttctatactctatggtgaaaatactattaatcttcacagctgggggtgaataatcacccccctggaaattttggacatctatgatgtcacacatgtgcagccttagatctcagttggagcttgcctgctgtctccagccctctgaagagcttggacccacttcaaggtcaggacttacataactgcctgacca

SEQ ID NO: 32581 - DNA, 304 bp, Mus musculus
  source 1..304: mol_type = other DNA
tgaagagcttggcttcaaggtcaggacttacataactgcctgaccaactacctattatagttccaatttacaggatagagtagatagtagccatgggccatgtgaaaactcaccaggtgcctgtggcagagcctcttatcaaatggagtcattttgttgtgccttaaccagatatgtaaatgaaacacaaagctacttccacagaagataaacttgcaaggatagctacccactaatatgtatttaaccttggaccaatgctttcaaaagtctcatataaccttgaatgtgaccttaaggaaca

SEQ ID NO: 32582 - DNA, 348 bp, Mus musculus
  source 1..348: mol_type = other DNA
gtgccactattgcactagcagcatatcttgaccttttatcctctggaagagtgcatagaaagcactataaaaactactcagtgggaataatttttttaagtcagtcaataatagctctttgatatagagattaaaaaccatgtcacatatttatcacatctttatcatttgtctccaataaaggacaatatttaattggaactgtgtggagcttgagtataggacctcaaagctcaagaagatcaataaatctgatgcagctttgagtgtattcctgtgagtaaaatcactgccaacattttttccatataaccctgaaatagtgtcacacaatcagagtggctagct

SEQ ID NO: 32583 - DNA, 311 bp, Mus musculus
  source 1..311: mol_type = other DNA
cacaacgcttttcagtttgtcagttctctaaaaaaaaaaaaaaaaaaaagacaaggcttgattgatatatatatatatatatatatatatatgtatatatatatatatatatatgtgtgtgtgtgtgtgtgtgtgtgtgtgtgtgtgtgtgtatgtatatatatatatatatatatatatatagttttttttttaaagacagggtttctctgtgtaccaagctggtcttgaaatagcaatgtctattctttctcaattctggcattatagacatgtagcatactgtaaagtatcataacttcctgagtatt

SEQ ID NO: 32584 - DNA, 307 bp, Mus musculus
  source 1..307: mol_type = other DNA
cagtgtttaatattctagcctagagttacaagaccatcagtcttttgactgttgtccaagtatcgcagcagagtatggacatgctgggtagagtcagcgctcacagtccccaaacagtctgaaggcacactttaccatgaagacaaggcctcagtcttcttttaaagagaatgcgtaattatggccacaagagggcataattggcaccttggactcagtgttggtgccatctcctagaagcctacaccaggatgctcattcaggggagttccctatagaaatcaagttgctctcaaaatttaagggt

SEQ ID NO: 32585 - DNA, 241 bp, Mus musculus
  source 1..241: mol_type = other DNA
aaccagagatgtagaccaagctggtcttgaacacagatctatagtttttaacctgtctactaggaagcataaaagacacatgggttcatcttagatggataggccctagcctggtctaggaagagtttctttaaggataatgagtagttacacagaatgctgcttattttcctttgacaagtatcttaggacagggccttcagggataaagactcgttagagagccttctctggtgaaacc

SEQ ID NO: 32586 - DNA, 485 bp, Mus musculus
  source 1..485: mol_type = other DNA
agaacacagactaatacttgattgtagtatatcatggttttgaggacatagtcatgagtttttagaaattatctttcctataagctatgtgttaagaattatatctacatgtgagataatatttaatatgctgttacaaaatatattgaaaaagtttcatctacttcacatattttaatgtgtctactagaaaactttaaagggaatataccatgttcatagcatttttgtactgggctgaatgctgcaatgtcacatacagggctcagtcataagttctataggctcaagcccagggagaaactctaggaagttcatttattgacttaccagactgtcctgttaagaggatctttgccctttatccagataaaggataattcagtgtatttggcaaagacacaggaaaggtcactggttgtttctggaaccaactaacatcctgaattctctttttaataaaacttgagctcaagattaaacag

SEQ ID NO: 32587 - DNA, 552 bp, Mus musculus
  source 1..552: mol_type = other DNA
aaaataggtcacttagcattttgtacccagcagaacacaaaactgtgctttttaagcaccatggcatgtgaattcacactttttttactactagaaatgagacgacagctgaaaattactattctctataacttatttttgagatgaattttgttatttgctttcatcccacatacctacaaaacaagtgtcctgtgagtccttagactcctaagagaagagggaaccttgtatttacccttcccataaatcccttttaaactttataaggaagaaaagaaaaaggtggaaggtatcccttcaggcaggagccctgatttcttattcacagagcttggtgcctccagcctcgctcaactgcagtgatgcatgtgtgtacaggtgtgtttcggtttatcttgtctaataagaagaaatgaaaaaaaatacagaaagggttagctgcactgtatttcactttttctatttatttcatgtatttacattccataccttgaatacaaacgtcatgttcactcaatgacctttaagtgaactggatgtgaagctagt

SEQ ID NO: 32588 - DNA, 339 bp, Mus musculus
  source 1..339: mol_type = other DNA
ggtgaattttcccttgttttgaaataattccttctctataaaatctgtaaggaaaacccaaccgtaggcggctctactagggtggggccacccgcagtgcacctacaatggtgttggtccgcagtgtccagagaaaccttctgaacctcaagtcgacctggagcctgggaggtagccgctatcacgcgagggcacagctagcctggagcaaagttagtggccaccttccccggggaccgcggccgcaccgggtcaccccagcccgcgccctttgtgctcctaggggccaagaggaccgggttccgcagccctctcgtgtgctcggggcagcccagggcg

SEQ ID NO: 32589 - DNA, 175 bp, Mus musculus
  source 1..175: mol_type = other DNA
gtgtatactgaatggaaaaatagtcaaattccctgtaatttaaatgctccgatgaataaagagaactgaaaggctgtattttaaatctaaaataaaatccaaaggtagatggctgtctgtcagagatgacaacctgacagatggcagaatacacatgtatatgcagaggtgtgta

SEQ ID NO: 32590 - DNA, 392 bp, Mus musculus
  source 1..392: mol_type = other DNA
ggaagccatctcatctggaatgctatctcagcagaaaagacctaggctatacattgatacatttttgtatctatacattttgatacatttattggttagatcacagataatgattaacaatagaagatggacattcgtccatcacttttataatttacaaaatgtttctgcatgactcttttaccttgtgatcaagttcagaagaggggggtaggcaaacctatatgtgaacttatcaattgactggagctttggaaagctccaaatttgcaatgtggcccagttgtgggtcttcccctgaccagggtgggggaaaaaggtggtgtgtatgtcactccagattcactagccaatcaggacatccagccggatctgccactccgggctcttcc

SEQ ID NO: 32591 - DNA, 447 bp, Mus musculus
  source 1..447: mol_type = other DNA
aagcatgtgatttattttaataaatccattttctacataatagaaagtttcgttctatcagttctgttcatctgaaaaaccttcactaacagagcctagggtttgtgtgcaggttgcctgaattcagcctgaaaccacaaaacaaaattttctttccaaaaatcttctttagttgtcaatattctggatacccatacacttttttaaatgatttatttatttttgtatatgagtataccattgctctcttcagactcaccagaagagggcatcagacatcccctgcagatggctgtgagctaccaagctatgcaagctatccagcttgattgaaagtacaattttgcaaagttgtctgcccataatggggagaaatgggcagctgagcagcagctgactaggtacactaggtagtttctctggcctgccactcaggagaagaggacg

SEQ ID NO: 32592 - DNA, 268 bp, Mus musculus
  source 1..268: mol_type = other DNA
atttgtctagcaaattaatttttaaaaaaccaggcattagagcttatttctttaaaattctgatatatatgatagactgattctatcagttctctttatctagagaaactttactaatacaggtaactgttaggcaaaaagtacttgcagacacaaaacaaaacacttgtttcctaatatctttcttgtaagttgagctcagcatccagaagctggagttgtggatcgtgcctgaagcctgtgcctggaagagaaggcgggcttttcc

SEQ ID NO: 32593 - DNA, 442 bp, Mus musculus
  source 1..442: mol_type = other DNA
ctacagcatgtgatttatttttaataaatccattttctacataatagaaagtttcgttctatcagttctgttcatctgaaaatccttcactaacagaggctgcaggttgcctgaattcagcctgaaaccacaaaacaaaattttctttccaaaaatcttctttagttgttaatattctggagatttatttatttttgtatatgagtataccattgctctcttcagactcaccagaagagggcatcaacagcactgcagatggcctatgcaagctatccagcttgattagtactgagctcagaaaaagtccaattttgcaaagttgtgaacacagggtcgctgcccataatggggagaaatgggcagctgagcagtcctctgagtgctactgaaatgcaaatcagctgatctgcgggcctgccaatcaggagaagaggatgct

SEQ ID NO: 32594 - DNA, 263 bp, Mus musculus
  source 1..263: mol_type = other DNA
aattttctgaggaattgttcaacaattcgagttctctttatctagagaaattttactaaaatagatgtcggtttttttgacactgagactcataagtattaggtgtaaaaagtacttgtagttttcctgaaccctgaagaagacacaaaacaaaaactcttgtctcttaatatacttggagctcggacagcttcaaagttgaaaagctctgcagatctgcaaaaggactggcttctgactgtgcccaggactaaaggcgggct

SEQ ID NO: 32595 - DNA, 297 bp, Mus musculus
  source 1..297: mol_type = other DNA
tttgtctagcaaattaatttttaaaaaaccaggcattagagcttatttctttaaaattctgatatatatgatagactgattctatcagttctctttatctagagaaactttactaatatagcaacaagaagatccacagtgtaactgttaggcgaaaaagacacaaaacaaaacacttgtttcctaatatctttcttgtaagttgacagctccaactttgcaacaagggaaaagctctgcagatctgcaaaaggactggcctctcctgtggcgggcttttccgggagctttcctggg

SEQ ID NO: 32596 - DNA, 484 bp, Mus musculus
  source 1..484: mol_type = other DNA
tggaacataatgaatcattctaataaatccattttctacataatagaaagtttcgttctatcagttctgttcatctgaaaatccttcactaacagagcaatatatgtgcaggttgcctgaattcagcctgaaaccacaaaacaaaattttctttccaaaaatcttctttagttgttaatattctggagatactgttggttgattttttaaatttctttaaaaaaaatgatttatttattttatgtatatgagtataccattgctctcttcagactcaccagaagagggcatcagacaccgcagatggctgtgagtatgcaagctatccagcttgattgctcagaaaaagtccaattttgcaaagttgtgaacacagggttgctgcactgtgctactgaaatgcaaatcagctgatctggaaccactaggtacactaggtagtttctcctgccactcaggagaagaggacgctcttcctgttact

SEQ ID NO: 32597 - DNA, 321 bp, Mus musculus
  source 1..321: mol_type = other DNA
cccagcctgggaggcccatgtgtctcctgggggcaagtaagaccccaggcatcagttctgagagacgaatataactgggtataggtaccgtttgagcccagagtgggccatgatcagtatctcagctctcacggtgctgagctcccagggggctattctgaatactagttttgaaatcacatcccgtgtgtggtgaatggtaggaaactgcctcctcccaccctgggaaggagagagggtgctgcgctccttctttaaaggaagtggttgctcttgtggccccaagtcctgaagatgaagcgcttctggttaaaaccacca

SEQ ID NO: 32598 - DNA, 446 bp, Mus musculus
  source 1..446: mol_type = other DNA
atggaatcatataacctgagatccctacagaactgtgttaagaaatctcctggcattctatcgccatctagtgccgaaaagataatggcatgtacctatatcactgtattaaaatttacatgtattgaagtcatggctctcattagttccagaaaggagggatttgcctgcagtctgtaccgtggaagcactacctggtggttgcttcatgattcctaaactaggtaactccctttagaaaatttatcaaatgtctattgtataaccacttgacgatctagcagtcaaaatctgatcttaaccaaaaggacacattttgaactttagcggaatcttttcagaaaagataacagttgctcactgagggagggaccccctcaccatttgcctgcagctgtaggctggggccagggggtggaggcggggcctgcattgcagctccggcg

SEQ ID NO: 32599 - DNA, 349 bp, Mus musculus
  source 1..349: mol_type = other DNA
caaagtttctttaaagttttgtgctttaaaaaagagcgctgactgctcttcagtgtacttacatataataaataaataaataaataaataaataaataaataaataaataaaaacagaccctataatttctgaatatattaaatcagaactgctacagcttattgatcaccagtaagcctggacaggttactgtactcattttacaaatggggcgattgagactctgctgtgcaccagagacacagcctgtctgtccctttgagttcagctcctcttgactcagactccggagcagttcttagaccgagaacttcctgcccacggagataagcagttccctcccagggg

SEQ ID NO: 32600 - DNA, 341 bp, Mus musculus
  source 1..341: mol_type = other DNA
ttattcacttcttaagtatttggtagagacacatttctttttactcttgattattcagtaacaaaaacttgaacttcatgacggagctagaggtcagcagctggtaagccacaccattgggagagggctttactctcagaaggtctcctaaggaggaaagctttgagttgctgaaccaactgacggttcatccacaccacctgtgtcccaggtccggaggctgggccaacgggctagccccggactgggcctacccacctcccggagtccctgtccaggagggaagaggaagctgcttctccgggcggagccggggcggggccgtggagactcttaggggc

SEQ ID NO: 32601 - DNA, 224 bp, Mus musculus
  source 1..224: mol_type = other DNA
tatcgatgctgtagtgctatgtacaacaaaactatgctttcccagccgatagacagggatgtcctccaggaacatccagagtctcgctgcagttaggagctgacaaccttgtggcttctaggaagacattctctattgtgaatgcatatcctatcacgaattcccttgaagtaactcctactctagtcatgcgcctgcgtggctggcaaacgccatggcactga

SEQ ID NO: 32602 - DNA, 393 bp, Mus musculus
  source 1..393: mol_type = other DNA
ctaaactcccttaatgattaagggattcagagacttatttttctttaacaaccagaaaggttgtgatgaatgctgtatacttaatttgcaaacattgatatgacttatgaatttttagtttttgcacaaacaacgttttacgagtcccagctcaagcgtgtgcacacttctctgaacgtttaacagagctcagctacacctgaggttctgtgcagagccagtccctgcagccccggaaactccaggaagtccctgaatggcaagagtttgccttccagtgtggcaggcgcagccactcttttgcctcatttccggctgaaacagcctgattgacgggcccatccacagggcccggccctctcgcaaagcgcaggcgcaatccgtatgagccgg

SEQ ID NO: 32603 - DNA, 428 bp, Mus musculus
  source 1..428: mol_type = other DNA
ttgaatcagccactctgaaaagtcaccattcatgagtgaacatgccaggtcatgaggtggctccagaaccgtctgctaatgagacaagaggcatctgacgttgctttctctagtagaagggattaccaggctgttcctgggaaagcacctgtcttccgtctctttcacggttctaggcattcccaagccagtgtatagtgcactgtacatgaggactgccctggaactgcctggtctatagaccaggctggcctcatcagtgggagtctttaaaaaatatagaaaaaggtacccgaaagttgacaggtacaggagctggccacttggccatctaagcatcaacagaaaaggcacccttcccatgttgcttagccagaggaagttatgacatcctccagcagcgggtccaggcaggagctgcatgtaca

SEQ ID NO: 32604 - DNA, 467 bp, Mus musculus
  source 1..467: mol_type = other DNA
tcaaactgattacatgcatgttgaaattacaaaagtaactcattagtaaaatgcatgccaaaacaaaaactattaaaagctacaacgtgtcctttcattttttttgaattattaaatttggatgtcagagtgcaaattcctctttgaaacggatttcttatgaagattcattttcttacattcagcgaaagaacgaggccagcctggtctacaaagtaagttccaggacagccaggaaaaaagtaaatataaacttgtttaaacaatacattagctacttttgttgagtatatcaaatctagagaacatctggggctctagctttttaggggcgccaaatgccctaaagagggtagatagggcctgcctcagttcgtaagagggcacctgagttgcacctacgctgctaaattggccgcggtggccgaccggcctccggcgctggtccatagcgggcgccgcggcct

SEQ ID NO: 32605 - DNA, 259 bp, Mus musculus
  source 1..259: mol_type = other DNA
gtatgggtgctttgcctctatgtatatctatgcaacacatgcacactggatcccttggaactagagttacactcaggaagaacagccagtgttcttcacacactctgcacagtggcgactatggcataccacatgtctggaattcttccacttgaaagtacttggcccctggcccagctccgccgcccccaaggagccccgccccttccctggggaggccccgcgagaacgagggggcggcgcccagaggccttgggag

SEQ ID NO: 32606 - DNA, 432 bp, Mus musculus
  source 1..432: mol_type = other DNA
cacaaaagttctgggattgcaggcattccaccatcagttcagaaccaattttaaaactgctgttatcattttccagtttgtgaatatttttaactgttttaaaatcaaaaagtgcctgcagagagttaactgttttcgtttaccagttctgcatactagtaatctcttaaggaaagttgtgagaattaactgaaatatatgtcatagttcctacgccggtaagagcactgactgctctttcatgtgtctgaagtcagctacagtatacttacatataataataaataaattactgtttaaaaaaaaaaaaaaaggtttctctttaatgttaaacaacttgcaatctaaagataataaaagaatgtgcactttactttgcttttctggctttattttcctgaagctcagtgaggttgctcaataaaattaaat

SEQ ID NO: 32607 - DNA, 440 bp, Mus musculus
  source 1..440: mol_type = other DNA
acatgttatgaaatactttctcattttctctgaataacttacaatgtaagaaccctaattcgaaagctcagaaccaggtctgtggcattggactccaaatttcatccaaccttgctagaaattacaggtgggcagctcacagccgccgcaactgcagctccaggacgacctcgtgcagacactgcagagactcccatttctcttcagttcttctaagcatctttcaaaggatgttcagatgaagttccgaggttggtgggcacactctcctgccccatctcctgatggagactgtgcggtcaccgtctggagagtttctccagtactgtcctctccataaaatttagtgtccgaatctcgcgcgatcttgccacggagaccccggagctttggaagggtcaggtgacctccgagactccgcccaggtgttcctgaccgcc

SEQ ID NO: 32608 - DNA, 273 bp, Mus musculus
  source 1..273: mol_type = other DNA
ttgtaaacattctgtaaattattggtagcctgactgtccttctgtcccagatcccagacagggagctgacctgggatgaccaccaatctggtgctgtgctgacctggggtagcagactatgccagaggagtagatctggtcctgcagatctaaactacaaatataaccacagtggaacactctttgccaatattcttctggataaccttggaatacaaaggtctttattctttcctgtattgcactttgccgttgctcctgcgcaaaggcctc

SEQ ID NO: 32609 - DNA, 266 bp, Mus musculus
  source 1..266: mol_type = other DNA
ataagagaggacaagacaagtcccttgttcatcagccctgaatgtcagcccagaattctggctccacagctcttggaaatatgctgtgatagcagtctttatctccaagggtttgtatgccaacaatagcagaggatttcgtttttgatggtccaacacattctgagaataaaatattgccaatattcttctggataaccttggaatacaaaggtctttattctttcctgtattgcactttgccgttgctcctgcgcaaaggcctc

SEQ ID NO: 32610 - DNA, 272 bp, Mus musculus
  source 1..272: mol_type = other DNA
taaatgaaggagccaattactgggccagtaggtcattgcttgccagtgactggccagccaggcaccacaggacagagttttgccggtgcctggagtctatacaccgttcttgttgtggtttgaattaaaaaaaatcccctatagaagtactatgtgaacagccacatgtaagtgtgagccaaaatgaaccattctgttgcttctgcttgggcacttggtagcagtgactgcagagtagctaatgctctgacctcacaaagaaccactgtgag

SEQ ID NO: 32611 - DNA, 425 bp, Mus musculus
  source 1..425: mol_type = other DNA
ggggctcttgcatagaccactccctgtgatattcattcattcacacattcattagtagtggcttcatgcacagtgaatgtggctcctaacactcaataagttctattgctggtcaccaacttaacagtttaacctgaggctcccagcttcacggagagagagctggccagcctgccagtggcaatgcaatgtgagacttatactagtttaagcaacaagaagacaggatactttgttttatctctgttattaatgcttcaaggattaatgtgcaaataaataattacatgagtaatttccaggatctgatttcgggactattaaggtgaggctcacataggggccaccagagctgtggcaccgcattgggcggagcctacgagcaggcgcccagcggctggacgcggtagaacggcgggcggaac

SEQ ID NO: 32612 - DNA, 412 bp, Mus musculus
  source 1..412: mol_type = other DNA
aggtggggttacaggtctgcaccagcaacagattaagtttttattctttaaagtactgaaggtattcaagcaaaactcacaagagccccatacatacatatatgacttttttctttttgtttggaaagtcgtgcgccccctctctatttccatatatttaatatatacgtattcgtggaagagtgggctttcacgcaggctagtgttaatactgactcaacctagggctttccttggttcagggcaattagttaggtgtgcgcaagtaactgcggcgtctccgaggcggagaaacggacgcgccttccgccgcagctgcatccgggggtctgtggcctccggacttccggtccctcccagggatgtgagcgcctcgcgcaaatagggcggggcgtgccgtgcggtgcggtgc

SEQ ID NO: 32613 - DNA, 339 bp, Mus musculus
  source 1..339: mol_type = other DNA
catgaacagccaggcgaagactgtcaatctctgacttctacatatacacacaggcaaaggcagtgtgtgtgtgtctgtgtgtgcccacacacacacactttgctataaggctcggtccctagcaactcaatggtgattccttcctgaaatgatttaataattgtgtcatcgtctatagatgactcctttaaccagtgatttctagattggttttactaaaagaaacaccattttctaagaaatacggtgaggccgccacagtcgtgctgacttcctcatagggccaagtagccacctgggcccatcctagtccacggtgagtcagctgaaaggggcggg

SEQ ID NO: 32614 - DNA, 311 bp, Mus musculus
  source 1..311: mol_type = other DNA
acccctaaaggattattcaaccccaaaggggttgtaaccctgagaactgaattccccccagcatcagagagaagaacctcctctcccactgcttacataagcctggggagggctctgtgaatcagctctctgcgctcagagctcaaaggcctggagacacaggcactagtgattcacactggctagtaaggatggccagcaaaccaacatagcatggtggaatttcatggacccggaccaattcaccagccttagcaagctgagttttaaaatcagcaattaaagtcatgctgaaatctgagattaattat

SEQ ID NO: 32615 - DNA, 306 bp, Mus musculus
  source 1..306: mol_type = other DNA
aggaagaaaccagtgtagtggtttgggtcatggtaccaaccaacatggcaaaatttatttgtctacaaaaaagtattggacttcaaactcttttctttatatcactcgcaaagtgaggatgggtaataaaatgtataatactggatctggaaattttgataaatgcattaaagtttagcatgtagaataaagctgcaggcatgctcacactccacttcgcagatgagaagtctactgtagaacagcctggcactcagcagtcgcctgctgcaggcaaaaattcggtgcaggtgttcccgtttccac

SEQ ID NO: 32616 - DNA, 405 bp, Mus musculus
  source 1..405: mol_type = other DNA
gtttccgagtcgactgtaaattcagtcaagttgacaagcagtgtctgagcagagactttgaggagtccaagaactggacgtctcggctgcttcaagaagggagccccttcctactgcacccagtggggcttatggcccagaaatgggagcgctagaaatccagcttcaataaggattaattcgcttttttaatactgcaaaggataacatttcttaaataccttcgggattttaagattttttaaggcaagagctgttcgcattaaataactcctgacatgaagctgaagggatagataccctttgaagtccttcccatcccccaacagctagttggaggtatgcttgttgatgtcttcagggctctcagagcgaaccgcagctgccggcgagctgccgactggc

SEQ ID NO: 32617 - DNA, 262 bp, Mus musculus
  source 1..262: mol_type = other DNA
gcatatgtgtgcacctgtggacctagagctcactgatctgctatacagatcttcatgtttgtaaaacaaactaattttaaaatccaatattactacaagcctttgactaattaaaaaagttctgaaaaaaaaaaaggttgtttctgaccatgcttggcactgaaggagtttgtcaaagctcccacccagctgtgggtggggttggaggacaaagcagagccgggctgtggggctgggtggtgtaccagcctcctcccagacc

SEQ ID NO: 32618 - DNA, 263 bp, Mus musculus
  source 1..263: mol_type = other DNA
ggtttgggtctccaaggtagagctgctgtgcagtttgaatgaacaattagtcaaaagagaaagttcgttattctaaagacattctctgtggcagcttcactgcgaattaccctgggtcctaggtcctttggtaagcaacacagtggagcagcagcctgctcacactcggcctgtgcacgtgcgaggggcgtggggctgcgcccgcaagggccccccgagggttaagcgccgcccagccgccgactcctccccgccccggccgc

SEQ ID NO: 32619 - DNA, 371 bp, Mus musculus
  source 1..371: mol_type = other DNA
attcaggagctagtgactagatgctagatgccgagtgatggtgggaccattctacccacagggacccttgagcacctacaagggtcctgcagcccatggtggcaggtggtcagcagacaggagctcctgatgtcctggatctctacagggcttggccttagagccatgtcctggaagtgctactagggtgggggtggggactttctgctccctcctccatgcccaggcaggtggttggcactgcgcagcttcctgcccggaagaagggaatggtttaagcaagaccattgcttccccctcagctgtgcgggtccccgcccactactggagggaaatggagtgggtgtggccacaagccttccagtacgtgc

SEQ ID NO: 32620 - DNA, 384 bp, Mus musculus
  source 1..384: mol_type = other DNA
ggaaagtggatagggaccacttcctgtctcctccctctggcccagcctctacctgggtacagaggtgctattcccgggcccctgggatctgagcgagggaacaggccagctggcacaaagctgtagtcagcaacctcaagccttgagagctcacagtggactgtccggtcccactctcatgggactgtggcccagccacctgctggcggtgggagggaaagcacccaggttggaccccacccccaacgcccggctgggtgcctgggggcgctgttccggctagtttcccaaaccgggccgtcagtcacccattgcggtcactgccccagccggcaggttcacctgccaggccccggaagttgcgcaaaagccggctacctgagc

SEQ ID NO: 32621 - DNA, 470 bp, Mus musculus
  source 1..470: mol_type = other DNA
ttcacagaagaataaagagacataaattagcatcagatataattattttagatttatttattccatatatgtgtgtacactgtcactgtcttcagacacaccagaaaagagatggttgtgagccaccatgggaagagcagtcagtgctcttaactgctgagccatcttgttacttttaaagtatgttataagtttaggttttaaataatcaacaggtttacatattcacagatggttaaaacatatctgttcttcttgtggatgctaaatttcacacatacatccctaaggaatttgtggggtatattcgtgaggatgaaactgcgaggtgctgccgccccgcaaaggaagcaaatgggtccttggatggtctggagtagtggtggtaagagcacttagcagtgaaattctaagaactacgcagcggcgccttcgcgcctggacttcctactcgagggcgcggtcaggaa

SEQ ID NO: 32622 - DNA, 310 bp, Mus musculus
  source 1..310: mol_type = other DNA
tattgtaaataggctatgtttatttaaatagtatggttatgtatttaatatctatctatgctgtacagagagttttgaagtatgcttaaaacatgacacttcctcctgacaagaattatgtagaaagctcgattcagcttctttcccaatctcctgggctaggctagaggccctgcctcttggtgcctgggcagccggaaggccaagcggccagctgggctccgggcagcagtcgccctgctgcatctgcggctcctgatgttgcctggcaacccgggtggcgcgccgttcgaacggaagcgccattgca

SEQ ID NO: 32623 - DNA, 366 bp, Mus musculus
  source 1..366: mol_type = other DNA
attctctcattagagagctaaagtgtcctggtgataagagctgtctatgtagccatctattgtgtagatacactggccaaaggcctcaggctgcttctgcaagcctgagagtctctgtcacagagggatctctaagagctaagagctgcagacagttcagaaagctgaaaggaggctgagttccaagacttgttggacactcccccttggaacaaggcccagacaccagaggcttgagggtccccccagagctgtgtggctctgccctacccctgacttgttcccgagggaaggagaggggcgaggtcctgcgggctgcaggcagtggttcctgccgggtcccgcctaccttcctgccaccagggc

SEQ ID NO: 32624 - DNA, 284 bp, Mus musculus
  source 1..284: mol_type = other DNA
tccaaggcatggatgagcaggagcccacaggaccggctgagcgaggccgtcatcggcatgggtgacccgctcctggggctctagtaggagcccaagctgggggcgttagatctgggcatccagattgccacttcagaactggggcagagggagccggccacaggcagagggtggtggctggccggcttactcttacatcctccccctctctctctctctctctcacacacacacacacacacacagacacagacgcacacattctgattcattctctctctctc

SEQ ID NO: 32625 - DNA, 309 bp, Mus musculus
  source 1..309: mol_type = other DNA
acaggaccggctgagcgaggccgtcatcggcatgggtgacccgctcctggggctctagtaggagcccaagctgggggcgttagatctgggcatccagattgccacttcagaactggggcagagggagccggccacaggcagagggtggtggctggccggcttactcttacatcctccccctctctctctctctctctcacacacacacacacacacacagacacagacgcacacattctgattcattctctctctctctgcccccaccgccggttcaggggaacctccagcctgcgtcccatataaagc

SEQ ID NO: 32626 - DNA, 320 bp, Mus musculus
  source 1..320: mol_type = other DNA
gttccttatagcctttaaaaaaaaaaaaaaaggccagcctggtctacaaagtgagttccaggacagccagggcttcagagaaacccatcagcttctcgaatggaatattacagcgatctactttggggaggcccttcagtaacactgtggggagttcctgacgctgagccacagcgctgggatccaaagcgatctatggagcggctcactcactcattagctccataccttgtgagtgtgtgttcagctagcagagagccgactcatcctctctgggcagatctgaccgcccgcgtcctcgcctcggagggcctgagtca

SEQ ID NO: 32627 - DNA, 373 bp, Mus musculus
  source 1..373: mol_type = other DNA
aaacccacgttctttttgtcaaagagcgtgactccgggaccccagtggccaccatccagacttcagtctgaaattcgggattcccagagtggtaaaaatctgcacatcgtgggcagagaaggaaaagttctttttgttctgatctttatcttcgttattaagtgactaaaagaggagagaaaagaagaaaagattgtcttcgcgcctagttaatggaacttgacagtctagtctgagaagcttttagttcaaagcctaggaatccagatctgcgctcctggacagctcaaacccagagcgtacggtgagggtcagaagctccggggccactctctacttgggggacccagagcctccccccggctataaggcg

SEQ ID NO: 32628 - DNA, 359 bp, Mus musculus
  source 1..359: mol_type = other DNA
actgaacctgtgctgcttttaaagaaatttaaacttcatcagctgaaattgagggagagttaaatttgggaatttctaagtttattaaatattagttttaaaaatcgaagtaatttcagagtcataaaaattccccaggagacttaattgagggacgaccctagggtggtgagggaacaccggtccttgcaaaagtctgcgcataaccgtggaacttgggcttgtggatttaatattttattttcataactaattgaataaaagcaaacacgcatgcgcgtacaagcggcttccaagcgagccccgcccaaccccgaaacgtaggtcacgtgggggcgtggctgtctgcgcgcctgcgc

SEQ ID NO: 32629 - DNA, 404 bp, Mus musculus
  source 1..404: mol_type = other DNA
cagtctaattctctctggttgcacaagagagaattttgagatgcatagagaaagtgccccgtttctaaaatcctatgatattctgaattgacagttctgggtaggattccatagaaggaatttctagattctaaactctagagtcacgactttcgttaatctaaactcccaagtttgaggattgaaaaaaaaacctaagcctagactaggggtccggggctcccaggatgcttcgcgcgaaaggtcgcgcatgcttcgggacttgctatcacaggttctgacttaaatgcgcttctctgttagaatcctattcggcgggggctgcgctaagtcagagcctccgagggcggggcgcctccgccttttccggctccgccccgcctctggttgggagggggcttccg

SEQ ID NO: 32630 - DNA, 292 bp, Mus musculus
  source 1..292: mol_type = other DNA
caggatccttctgtcctgcactctgtagaccaggctggcctcgaactcagaattcccagcctttgctagacgaaaagtcgtgaatctgtaaagacaggtcgggtgccaaggtgtttcctgcaggcttagcacgcgtggacgcgacgctcgcaaggacagctctcgaggagtgcacccgcccctagccccgccctcccagagctaggcgctgcctggagtcggccgggtcatgggtccctagaccaagtgactctggtccgcccaaccaagcgcgaaatgaccctgcagagtc

SEQ ID NO: 32631 - DNA, 270 bp, Mus musculus
  source 1..270: mol_type = other DNA
gcaccactctgagacagggtctctgctggctgctcagaggtggttataagctcccaccaccccggggccactgagttgggaactcagatcctacaggatccttctgtcctgcactctgtagaccaggctggcctcgaactcagaattcccagcctttgctagacgaaaagtcgtgaatctgtaaagacaggtcgggtgccaaggtgtttcctgcaggcttagcacgcgtggacgcgacgctcgcaaggacagctctcgaggagtgcaccc

SEQ ID NO: 32632 - DNA, 378 bp, Mus musculus
  source 1..378: mol_type = other DNA
acaaggccttctgagattctaggtgtgcatcacacccagctcttctaagagctttgagcataatgttcacgggaaatggagctctttgtttttggctttgtgctctcacagagccacaccccgagcccccttgaaagcagggtttctctgtgtagccctggctaccctggaactcactctgcagaccaggctggctgcctctgcccgactaccgggtagcgggtggaggggattgtttcctctattctcatttcatatacggggaaataggtagctccgatgtggccccgaaggtgagggcggagctcactcggcgacatgggcgggccgctgggcgtcagcagcacaggtttacatcagccgggcggggatccgagc

SEQ ID NO: 32633 - DNA, 227 bp, Mus musculus
  source 1..227: mol_type = other DNA
cgtgaacattatgctcaaagctcttagaagagctgggtgtgatgcacacctagaatctcagaaggccttgtgtctgagttcaaagccagcctggtcgtctactacccccaaaggcccagtgcctttcctgatacttgagtttattcaagtaaaaaacaaacttcctaggattcgacctgatccggcccacctggcggctggggagggatgatcagagatgtgagaac

SEQ ID NO: 32634 - DNA, 259 bp, Mus musculus
  source 1..259: mol_type = other DNA
tctctaagagaagtccgtgagagactaggccccgagaggacctcaggatctgtagagagatagggtctcatgtagcccaagctagcttagaactaggtatataagactaaggacgacctaatgctgggattgcaggcagtctgtatgtgtcaggggcacctggagaaatggagaccagtctgcagagccagcctccggggtcggagacactccacccccgcccgggattgtagcgcaggcgcgaagcaaactcgctctg

SEQ ID NO: 32635 - DNA, 619 bp, Mus musculus
  source 1..619: mol_type = other DNA
tgtcccttagggattcctttagcgccccaaaggaaaccattattgggcctaaaagggaggggctctaactacaaggtgagtctgtctccttaaaggcagggagtcctcccagtaagagaccgggaagaagtcctacctggcggcatgggcagcgctccacgctgcccagcaacggatgacgcgcagcgagcgcgaggcgtggcccggccgctgcccgagcgggcacctcggtgtttacacggggcggccccgcgcgcgccgcagcggcccgcagacggcgagggggaggggagcgagcgcgcctccggggccgcgcgggggcggcggcgggcgggcaagcgcgcgcggggccgcggagagccaggccgcgaccggagcccgcaggagcccacgaggctcgagtccttggcctgcgcggcgcgcggaggagctctactggcccggggcggcggggacgcgcggagccctcttgagcccgcgccactgacctccccctcgcacagacggcccgagcgccggctgccgcgctcccagctcgcgggggccgggccgagccgcggggcggggccgcccctccgtcgccgctgcctcctcccccaccgccgccgcggaggatgcg

SEQ ID NO: 32636 - DNA, 629 bp, Mus musculus
  source 1..629: mol_type = other DNA
cgcgaaggtgacctccccctagggctgcacgcgccgggcggtgctacaactggctcacacgtggtgagcctggagagcgaggcgcctccccgccacgcgcggcccgcagtcctctcggtcacgcccctaggaagactccgcccagggcggggcgaggcgctcagccgcccccagtggactggctgcgcgcgctgggcgagatccaggacgcgcccggggtgcaggcgactccgctccggagcacggtggcccagcccctaggtgctctagggagcaagctaggaccgccagactagctagaatggcagcgcgcgtcctgcgtgtcccttagggattcctttagcgccccaaaggaaaccattattgggcctaaaagggaggggctctaactacaaggtgagtctgtctccttaaaggcagggagtcctcccagtaagagaccgggaagaagtcctacctggcggcatgggcagcgctccacgctgcccagcaacggatgacgcgcagcgagcgcgaggcgtggcccggccgctgcccgagcgggcacctcggtgtttacacggggcggccccgcgcgcgccgcagcggcccgcagacggcgagggggaggggagcgagcgcgcctccgg

SEQ ID NO: 32637 - DNA, 284 bp, Mus musculus
  source 1..284: mol_type = other DNA
ttgaagtagcaatgggccaccccttctgccggcagcccagaggaggagggagccttttgcttgcttaatgctggtgggattccagcaccagccattatggacccagcaacttctagattcttggagaccatagcctatccagagttacacagtaagaaccctactatctctgtctgtctgtttcatagatgcaatgatcatatatacctgcaatccatgatggaaagtggggagacgaacatgtcatgttttctaatctccacgatatattcgatgaaatattg

SEQ ID NO: 32638 - DNA, 370 bp, Mus musculus
  source 1..370: mol_type = other DNA
ggaccccgccgactccgccgactccggactctgagcaagcaggaaaactcagtctgcctgcccagggacttagtttttgaccatgtatatgtgtaacttcgctgacctccacctgtgagatcggtatgtgatgagatctgggggccgccatttcttttgacagtgcgcgcaggaagcactgctctagggcgggcgctcgtccgcagaggggaggcgagccggggtcaagacgagccgtctccggccggcacgaattcccgcacgcaagacttccaagagggcagagcgggggcggggagtcgcccacgcagcccgcggccctcatccctcatcccgagcgggagcgcgccatgggcacctcggaccgcgg

SEQ ID NO: 32639 - DNA, 373 bp, Mus musculus
  source 1..373: mol_type = other DNA
agacttccagtggagggatggggcaatgtgtcctgcctacctggcccaatgcccctggctgtcctggaactcactctgtagtccagactggcctcaaagctgggacagctgagctttgagggacctgttctgcagggagagcttaccctgctccagtgttaataaagtggtttagagctcacgctctgttgcacagaaccagagatctgttccttacctaggtaagaggacacagacacacagacacgtgtgtttgatttttttttaatcttttaaaataaaagaacaagaagtataaagatcatctttttcttgccttattgctgaaaaactgttacttcactgctcattgcccaaggccatgaagaggcca

SEQ ID NO: 32640 - DNA, 273 bp, Mus musculus
  source 1..273: mol_type = other DNA
tttgcttctaaacaaaccaacagaagagtcttatctcagctctctctcttagaagaattagtactcttgtttcttccggattcaacatgtccaaccatttggaaagatacacttaaaatctctttataagtaaggtattaaagacaatttttaagcctactcaagagaaacctgcaacttagtcataaacagctttaataatgtcattagatttaaaaaaatagggatggctcatccaaaccagggagtttagttaaccaaaccgtgggctga

SEQ ID NO: 32641 - DNA, 357 bp, Mus musculus
  source 1..357: mol_type = other DNA
tcatattatacatacatgcatcatatacatgcaatgatgataataataaaagatctgggtttgggtcccagaacacacacacatatgagcattaaataaacatagatatttttaaataaactttaattttgaaaagactatctcagggggtcacctgctcaatcttctctgtgaaaaagaaccacatgcatatatagatacagatggcgatgccgaatttatatgcagaaaagtacgtataaagtgagctgagccctctgctaacacaggcgactgtgaagccctcgggtgtaactctccagccatgagagtgtcacctaagcaatggggctgagcctctgcattcagagacatact

SEQ ID NO: 32642 - DNA, 341 bp, Mus musculus
  source 1..341: mol_type = other DNA
taatttcctaagataaaattttggatcttggtttgtaaataaaacaaacaagcaagcccttttgttccacaggcagacagatctctgtgagttcaaggccagcctggactacatagtgaaataaaacataaaatataaaataatgaaaaatatttcacctttcccaatatactgtatgggaaaagacaatcatagtaaatctgctttcctattttgacgcattgagggcataaatgggactgacagccagagaacatactatgacccactggcactgttagatgtgtacagggcactgcaccccactgggtttgagggcaacttcctggttggcctgacag

SEQ ID NO: 32643 - DNA, 311 bp, Mus musculus
  source 1..311: mol_type = other DNA
acgcaatcaccttgcgtcttcacctaccttcccagtgatggaatggaatggaaggtttggctcctgccaagccaactctgccgctgaactgcctgtttgcggtgcctgcgctacacgctctgggcacacaggcacagcagcctgtttgcacctgcagggctctcaggctcacagttgtccttgaggccatgcatcccgatcatggtgagcatggagcagaaccacaagcatgcgctgctcttagcactgaccagcagagggcccttggccttcctcagatttattacccatgactaggccctaccttagtc

SEQ ID NO: 32644 - DNA, 342 bp, Mus musculus
  source 1..342: mol_type = other DNA
tcagacatatgcttacccatgggcatccccaagtcccaggggcatatgcctgtggggccagaggatcccctgctggtgccctggaagagctctgcccagttttactgaggaaacaaacatctgtgtaaggaactttaaaccttcttgcatttttatgatgctatttagttcgttcctttctagcagagaaacgtctagaaaagattcgcaagtttacattttctcactgagtgagtgacgtcacacatgaggtgccacctcctggagttgctgggatgtctcccgccccggcacagcacccccagctgggacctctgacctgacagaggcagggccctgctc

SEQ ID NO: 32645 - DNA, 399 bp, Mus musculus
  source 1..399: mol_type = other DNA
tacttaaagcactcttctaacacagaggtctgtcttccaaggctagactttgagaatagatcccaaggctcatctcaggtcaggctgtcatgaggaagaactggctggcttctggaccaaaactgcgttatattaagcttatgttgaagttatacaaagactaaatctgaagtctggtggctggagagatggtgctctttaaagagaccacagttcccaggacctgcatcaggcggtggtcaccatgccctggaactcataagtaaaaataagaaatcttttcattaaatccggagtctgatttttaacaggtgtggactccactgaattccataattcaatctcaagccaaggtcacaattgaattaattgtaatgtcactgactgcaaggaagtgcc

SEQ ID NO: 32646 - DNA, 201 bp, Mus musculus
  source 1..201: mol_type = other DNA
aggcctgtgtcaggtgtctttcccaattacttgccacttaatttttaagatagtgtagattggctggccagagatccggaaggtcactgtaacttggcttccaaatgtgtgccactgagccttgtgaatgttgggaatccaaactcaagtcttcacaatttcatgaggccggagactgtccttcggactggctgaccttgt

SEQ ID NO: 32647 - DNA, 403 bp, Mus musculus
  source 1..403: mol_type = other DNA
ggacagaggctgtgcagcaccgcacactcgggtcctctccataaaggactccagtgaaaagtgctttgctggatgagctatcaaggtagcactttggagtgttgaggatttttaaaatgtattaaacatagtgttctaattaattcttcgaaaattgtgtgcactcgtacaatgtctctgttaaaaaaatattttgttagtgtgtgtgtgtctgtatagtctgtgtgccacatgcacacagtgcccacagaggccaaaatgggaagagcacccagtgcttttaaccattgtgctgctcatagagccacagatgtggggccttcattggccttggccattgtaggaacagactgtacccgtgggcctcggaggacacgtgtctcagctgattataaggagcagg

SEQ ID NO: 32648 - DNA, 286 bp, Mus musculus
  source 1..286: mol_type = other DNA
gttgtttacccaaccttatgtgtggtggccagcggtagccagcgccaccttgtaatggcatatgtggcttcccacaggggtattataaatgctcttgaaggcattacgattatcaggacggtccagtcaggaagtagaattcatgtaaataactgagttggattccctgaggaaggggctccgcccagagcccagaccaaccctgtgcttggttagtgctgggctggtgctcaggcagagctgttggcaaagagctgtgctgccggggtacgggactgttcccgga

SEQ ID NO: 32649 - DNA, 336 bp, Mus musculus
  source 1..336: mol_type = other DNA
agcacttgctgctcttgcagtggacccaggtctggttcccccatgcacacacctggtgcatgagtaaatctaatgaaaattaaaaaaataattaaaaaaacagagagaaaaggacacttttcatcattttgtatcacttttgtcattgttgagacaaaatacttgacaaaagcaacctcctagctgcttactggatgctgttaagttgacagtcagtattgaccatcgcatgggaagatgctggatagaagcaggcctttctcacttgcacagcctctgggggatttggctgactagtccatgcagaggtagccatgggagaggaccacgtggcct

SEQ ID NO: 32650 - DNA, 323 bp, Mus musculus
  source 1..323: mol_type = other DNA
tgctcaaagagcttggatgcaggccttgcagccggcttcggaccactctatataaaccaactaacaaataaatgttctctatgtattatttttttaaaggggctagtcgtaagcaattggatgacgagcgacttaagggtatcagaatcaaacatctttactgtgcagagcccagaggccagtcctgcggaatcacctcccttggaagcatccagggctgaaccacctcacggggaggacgagacccgggctgccttgacagggcggggctgcacggggcggggtggcgctggaacgggcgggaccggccggaggggctgcgt

SEQ ID NO: 32651 - DNA, 339 bp, Mus musculus
  source 1..339: mol_type = other DNA
gcaggctccaagatcgctgcttcaggctctgtgagcccctatataatttttaaatttgtgcagcacattcatgcaggtgccgcagtaacttactatttttaattttaaaggcagcatcttgctatatagttcaggctggatagggtctgatcaccccaaataactttggttctgagccactggaggccatttcctttggagggcaaaggaaattgaaggcctcagcccgttcccaggaggatgagctggctgaagatgcaggaagcctggcgttaccaccaactggctgtaggtcagcatatggtggtggttaccatggcaactatctctgcactatag

SEQ ID NO: 32652 - DNA, 443 bp, Mus musculus
  source 1..443: mol_type = other DNA
taaaaatagcttcctttaagaaaaataggggaatcttcaaaaagaatcttgcttttatattacttccttttttttttaatactaaaactaccctaaatagttgcttccagttatgataatagctttataccgatatgctgtcatctttacactttaaagctattctaaaagataatattttagactccataatttattttgttcatctaaaatctgagcttcatgaatgaaaggatgaccctaggacactaataagagagtgataagggtaagtgggacaccccaataaatatttaaggctcaaatgaacagttgagtttcccgtgaatgcatgcataacttctcaggatggacctccctcaccgccaccagagggcgatcgggcgcgcggtagcgtgaacgcgcgcgcgttccctgcatggcacggaaaggcaaggggaggc

SEQ ID NO: 32653 - DNA, 330 bp, Mus musculus
  source 1..330: mol_type = other DNA
ttctccagtactgggttttccaaagaaacgactggttcatacccagcttggtcacaaatgatgtttcacgttttgaaagatacacatgaaatgaattttgccgaataaataattattggattttttttaaaggttttttaacgtccataaagccgttcaggattcccaagcattagaatactgggggacctccggggattattggcccgttagctcccgggggagctgtacagtgccgcgagagccgcgtgccgcgcgagagcctgccgcagcttggcgcatgtccagtccgaagtggccgtaaagtacagtccgtcggaccgtcttccg

SEQ ID NO: 32654 - DNA, 400 bp, Mus musculus
  source 1..400: mol_type = other DNA
ccgcagctgctaaaatcaccagctgctgcagatttggaacctttctgcaagaggctgcaaatccagggtagaattgggtgctgtagttctactcctttaaatagttcctggtcctagggactttacagttcatttctctagaaatttgagtcaggcacggaattcagagtaaaagagagcctgctttgaaatctgtctcagaacatgatgtggtaataaatataaaaataaaattcggcttttaataagtagaacttccccgttcctgtttaatctgcaaaatggacctggagtcctggggtcttttccatcagcctaagggtgtactagtagatagaggtgggacccagaggcgctcaaagccacgcctctagcagcctattggttgcttttgaacgtt

SEQ ID NO: 32655 - DNA, 318 bp, Mus musculus
  source 1..318: mol_type = other DNA
tagctatgtagaccaggctggcctccaactcatagaggcctgaaccaacctttggtctctcatcacagctcagatgagaaatcccgggggtggctttatctctccttagagacagcgtctggaatcctgggaccgctggtggcctgaggcagaaggaggctttcccctctccccttactgcacccctcttagggtggagggcccatggcgtcacacctgtaatctcagcgccctgaaatctttgcaggccatcctggactccaccaaaccagacagcattcctggtgggatggcaaggagtcccaggacccagcggga

SEQ ID NO: 32656 - DNA, 619 bp, Mus musculus
  source 1..619: mol_type = other DNA
gcctcccctgtgcctgacaggcgctgggcccaatgggagcctttgcctcccgcgtgccgactcgacccgcggattggctaagctggggcgggccgcgggggcgagacccctccttccagagaggtctagggggcgcccctgagggagggcggttgcctagcaacggggcggtggctcggcgggtacccggcctaggggagcgcgagcagtaagcgaggcctcagcccacccacccggggctccggcgcggagcggcctccggccctcgagccctgcagggggctccagaaggccgccttgggctcggcctcaggaaaaacgaggtctccactgtgggagccccgacccttcttcctggcggtggcggggctcagtgcctctggtgccggcggccattgtgtccgggcgcggaatggaggacctggccgtcccccagtgctgtgtccagggagcggtgtttgtggggggtctccagcatacgcctctcggaaaaacccgggggtttgggtggggggaaattacactaaacccatacctcgactcccagtaggaggggctcccgggtggctggagcctgcggagcagagagaggccgccctcgatctggtcgatggaggaa

SEQ ID NO: 32657 - DNA, 389 bp, Mus musculus
  source 1..389: mol_type = other DNA
acacacacatatatatatatatatatacatacacacacacacaccatggcattccattacagatggctgtgagctaccatgtggtggaagagtagttagtactcctaatgctttttttgagacaaaatcttctttccctgcacaccagcctggcttgaggcttagaatgcacatagattcattctgtttctgagagaataatctttaaaaactaaaacatttccttccatgggaggcctaggactcagtctacttctagtttctagactctagtgccaattcttccaattaagtaggaacaagcttagcatgatgaaacaattgaagtttaaaagtcagcaattgtttaaaagtcatcctcagttacactgaaatcaggcaagcttgga

SEQ ID NO: 32658 - DNA, 323 bp, Mus musculus
  source 1..323: mol_type = other DNA
gcctaaatattgtcctacccacactcatgtgtacgtgccccaaataaatttttgaaaaactgagttatagctcatttggtagaatcctatgctacatagattgaggacagactgggctgaaaaactgttaaataaatgtctttcgtcagggtttgcatttttaaagagatcactcaaaaacagagacattgccttgccttgtgtcttcaacaaaccaaactaaggggcttttcaagtagtacctgatacacagtcaattattgctgtctatttttcgacatcgaaaggaaaaagcactttttctgtagtatacaaattcctgc

SEQ ID NO: 32659 - DNA, 431 bp, Mus musculus
  source 1..431: mol_type = other DNA
ggttcctgcagtacagggccctttgaaggaagggcttttaattattattatttatttattttatgtatatgagtacactgtagctgtcttcagacacaccagaagagggcatcaaatccccagatggttgtgagccgaagagcagtcagtgctcttaaccacttctctatgttcccaatatctacaggaaggagatattaacatagcaattttaatgaaattaaatacaaaaaaattctgtactttaaaaatcatcttagctgttcacacagttataatcagagtgtccatgcatgctgtagttattcagggactcctgagctcctgcagcctgtcacagtgtgctgttgctgggacagactgtttttacaccagctttagtcacagcttggtgtggccctaacaagtacagaatctacagccttcctctc

SEQ ID NO: 32660 - DNA, 398 bp, Mus musculus
  source 1..398: mol_type = other DNA
ctgtctctgcagggcaatgaccagcagtggggagccacttttgcctcagttgggatctgaacccaccctctcaggcctcctcccagagaagcgtgggctgacagcctctgcagtggggaggaccccacagaatggttctggggtctccatccctgaagagacgtcccaccaaccccttctagaggagggtcgaacccaagaagtctttccattctggcatgattccttacccaacatccggatacctggggcacagggctaggcactggggtcacggcagctctccccaagctcctaggaacccaggctgagccattccagggcctgggcatagtcttgcccttctaccccatgtcaggccgtgggaacaggtggtggcaacccgcactgcttggccc

SEQ ID NO: 32661 - DNA, 293 bp, Mus musculus
  source 1..293: mol_type = other DNA
ctgtaagcccacaacagttgaccacagacttgatcttagttccatttcagagatgggaagctgaggcctctgttagccatcctccccacattggtcactagagggcgccagggctcaggggaactgggttgagcaacatccttatccctgtagccctccaaagtctacaggccagtacccagggcctgaatagtatcagctgctcagagcccttaccgcctccttagacttgacaagggcggtgagagaggagggaaggaccgcgtggtgggcccacctcttttcttaacagc

SEQ ID NO: 32662 - DNA, 478 bp, Mus musculus
  source 1..478: mol_type = other DNA
aggaacaaagcaggctcagctgtttctattcagtttgcttatgcagacagtgtcagctgaagccacgagccaggatccaggtgcccggaaccttgcagttacacttggtccaagtagaattacccacgtggctccatcctccctggggaccagagtttctgtttccttgttgcaaacagaaacctttggcaatgagtccagcacccaggctggagaagctagctgctttgcccccagccgcaggcaggtgcaggcacagcctcaagctgatgtctgcaccccacagggggcgacccacccgccctaaacgcggcgcctgacggtgccagggttgggggagtgccccgcccccacctccggaggtggcgtcccacgcggccgcaacaagctgccgttgtcccgcgggccgtgggccccgcacactggggctttgtccggccccccgccacggcccacgggggaggggggcccacatgac

SEQ ID NO: 32663 - DNA, 259 bp, Mus musculus
  source 1..259: mol_type = other DNA
ggttaagagcactgactgctctacatggtggctcacaaccatctgtaatgagatctgatgccttttctggctgaagatagctacagttttaatccccgggaggtgagttccagaccagcctggtctacgggaccaaataatcaggtgacctggtgaggaaacttccctcctgctgtggcgggcagccagcctctagccgagtgtacccccacgctgccaagatccttgcttatccaatcagatcggtggatctttggtt

SEQ ID NO: 32664 - DNA, 351 bp, Mus musculus
  source 1..351: mol_type = other DNA
gagagacagacacctgacaccctaatctgtctggcctctgcttgtgtctgcaggagcacagagcagaggcagaaactcccaggcccagcgtctgagcctccagctttgcaacattgggggacccgtgacattagattcaacaaatgctgcagccagatgcaatttaaaataattactgcttcctttccatcttccggggagaaagagagagagtgaggggaatttctatcacccattatttacaaactggaagctgaatgagtctgtctgccacactcagtttctgggtcagagcctgtagggggcgcacctgccccgctcccaaagctggagccccgctgcggcgcttgc

SEQ ID NO: 32665 - DNA, 429 bp, Mus musculus
  source 1..429: mol_type = other DNA
ctgcatttttaaaatttatgtcactgaaatcatggtcgcagaagataaggaaatagaatttggttttttatttattcatttgcagtgctaaggacagaaccctgggcctgcaggctgctaggtaagtgctctattattgagtatccctaatagtaaatatttaatatttattgagtatttcatatgttcagttctaagtgtatttaatcctagtcaaagtactatgctgaaaaataaggatttattattattattactactactactgctaccactttctcagagaaaggccggggtttctcctggtgtatacagagattttaatgtcttatcttgccaaagtcattgagcaaggttggtggcagacataagtgcccccacccccaccatcagatgggaggggcaggaactctggtggagtttccgacc

SEQ ID NO: 32666 - DNA, 224 bp, Mus musculus
  source 1..224: mol_type = other DNA
attctctagaacacacaagcgcgcgcgcgcgcgctctcgagattaaaaccctttcagaaaatttgattacaaatctagagaatttgtaaaatctttccgtaaagacgcctggtgccaagcgtggctgcttgagttcagtataaacgtaaaatattacaattctttagggaatccaagggtatttggggtccaaaatctctgggttagaatcctcccagggtgcg

SEQ ID NO: 32667 - DNA, 250 bp, Mus musculus
  source 1..250: mol_type = other DNA
gtcttaaagagacatttgtgtatgttacacgtgcttccagaggattcttcaagcaaaggccaccttgcttttggctgattagtgggtcccaagggtccttcttgcaaagagataactaatgacacatttttaatggcttcccttacttttgaaggtgacattaaactgactgctcttgctagctaagttctcatctctctctctctctctcacacacacacacacacattctcacaccagcatcaccagg

SEQ ID NO: 32668 - DNA, 412 bp, Mus musculus
  source 1..412: mol_type = other DNA
tcaatactggaaagttaagtttaagatggttaagtgacttgcttcaagtcatacattaagccagttagaatggagaagtccacattgaaaaatgtctcctttcactatattgtttgggacacctaccatatgtgtgaaggaatgtacatacgttatataatgacaattatttattgaatactttatatgattgtgtcagtggatacttaacataagccaattataaaaataatcagaggcaggcggatttctgagttcgaggccagcctgtctcggttagtaagactatattatagtcaaataaatatttaaacatataattacaaattactctaaatcagaagctaagcttcttttacctcctcactactgcgactacagaagaatctgaagccccttagtggagctaccg

SEQ ID NO: 32669 - DNA, 442 bp, Mus musculus
  source 1..442: mol_type = other DNA
caggataaccatgaactcttcttgctggacctctatctgctaaatactatattctcttaacagctttttggatccatctaagaagatgaaccaaactcaatactggaaagttaagtttaagatggttaagtgacttgcttcaagtcatacattaagccagttagaatggagaagtccacattgaaaaatgtctcctttcactatattgtttgggacacctaccatatgtgtgaaggaatgtacatacgttatataatgacaattatttattgaatactttatatgattgtgtcagtggatacttaacataagccaattataaaaataatcagaggcaggcggatttctgagttcgaggccagcctgtctcggttagtaagactatattatagtcaaataaatatttaaacatataattacaaattactctaaatcagaagct

SEQ ID NO: 32670 - DNA, 435 bp, Mus musculus
  source 1..435: mol_type = other DNA
catgagttacatatacacatatataaatgtagatacaaaaatgtttagtgtaggttctatgtataagagaaaacttgcagtatttgtctacattaatatgttgttaacatactgatttttgcacaagccttatagaaaatatctaaccccaccccccttctacagaaggctttctgttgtaccaaaccctagggtgcagctcagttagcagagtgcttgcctagcgtgctgggaaccctgagttccggctgcagcacttcatggactcactatgctagtgcatgccttccgatcccagcacccaggagctggaggtacatagtaggttcaaagccagctacctaggatataagaggtcctgttgaataaaatgaattttattaaaatggagttcttttattacgaatgctgtgaagtttcattttaaccaaactc

SEQ ID NO: 32671 - DNA, 268 bp, Mus musculus
  source 1..268: mol_type = other DNA
ggcacaccctctgctgaaagccagctgcatacaagctgtaattattgatccttatcagtaataaatggacccacagtggggctgtgcataaatgttcacaggtcaatacaatggagcaactttagattgtggaaggaaaacaaccctcccgtgttgtgctggctttgatgcaaggttacaaccacatctgctgagttgggcctggctctagcaagtcacatccggcaggggggtgcaaggggcggagctcgccccagagaggagaccc

SEQ ID NO: 32672 - DNA, 280 bp, Mus musculus
  source 1..280: mol_type = other DNA
agatgtggccctcatggattctgcatgttcacattctagaaaacatttatttacaagttaagagaatgaatctcgttccctcagatcagatgccagaagataacaggttctgtctagttgaaagagaagcaaaattctttcacagttttgacaagaagtctgaaggaataagcaactgtggctgctcagcagcctgctggccactgaaagccatcaagagcacatggtagcagcctgtgctaaactgctgtgtcttgtttgtgcatgttcaacagaacag

SEQ ID NO: 32673 - DNA, 577 bp, Mus musculus
  source 1..577: mol_type = other DNA
tcttgcaaggtcaggccatcagatgatggccatggtcatatccacgactgcattttgtacaaattctgcacgcacttaaaaactttttattgtctgtcttcctaaaatgaagaatcctatgagatttatctatgaatgcaagaattgccacgagacagtgcgggcaggtcttgttagacctcgagtgagtcacttagggcagggaagaacacaggccctgcccctctctggtgttctcctctggacctgagaagtctccgggcgcctcagagatccgtttaagcagagggggtaaccggccaggtcccaggagcccgctgaccgcccgcggagcggcagcgacgcccgcagcagcaggtgtggcggtgcccacgcggcggcgcccatgtcgacggcagagccccagagtgccacggcccggaggcgggggggtgggagggaagaagaggcgcgagtggccgccccgctcccagtgctccccgcgcgccgcccgcgcgccggctgggcctctctagcccgcgggcgggcgggaccatagagagcccgcggcaccgccccctccacgacccgagcgccc

SEQ ID NO: 32674 - DNA, 535 bp, Mus musculus
  source 1..535: mol_type = other DNA
gggttcttcggcccgaggtactgcagaaaaccccccagcccagggagtctggggggtccagactaggggaccctcaggctgagtttccaggtctaggaatggagggagcctgaaaggcttgttccggtcccctgggcacaggtctgaggtccggggaaccggggcctatcgggggcccggctagagcaaagggggcccctactcaggggtgtgggcgaccgcgctgggcggcccgaagtgaggggcgccgccgctccgagagccgggcgtgtgggcgcagcgcgacggcctcccgccccgctccccagccggcactcactgcgctcgggaccccgcgctgcgggccgggccgcgctcgggctccgccaggcccgctcaggccccggtagtggcggcggtcgggccgagccgcgcgagcgggcgctcgggtcgtggagggggcggtgccgcgggctctctatggtcccgcccgcccgcgggctagagaggcccagccggcgcgcgggcggcgcgcggggagcactgggagcggggc

SEQ ID NO: 32675 - DNA, 439 bp, Mus musculus
  source 1..439: mol_type = other DNA
atgcactcccagcccagctggtttgcatgtgctgaagtcagaggacaacctaagttgtttctctcctacgcgtttacccgacagagtctcgctgtgtagttcggaacttgctacccaagcatagaactatagtcattcaagctcaaccaaagttttttgaaggccttatactctattaacagagttgtggtgctgttctttaaaaaagtggagaaaagcaccctgggtgcttaattgggagccactcaatactaatctgagacccagatcagagaactgacctgaaagagctttcagaagatactgggctctgtttcacaaacgtgcctaggagggtcagagtgtccgcgcgctgggaacctggaaaacgccgctgcactccgggttccgcccctcggcgagctcctcgcttcggagggagccgggttgctaaggaagt

SEQ ID NO: 32676 - DNA, 759 bp, Mus musculus
  source 1..759: mol_type = other DNA
agaagtccggggaagctttttccccgggaccccccgctgctgctgccaacgtggggggaggggagactggcgcccgggcgctcggaggggggaggagccgcttgccagctcgcccctccgcaggaattcaaggggtggggggatgcaaaggcgtcccagcctcctcgggcccgggacctcgggagctccacacccgggcggccccgccccctgctgcggtgggcagggcctcgcccctcccccgcccggggagccgcgcggagcccaccccctacgccccccgccgcggccccccgggcagctcggctcaccaggcgcgcggcctcggcccacgtgcgccatcctcctcctccgcggcggcggtggcggctccacgcgggtccttcgggcggggcggactggggcggtggcggcgcggggctggggcggaggcggcggcagcggcggggggcgcgtggcggcggcggcgcgtgcgagggctcgggtgcggccggagagggcgggcgcaccgggactggctagagcgagaccccggcgcgagggtggcgctggggggaggggcggcggcggctccacgcgcccgcgctgcgtcagtcgcccacggtggcagcggcagcggcagccccgcgatggctaaggaatgcggcggctccgcataaccacggggtcagaggtcacggctccggcctccgcgttcccgcgctgctgggaaacccaagagcgaaccgggcccggatggcgagacgcggctttccgtgg

SEQ ID NO: 32677 - DNA, 424 bp, Mus musculus
  source 1..424: mol_type = other DNA
acgctgctggaaactgcaggtgcattcttaatcacctaagtcggtcaatcgtgcaataaccgttttactgatatgagtgggccaaaaagaaaagtcctgctttttgtcacccaccgttaaccgcgcgcgcggccaggggggagtccagccaccgccccttccctaccgtgcttggagcgcagcggggaccctttcggtttgtttttgttcaaaaaaaaaaaaaaaaaacccacggaaagccgcgtctcgccatccgggcccggttcgctcttgggtttcccagcagcgcgggaacgcggaggccggagccgtgacctctgaccccgtggttatgcggagccgccgcattccttagccatcgcggggctgccgctgccgctgccaccgtgggcgactgacgcagcgcgggcgcgtggagccgccg

SEQ ID NO: 32678 - DNA, 369 bp, Mus musculus
  source 1..369: mol_type = other DNA
actgggcgggggcccgacccagagtcggccacgtgcctggcttttccttgtcagcgtcccactaggacctcctaggcacgagcacccgtgtcgcccgggattgagagagggggctgtctggaggccccatggcaccaagagttctcgagaacacagacagcttgcagggtatgtccctaccccgcccaggacttgaagtccgcagcctcagggagccagggcgagcccagctcccaactcttctcccttaagagagctccgccccgtgcccggtttcctcccgggccgcggcgccgccgccgccaccgccgccgccgctcgcctgggccctccccctggccacccccgcccccgggccgggcagtgacg

SEQ ID NO: 32679 - DNA, 566 bp, Mus musculus
  source 1..566: mol_type = other DNA
aacagttgggatgtccccagggtgtttgcatggaccctgggcaaacggccacgagccttgggagaggagccccgaggcgcttcaccacggagggggcttggcacagcgcctggcacatagcgggccctccctgaaggatccagtggtaccgcccggcgggcgcgcgcgcagcaggtgcgcggtggatgggcgggtcccccgagcgggcggggtctccaggtgcgcgggcacgggccagagggcgggcaggcgcacggacgcaaagcgtcccgccccaagccgggctgcagccgcggagccgtcccccctgcactgacagctggctgtcccagcttgcctgcccgcgaggagccgcgcgagccgctccagcgggccctccgaacccgggccggcacgcgcgcacgcgcgcacgcgcatatcttcccgccccgtccctccgggggcgcacgcgcgtgcgccgtggggagtgcgagcgggctcacccctgccccgccccccgccctggcagctgtcagcggcgcgcgcggcccgccggcccctgcgcgcgctgtcaacagtcattagcg

SEQ ID NO: 32680 - DNA, 338 bp, Mus musculus
  source 1..338: mol_type = other DNA
gagggtgaactcagcactcacccagtggctgagaactcagaagtgtggttcctgggaattaatgggaaatgtacattacccctgctcagaactcagagattgggggtgggaccaccattggcggtcagatctgctagactctgaatatattcgataggtagatgtaccctatgtttaaagacctgtgctccaggctctgagctcaaaagtttgctgaggcttcagggtctcccaggcagagacttggaatcttactgggttgctcagagcggttcctggaacccggcggtcgcgcgtgcgctgtcacgagaaccgcggctggaccgggaggaagcgag

SEQ ID NO: 32681 - DNA, 669 bp, Mus musculus
  source 1..669: mol_type = other DNA
aggccacctagggcctggggcactacaaggccggccaaccaaagggtggtggcttggggtcccccccccgggggaacattcagcctgtcccacaccgccagggttgggctacctcggctaagacgacccaatcggggaggctggggacgccagtgccctactgcctgcgggacagtcagcccgtcccgacagagtgcggccttccaggctgtgggccgaaccagccggatggaacacgatccctagctgggtaccgcgcgcctgccgctgctgccctcccggccgctgcgggtgcagcagcccccgcgcccccaggggccgggccgggcggggctgggcgcgcgggcgcgggagggaggggggcgggcggcggcgcagcctgcgccgctctaacaggtgggatcccgcggcgtggtgcagcgggagccccagccggagccagcgaagctgacagccaccgctgccgcccgcgcccaggctcggtctcgctccccgtgcccggggccgctccccgcctcccgcctcccctggccgcccgcggggcggcccgccccctctgcacctccgggcccggagctgcctccatctctcctgcatcccggccggggggaggaggaggcggagcaggaggcgagtcggagccgccgccgccaacgccgccgccgccgc

SEQ ID NO: 32682 - DNA, 364 bp, Mus musculus
  source 1..364: mol_type = other DNA
gctgagcctgcacgtgctaggccttgtatcgagccgagccttaacatatatttatttagtgtctactttagtgatcaccatctaatgaacgccaggtgcctatcataagtatttgtgttttggccgaggcagccctaagctgcagggtagggctcctccccagctggcacgggtccccagcgggtgacccatagggccactacagcgccctggacagcggcccaggctcccgaaggaagctcgggagggatttcaaatctccctcgcccgtcccctaggcccggccggccggtgagtggctgcggcgggggcgccccccgggcgggggcggggccagggccgggcccgggctacaagggcagcg

SEQ ID NO: 32683 - DNA, 418 bp, Mus musculus
  source 1..418: mol_type = other DNA
catgtttcattacaggaattgtaacactaactaaaacaggcgccaaatctttttttttttttttaaatttaaaggcaaacaataactgtgttcataccaccacagttatttgtgggcctagcttgctactgtagaccaggctggccttgtacctcaggctgaactcccagagagattgctggcaagataggtgtgttccaccacagctgccatctgtggtgttgtcaaacgaattttcttctgggctacagcaaaccagaatgtcctcagaggactcacacgtcagctccccgcccccgggcatgccagctgtcgatcaagcattcggccccgcctccggctcgcaggccagtccgtctccgggcgggagatgacgagcccctgcgtcggcgcgtcacggcggggtgcgtgtgaggtc

SEQ ID NO: 32684 - DNA, 332 bp, Mus musculus
  source 1..332: mol_type = other DNA
caggagcaggccatcatggggacctgggatgccatatcccatagatatctaaccagacatttccattttttctttttaaccctagtaaaaaggtggactttattaaaacaagagcataaagaatgttttttcatgtaatgtgttccaaatgaaaagtgggctttaagaccctcctcaaggtgtagaactgctcctccagcaccatgcatgcctggatgctgccatgctcctgaaatggaaccctaactgagacaaagtttcaggagacttgggatccatccaagtactctatgaggtcacagagctgacagttccatctggtaaattccatg

SEQ ID NO: 32685 - DNA, 290 bp, Mus musculus
  source 1..290: mol_type = other DNA
tatgacttatgtgtatgcatatgtaatggtgcatcctaattatgtatatatatatacatatataatcttaatgtgtgtgcatatgtaatggtgcatttgcaaccccacagggaacattgggtcagccacactggtttctggaagagcttggagacacaaggctatcccggtgagagagctctcccggagagagttctccttccagagagcgtggaaacagcccagtcgtggcagatgcatccctccctggctcctgcttcatggtccgcaggctgcagtgggggagcctc

SEQ ID NO: 32686 - DNA, 403 bp, Mus musculus
  source 1..403: mol_type = other DNA
taaatgcactagccttgccttgctaacctagaaccagacttaggctactctgggatccccagcaccagtgtagtcactggcctgacaatatagactttctattggcttaagcccacatccgagtagtcttctctggtgaatacccttaggtccctggagtccccacttaaggattcgtgtatcttctcagggatacatgtgagcagaattctgaggtaatttcaggatgtctctcaggaacagctagatcctcacaggaggagacactttcctccatgccagaaactctctcccagcatagagactcccaagagctcatgtgataatcggaactgattcaggaagcttctcgttctgcaatttcaggaagtcacattcctgccagagtggcccaattggccca

SEQ ID NO: 32687 - DNA, 296 bp, Mus musculus
  source 1..296: mol_type = other DNA
tgaaggaggcatcctaagcaccgtacaacatcacaggaatgtaggactatgtgacatatacagcatatgccatatactatactatatgctcgctagctatagcatatgctatagtctcataatgagacgcattagaataattaattataattatgtattataattccagccacattgtcacacctcagctcccagggaacttgctggttggtgggataagcactggcagaagcttctagtgatcacacaagagcaccctggctgaagtttgaggattgtgccggaagcatccagca

SEQ ID NO: 32688 - DNA, 405 bp, Mus musculus
  source 1..405: mol_type = other DNA
tttcagttactttatctggtaaagttcatcagagacctcagattattggtttattctgaaaccaggggaacacatgtcatctactgctaatccattggtagtatgtggctcacagagacacactaatttttagaattgctggaattttctattttgagaaataatagcgcattaaacaaaatcatctagaaagctggtttaaaacaattgaacaaacagaagctgctggcttttttttttttaaatgagttctcaaaaaatgactgggctagcagtctcaagtttgacaacatagggctttgaacttggcacaaggtccatcactgtcacccaagcatcctgggtgtagatattttctttggagtatctttagaacatccaatcctgggaccacaatataagtca

SEQ ID NO: 32689 - DNA, 283 bp, Mus musculus
  source 1..283: mol_type = other DNA
aaagaaggagagtcctcttccataacaatcaaaatctgctgaatatgtgtgtgaaatattcaaagaataaacacaaataatatattaaaaataaagttgaaagatatcactgaagcagtcttcatattgactgcagtgccttggcaaaggagaaaaaatgccaccatttctgatggtgcgaatggaccagcacttatgctatgtgaaacaagccagatgctggcagatctcaagtgtgagctcactaataagaaagttctattccaattggaccttgctgtgt

SEQ ID NO: 32690 - DNA, 277 bp, Mus musculus
  source 1..277: mol_type = other DNA
gcacccaggagtcttagcaggatatgctgaaggtcagcctgggcttcatagtgacttcaaagcaatcccacactatcctagaaagatgtttccctcatatacacacatataaaatttaggggtctgtcaagatagtgtaccgtgaagtcttgactccatctcaaatttaatttgtggactgagcagcttagctgactcacctgttaatatgattgacaattatttactttggacacttctaaactacagaaattggaattatctgccattctataaa

SEQ ID NO: 32691 - DNA, 320 bp, Mus musculus
  source 1..320: mol_type = other DNA
acatgcttatgtgattatgtgcatcatatgtgtgcatatgccaaaaagcttaggcatcagatttgctagagcacagataataagctatctccccaaataaatatttattagaagcaacatactgactggagaaagacgactgggaagcagtgtgaagagctacacatatacatgtgcacacacacacatctacacacacatgtttatagaattgagaggggagctaagaatggagttcctggctcagctaccctggcactcatgagcatggatctccaattgccgtattcgggattatctagagttctataaaagaagct

SEQ ID NO: 32692 - DNA, 113 bp, Mus musculus
  source 1..113: mol_type = other DNA
ggtagctttgaaaaggcagtttaaaccctccaggtcaccagttgctttgaagtccaaggggcttctttctaaaggggtcatgagggaggttcccctgtgtacccctgctggcc

SEQ ID NO: 32693 - DNA, 366 bp, Mus musculus
  source 1..366: mol_type = other DNA
tggagggcagttcctcctcactaatagcaggaaactcacagttgttccttcagggaaagaatccatagaagctatctttatggactttataagagttccaatacagtgatgtgaaattgatttcattatcgccaaataaggcctaaaatagccaactcaggtcagatttcagaaatttgagccaacgccggctagagtcctcttctggctgtagaggttgcagagaccactacgtggtcttccaggaatcagagagcccttgtaaggtttgctgcatgcctgccaacctcaggaagccagagttctgaggctgcctcagcccagcctgaggtcttggcccacacactcagggtggctgcccaagtc

SEQ ID NO: 32694 - DNA, 209 bp, Mus musculus
  source 1..209: mol_type = other DNA
gcttactaagccttcctgtgcaccaggcaactttggtgaccacatctgagttttggccaaaagcccgctgaagaattgagcatgccaagctctggcctggggccttggcttcccaggcctgagagagctggatccataagggagtcaggccccgccccgcgcaggagggtggggtcacggggctgcgggcccctcgagaggacttaagc

SEQ ID NO: 32695 - DNA, 352 bp, Mus musculus
  source 1..352: mol_type = other DNA
ggtaaatgaatatcatcaaatttcattgaataaacatacattttcaaagaatacatgactattactggaaatattaatgcacacacaattcttcactcatgccagccctgttataattgcataagtggtcacaatatccatccatccgttattcatggatacctgcaaatatggctggatgcttcatgtcactcatccctgagaccaaggatttgaatgcatggctgcctaccattctgttgatggttagatatcaagcttatacttaaccttatgaaacaccattctccttacattacgagacgacacgcctgcccttcctccatcatgacctttcaaggaggcactggat

SEQ ID NO: 32696 - DNA, 286 bp, Mus musculus
  source 1..286: mol_type = other DNA
ggtaaatgaatatcatcaaatttcattgaataaacatacattttcaaagaatacatgactattattggaaatattaatgcacacacaattcttcattcatgccagccctgttataattgcattgaaagaagaaatgaaagtgctaggatttactcatgggtacctgccatctcatgaagtagctatgccatggctgcctaccaattctgttgatggttagatatcaagcttatacttaaccttatgaaacaccattagtcaatcgtgacctttaaaggaggcactg

SEQ ID NO: 32697 - DNA, 408 bp, Mus musculus
  source 1..408: mol_type = other DNA
gagaacaccgaagtgtgctacagcgtgtgtgtgtgtgtgtgtgagagagagagagagagagagcatgtcccatggcctatctgggttctggggattagaccccaggtcgtcaaacagcaaggtggcccttttcttaaagggtctggtgagggggcaagggcagatacagactctgagactgcccacctgtttgtttgtttgtttgtttttctaattaaaaaagatttattatgcataatagtacagagagggcatccatcggatccctttacagatggtgttggaactccagacctctggaagagcactcagtgctcttaagaagtagtaggtctcacggctttatttttcaaagccagggtcctgggactcggcacgcctaggcgcgcagcggaggactcctgagaa

SEQ ID NO: 32698 - DNA, 260 bp, Mus musculus
  source 1..260: mol_type = other DNA
ctccactgtaagagcgtttctctgtgtagccctggaggctggctagcctagactggactcaacttcaagtgatgggaccaaaccctcaaaggagtggcatttctcctcctggtgggacctcttagaggccgtgagtctggagcctatggtcctgacacaggcagggaactggatccttcactcccggggccccgcccccgttagccccgcccccgacagcctgtcctccgaagctccgcccccgaggccggggtagggtg

SEQ ID NO: 32699 - DNA, 514 bp, Mus musculus
  source 1..514: mol_type = other DNA
agacttagaagtatagcttaaggttcaaggctaacctgagaatagccaaatgtacattatgacattgtttcaaggcctggtagttcaggcctttagtcccaagcacatcagtaatgacagctagttgttttaaacatttagattcctatagccgcaaaagatgtagaaatctgcgagatagctaatttggcaaagatgcttgctgtcaaacaaacttgattccacagggtgaaatacgaagccccgccccgggactccgcccccgttcctaggttgccgcccaggccacatccggaagtctggagctcggagaagggcggctccctgcggccacgcatagcgcgcgggaggcgggtcgaagtgcaggccgctccaggataggacgcagcctggcgcggaaggggcgggccaggtcaggaggcggtgcttcgcgtgagcgccctcgggcccgtcttccgcgtgcgttggtctgcgcgcgggagcgcgcggcgggggcgtgccggggctgtctggg

SEQ ID NO: 32700 - DNA, 346 bp, Mus musculus
  source 1..346: mol_type = other DNA
cagtcttgagaatgtttaatgccctagaaccagtgtgaaccatacacagtatgtgtctccctcctacaactgtaattgggaactttaagagacccccagttatacctatatgggcagattttgcccctatgatccagaaaatatccaggatctctgtaataagatccttattttagcttaggtgcattgctgtctttaggagttagaaacaccacgagcttcaaagctgaaggggtcagaccagaccccatgcggctgtcacacagggaaagtacctgtacatctgaagtttctctttagaaccgagagttaaagtgcctgctgccattagtcataatgagcccaa

SEQ ID NO: 32701 - DNA, 300 bp, Mus musculus
  source 1..300: mol_type = other DNA
aggccagcctggtctacaaccaggactgccagggctacacagagaaaccctgtagctagtgaggcctctaatagagacctatatatatatatgtagcttccaaccagtacggggtcatatcacacatcattttgtaccatgtgttttaaactaagatgagagtagtgcccgaattgtttttaaccatcttaacaattttcagtaaccataattgactagcagctaattgaggtcacttgtgagctcacaatacagttaccctgatgggcggggccaaactggggcccctggttagagggc

SEQ ID NO: 32702 - DNA, 377 bp, Mus musculus
  source 1..377: mol_type = other DNA
gaaactctccgccagccagagtgaggctagtgttggagggaatgttcacttcagcttgctgtgcaccttctaaagatgcaacacagtgaactgtgttctccatgacttgtgttaaagcatagatggaagtcctctgagctgagcatctacaaagcttacttctttacaacctgggggctaagggggtctgatctattaggctgcacgagctgcctgcccacacccgactgggtggagcggatgtcattgccagtgacttctggggtgactccttttggaagcctcttccaggcggggaaaccgaggccaggtgggggcggggccatgcttgggccaatgggcgcgcgccccgcccccagccagcctgggcggcctgg

SEQ ID NO: 32703 - DNA, 734 bp, Mus musculus
  source 1..734: mol_type = other DNA
tctctgtaaactgagggggtggagaccaccagaaccgagtacgaagtttgttcgcttcgccagacccgccacccatcgagtgggcggtgaaggggcggggcccattgcccacgcctcctgcagggcacggcgagaggcagaggggagaaggcgcccggcaccgcccggacaaagcctgcgcgcgccccgccccgggattggccaccccgcccatcggagcctccgtcgtcacagccgccccggccaatggaggaggcgttcggcggcgcgtggctctttcgcggcaaaaaggatttggcgcgtttgcaggcagcggcggccggggcggagcgggatcgagccctcgccgcggcctgccagtcatgggcccgcgccgccgccgccgcctgcctcccgggccacgcgggccgtgagcgccatggccgtagcccccgcgggcggccagcacgcgccagcgctggaggccctgctcggggcgggcgcgttgcggctgctcgactcctcgcagatcgttcatctccaccgcgcccgatgtcggcgccccgcagctccccgccgcgccgcccactggccctcgcgattctgacgtgctgctcttcgccacgccgcaggcgccccgacccgcgcctagtgcaccgcgcccggctctcggccgcccgccggtacggaccctaggcgcgggcgggggaggggacgggctgctgcgctgggcggcgcggagcctgggctgggcc

SEQ ID NO: 32704 - DNA, 369 bp, Mus musculus
  source 1..369: mol_type = other DNA
gctgaccccagcaatcagaaatgctgatggaggacctctggggatcatgagtcatctggatgacctgaactgggatctctgtaaactgagggggtggagaccaccagaaccgagtacgaagtttgttcgcttcgccagacccgccacccatcgagtgggcggtgaaggggcggggcccattgcccacgcctcctgcagggcacggcgagaggcagaggggagaaggcgcccggcaccgcccggacaaagcctgcgcgcgccccgccccgggattggccaccccgcccatcggagcctccgtcgtcacagccgccccggccaatggaggaggcgttcggcggcgcgtggctctttcgcggcaaaaaggat

SEQ ID NO: 32705 - DNA, 296 bp, Mus musculus
  source 1..296: mol_type = other DNA
tttctggctccaagaacccaatagtccacgtgttgacattgagcaagtagtaagtaataacaattacaatgtatatatcctgcaggctccccgtggtgccacttcaaaaagggaaatatcagatgtaactcctttgagtttgtattttaaaaataagtagactagcctgggctataatgtgatactcgctaggcaatcgaaattatcaagtgtgacaagtgacaagtccaatctccctaagaaaactgccttctcattgggcgcagggcggggctctccagtgcggagagctgtgt

SEQ ID NO: 32706 - DNA, 268 bp, Mus musculus
  source 1..268: mol_type = other DNA
agccagtcatcattccagaatgcatggatgaggacctcactcaatataatgtaccagcagttcaaattggacttcatggattatagactgagttcagtgtctgtgtgtagatatatgccatgtgtgtccatatacacaaaacaaaattaataagaaggctgctttccaatcagtctccggccggacagcggggcaagctgtttccggggcaggggcttcggcgtcggctcctgggcgccccctggcggccccgaccccgccgcggttc

SEQ ID NO: 32707 - DNA, 598 bp, Mus musculus
  source 1..598: mol_type = other DNA
cttagtaagaatcactggatttctttcaatgccggcccggcccctccagcaggtgcacatggtggcgctcagagctccctttctccagagcctggggcccatgcaccacggcgacacagaatcgaatccgattcgatcggacacacgcgtgcagggctcagatcggagcacggtgggagactccgctgtgcacacaggcggcgcctccttctctgctctggacttagtaggactacatcccagcccggaggccaccgtgggtctcgggacgttctgagtggttcgggcgcccgactgggcagctgagccgcccagccctcccgcaccgccgtctctccaggcccaggcccccggctgtttcctgggcgtgcaccctcccgcgccggcggcctcgactgccgcgctgttccggtcccgaggccccctccccgcagagccggcgctcccaggctgttcccgccccctcccgccccgcggctgttccggcccggacgccctccgccctccgccccgcggcctccacgcgccctgggcccggcgctgcgagggcgcggcgggagggggcgccacgcggaacagccgctgccccggcccgacg

SEQ ID NO: 32708 - DNA, 453 bp, Mus musculus
  source 1..453: mol_type = other DNA
cttatctcagcctttcaaaagatgtgagattataggcatgaattgccaagtcctgtttaaaacacacatctttactcacttacaaactcttttaagaggacttgtgacaatttcaaatttacagcttgaatattcgaggctgattttgaagctttgctgttgaattacactgcctgaccggtctggtaaagtaagctagttagacagccagtttcctaggccagcctctgatcttgtaaactgctttaagaatcaaatgtgattatgattgtaaagtactatgttccagagatcatagaaaatgagtgatgttgttatcactacaggagccggaaaactcagactcccggcttgcagcgcgcggtcctcccttagactcgaggggctgcgggcgcgtggtgtcagcggcgcgttgccctgacgccggccgggcccgggcgtgggggcctgtgg

SEQ ID NO: 32709 - DNA, 152 bp, Mus musculus
  source 1..152: mol_type = other DNA
gcctggcctcgctgtgatgccaacaggtaatcaatggtcctctttgctctcagaagaccccctgatggtctgtaacataagggcaaaactacttaatcaggcttttttgtagcattctaattcctagaacggagcacccggctggtggaagc

SEQ ID NO: 32710 - DNA, 283 bp, Mus musculus
  source 1..283: mol_type = other DNA
taacataagggcaaaactacttaatcaggcttttttgtagcattctaattcctagaacggagcacccggctggtggaagcgcgcgccgaagctctggacctttccaaagcccggcgcgaggggtgtgcagggagcccacgcgtttggagagcccggcccgtgcagggcggcgctggggactgagtgggagccggggcggcgggcaggccgagtgcagacgcctgtccagcactccccctccccgcgctcgccccattggtggcggccgagcgaaggactcgcg

SEQ ID NO: 32711 - DNA, 386 bp, Mus musculus
  source 1..386: mol_type = other DNA
agtcccttcagtcacctgagtggatcacctgacgccctgtggttacaaacacaggtgtctgtatctccccagggaaaatagatgatacatcaggacacataattaatagtcccagatgattatatcgcctaggacgtgtaatatggtatgaagttcgtcaacaagttaattacctactctacattgagctagttaagactatttcgaagcttcctgaccctaagaatcttctgaagtaaaaagctagaaggttaaacttctcacgaagtgaaacgcttctacttgttcatattagggtttccactaagttaaacctgaaaaatagtatgcccggcgccggggagtcgccgaagcgagctctgcgcaggcgcacttccaacgtttga

SEQ ID NO: 32712 - DNA, 141 bp, Mus musculus
  source 1..141: mol_type = other DNA
cctccccagtggtggcatccatcccagtagagtgcaccacccctggttcagaagctgtccctgtgactcgggagcctccttgctaggtgcccacccagacaagtgagcatgctttggccatggttacagcatcctgacaac

SEQ ID NO: 32713 - DNA, 348 bp, Mus musculus
  source 1..348: mol_type = other DNA
ggttcagtttagaccctccttgttctttttattccttcctgaaagctagccgctgatctatgctcctgcggatagctccgcagtcatttccatgtgagcagactggcctcgaatttgtgacaaatctcctggctctggctccagagcgggagatttcagacactgtctccagagtggggagcaagagttttacaattgaagcagtagtaaattggctagagtctaagagagaagaaccgcctctctccacgctccctcgtgcacaaaatttatgatttttgaggcagagatctcaacgcctcgagctaggctggttcatgaatattcaaataagaagatatttaaaga

SEQ ID NO: 32714 - DNA, 288 bp, Mus musculus
  source 1..288: mol_type = other DNA
ctagctaaactggcaagatccctgttcagtgtctcaaagatctgagagacacacacacacacatatatacatgtttgtagtccataaattgtgaccttataaattttagcttgttcaaggaaaatggtgaaaatttgagaaatttgaaaattatgagaccaatattggtaattccctaaggccaggcctcagccatctgcctacccagttggcttagtggggttaattctgaattaaatcctcattaactctttctataacaaaacttgtggcctctgggacgagtct

SEQ ID NO: 32715 - DNA, 473 bp, Mus musculus
  source 1..473: mol_type = other DNA
tggggttcacttttttgtttaataaactcagcacataattcataatatggtagtttcaaaggtatttcgaaaagtttaagtgactttctagatagtttcctggataaacaataatagcaaagtttgctaattatcacgtgcctctattattaccacgcacagcctattaattcggtaggattagatgtgttttgcctgggttaagaagtttaatttaagcatctgaaaaggtaaccaatggcatctttcacatagttttgttgtaaacgtttagaagtatgctttgcttattgtgattcctgctgactgagtcagaaactggcggtggagctcagcagtctgtttttaaaagctgttcaagtgattctgagacacgctagcatttggagagcaaggcttagtgtccacttcacctggaggtaggcctgctggggcctgtagtccggactgcgccgaggaggccgcgcctgcgc

SEQ ID NO: 32716 - DNA, 324 bp, Mus musculus
  source 1..324: mol_type = other DNA
ccttagagaatatccctcacacaggacatcaatacagataccgttatccttagtgatgcctgctgcactctttcatcaggcttggtactttcctgcgacaaaggttcgttacatgccagtgttaagctaggttttctgctagaaacccggagaggacaagacaggtctttgggagaactggtcctctaaaaagtttctttccttgttcatgagatgcccaacctcggggctgcctgggccaaagggaattagttggcctggcaccgatggagaggaaattctccctgctggctctgataggctgctcgatctgtccgtctccac

SEQ ID NO: 32717 - DNA, 350 bp, Mus musculus
  source 1..350: mol_type = other DNA
agagccagctacatctggcattgattctggctttctaggcaagtatcctaatgctttctatggttgttccagaattctttgaaaaattaagagcccttgctattatttcaaggagacacattaaaaattttaaaactctgggtgatgaaggtgcggtgactactccgcagcgtcgagacaaatgcctggcttctgagtctgtggcgccaaagagaggacgtgacgtcacagaactgtgacgtggagctcgacctgcgccgggaatccgggctgtctgcgccgtggcgtcacaggtccggcaggcgggttttccgtcggcccaatgggagcggcgcgccggcctccccttt

SEQ ID NO: 32718 - DNA, 433 bp, Mus musculus
  source 1..433: mol_type = other DNA
ttcatggatataaaaatttcttgcataattaattattatagctaattttaaagcgctgtacacactcccacctggagggatttcaaacacagaatttgctgcagtacatgtccttttggaagaggaaaaaaattgtaaagcagggttcttccgcggttttagcctaataacttgctgaaggtcctcgccacacaatatagtgctgtcgcactttttaaaaatataaaggtaaacattttaacattaaaatattcacacgagtgaaattatttctttaaattttgctcacgatctcagtaaaataggtacaatatttcttcagaggcgtagtccaaacctttgcaaaaagtttgacacatcccactttgtcgactcgccctggggttccacggaggtactacagtgtggcgcgcaagtcttgaggctcttccgc

SEQ ID NO: 32719 - DNA, 305 bp, Mus musculus
  source 1..305: mol_type = other DNA
actgtaaaaggaggatgctacctaccttttgggtttattgtaaagattaaaaggtggcagtctggaagaagcaaccgtaggtgccccttcttcatttctatctaccaagtggtgagatgaaaggcaggtacatgtaatctcagtttctccacatgtaaatcaggactaacaacgtcacctccactcagaggctccgagagcagctcccgggctacagccacccgctggcaaaccgcggaggggcgcctgtgattggctgccgtcccgacggccgctgacgcgagcgggcgggcccctttgtgacg

SEQ ID NO: 32720 - DNA, 360 bp, Mus musculus
  source 1..360: mol_type = other DNA
tgtctccgccggcggcagccggagcttatgacattgagacgtcaccaaggccagccccgccttccaggcttgcatgggtgcgcccagctggagcttcagactccaggtcctggagacactaccagatggtagcggatcccctctgtcattttcagcctacaaatattgagggtcttaagccccacaactgagactcagagagacgtagtttactggagatctcagccaattagaatcacactcactaagtggtagattccttagctataagctactcttgggttatcctggacattttcccagtgaggtgagtcacgggagttccctctgtgggcctcccatcagagctgtcagctggga

SEQ ID NO: 32721 - DNA, 403 bp, Mus musculus
  source 1..403: mol_type = other DNA
acaatctagatttttgtcgaatcatttttagtaagagagtgatttctgactgaggaatattgctgacagtctaagtgcacagaactgatttaagtgaatccaggcccacccgagagaagagaggccagtggcccgcccacacttgttcactcaacaattacattttgtgagcacctactgagtctgctaaggttataagagaataataaaggtattctttatcgatcctatgttaataatggcaataatagcccaaggggagatcggacccagcaccggagctcgcacgctcgctcgctcgctcgctcgctctcaggctcgcgcgctccaccttgcgcgccaggggacgcccgatcacgtgggcaggggccccgcccctccggcccgccccgcccccgccgcg

SEQ ID NO: 32722 - DNA, 285 bp, Mus musculus
  source 1..285: mol_type = other DNA
tgatgctgtgtgtcaaaccctcacacagacaagcaaggagttacttcctaagttcattctttaaaatgccaaagaatattagccatgctctgctttcaggaagggccaatctcctatgctgaaatcaaagagaaatttgcgctcaaaagtcagtctgtggttctagaagcatatggaatctgccacctgcctgcaggctgcaatcagtagactttaagcaggcgggggtaggacactgctgacggtgggggcgccccctcccggctgtccaggagctcagacccc

SEQ ID NO: 32723 - DNA, 231 bp, Mus musculus
  source 1..231: mol_type = other DNA
ggtgaattaaagaatgtaatttttcctctttatacttgtattattttatattgcatagaccttgtattttaagatctggctttctgtttatgttagtaaaaacaaacaatacaagaactaagagtcttgtactttacatcaggatggacggtgggagactgtggagtgtcaccgagcacggcctctagcctcaggctccgccctcacccgaggccccgcctctagggtcga

SEQ ID NO: 32724 - DNA, 384 bp, Mus musculus
  source 1..384: mol_type = other DNA
catctttttttaaaatcaggtatatatagtggctattcctgattgtcaacttgactatatctggaatgaactacaatccagaattgatcctaatctggagactgggagatacaagtttctgaccaggcctgagtttaacaaccttctgatggagacctacataaggacattggaagaaggaagattagctcttctttgcttggactacagactgtaagtcatctacaaattccctcactatatagagaatacaagataactcagattttgaatcaacctcaaaacaaagttaaattactgtaggtttgggaactagctaacacgttgtagccatgcggggcggtctgcgcaggcgcactgggtcgtaccgaagccccgcccccc

SEQ ID NO: 32725 - DNA, 270 bp, Mus musculus
  source 1..270: mol_type = other DNA
cttcttcctattattattattattaattattgttattattattattattattatttaattttgggagagtcttgctaaattacttagactgttgagatctaacactgagaacttggagttacaggtctctagacttcactgagaactgaaatcgatggccagtcctgcgtgtaggagactgtgactcactctgaatcccagactgagtgcctttgtgatcccctgacaatgggaggtcctttgctgaccttgacaacagcaataaaaggg

SEQ ID NO: 32726 - DNA, 284 bp, Mus musculus
  source 1..284: mol_type = other DNA
ttgagatctaacactgagaacttggagttacaggtctctagacttcactgagaactgaaatcgatggccagtcctgcgtgtaggagactgtgactcactctgaatcccagactgagtgcctttgtgatcccctgacaatgggaggtcctttgctgaccttgacaacagcaataaaaggggtagcagtgctccgctccctgtcctcaccgtggtgccaggtgcccaggacatcagtacctatagcagaggatgctcttatgtctggaggtgtgcatactccagtg

SEQ ID NO: 32727 - DNA, 307 bp, Mus musculus
  source 1..307: mol_type = other DNA
agtgggttcctgggtatacacaccacggctggcttgtggacctcagccagcatggtctagcctggccctccatcctggaggaggagtgcatgttccccaaggcttcagacgcaagcttcatcgaggtggtccactacgcaggcgtggtacccacgtgtctcagcttcacaaggtgaggtccagactggggtcccagcggccctggctttctgcaggctgccccgccccccctacaggctgccacgccccctacaggctgccacgccccctgcaagctcagtgatgtttagctcctctgcatgtgaac

SEQ ID NO: 32728 - DNA, 374 bp, Mus musculus
  source 1..374: mol_type = other DNA
atttttgttacaagatacctcctagaagagaaagttctatttgataggggatacagtttgccaaataaataactacatttgtttgtgtgtatattcagtatgaggagtacagctattttttgacatctatctgtaaatgaaatatttgtctcatttacataaagcacatatttgttaattgtaataaaaatattagttgactagtcggacacgtgtcaagtgtcaactctggcctagggcctagaatttttccctggcttgcatcatttccagctagcgaaaattttgagagcttgtgcgggcacgcacagtccctgccacgcggcttgcacctcgggcgatgtagagagtcctccgccgccccgtagaaatcg

SEQ ID NO: 32729 - DNA, 202 bp, Mus musculus
  source 1..202: mol_type = other DNA
accaggctgacctcgaactcaaaccgcccggccggcccaggggaccgtgatttcatggcaccctaaagtgaaagaccgtcataaatgtatgaattcctagaacaaaagggatttctggaaaccttaaggctttgggaaaataattctagagtttacttacacaatggtttgtcaaaccctgtgtctattatagtcacagtct

SEQ ID NO: 32730 - DNA, 348 bp, Mus musculus
  source 1..348: mol_type = other DNA
cctggctgtcctggactcactctgtaggccaggctggcccccggcttttttttttttttttaaagttgaaaatgcacagacagaaacgtatataagtgaacacatatttcaggaaatattgcttactaaggatgatgcatcaaatttcttattctgtcctacttcattttttcaaaagacatactaatttgtgatgtcattgccactaaatgactagtgtacttaaacttctgataaactatagtccaatcctggacgtacaaactttgggctcctcctcaagcctcggaagcaagcagcgggaggaagggcccacagctgggaggggccgaggcgagccaggccccc

SEQ ID NO: 32731 - DNA, 350 bp, Mus musculus
  source 1..350: mol_type = other DNA
gcacacaggtctgttgtagatctctgtagtcaaggtgtaaccttctacaccttgccagggcactgctggtgttcctgtgggacattcagggggtgggtgatccctctccctctgaggggtaaaggagcccagtgaagcactcttctcccccagggctagcctggggttacagacccggggcccggccagccgccctagggccagtctttgcacccggggcctggagcgagcgcctcccgcagccccgccgctgccgcctcccgcaggtcccgttcgggcgctgcccccgcgcccccggccgcccctcgccggggcggggcgcgcggaggcgggggcgcgcggcggccgag

SEQ ID NO: 32732 - DNA, 274 bp, Mus musculus
  source 1..274: mol_type = other DNA
aacaccatctcttgacaattgttactggaaagcctgccctgactgcctcccaccatcctctccctcctccagttcaagtcagcctggctacaagtttctgggtccatttcaagccccctgccagggcctttgtgaggccataggcactcagctgcagtgctgtcctgcctgaatttgaagatggggtagcctccttgggaagccaggccgcctcctgtccttgggccctgggtttcccgtgctcacggggcccgcccctggcgtgcgaaggcct

SEQ ID NO: 32733 - DNA, 267 bp, Mus musculus
  source 1..267: mol_type = other DNA
gaaagggcgccgcgccatttatgcccctttcagatcagatcttcttggagaagaatgaatggcataagacagtctgcggtaagtgacttttgtatattctacactagttgagacaagtttattctatactatccccagggctgctgatggggtgatcaatcttcaacccttgacccttgccactggtccagatccttcgtggggctagagtgaccagcagctccgcccggctcctgcgcgctcccggaagcgggcctgggaggaggc

SEQ ID NO: 32734 - DNA, 339 bp, Mus musculus
  source 1..339: mol_type = other DNA
ggtgataaccagtggaggggagcttggctcctatcaggctgagggtatccccagagctgttctggaggtgcagccgtctgccctagcccaccacagtccttacagcactgactgcaaagtcagttcttctaacaaagccctgtgcgttagactctcagcagaactctaaggtcatccttggcttccttgtgacatcaaggttagcctgtgttttgccaacatacgtatatgtatgtgtgccccgtacatgcctggtatggatgtgtctgaacatcccctacccctcaacatccagggtgtggtgtggtgtgggaagggcctggcactgccacttccccg

SEQ ID NO: 32735 - DNA, 356 bp, Mus musculus
  source 1..356: mol_type = other DNA
caggctaaatgaacactgaatactcagtaggtctttattgacttcaggtcagtcactgaagcaggatgtaagcgttctttgactgagacaatctacttgccgacaaggctgtcttctaactcagagatcagctcctatcagtcagtattcaaagatgtgttacagccaagcacgagcctcaagctcctcttctgtcgagcgtcaggtcagtacttgacgaccaggcccgcgcagcagcgacttaagaccgagtctcgcgtcctggaacctcattccgcgggtgcgcagttgcgaaaactacgcctgcgccgcctccagagcctgactacctttagcaacaatcgggattccggaag

SEQ ID NO: 32736 - DNA, 416 bp, Mus musculus
  source 1..416: mol_type = other DNA
atttcttttaagaaaactggcgggttttccctggacctggtttttttttctgtttctgggtcacaagtttattaaaataaaagaaacagctttacagacactccaaggacttcactgaaaaccttgcttgcatgctagtttgtgcagatctctacactttctcaacatctcggatggggaggccccctaagcctgagtcccgctatggggctctgagccaaaagcccccgtgagccatggcctccaaagggcagcggtaatttttttcacataaatatatcgcacttaaatgaatttagacagcatgacatcagagagtaattaaattgaattccgtttccaattccttcaggtttgtaaaagatttttagtattttcactggaaaggattcaagaaagggggcttctcctttcaa

SEQ ID NO: 32737 - DNA, 268 bp, Mus musculus
  source 1..268: mol_type = other DNA
ccttaatccgcgggcggatctctgagtttgaggccagcctggtctacagagtgagttccaggacagccaggtgcgtcaataatgattgtacaatatattatcaaaataaaacgacacagttgtttgcgaatgttctgtttctggagctaggtgctttcacccagttactgtgtgcgcaggtgcaccgagaccttggctcagtgctagaattcagagacggtgactgtggcgcactcattcccggcgctcggctggactgggctgggcg

SEQ ID NO: 32738 - DNA, 362 bp, Mus musculus
  source 1..362: mol_type = other DNA
cgtccatggcatcgatgctaaggccagtgcgggaaaagaacatcgatgttgatcttcaggtcctgcccttagaatgccaggccccccacccctcagccccttagcaggccacggagggtccgggagcccgggccgaacgcgaggacagctccctccttggtggcacccccgcaggtcttgacccggaagcttccccagcgcctccatggggaccggccggaaaggggacaccagccggcccgcccctccagcctcccgcttccggcctggacccggggtcacgcccctcggcaggcgtagcggtgcgtaagtggggctccaccccctcacctgccttcctcgcgcggattgggcagtgctcc

SEQ ID NO: 32739 - DNA, 274 bp, Mus musculus
  source 1..274: mol_type = other DNA
agagcgaacaacttaattttgttatttttatattagaccaagctggccttccagtttatatattattttttaaaaataatcttttaaaaaaatattaaatgacctttaaattttagtgagacagggatttaaacttccgtgcccatgtcacagtgagacagtgaagagattctatcctcatgtaagaacagggctcaggaggggcttcctgaagtgcctgtgaggagactaacatgcagttagctgcaagcaggcagtgtgtcatactcagctt

SEQ ID NO: 32740 - DNA, 400 bp, Mus musculus
  source 1..400: mol_type = other DNA
ttaatctccacgaacccagggtactctgaagtccagaactgggttccactattgatcagtttaagcttgaaaaaaaaagcaaagttaacacccactctcttttaaaaataacttatagattatatttacttttttgtgagggcagcaaatgactttctaatgagggaaccaatgatttccttggaaccgatttcgaggctgaactcgaactcacagacatccgcttgactctgtcttctgagtgtaaagagtgcgcccaccccggtttggaaccaattctaactcagcccgcccctctcggagcactgcccaatccgcgcgaggaaggcaggtgagggggtggagccccacttacgcaccgctacgcctgccgaggggcgtgaccccgggtccaggccgg

SEQ ID NO: 32741 - DNA, 474 bp, Mus musculus
  source 1..474: mol_type = other DNA
tcctgagtgctgagattaccaccacacccaaggagactgaatttttttaagtgtttgaatttgtaaagattgtgagacttttacgtttccaatatgattcacattgtgttatttattaatctgaaaaaaaggtactgttgcttgtgtcaaattgacaaggagtcatcttgaaacaagctgatgtcttctgaaaggagagaacctcctttgagaaaaagcccgtgggggtatcttcttaagacaatcctgggcctgtctctgtagtctctggttcttctcaagctgcatcagctgctgaagacaactctctaagttacttctggtcatggtgttttatcactgtgctagaaagaaagccaaagcaatgccttggaggcctgcgaggctagcgtggaccacactgaggcagagttctgtgctgaccacagggacctcctgccctcctgtgtgtttgactacagggaaaagcaggca

SEQ ID NO: 32742 - DNA, 344 bp, Mus musculus
  source 1..344: mol_type = other DNA
cagaccagagctcaggggactgtgatcccgactagaaaacctcacgcttgctgcctaagcatgaggactaaccatggagtcgtcccagccctcgttcaatggttctggtaacagtagcaaaattacaggttttcttttaaagacttatttattttatgtatatgagtacacagttgctgtcttcagacacaccagaaaagggcatcggatcccattacagatggttgtgagccaccatctggaagagcagtgagtgctcttcaaaaatatagttatgaaataacaatgagaataattttatggttggaggagagaatctatctcccagtgacgtcacgggcgct

SEQ ID NO: 32743 - DNA, 499 bp, Mus musculus
  source 1..499: mol_type = other DNA
ccaccatctggaagagcagtgagtgctcttcaaaaatatagttatgaaataacaatgagaataattttatggttggaggagagaatctatctcccagtgacgtcacgggcgctctgtgacgcggctcctctgtgacggtgacaacagcacagcagcgggagggtcggccgagccgccgcggggctcacgcagggtgctaccctgcggcgcgaggcagctgaggaagggccgagggctcggcggaggggtagcccaggtcaggatgcggcggagcccccgctcaggctcggccgcaatgggcgccggtccgctgggccggagctcggggagcccgagggcagaagggcccggggctcgagctgtggtgagtcggccgaagctggcgcctcggagccacaatgggcagaccgcctgtggcgcggcaaccgtgaggggcggggcctcgggtgcgggcggggtcgaacccgggggcgagagggcggggcgggctcgggggcgg

SEQ ID NO: 32744 - DNA, 559 bp, Mus musculus
  source 1..559: mol_type = other DNA
tttaatttattatttattattattattatttattttgagatgctcggtggttaactacagtacttagcactacaattaaactagtgctgggtaaatagtaatttataagcacagtatccaaatgtgatagcagtttatctcagaggtagaatattttgcttcattacatgcagttgggagttaaaatcagataatgtaaatcatactaatatgattggctcttaagtggaggtaagtgtccagtactccactaacagaaagccattttgactttagaactggagccctcggaaggcagtccgcgaggctcacctgagacaggacgcggtcgaagcagctgggctgggactgcccgtagggacccacggccaccgggtcaccagccgtggcgtcggccaggggacgcacagcagggtcacatagcacccgggtcagaagccagcccgcggcacgcctccaccaccctcgcgatggaggaccccgcacgcgcgacgcaggccactgtcgggccccgacgtctcactccgaatgctaggcggagggcgctcgcggtccgtgg

SEQ ID NO: 32745 - DNA, 174 bp, Mus musculus
  source 1..174: mol_type = other DNA
ggaccggctgtcctggaactcactctgtagcccaggctggcctcgaactcagtcccatttttttttttttcaatagtcaaaaaaaggttcaagcttttgcttcttggtgaagctcttcccatcaggtgacgtcggcagcggcgccccgcctactccgggaacgcggagcgccgg

SEQ ID NO: 32746 - DNA, 223 bp, Mus musculus
  source 1..223: mol_type = other DNA
attggcagcactgccttccttcaaaggttcggcagaggacggtaggatccgcaataatgcagtgcttagcagcaccgacccaagggggttcgctcccgcaggcgcagtccccgggtgggcaccgaggaccttcccagggccaaggaggtagccgccaacgacgcccgcctccaagcggctcgcagcagcatatgctcccggaagtaactgcgctgtgctccgg

SEQ ID NO: 32747 - DNA, 649 bp, Mus musculus
  source 1..649: mol_type = other DNA
agatgaaacacaaatacctgttcttgttttaagataatttatgttaacctaaggtagatgtcatttttatgtggttcatgctaatactattgaatttaaagccattgaatctaagtatagaaactaattgtgacttgtcatacactgtttgtatcccaatagtaagggatcaatgtttaatgtaacaaccttttagcctattttctgaagagttttaaaactttaacactgagtttgcatttgttactgtaactagttttgcagtctcaaatcaaatttcattttgtttagtctttaaagaatcagaaaaggataacagtaaaaatggcacagttaaaaatatattggctactgtggtgtcgattatcaaattttggaataaatgacttttctatttttcttattttccagaatactttgcatttaaaatttagatcttcttacatggaagaggaaaggcccaggggaccatttacttcaatgatgttcagtacaaaattccactgccaaagacttgggaaagtcccatttaagttgtaacaggatttgaatttatgaccatttctttagttgaaaaatgttttctaatttgtaacaatcttaggaagattgtatcttacgaaaagtctggaaagacattgagtaaaaa

SEQ ID NO: 32748 - DNA, 288 bp, Mus musculus
  source 1..288: mol_type = other DNA
ttgatattttatttcaaaacgttttctattatgtaaaagtgggagaaaaaaaaaaagaaaatcgtactttttattggtcggctctgagaggggaaaccttcacacccagcagtcagggcaccaactgtctttgcccgacgcaccctcgcgagacttgggtgcagctctggcgggggagtccaatcattgcgcgagattgggccacggtcgccgggagccgcggtgagagatctcgcggaacccggggcagtttctcgcgagagcccgtgcttgcggctccgggagacc

SEQ ID NO: 32749 - DNA, 293 bp, Mus musculus
  source 1..293: mol_type = other DNA
aagacaaacctgtctatacactgatttccagtctagccaaggctacactgttagcacttgctattggaccttgctccctagagacaaaattcggctttttcttccttttctaaggaagatttagctcttcttctggagaaggaacaagtcgttcttgacctcagccgtcacgggtgagtgcggactcggcgttcccgcttcagggaggctcgcgctgtcgtcctggcgaccgggaggggcggggcccggggcgggggggatacgctgggcgcgtccccggggtcacgtggtgc

SEQ ID NO: 32750 - DNA, 597 bp, Mus musculus
  source 1..597: mol_type = other DNA
ggccttttgcaaaacaaaactcatgcaggtttagaaaaactgaatgtggtctagatctaggtagatttggttcaaaattcaaccagtccagggagccccaggctccgccgctcagccggtgatgcgcacgtccgcgcggcgccgcagccgccgagcccgggccgcctccggtagaatggcctgcagctgctcctgcaccagcatctccacgatctgctccttggtgcggatgtccggccgcagccactggcgggacagctcccgcagctgccggaaggcttcccggggcccggccgcgtcctggtagcgaaactgccggaagcgctggcgaaaggtctcggggccgggccgagaggctccgggccgcagggcggcgtcagcgtagggcgccgtgttcaaagctgcgggcgcgccggggagctccggggccggggagctcccggaatcgggcgacggggccgcacagtcgccggctccttcctgctgctcgggaggcgccgcggggctttgggggtcctggctgggctgcggcgccgccatgactacggcgcagtccggcgcctcgcctgcgtctgcaccggaaggaggggcagggcc

SEQ ID NO: 32751 - DNA, 453 bp, Mus musculus
  source 1..453: mol_type = other DNA
cgttaattacagtttacttattaaacttttttcaaagatgtatttacttattttatgtattcaccgctgttctcacaccagaagacaccatgggaagaggagtcagtgctcttaactactgagccttaaagttaaagtaatctctttctcttggttttcgaggacaagcaaaaacaatgacaaaggtttgggaaagtctgaagactcttgcccaaatactttgtcttctaaagtgaaatcaattgcacctatgcatcaatttatagctcaggaggtgtcctttagtctttttaaaactgcctggtcaagtagggaccagcatctaccctaggaggcgcaggtcacctgcacgccagggcggtgatctggaatccgatcccgactcagatttcgactctgcccaatggggaccttgcagtccgccactagtgtcagtagagctgatgtctacgg

SEQ ID NO: 32752 - DNA, 317 bp, Mus musculus
  source 1..317: mol_type = other DNA
accgaggcctcgatgggcctggtgagcggggccccatcgattcttgggccgcgggtcttccctccacccgagagaagccgagactttagacttctggctaaatctggacgtctaactgtagagcgtcttctgcaagtgattttgacccaggagcgacactcgtccctgtttgttataaacatggattcatttgaattaaaaaaagccagaggcttttctttgtacatagtgtatgtaaaggacaaaggggtcctaatttacaacatctagtcactctagatgttaaagagacaaagtagagttagtagaacaacact

SEQ ID NO: 32753 - DNA, 245 bp, Mus musculus
  source 1..245: mol_type = other DNA
tcacctctgggtagctgaaaactgtataccatacgtcaccattctttacacacactctgtgagactatccaggggactggagagatggctcagctcagctgtctccaccgtggacagaaactgtactatcttactaggtaattagtttataacaccacttctagtgagactagtgtagtactttgcctataattatttttataatgtatcacaaattctcccggccggaaccttgcagttgggga

SEQ ID NO: 32754 - DNA, 426 bp, Mus musculus
  source 1..426: mol_type = other DNA
accttccggcaggagcctgtaaggtccatgggcctgtgggtccccagggtcttgggaccaggggctcggcccttgcttccaaagagtggtcctccacagctccgcagcttaggccgcccgaagtcggccaggtccctgcgctggtcccccaggttagcccaggctaccggcctgaaagaggaggctccgtggagagtctcgtcttcgtggtgagctctgcctaggctctggtgggcgtctgtcccacgtgggggaagccagcggcgcgggctcgcggggcgcacacccctccgagttcccctccctgggatcggacgcgcctgctcctgggcagctcttggggccagtgggtcgcgctcgctactcggacgcctggcccggatcgccgccgcctcctcccagggagctggcggggcggggcagagg

SEQ ID NO: 32755 - DNA, 315 bp, Mus musculus
  source 1..315: mol_type = other DNA
gtacagatacaactgcagtgtgtgtgttactatggcccaaacacggtacccgtctttggtgatgggacccagagacagtttaagctggcgcacggcagctgcttgccaagggaactagattggaacccaggccctctattttccaaagtgctctgtggctcacacacgaccgcgtgctagggacactcatgccggatgattcccggaaggcagttgctttgcggattccctaccgggagaagaacctgcatctcaggcgggttctgtccccgcgctgagctggcccacagaggctgagtcacctcttctgagtca

SEQ ID NO: 32756 - DNA, 279 bp, Mus musculus
  source 1..279: mol_type = other DNA
ggtttctatcactgggataaacttagaactctcaggtctagactaggctggccttgaactcacagaaatctgcctgtctctgtctcctgatatatcatacagtaccatcgcctgacagactgccccttgttgtcaaattgacattaaactaaccatgaatggaattcaccaacttgcctggttgctttgtccaattggggcccctctgcagtacagtgtgagcacccccagtgccttgtaactataagccaggtgacagatactacagatacgtgtagt

SEQ ID NO: 32757 - DNA, 359 bp, Mus musculus
  source 1..359: mol_type = other DNA
gtgctctgctataaggacattggaagaaggaagattctctctctctctctgctgctcaccattgttggagagctggactacagactgtaagtcatcaactactatatagagactacccataagttttgtgactctagagaggcctatggatagtcatttactatacacatcatttgatttgttattaaatacacagtacatttatgatcactcagtttccacttcaggcaacagccttgttctgagccagtcttgtgtgccaacacctgaaccatgctttggccagcccgtgtctgtggatagtttaattaaagtcgttatttataattcgggaagtaaacggctccgccgccaaagca

SEQ ID NO: 32758 - DNA, 399 bp, Mus musculus
  source 1..399: mol_type = other DNA
cagttgcatacctagtattggactatggtccgtgatcacagagcccccgtgaggacaggtgcccggccacgaagcgggtcaccgggagggggcacccgatcttccaagttcgcgcgccaccgcggccagcgctgtgtaacctcgctccggtagtctgccctctctggacgatcggtcgcagattcccaagccgcagccgctgcccctcccctccccttcccttccccgggcgggcggcgggggtggcgcgccgggccccgagcggcccccgcggtcccccgcagccccgggcccccggcctgatccgcgcctggttttgggcgcagccgcgcggccccctcccccgcgcgcgtctccccgccccccgccccctccccgccgctctcggggagccggggc

SEQ ID NO: 32759 - DNA, 642 bp, Mus musculus
  source 1..642: mol_type = other DNA
ttctctccaggggatactcagcactggggaatcccagacacagcaacacatgaggtgtcatagcctaagaatttactttgtattttcacctaaagcaaatgaaactgaatagcatctttcacagtgctggcatcattgttgcttttgccattattgtgtcttaatgcaaaaggtagactggaaacagtgttaccttcttcatttccgcctctgtcagatcccagtacagaaagcaggcaaccagcgggcttgccaggcagcaaagatctgtgcttggcagaaccttctgactgcatcacacaagtgggatactgaacccgtccttaggacccttgctagtagctgcgggacagaaagcccacggtgggctcgaggcgtcgccaccagggtgagcccgcagggacggagctggaaccggtttggcggggcggttcgagagggcggagcccctcactcgggcatgcgcgagttggcgcgggcgcgcactccctttcaagaccggccggccagggcgtgggccgcgcggtacgcgtgcgcgcttgcgctgtgtcccgcttgcgcgcgccccctggcggccccggaatcccgggcgacgcgcgcgcggctgacgcgaggggcggggccggcgcggggctttaaccc

SEQ ID NO: 32760 - DNA, 335 bp, Mus musculus
  source 1..335: mol_type = other DNA
gagctccagcagtactggtaaaggactgctgctctcctgtgagagtgccctccccagagtccatggttgggaaggtgcagtacttcccagaattactgagacaagatagtggatttctcttttcatccttaagaatttaactcaacatacatgacttgcctaagtcttgtacctgcaaatttggtttattggccaattttttaaaacctgggcttaggagcaatgctccatctgctgttagatgactgaaattatttccacagtgatcatcatctcaagggactcccccaagcagggacgccatccccaatttgggcattcttccacataggtgg

SEQ ID NO: 32761 - DNA, 435 bp, Mus musculus
  source 1..435: mol_type = other DNA
aatgtacttaatgttgccaggacagataaaaactgttagatcctgctgcctcagcttctcaaatgccgagattgagctcagaccagggctccctaggcagatggatcagttgcctgccccattgcggagccaggcagctatttacaaagtaactggccgggtgaaagccagccttccaccagacacagcaggggcctctgggacaagagggggtcggagagcgggaaacgctgaaggctctccatgccccagcctgggccgacccagagaaaggctgcgtcgaggggggctattccaggggcaccccagcttctcagcctgcaagcagaggcctaataaggccgggctggctgcctcagccccgccgccttgtaaggccgggcggcctgcggaccctccagccccggctccgcccccagagctccgagcatcgag

SEQ ID NO: 32762 - DNA, 198 bp, Mus musculus
  source 1..198: mol_type = other DNA
tttccccacatacagtctgtgggctgcctagagctcagcctgactgtagtttcaacttgagggaccagtcaggctccctgaggagagcagctgtgttccacagactgtgcagaagctggggggtccgacccctcctaggagagccctatcttcccgccattgagatgggcacattgctatgaagaaaagcatatggtt

SEQ ID NO: 32763 - DNA, 498 bp, Mus musculus
  source 1..498: mol_type = other DNA
caggtttctgggcctatatgatcacaaacccagaaaaaatgacgcctagcctcaccctctccaacggacactggcacacgtgcacggtgcctgcctcactcacgctcctggggtgcagcctgtacatggccgagagcggacaaaacaactggtcctttagcacctgggagttactctgagccgactgagcctcagtttccccgggactggcaccctttgtgcctggtagtgcccccacccccatggaggagcacaggagcgggccacttcctgccctggagctgactccgggagccctggtcccaccgctccgccccgggccccggccatgcggcattcctaaggtgggtgggcgcaggaaggaggtgccgcgggcccgccccctccgacgcgtgggcggggcgaagccccctggctctgcgggcccgcccccgagggtgggcgtagctggccacgctctgcacaaagtctgacgtcaggtcgcgaggtgctttccag

SEQ ID NO: 32764 - DNA, 726 bp, Mus musculus
  source 1..726: mol_type = other DNA
cgtccaggctcagatcctctggagatgaccagctggtcttagaaccggctctcgaatcttaaagctcacagggcatgtcttctttctcatcagggattccgcacccggcacgtgcgcagtcttcagaagcgctaactactccggatcctgcggagcaaacggcgggggatagcaggggctccgctcgctccactacgcgccggcccccttggcaccccgctccctgctcccatggccgcgcccggccgattggccggggcgagggagacccgggcccgtcctccctcgccgggcctgccgcgtcgctccgcagcaccttgctccacacggacaccttgagggccccgttggccagctgcggctgaggcggctcctccttccgccgcccgccgctcatcctcccgtcgcgccgcccgagccgggcgtggggcgcgcgggccaagccgaagggagtcggggtctgggaccgcgggactcggcgcgcggggcggcagcggtagtccgggcagcgagggacagtggcccgccgaggctctgctcgctctgcccagcggccggctcgctaagctccacggagcaggcgccgccgagggaggggcggggccctgatgacgtgcgcacgcagccaatcggcggccacgcggcggtcggctccgaagctcggcgacgcctcgacgcgagcgtcccctccggtgggcggaagtgacagaagcttccggcggacgc

SEQ ID NO: 32765 - DNA, 480 bp, Mus musculus
  source 1..480: mol_type = other DNA
gtgtaacccaggtcagacggggcgaatgtagccaggccagcctaacattcctcggactgcagacgagtcacagtgtacaccacaacgtgtctttgtacaagttcgcagggggtgctgctccttctgtcctttcaaaacacatcctgggaagtggtagctagcaggaaagaatttctctcttgggatctcagcttcacattcggatctcagaagagaaagtcatgaacaaagtggggcagcccagggcttccggggaccaaggacccggctcgggaggcggagcgctccgggggacgagccgcggctcagccggcaaggagcgtccgccggaagcttctgtcacttccgcccaccggaggggacgctcgcgtcgaggcgtcgccgagcttcggagccgaccgccgcgtggccgccgattggctgcgtgcgcacgtcatcagggccccgcccctccctcggcggcgcctgctccgtggagct

SEQ ID NO: 32766 - DNA, 439 bp, Mus musculus
  source 1..439: mol_type = other DNA
agggatggcaccacagtgggccttccccacttattcattaattgagaaaatgcctaagaggcgtttccttaagggaggctccttagcttgtgtcaagtcgttgcttccagaagcataattctgagagtattgttcatacactgcagactgcaaaaactattgtatctattgttctttgtttaaaataccaccacagacatagtaacctaagacaacacacctttattatctcaaggtgtttctctcagctgagtccccactgggaaggaagctctagtatgccagctggctcaatgcaaccagcagggcagcaagacaggtgtttaaatactttgtaatgtaccacatgaaagcactcatgtacgttcttatttccctcattctgttagtcaaaagcaagacatagatcctgccccacactcaggggtggggtttgggg

SEQ ID NO: 32767 - DNA, 434 bp, Mus musculus
  source 1..434: mol_type = other DNA
aatttgctagtgttatgaatcaaatataaatatctgatatgtaattactttatttcaaattgacataaaagtgagaggactggaattcactgcagctgtctttagtaggaatctgctacatttatatgaacatcactgctgcacagatgctcgtatatgcacaattaacaatgaaaatctttaattgttgagtcaataatattgttctactcaagaaggaaataatatggctgccatttctaggaatttgattcctggaaatcgaatccctgaggctcaggagtgccagataccttgttaaaacaagtatccataagagcttactaatataggtgtgcagagaaaacatttcacatcccctcctgctagagactctgtaggcctgaccgcaggcgcgttgcgcatgcgtaaacccccggcatcctcagcgcgcc

SEQ ID NO: 32768 - DNA, 246 bp, Mus musculus
  source 1..246: mol_type = other DNA
tctctgtatagccctggctatcctggaccaggtctcactatgtatccttggctggcccgggtactaggctggcctcaaagacacactgtcttcccagtactcagttcacaaggttcagatctgaaaggattcacttcattgatgcatggggggcattctgggcccatgggaggggcccatgctcagagctccccggagtacgcaggcgctccgccggaggcacgggttgcgcgagccagcgcggaa

SEQ ID NO: 32769 - DNA, 473 bp, Mus musculus
  source 1..473: mol_type = other DNA
tgagaaattaactctgacaccaatactggggccttgtcggttccaatggcagcgcatactctgtaggatccatcctgcttccttctcagaccaagaaccgaccgcgtgccaggtcgtgtgcggcaggctcagcacccacaaggggcgcgcggcgcggtgctgggtgtgcatggaggtccgcggggcctctgccagggaatagtctctcctgtcgtccacgaggcccctacggcgacgccgggcttccaggctcctcggccgggtgtgatcccccagcccgcagaggagcggccggcggcccggagcggcgggagcgagccgaggccgcggctgcccgggcccgcctgaccctcgagggggtcgctgttgcctcgccttttgttcgccgagccgcgcgcccccgagccgaggcggcggggcggggagctggcggggctgcgtggggggcgggccgcgccgggcggagccggggc

SEQ ID NO: 32770 - DNA, 363 bp, Mus musculus
  source 1..363: mol_type = other DNA
atgaactgtgcatacatccttaggcaaaattacatcttcaaagggtgcccgatgatctgagttcaactcttagaacccacattgcacacaatatatacacacaatatatacacacaatatatacacaatattcttttttttttttttgagatagtgaagaccaggctggctcctagcttatgatatattttctaaaagttacacaatgggaaatgtcctgagtccctagtatggaccttaggtatcctaacatgtgctagatgctaactccaccccgtggccacttggcctggggatcacaggagtggggtgtgcccaggcacctcctcatagagcatttccttggccaggcccaaggactct

SEQ ID NO: 32771 - DNA, 345 bp, Mus musculus
  source 1..345: mol_type = other DNA
gggaacgttaaaatacctagatgtgtatgtggtttggggtctgtcccaaaatggtatttggacactgactagtaattagtaaaaatactgtctatttggaaataattaattttattttaacaagtttacagcgtttgaaacctggcaaaacgtatttgtttcaggaagatacagttttgcttttctaataacaccaccctttcgatcgcgtaggcattgcgcttgcgcaatgggccgggcgcgagcgccccggggaggccacgctcccagggctgatgtccggggcgcctgcgcagtaggcctggtgcggctgcgcgcgagccggtgccgcggtacttaacttcg

SEQ ID NO: 32772 - DNA, 312 bp, Mus musculus
  source 1..312: mol_type = other DNA
tcagcttatagatgtactgctcagtttcccaaggttacgagttacctggtgcatctgaatgctattatttttctgtattttaaagacaaaaaatgatctcgtgggagtgaggctgagaccctcgtggcgcttctacgtgaagaagccactttcggtccacaggacaacccacaccagggaacccgcggtggagagcgcggggcgcgagctacagtcccggcagcctcagcaccggctcggatcccgtccccgcggcccggagccccgcagctgcccacccagggcccgagctagatctaaggcgattttcgc

SEQ ID NO: 32773 - DNA, 332 bp, Mus musculus
  source 1..332: mol_type = other DNA
gggattcactgtgtagccctggctgtcctggaactcactttgtagaccaggctagcctgggaacgttaaaatacctagatgtgtatgtggtttggggtctgtcccaaaatggtatttggacactgactagtaattagtaaaaatactgtctatttggaaataattaattttattttaacaagtttacagcgtttgaaacctggcaaaacgtatttgtttcaggaagatacagttttgcttttctaataacaccaccctttcgatcgcgtaggcattgcgcttgcgcaatgggccgggcgcgagcgccccggggaggccacgctcccagggct

SEQ ID NO: 32774 - DNA, 364 bp, Mus musculus
  source 1..364: mol_type = other DNA
agataacatatgtagggtgctcagtactctaatcagagctacacattagttctggcttccattttttcccctttacctcattttcagggattgtgtcagtatgcacaagacccacactgatagttcgcttagtttgttttttactttagaaagaggaaaaatagagaatatgatcaaaatatattgtatgaaattttcaaaaaaaaaaaatcaaacattttaaacaattattaataatctaagtaatgcattaaccataattttcccaaccggacccttttaaaattggccgggctgcggggtgagtgacagcgcgtccggccagtcactgtcactggccaatcagaggtggccccgtcttagg

SEQ ID NO: 32775 - DNA, 480 bp, Mus musculus
  source 1..480: mol_type = other DNA
ttttcagggattgtgtcagtatgcacaagacccacactgatagttcgcttagtttgttttttactttagaaagaggaaaaatagagaatatgatcaaaatatattgtatgaaattttcaaaaaaaaaaaatcaaacattttaaacaattattaataatctaagtaatgcattaaccataattttcccaaccggacccttttaaaattggccgggctgcggggtgagtgacagcgcgtccggccagtcactgtcactggccaatcagaggtggccccgtcttaggcccgccccaaggcccggcccaatcgggtcccggtggcggcgtgagcaggcctgccccacactgcggctgccgggcacggccctgccaagcgggaccgccgcgactgacctttgccgggagcccaggcgtgtgccgcgggtccctggcgtcccctccggcgcgctcttggagccacttcccggagcggaagtctgcc

SEQ ID NO: 32776 - DNA, 292 bp, Mus musculus
  source 1..292: mol_type = other DNA
tgaggcccttaagaatctgttttatgagctctagttatatagatgtccaaagaaaagaaacttttaaaacctttgaaagctgttattcccatgtcggagagaaggcaggtctctgacctccatgtggatctgggtcccaaagaaaagggctgtcaaaatctgcctgttgacggcagcagctggtatcaattttccccactaaaggggaaaataaaaccacttattggtaatattgtctactccatagtgaaataaagttacgtgtggacaaaacatataattagagaatctt

SEQ ID NO: 32777 - DNA, 331 bp, Mus musculus
  source 1..331: mol_type = other DNA
tgagtctgagctggagccccagcttcatagtaagacgtgtgtattgtggtacatgcacataagtgtatgccagtgcacaggcatgcagaggccagagtaaacacaggatgacttttgaactcagataactgaaactcaaacttaagtttcaatgcaagttctgactttcagatgagaaactaagctgttgagtccctggcttcagctcccagacagacctgtgagtctcctgtccctgtcagggaaaaggaaccttttggaggaggccaggctcgggctccgcgctgcccgggctcgcgctcggccttgcggggacccgtagtcccacgtc

SEQ ID NO: 32778 - DNA, 240 bp, Mus musculus
  source 1..240: mol_type = other DNA
gaatacattcattgagcttattggagcgttctgcagatgccagaaacctcaggctgttgtgagcccaacaagaacagagaggccagcctggtctagactgagcaactcattcagttgaggagcacaatttgcatgaaaaggacctgaggtgcttgctatctggacatgaccttactcagaggtgctctgaggcccagggcagagaaggaggagtcctgctcctgctggccttaagatgag

SEQ ID NO: 32779 - DNA, 338 bp, Mus musculus
  source 1..338: mol_type = other DNA
atggatacgggatccctgcggctttccctataatagagcaagacacggatatactctggcctcagcagccataggtacatgcatgtgagtgcatatgccacacccgggatttcaggccacatcagctgacctagagatagtttatctggctgccttccaagtcacaatgtttttctgtcattctatgggtcagtgaaggcttgactaaggattccctatctattatgtgacttactggatttctggctcagacttagaactgagttctaaacggagaattgcccccagtttcattaaagcttcataaaacccgctgagcggaatctgctgctgctccc

SEQ ID NO: 32780 - DNA, 534 bp, Mus musculus
  source 1..534: mol_type = other DNA
agggatctttgccagaagcccaggcctgtgccacatgaacctcagtttccctgtctgtgagatggaagcactttcaaggaaaggatgctcctggacccctggtggtctttgagaccagcctgaagccacaatgcacacgggcttggcctaattgagctgggccccgcaagttcctgccctccattggcagaggctggaggctccgcaagttcaaggccagccttggccagtgaggtctctgaggattagagacactcagggtcatcagtttccggacagtgctagccaccggtgcgtagctcaggtagctcgggaggccgagcccggcgcgtggcgtggggttgggggggcgcccccgcgggcggagctgcggggggtggggggctgggtgcgggaggcgcgggcccggctcgcacagcaggtctcccgggtcgccggcggggcccgggtccgcgcttcctcctttctccggctcgcggcggccgcggcccctcctcccgcgcgctctcgccgccgccgccgccaccgccgccg

SEQ ID NO: 32781 - DNA, 206 bp, Mus musculus
  source 1..206: mol_type = other DNA
ggttataaacattttaaaaaagatgtatgtatgtatgtaagttgccaatgggtatatatgcacaccagatgtcaaagttttaaaagatatttattttattttaaatgtgtgagagctgaacagcaaatactctttaactgctgagctgtctttccagctccttgactactatgaatactgctgtgataaacatggaagttaccatg

SEQ ID NO: 32782 - DNA, 274 bp, Mus musculus
  source 1..274: mol_type = other DNA
gtctctcaagacaggttggtgggtggtagtccccccgacactcactctcaccctggtgactgagatgggcactgcgcttgcgcacagtatgaggtcaggaacgtggctaataagctagtaagtgaccacactgaaggaagcacgtcctcagcccgctcatcagctaatctgctgcatatgcccggaggttcggggctgcctaagatacgccaattttattcaagtaaatttgaggactcggttctggaccgggggtccttggaccgctccaaga

SEQ ID NO: 32783 - DNA, 282 bp, Mus musculus
  source 1..282: mol_type = other DNA
actatttggcctctgtgccaaggaggcttgctggaccattatcgcaattcactaaagatctataggatgtagcaaaatcctattttgtgttccagctgcatagcgctttagctacgaagagcaagagtgccggtccagctcgggatcgcagccactaccgcctgccggacagagaaaaggtatacattttgctttcagagaccatccgtatggactatttcaaaagcgggcagagaatcttctgtgaggagcgccccccgcgcgcatgcgcacttagaaggc

SEQ ID NO: 32784 - DNA, 273 bp, Mus musculus
  source 1..273: mol_type = other DNA
tgaggttgccactgggtcttgtgttagtgggggcatgatatcaatggtttctcagccacctgaaatccacatatacaatttcagtatatctactaagtacgcttaacaaatgagaggaaagtcaaattcatttcataatatatcttcctttacccagtaagtgaaaaaaaaaaatccactgtgcatttgattaacactagtgccgagccacatgtgggggttgtcaaaacgcggcgcgctttacggcagcgcgtccttttacggcagtgtggc

SEQ ID NO: 32785 - DNA, 374 bp, Mus musculus
  source 1..374: mol_type = other DNA
gaagaatccttcccggggtccgaaaccttgctccggatcttctcaagacctcggagaaggcagccttatgaaataggcttttctttaaaataaccctacattgtgtgggcgccacgaacccccgacacacactgcttctggtggtggcgtttgagcggcccctccagcgcacgggtctggtggcaggtctcggccccaacaccctagtgttccgccctgcggggggttaggtccccaggtggccttccacccccgggcctgccccacccccgctcccgcgcgggaggccagttgtgcggatccctccgccgccgccggctcagggcggggagcgagggggagggcgggtgcgcggcggcgcggagtggccttcc

SEQ ID NO: 32786 - DNA, 410 bp, Mus musculus
  source 1..410: mol_type = other DNA
tcacctttgcggagctcgcggtgccacacggaggggagagggtctgcacgctctgctgagagttgctcagctctgagagcttcttttccagcgccgattctgagaagggcccgggccgcccgatcgcactcggcccaggcctccgctgacaggctgcagggctctccgccgactgacagacagctcgggggtggggggaggggacaggtctccgcagtaacagccgcccgcgccgccgcgacctctcaccccgccgccacgggggtcaaagggcaacttgccccttaggaggcggcagtatccttggtccctgacttctagccggccaggccgatgcgctttaaccgctcgcgcccgcgcgccggcgcagtgagcctcaccgtcccgctccgcagaacctttctggcgcg

SEQ ID NO: 32787 - DNA, 206 bp, Mus musculus
  source 1..206: mol_type = other DNA
tttgaaagttttgagactgagtctttcactgaacagctcccacccctccaaaaaaaaagttgtgtgtgtgtggggccacacttcggcaagagttcgtgtctttaaaggaggaggtgtggcctaggccagccaccaaagcgaccctaggcggaaatgacgactaagtagtgcgtcgcgccgcgccagaaaggttctgcggagcggga

SEQ ID NO: 32788 - DNA, 310 bp, Mus musculus
  source 1..310: mol_type = other DNA
ccttgctctgagaagtgcacagagcacagccctttcctgtgagaggtgagagctctggggcacatgtgcctcgatgaccctgagttacacgtacatacacacctccctatgcatatatacaggtacaaattacatctatacatatacctatatacatgtgcatgcacatcagaatgctaatagaaatatgattatctgttttggaacagtagttatctggatcaagttaacgttatactaaataatccagttggctgtagcaactttttttttctttgaaccttagtttcttcctcgtgtaaaacaaaag

SEQ ID NO: 32789 - DNA, 271 bp, Mus musculus
  source 1..271: mol_type = other DNA
acaggcctatgccttttccatggtggtaagggagcttagcaagctgtcgtggtccctgttctggctgtagttcacagtgggctagcacagggtccgcgtgccagtacctgcacccctgtggaaacccagccccgtgatacatggtatgtgcatacgtgtccagcagggggcgctcccggcagccttagttcccggacagacagccgggggtgtccgccccgccccgcccggggcccgcccggccgcccggccgccctgggctataagttcg

SEQ ID NO: 32790 - DNA, 348 bp, Mus musculus
  source 1..348: mol_type = other DNA
taataataataataatatttttgccctctgaggttaaagaggagaagggtggccaaatctctccagccccctctccccaaggacagggagtctctggggcaccctgcctcatagcaatgccttcctattttacagttgaaaaactgaggctacgctggagggagcgctgggcagcgccagacacccctagactgttccggtggcctcggcagggggtgcggagtggaccaacgtcgggctcctgtcacccgcagcggcggcggcagcagggcggcgcagagcaaggcgtcgcacaaagggccgctgtcccgccgccgccccgccccccccccacggggtggcccgcct

SEQ ID NO: 32791 - DNA, 365 bp, Mus musculus
  source 1..365: mol_type = other DNA
aacagatatctggttaagaaaactgggttgaaagggaactttcccgacaggcagaactaactatctatgcttgccaggaattggtgttgtgtcttggagacgagtccatgtaaatgcctgctttccctactggaaggccatcctgtcctcacagtaagctaggggcgaaggtgatagtccccccccactcagggagtctccgtgtggtcaccacccagccttacgtctcaacaggctcgcgcgtgctggcatgggtgggcgcgtgcacgtgcacagcacatgcgcacatgcccatgctcgcacggctccactggggcagcccctggactggtccccaacgttgatggggaaccgcagctgccctc

SEQ ID NO: 32792 - DNA, 233 bp, Mus musculus
  source 1..233: mol_type = other DNA
ctgcccgggtcatgcagcgatgttccagacagcggggaagacaatcctacttttccttccgtgacacaggccttcctagcagagagtcagaggcaatgcagaacctccagagagtgtggggtttcccccttctccatgcaggggagaatgggagtggcttatccccttggcaccaggcctcccacccctgtggtgtcgcaagagggttccagtcagtgggtgggccttgacta

SEQ ID NO: 32793 - DNA, 296 bp, Mus musculus
  source 1..296: mol_type = other DNA
aaatactatgtgtaccacttttacaggcagtgtttacaatgtggaattgaactcaggtcccaattgccccaagggcagagctgctgtacatagggccaagagccacatttggcctaggatccaagcagagtttgggagaaagcattgtgacaccactgagccatgtgctgtggaatcagtagtttgtaagagaggtctgcttcagaactcctaaaacgtatcattgtttaaaaaaaaaaaaaaattaacttaatatgttcaaacagtgcgctggagggcccgccgctcggagatgc

SEQ ID NO: 32794 - DNA, 356 bp, Mus musculus
  source 1..356: mol_type = other DNA
ttatagtatactgaactctcttcagagacagccctgatgtctacgctggatacagttatgagcttccatctgggtgctgggaataagagcagtcagcgctcttaatatcatactgattaaaatatagctatatggatagatggatggatggatggatggatggatggacaggcagacagatgcatgcagatgaatagatttctgcacatattttctggcaaaatggatgcattactcctgcaggggacgctgcagagccacgcccactggccagttgcgcaaaggcgaagctggagactgcagcgcgcgcagccgcagctgggcagacactgcggttttcggggagtgtcctgcgc

SEQ ID NO: 32795 - DNA, 334 bp, Mus musculus
  source 1..334: mol_type = other DNA
ataaagcacttatcaaaaactgtctaattgaactttactgacagtcaccgttttctctgctttccatacaaatgtgttttttctcagcctgacacgtggggaaatgttgttactttcctcgtggaagttgaaacgaaattctttgtttgcaaaacgtcatagcttatctccccgatcagatacaactctgctggcccttttcatagccaccgaagcccgaaagggggcggtgtgggcaatcgcgcttcgcgcggccctctgggacggctgcgcacgcgcagcttccggctccaggctcgaggtcgcgggtcagcagcgccgcgcaggcgcagta

SEQ ID NO: 32796 - DNA, 479 bp, Mus musculus
  source 1..479: mol_type = other DNA
ggctgtgcaccggcttttagtcattacttaggcatttactaaacagaggggacaagcttataacttcaaagtaagttactgtgttaaagttttaaatggctgcatagtaagtgcctgacagtagctattacagccattctggctaggccgctgctgggatttccaggtggaccaacgaggattggagtgggtgttttttatacctcacccccagtctcgtgttttgaacttgggagactccacactgcccacctgcaaaacagccagacttgcactgttgtgaaggctggcaatgctggacctgtctttccagcaaaacaactattgctggggctatacagcggagggaagacccagggacttggctggttcctggccacagtgtaaccatgagtacgaaattctttcataagaaggtcaaaggctcccatgagcccagtgactcctgggtcaggccagccctggctatccttcttgga

SEQ ID NO: 32797 - DNA, 434 bp, Mus musculus
  source 1..434: mol_type = other DNA
tccatgggaggagcctcggcagcagtgggactcccatcagctgatcatctgcgcaaggactacctgcaagttagagctcctgtggtcccccatatgtaggactacagctcccacccctaatctttctttttcttttagattaaaaaaaatgtgtatggctattttgcctgcatatatttctgtaccatatgcatataaagcccacatgggccagaagaggacatttgaatctcctgggaccggagtttgggaattgaagttcagtcctctggaagaacagccagtgctcttctccagcccaggctggtcttggcatgtgtaacatgctctgtgctcacacatacctgcctgtgggcggttctggctgactcagcctcacctcaatatgggggtgtcttggaagggtgtgccacaggccctgccaccttcctccg

SEQ ID NO: 32798 - DNA, 638 bp, Mus musculus
  source 1..638: mol_type = other DNA
tgggtttgtcgtgacccccgaactccccaccagctcccacggcctggtccttggagccagagggtggcagaggagcgccgccgcgctgcgtctccgcagggctccaggatgtccatctgcaggccctggcgatgctcaaagtcgagatcgtcgcagtgcgcgaagcccaccgcttccaaacatgccgctcaccttggcctgggacttgttggacacggaggtggccacattggtcagcttgctgcggagcagggtggccatgcggcgggcgcgcgtcaaggcagcgaggactgctatctccgctgggtctccgcgcggcgccccagggcgctctggctcatgaccctcgcgcctgacgttcgaggctggccccggtcacgacagtctggctcttggtgggaccggcccgagagtgcactgcagagctggtgcgggtgccggctgggctgcggagggcggcggcgacggcagcgtcagaacagctacgcgaggctggcgcggcgcccccacgcgggcgcagcccaatgcgctcgcacccctcggagtcaggcggtgcgtgggcggagggaggtgcacccctagggtgggggccccccaagtgctgcatttctggaggaggccgtcccaccttgctgctg

SEQ ID NO: 32799 - DNA, 496 bp, Mus musculus
  source 1..496: mol_type = other DNA
tcagagttcacacagcgccaacccacaggtcttcgtgcccgcgcgcactcgcatgacactctctctcagtccgggggcggtgatcctagcctggccgagcgtaccctgagctccggtccgcaaggctgcttctcagataagcatttgcttaccgagggggcgagggggcgtcctcagaatccctccgagagtagcctttcccttccactgcgcgcagttgatggtgaggcaccagctcctaccacggctcagatggtccaacccagggctgactttcttcaaaagtaatccaagacagtcaaccgatcggccggcctagctctagagacttgtctgtcctgttggttatccggacggttagccagaggatccggggcccccgcacagctccgggactctggaagatagttccgagggtggggaccttcgagctgaactcctccctccttgtggcagcagcaaggtgggacggcctcctccagaaatgcagcacttg

SEQ ID NO: 32800 - DNA, 533 bp, Mus musculus
  source 1..533: mol_type = other DNA
gcctggccgagcgtaccctgagctccggtccgcaaggctgcttctcagataagcatttgcttaccgagggggcgagggggcgtcctcagaatccctccgagagtagcctttcccttccactgcgcgcagttgatggtgaggcaccagctcctaccacggctcagatggtccaacccagggctgactttcttcaaaagtaatccaagacagtcaaccgatcggccggcctagctctagagacttgtctgtcctgttggttatccggacggttagccagaggatccggggcccccgcacagctccgggactctggaagatagttccgagggtggggaccttcgagctgaactcctccctccttgtggcagcagcaaggtgggacggcctcctccagaaatgcagcacttggggggcccccaccctaggggtgcacctccctccgcccacgcaccgcctgactccgaggggtgcgagcgcattgggctgcgcccgcgtgggggcgccgcgccagcctcgcgtagctgttctgacgc

SEQ ID NO: 32801 - DNA, 286 bp, Mus musculus
  source 1..286: mol_type = other DNA
aatcacttgatccagtcctcttctgtattccagaagcttttatagaatgcactccaaaacaatgtgtgtgtgtgagatgtcaataaccctaatacatactgagttcgaggccagcctggttgaaatattcaatcttaagtagacagcttgatgaatttttacaaactcactaaatattcattttagctgccactcccagaaactgaagttagtagtacctcagagtttccttgagggccctgagttccatccctggaacctattgggttacgcctccatgttgctg

SEQ ID NO: 32802 - DNA, 383 bp, Mus musculus
  source 1..383: mol_type = other DNA
cacacagggtactgggggctgagcccagagttttgtgcctgctaggcaagcactctactgagtgggcagggtgtagtgaccctgcctttaatcccttaaagagtgtttcaaacaggattacctggctcctaaagtcagctttcagggaatgcggattccagagaatgtttctcccctctccctggggggaggagcaatttaaaggagaactttcaaaattagatttctgcccagcagcgcctaggttacatgacagaaacccagggcgtttgggtcttgttcttagcaggaaactcaaggaagcagctgggcctagatcttccgggcacctcagctggtgagacaggccatggtctattgccttttctcaggtaaaagaccta

SEQ ID NO: 32803 - DNA, 486 bp, Mus musculus
  source 1..486: mol_type = other DNA
ctggctcctaaagtcagctttcagggaatgcggattccagagaatgtttctcccctctccctggggggaggagcaatttaaaggagaactttcaaaattagatttctgcccagcagcgcctaggttacatgacagaaacccagggcgtttgggtcttgttcttagcaggaaactcaaggaagcagctgggcctagatcttccgggcacctcagctggtgagacaggccatggtctattgccttttctcaggtaaaagacctatctatatagccccgtcctctagataaggcctggccaagttcctgatgtttgtggagccttcagaatcaagctcaacgtgggagattgactttcccctgtctgtactggaggttagaggtgggacacagtcaagggcagcttggggatgcgcgggcccacccctttcccccgggagctgaggctccgccttaagggaggagtcaagaggcggcacggtggctcgc

SEQ ID NO: 32804 - DNA, 342 bp, Mus musculus
  source 1..342: mol_type = other DNA
tggattagtatatagatgtatatgtatgagcatatatgtatgtgtatatgtatatagatatatatgtgtatgtttgcaaggcatgtgctgggagtgtgccaccaccaccactgagaaaaaaagacatttatttatttttatttaatgtgtatgtttgtgtgctacgtatgcatacagtgtccgtggataccagaaagggcatcatcagattccctggaagcaaagttaatgattacctacccctagtccgagtccttgaagcacgtgctcggacagtgcggggctatgtcccggaagtcagatttaaattccgctcagccatgccaatgggattgctggggg

SEQ ID NO: 32805 - DNA, 276 bp, Mus musculus
  source 1..276: mol_type = other DNA
cccttgggggctctcaggggctgtatctgatgcagagtcccccaacaactggagcaggggctatccccgagtctgttggctgataataagcatcattctgtttactgggaaacagaagctacagttccagggaacacagcagcattaactgaattattatctctcagtatgaaaataggagaacgctcgcgcggcacgtgggccgcctacccgccccccgcagcccccgcggaggctgctggcgggccacgccccttgagcccggagggactcgcg

SEQ ID NO: 32806 - DNA, 274 bp, Mus musculus
  source 1..274: mol_type = other DNA
aaggctcagactctctagtctgtgctgaacacaggtttaaggcagaaattgtgtgtttgggagttatactgtgatcgtccctggatctgattgtctccctttgtcttctcacaggtaacaaggtgcttgttgtgggtggctcacgggcccacctgcagccagcatcgatctgttccaagaagcccttttattacatgttctttctaccagggtggtggctgctgacagcagtgggcaggtcagcccgaccttggctgagaccaaggtcctctct

SEQ ID NO: 32807 - DNA, 424 bp, Mus musculus
  source 1..424: mol_type = other DNA
ctccttgcagccgtcagaagcttggatcgagccactgagtgcacagaccggtgttggtctcggctctgagcctcggagttgtaaggtttccacacgactgggctgcgagaccactggagctctgtcttctgagctcaatcactgaaccggctaagagagtcttggcccgaggactcggcccgcggcgccgaggacacacggagcgtcgcccactgggcgggggccgcttgggaacaaagggccagggagggttgggaccaggcggtccgtcccactcggctccagggctcctccggtctccagtcagctgacgcgggggggcgggggagctgtcaggcacgccccgcccagcgtcgctgggccgcgggggccgtgcagccattggccaacacgccgggccgcttgggcccccgcgctccaggcg

SEQ ID NO: 32808 - DNA, 412 bp, Mus musculus
  source 1..412: mol_type = other DNA
gtccacacccaggactgtgaggagtcagggcagaccttatagtatggtgttccctaaataaagttctctcagggtattccctttgatttggaatattttaataaatgtttataaaaagtaaacctgactgaaaaattaaaataatttttaaaaatgggtgtgaagtgcggcgcacgccttcagggctacacagagaaacccattccagaagtctggacaaaggctggaggagactccggatcaaacttgtctggctctagagatgcagaagctggagacacggtccctggccagcttagctgggtcccgccgcggcctttaaaggcctaccacgtggccgcccgggtgtcaggcgcacgctgcgctggctgacgagcgctgacgtcgacgacgacgtcccatttaaaagcgg

SEQ ID NO: 32809 - DNA, 294 bp, Mus musculus
  source 1..294: mol_type = other DNA
tgtccaactaactgtctgctcatcattggccagacggctcgggtttacccgtgctgttcagtgggccacgaagctgtgctgatttcaggggagacccaggattggggtcacctgtgtctgcgcagaggagaggcctcgaaggccaccggacccgcgtccgagagtctgagggccctgcccacacctgcgtggccccctccttgcaaaagacgtctgcgcagagggggcgtggcaggcgtgctgtcactcacggcctgttagccaatccacgagtgcgcccctccccggagaggg

SEQ ID NO: 32810 - DNA, 370 bp, Mus musculus
  source 1..370: mol_type = other DNA
tgctgagtattttggcaagggaaactccagggagagcccagattttcccttctctcctctgccctgtgggaggggcagcagcactctgctgccgagaaaagactctcattatagttttttttttgccgtgcaagcctgacaaccgggatgtgtgcacccttacacattacatacacgcacacacaaataataataataaaatttaaatatatatatgtatgtatatgtacatacacacacacacatataaaaaagcactccttgtgtggctgcttcccacagagagcacaagccaggggctctgccacttgccaactgtcagggtgaatgaaacaactcggtttaattaagcaggctgtttaacacagcc

SEQ ID NO: 32811 - DNA, 691 bp, Mus musculus
  source 1..691: mol_type = other DNA
agctgccactatcctaagacagtgttaaagaatcggagatcatgtttcccaatggggagagggcgcatgggtctgggacccttgcccagactacgtgtggccttccttaggtggccctcaagaagaaccgcttagggcctcagcatccgttgtccgcctcccctgcccccgtggcaacacagagaacgctggcccgcagccgagctgcgcatgcgctctgggtaaggtccgctccccgcgacgtcaaggggcttgcgcccgttcccaaagccccgcctcctagcgcctgaggcgacccgggcggggggtggggggtggggtcgagccacgcccccagccgagtcgaggagggccgaccggagccgaacgcctccgagtgccaccgagctcggccgagcggccgggagtcagttggcagtccgtggatctggcgtcgccaccgccgccgccgccgcctccgcggggcctgtgccggccggccgcccaccaaggaaggagggaggctcgcggcgtggggagagcagcgggggccacgggtgccgccgccgccgccgccaggtgagcgcccgccgaggcccaacgtccccagagctgtcagtcccgggcgtcagccccgtctgcgagcgccttcccgccaggcccggctcccgcccggccctgtcagccgccagcacccccgctccgagcggcc

SEQ ID NO: 32812 - DNA, 555 bp, Mus musculus
  source 1..555: mol_type = other DNA
tttggaacttgctttgtagcctaggctgatcccaaacttgcaatgagattatgggtgtagatacacagcatttatatagactgccatttaatctttgatattcgatataagcctggatccgaatttctaaacatatttgccacagatttaggttctgttgcctggaacaggaaccaagatttttaattccaggccaacagcagctgccactatcctaagacagtgttaaagaatcggagatcatgtttcccaatggggagagggcgcatgggtctgggacccttgcccagactacgtgtggccttccttaggtggccctcaagaagaaccgcttagggcctcagcatccgttgtccgcctcccctgcccccgtggcaacacagagaacgctggcccgcagccgagctgcgcatgcgctctgggtaaggtccgctccccgcgacgtcaaggggcttgcgcccgttcccaaagccccgcctcctagcgcctgaggcgacccgggcggggggtggggggtggggtcgagccacgcccccagccgagtcgaggagggcc

SEQ ID NO: 32813 - DNA, 147 bp, Mus musculus
  source 1..147: mol_type = other DNA
ttaggcaaagcctgaccgtgtgtgctttttcgaacaaacgtgcagggatcatccatacaggtagtcggagaggtctctgagtcagggattcaactggtcaccatctgccctctggcgcccactcgctacaagctatccgtgggagaa

SEQ ID NO: 32814 - DNA, 303 bp, Mus musculus
  source 1..303: mol_type = other DNA
aaaactgactcatgcattactgaggggctaaacatgttagtcgccccacctaataagggatgaaccttggccttatggtcactgacaattcttcaggctgtggccatttcctggtgattagcaaatagaatgtcatgcttaatttaggcttaatatggtgtgtttctctttataaagacagcttctccgtgacacagctgccttgttaaagaaactagaaatatccactttgcttatttgaaagcactggtccttggtgcttgggccagtgtccgtgactcagctagtcactcagggacactc

SEQ ID NO: 32815 - DNA, 212 bp, Mus musculus
  source 1..212: mol_type = other DNA
cttagtcctcgaagccagagcagtaggtctccaccctgcctcatgcagggaagctggagaaaccagtggctcctggctgaattccagtctgaagctagagactagctcggtacctgaagttcatagcctttatggctgagccatctctgcgtcttaaatggaagacttcctttaggacttgaacctcaggtgccttgcaaggttgtcctgag

SEQ ID NO: 32816 - DNA, 393 bp, Mus musculus
  source 1..393: mol_type = other DNA
ggcccagtatttggtactggagggccactcttggatgacagaatcagaattcagaaagccgcatgactgtatagatgaactcttaggttacatagtccaggaagcctggcttaaggtagtttctaataatgagtgtggcagacaggcagcctggccaccttccccggtctgaaatctgcagttatcagatctcctgggtcacccatagacaggggacactctggctgtccagggtcgggactatggtacccatactcactagacgttcaagactgaagtgtcctgctagaggtcccagcagggaggccaggcctgcctgcaggctttgcagctcgacggggagggggctggcggagctcgcggcgcggccccacgcctcccctgcgcggcccc

SEQ ID NO: 32817 - DNA, 142 bp, Mus musculus
  source 1..142: mol_type = other DNA
catgggccgacatcaggaattccctcactggggggctgggttattcctcccttgagtttcccagggataatgcagactggctggccacctgcaatcctgaggtggtcccccactcaaatagtctaggtttctggggtaccca

SEQ ID NO: 32818 - DNA, 500 bp, Mus musculus
  source 1..500: mol_type = other DNA
caggtatttagtgggcacttaaaaattagctgctaaaaaacgaattaaagacaacaattggttgatccttgaggatcctcagggctggaaaactcccggggtgtgcagggccctgggaagtcctagtatgctagggagccaggcggatctgcagataagcagctggagactgacgacccgggcgttgcaggatctgggcgccggcggggcgctcacgtcgtgggaccccagtacactgcgagacctccacctgcaggttgagccccagccgcgggccagcgcccaggtcctcgccccctgcttgcaaacagagccgcctgcgggaccccagccccgccccgcccccgcggcccggccgcttcattccgggggggcgggccgggagctgcgctgtctgtgggaggcggagcggctccgactgcaagcaagcttcggcagcccacacgaccaatgaacctgtgttttgggcagggcccaagctgggttagggtgtccttgta

SEQ ID NO: 32819 - DNA, 483 bp, Mus musculus
  source 1..483: mol_type = other DNA
aaattgtaaaacaaggtttagatgagcatggcaagacctcatctcatgatccctagggacagtaagaactggatcttatcgagtgcatatagtaattgttcaagtccattttaccaattctattgcaaggaggttaccactagcagacatgtattcttgacaaatttcacaaccaacacaagacaacattgtcgttgttttcttggaaaggttcacccttggcagagccttcattcatagtatctgctagagctcatttcaagaaagcatgggcccctttcttagaagccagagtccattaagcacgccaagataagattcttggtctccatgattcttgactccttagaacatgagttttaaagaaccaaacacatgtgcttctatacaatggaaattaacaaatgctttctggtcactaggtcatattcaggtgacttcttgtgaaccaatcccctcatgaataaaggagtcaatcacttg

SEQ ID NO: 32820 - DNA, 405 bp, Mus musculus
  source 1..405: mol_type = other DNA
tttatacaaggctcacatccctcccctggtggcaggcctgtgggctgtggcaggcactgcccagtgatctatgtctggccccagctccatttctctctgaaagggaggggagagattcccacacctgtgtgttgcaggagacccttcaacagctgtcgtccggacgcccccgcagggtagcctgaaagcgagcgcttgagtgcgcgagcggccccgagccggccagcccgggagagggtgcgtgggggagcccgcgagtggcagccgcgggcgtgtgccaggcgcgggcgggcgtgcgcgcgagggtgtgtgtgcgtggccgaggcggagcgcccgggcgggcggcggcgacggcggcggcgttaggactctggggacaccgccccccggcccccgcgtcccgcc

SEQ ID NO: 32821 - DNA, 789 bp, Mus musculus
  source 1..789: mol_type = other DNA
cactcccatgggaagtcccagctgcgatgatcttcagtgtctcccaggagaagccaccgccctggcagcctgggcctgctagggacctgtgctccccactccaagagcgcgcagcccaggaagctgcccgggtgacagtgctccgcgccgggcgagaagcggcgcctcctccctccacccgcaacagccgcgcaaagttactcccgcccgggggtggggggggcgggactgggcacgcctggacacagcagctgcgtccggaggttgggacgggactcccaccgggccccggcatcccctggccacgggacccaactttctcctcccagggctggggagagcgaaggggcccggggagcccggcgggcgcactcacctgcggcgctctgcgctccggcgccgggcaacggcggccgctgcagccccaggagcaggagccggagcaggcagagggcgagcccgccaaggctccccatccgggcggcaagcggctcagccccttcccgagggcgccggggccgggactcgggcgggcgcggggcggccccgcatcgccagcgcggctgcaggcagtgcgcgccgctgggctcccggggctggctcctctccggctgcgggagccggcgccgctgcgctccgagcccaggcgcggcgcgaactgaggcgcgaggctgggcgggggcgggacgcgggggccggggggcggtgtccccagagtcctaacgccgccgccgtcgccgccgcccgcccgggcgctccgcctcggccacgcacacacaccctcgcgcg

SEQ ID NO: 32822 - DNA, 461 bp, Mus musculus
  source 1..461: mol_type = other DNA
acagaatcttctctcattatagctgaaaagcctgaggctgcccagattctgggcatgctccttgatagtcaattaactttactcggggctgttttgtttaactctacagcattagatgtcacctccagaggaccatggggcccagccatgctccctcgcggcgagcgcgggattcagagctgtcagagctccgagcagagggagggatgccctcccccgctggtcactaaacctcggggacagatcccgagccgctgagatctcgttctccgcgtgcctgggcacaagaacagtttattaggcacgactcaaaaggtccgggcctcggctgtttacgcacggcacgcgccgcgggccgccccaacacatccggagcggcccgcggcgcgggagaggacgtgctgcgcgacgacgtcacgcgctgcgccgcgccgcgccccgcccccgggcacttatagcgt

SEQ ID NO: 32823 - DNA, 376 bp, Mus musculus
  source 1..376: mol_type = other DNA
attggaagaatataccatttaaatgagtatttttcatcctaaagatttggctgtttattagtacccactttgctcggaaccggggatactaaaaactcctgagttactcaggtctctgaagccttttgctttgagcacatttgctcaaatcgacacaaactcgaactctagaatatggcataatagtcttccaatgttcaatggaagcgccaagccaagcccatggcttccttaagtccccttctccaaatggggaacccgacttaggcagggttgcagccttgccgggtacagaccagctggaggagatccatcaggcttcctgcttctggagctcggcgcccgctctgcagggaacaggcccgcccccctgtgt

SEQ ID NO: 32824 - DNA, 183 bp, Mus musculus
  source 1..183: mol_type = other DNA
gtcacttctcctaaaatgatgtcaggattgagctgcccattcctgaaagctctcaagccaggcagccctcctcccatgttccattaggagagccttcgtggaggctcaggaattcacgtgaggctctgggagctggagtcatttgcccaaggtcacacagcttcaactggtgcagcagctccc

SEQ ID NO: 32825 - DNA, 359 bp, Mus musculus
  source 1..359: mol_type = other DNA
ctgaggcctgagcctaaagggctcccagtaagatgacactcagtttttaggtagtaaatgacaacctccgaaaggctgctgggagaatgctcacagttcagcagagcggcccaagcaaaagctgcaagacttaatttcgcctctctgttggcttggaccgtcccaagcagtgacaatttctcggggtctatctaagattcacacagagccaggcctcgcgcctcattgaactaacagagcatctgcccgcttgcacagcccctacagtaggcccctcctagggttctggcgcgcgggctcctgctccgcccctgcgctcgcgcgccagggccgggcggcgccgacgcacttggcgggag

SEQ ID NO: 32826 - DNA, 571 bp, Mus musculus
  source 1..571: mol_type = other DNA
gaactgctccaggagctgctcccggtctggtgtcctggcacttctagtacacttacagtaagatcctgatcatttgcatccttaattgcacacttgatcatttgcatccttaattgccttcaattctgcagcactccactagaaaagtttccgtgggagagaagagatcgttctctttcacacaaccacagtcgtgaaaagtgccttaaaacttgtgtattttaatatccttaacgcatactgctctgtattaagacatagatgaaaattgaggctgcagaggctttgactacaaagccacagacagccctctctcagtgaagcctctaattttggtaagacctggcacgctacccggcaagagcctgcccggaacctgcgtccaggccaggccggggcgtggcttgccgcagcagtccccgcccataggcaggccggaattcccggcctggggagcagttgctagcaaatgaacaatataggttccctattaaaaagtgactccttcagtttggatttaccgggaaacgggccagcccagcgctagccccacgtctgtcgcgctgtcgtc

SEQ ID NO: 32827 - DNA, 265 bp, Mus musculus
  source 1..265: mol_type = other DNA
ttggagtttctacgatcagagcctgagcccaggcagtcacaagggtcacactgagccccaggtctcctcggtcctaacatgaggcctgcctgtctgcagtctgcagtctgcagtcttacaggtttctctgtatagccctggctgtcctggaactcactttgtagaccagcctggcctcgaaggcaggttttccctttcccagcaggagaaccccatttccagccaccagctgggctggcttgtgttcctcacagtccaggtggcg

SEQ ID NO: 32828 - DNA, 352 bp, Mus musculus
  source 1..352: mol_type = other DNA
acacagttccaaggctcattgtcccttaaagggtgacatcttgtttttttagtcatatatgcaacatttgctcgtgcaaaagaaaaacaatgtgcctctattcacgtacacatgacaaaaacatgaacatgtgtgggcatgcacacacatgctcaagagccagttcatatttttatacaaacagaaccatggccttgttccgcagcatcgatgctcaggagtctaattgctgaatactgaagggccttccggtgcaggggcttctcccaggcagcatgcctctgagttcccacatgtgggcccaaatttaacaggttttggggggcgggggtgccgggcctccagccaatag

SEQ ID NO: 32829 - DNA, 453 bp, Mus musculus
  source 1..453: mol_type = other DNA
tcctaggagtgagatccctactgaaatggggttcctgggacccctgtattggcatccaaggtagaactaggaatcctagaagtacttgtgaaagaaatgttgactgccacacaagtcagattgagagaactactataaacctcactattaattttttttactaagttgtttcctcctgttactcaagttctaggaaactcaggcttagtaggagctccagacacaccagaacttaacctctgcttagtatatagaatattgtgtgttggactcctactgatgagtgaaacttagtcatgtggatgaggtttccttgtgtttgacctggttaaataaaccacgtgggttctctgtgtagccctggagaccaggctcacacaaatgtcaaacattgtgacatcttgacctttggaatattagaggtctcataataacacagaaaactcttctgag

SEQ ID NO: 32830 - DNA, 350 bp, Mus musculus
  source 1..350: mol_type = other DNA
atcgttatttttgaagagcacataaggccaggcttcagcggctcctgtggcaggagcaaaaggctttggtgaatttctctccccaaccccctctcatgggttctggggttcgaatgccctttatcagggttctcccccagttttctgagctagggctggggtagaaaggtcctgcctcggcatgctcgaagtggtagggcccccccgggatacaatctagatgggaggcagctctgatccacaagcctcgggccactgcctgggtctgcaggcccagcggattggaagcccccctccctccctccggctctgaaggaggctgggccagcctgacctttctatcctgagcc

SEQ ID NO: 32831 - DNA, 420 bp, Mus musculus
  source 1..420: mol_type = other DNA
tgcatctggcacccaatacaaataaataaatatctaataaaatattttccaggggaagcatgggtatgcttaggtaaccttacctaagttccaaagaacatttaaaatctatggtgtcacctagacacatgattccttgcaggactgctgaatcacgagccagtcctcaggccaaaggggtagaccgctggaaagcccttagtgcctgtgcctgggcaccctttaggaaggggaacatcagaaaatggagtttcaaataaagctatctccaaaccttccctccctagggccctcagggaggacctccagctgggaggaggaggaaagagccccgggatccccttgcccctcctcctgcacccagtgagtaatgacatcgcggggaggaggccatgtgatgctgggcgccagcgagccgct

SEQ ID NO: 32832 - DNA, 391 bp, Mus musculus
  source 1..391: mol_type = other DNA
ggtaaattgcttaataccttcttgcagaatttcagacgttcaattatcaagagatacttcaaaatgaaggaacaaatgagatcctgcttttttttttttttttaaagcaaaaaccacaaaacctaaatcttctctgcggacccaaagagacgacccacggcgaggcaagcgcccttggttgcatgtaagaaactccgccaagcattcccggaggcatcagctggcgcaaatactcccgcagcccaccgaatcccgttggcttggggacttcaagaggagcaagccgccgcctttcgagaggccgggctaccgccgtacgcctgcgtagttgcggcgggccgggttgcgcaggcgcagtacaactctagaggcgcgggccaccctatcggtg

SEQ ID NO: 32833 - DNA, 277 bp, Mus musculus
  source 1..277: mol_type = other DNA
caggcttgacaaggaaagcctcgtgtctgtcagaaacctgactgtccacaagctggagacactgagcattcatcttccaatgtaagtaaggtttcacgcttgcttcggtgacatctccctgaacaggacagggcgggggaatagccgctccaatcacatactaggcgcgaatgtcccagtgtcgcgacacgcgcgcggacgcgcctgtcaagacagggtgccccagcatccaactggcttcttggggcgcgggggcccggagcccgatgcactcacg

SEQ ID NO: 32834 - DNA, 530 bp, Mus musculus
  source 1..530: mol_type = other DNA
aactgactttgccattgctaggagcttagctaagggacaaaactgagtgactgagtccccaagatgttcagtcaacaacacagttgattcatccttattcttacatttatttacttatctatttatctgtatttatttatttaggagttgccttccacaatgtggagagagcaacttatgggagttgccttccacaatgtggatcccaaggactgaatccaggttatttggtttggcaacaagtgcccttacttggtactgggtcaagatgagttccaagtcagccaggtctacttacaaaacaagtaaataagatttaaatttattaatgactttgcaaagaaatttcatctgaaaaaccctagtgggtctcttgtttgttttgcagataaagaaagcgagttgcccaggcaaagagcagcctgcagtgatctcagccagtagctttaaatgcagacctgcactctgcagaggagggagacacgccctctagggggcggagcttgcaggaagcgcgcatgcgcccagag

SEQ ID NO: 32835 - DNA, 169 bp, Mus musculus
  source 1..169: mol_type = other DNA
gggctagcacggtgatcccagttcgaacggctaagttggaaggctgatgtttccaaaatctggcttaaggggtgagtggacctgaggtctagccaggttgctgttgccatgacagtgactggttactgtttaacgtatccacccaccttgggtgattagaagaatccgg

SEQ ID NO: 32836 - DNA, 379 bp, Mus musculus
  source 1..379: mol_type = other DNA
gggagctcatagccctgctgtgaacagaggtttagggtcggtagcctaagctatctatgagttaacccagggcttcacaaatgctagctaagctgccatggaagcatgtttttcatgataagacctcactttctaccatttggcccaaagctgactatgagattgaggctctctccctctgtgttgcccccacaccgggggtcactggagtaactacagaatcctggaggttgctccagctgtatctggccccagtgcaggtctagaggcactcgacagacctctagtcacctggggccccctggggccacctggcgccttggcgaagccaagagtcatgtctacccctttgaaatttcaaattccagtttgtggacaa

SEQ ID NO: 32837 - DNA, 233 bp, Mus musculus
  source 1..233: mol_type = other DNA
cagaatttgagctcaacttgggctccatagcaagacaaaatgatggtctgagcggaagcccaggtctatgggctgcagctcttgtcattcagtgttttcaggaaaccatctatggttcagctggagcaaccaagagatatccaaccgctgggtgagtcccagcggttcccaaagccccaagtgtgggcttgggttccccacagagcctccaccctctgcagaggctaggccag

SEQ ID NO: 32838 - DNA, 351 bp, Mus musculus
  source 1..351: mol_type = other DNA
agttgggggccagctggcaatccctttgaatatgacattttcttagaccgacgaaatttctctctagaatgtggagttaataaactccttttcaaactactgctgtctcgagaccagagcaaacaagtagtttctgagtcggggtagtgcacttggccaaagcggctcagctgatagtccagacatcagctgaggacagagtttgaaaaaaaaaaatatatatatatatataaaatgaaaataaataaataaaaagacaatttaagcacagccggggccaccaggtggtcccggatgggcgccgcctacacgcggctcgagcgtcacttccggcgcgagggccgggccggc

SEQ ID NO: 32839 - DNA, 238 bp, Mus musculus
  source 1..238: mol_type = other DNA
ggacacaggcagtgtgccaggccccttgattctatgtccttaagatctgacacatttctatgatcactgtagtaagttacattgtaaaaataaaattcaagcctgtgtaatctgaggtcggcaagttctagaccatgttgagctacatagtctcaccagtatagttaaaaaaaattctcttaaatgtccagttgttcagatctatttcttagaggtaactgctgataaatttttttta

SEQ ID NO: 32840 - DNA, 255 bp, Mus musculus
  source 1..255: mol_type = other DNA
tatattctttactggttaacagacaagaaaacattgacaagctgagtaaagtccccagctcccccagggcctggtacttagcataagtttcttttgcttgttcccaacaaaatgagaatttttattataggccagcagactgacccccgcggagggacggatgtagcttctttaggctccgccttctccccctccgtgggcggggccacccaatgacgtaaactgggcgtcctgcgaagggcgggccctccgtcg

SEQ ID NO: 32841 - DNA, 341 bp, Mus musculus
  source 1..341: mol_type = other DNA
gagaatcctaggggcctacaggcctttttccctctgtacagtgggatgagaaacaactgagaggaggaaagccagttcttcccccagctgtgggttaaggctgccatccaagcaatcaactgatttaatctgaattcagatttagtctaattcatagagctccacaccagctaggagcaccctttgaacttagggtccctacctaattgctgaatatgaattaattatttcccatgctgaaattaattctggtgtttaaattttccaaaaaaaaacaaaaacaaaaaacttttacttttttgccatgtcttcccggccgccgtagagcaagcgacgcggga

SEQ ID NO: 32842 - DNA, 239 bp, Mus musculus
  source 1..239: mol_type = other DNA
taaggacagttaaattctcttacttaaaggggaccccgggagtccacaaggccaggcatcttgggccaggagacctgtgacttgcttaaagcaggggacctgaagccagttccaacagagcagtgttgttttcctgtgtatattcataagaacagaaggacacatgcacgtactgtgcccagcacactcaggcagccgccgtcctcccagtgtccaaaggaaatggatctctcttgtgg

SEQ ID NO: 32843 - DNA, 361 bp, Mus musculus
  source 1..361: mol_type = other DNA
agtttcagatgagaattgcatctcacctagttctgggataccaccattaaatggataccccagggatggcaggactgagaaccatagtattgctgttattgctgcagaaaccagtccactgtatttacccacagcactgatgtgagcattctaaataccgtgggcatatttctccagcggccaccctggagacttagttctcaggagtcggactgtgtggctccagcttcagcctgcacaaagtaggcgcccatctgcgtctgcagggggctcacctgggagcttcctagggtgtagccagcagggaagtctggggttcagaattccgggaaatgctgtgccggggcagcccggtaaaaag

SEQ ID NO: 32844 - DNA, 520 bp, Mus musculus
  source 1..520: mol_type = other DNA
ggccaatcagccttttattgacagatgatgacaccctgattttttttaaaaagatttatttatttaagtattttatgtatatgggtacactgttgcagtcttcagacacaccagaagagggatgtgagccaccaaagagcagtcagtgctcttaaccactggggcatcccctgtacccaatggatacagttggtgaccagtccagtgcccaggaagccacatgcccactagataccttctgtactgagtatgccagactctttgtctgaacaagggagggggtccggcccaggtcgcaggtctgcagaaaagtgccagcacacagtaggctcagtctgcttaggcttggccaccctaggccaccttcagagcccaggaggatagggaggctcttggttgccaagagcagacaggctgccagggaagctctgctctgggtcacacccacctctgggtggctgccagtctccctgccagaaaccacaggctgggtctgggctgcccagagcttgagcttcag

SEQ ID NO: 32845 - DNA, 264 bp, Mus musculus
  source 1..264: mol_type = other DNA
ccggtggttcataagcggctgtaactccagttccaggagatcctacacccaaaaattaaataacaaaaaatgaatttgtagaagtcacttctcgagggacctacgactcccacgggaggctgctgctgctgtgcacacctggaccgggcctctgctccagatgtccctgcgggcccctgcgtgggttagggcggggagcgtcgggagagctcagagcccgccccctgctgtaagccgggcgcggcggagatggagcactcggag

SEQ ID NO: 32846 - DNA, 399 bp, Mus musculus
  source 1..399: mol_type = other DNA
ggtaaaaggagaaatgacaaaggcctattactttgttctttctctaaagcttcaagacgcaagtcttattgccacaatttaggtaacactgaaagcggatcccagaacgaagaactgatgtacactggtttacttcatgaagcgtccttggtctaggaaaagaacagtaagtaccttttaggctaactgaaaatggagggctgtctgttctcctttagttacaagcattcccttaacgcacagctaaaagccgaccccgtgagaattattttcagggttgggtaggaacagcgatcctaggcttcccagccctggggcggccacctcggccccccttttcaggaggacggagcaaccccgtgcctcattcacccaatgaggaatcgactcagggtgggg

SEQ ID NO: 32847 - DNA, 324 bp, Mus musculus
  source 1..324: mol_type = other DNA
aacaggactaaaactgtttattataattaaaaggctatgtattttaaattcagtattactgaaacatgtctagaatttcaatgttttctttggatgacttcttgtaaaaagaacaattgtcttttaatcgcaacagcacttttaaagtaagcactggctgcaccacatggtggctcacaaccatatcactcgtatacataaaataaatacataaatcttttcttttaaaaagcaagcagcctggtctgtgagttccaggatagccagggctacaatgcatgtaccccaataagatgtatgagtgattattattaagtgtgcctt

SEQ ID NO: 32848 - DNA, 490 bp, Mus musculus
  source 1..490: mol_type = other DNA
gcctcctcctttgggaccggtgaacttgcccgaaagcagcttcccaataaacctgcctttactataatctggtttaaattggctcatttcatcggcaacggagaaataacctatcacctataacatcattgtgttttcttggttttgttttaaaacaggagctcagcataagtgcattatattcttttgtgcgtataaaaaattttcatcatttattaagataatcccaaaacttgggaggcagaggcagctgtgtctcgaaaacaaacaatcttgacaaaaagtatgttttctcttggtcgccaacggagggaagatagtctgcctccttcggtgattcagctgtcgcttcagcactggagtccttccctggccccgcccctggacaaggaagagcggccggacagagctaagggcttgagcccactcttcagccccgcctcgtctggccccgcccctcagggccggtccacagtgggccttaaaggca

SEQ ID NO: 32849 - DNA, 543 bp, Mus musculus
  source 1..543: mol_type = other DNA
cctttatcgtccttgcctttggtaaaggagacttaagccaagctaacctgcagggtccttggtccctagtaacatatatctgttatgagtagcaaagcagctgcccggaagatatagccctggccttggccacaataaaacctctccagtcttggagcagagattttctctctctctctctctatatatatatatatatataatatatatatataaatatatataaatatatatatacacacacacacatatataaaatatatatataaatatatataaatatatataaatatatataaatatatataaatatatatatatacacatatataaatatatatatacacacatatataaatatatatatacacacatatataaatatatatatacatatatataaatatatatatatatttatatatatatattttaagaactcacttatcaagtgtcgctgacactcgggccactagaggccgcccgagaggcacctcttgccacgccgccgctccgcccagcctcctctcgcttccggtaggg

SEQ ID NO: 32850 - DNA, 264 bp, Mus musculus
  source 1..264: mol_type = other DNA
agattctggataaaggccgaagcctgttagctatcctgattctaccgaagtggatcgagccgctgctgactcctgtgcactgttaaagtgtttaagaaccatcattaaaaataggctttaaaaacagtctagggcgggccacccccacgtgccgccaggctgtgtgtcctaggccctttgtgcagagacttcttgtgcaaacagaggatcttcccaatggtggccatttctgacagggcttggaaagcacaggcttcccctgtc

SEQ ID NO: 32851 - DNA, 339 bp, Mus musculus
  source 1..339: mol_type = other DNA
cacgagtgtacttgtaaagattttgtaagtccaaggtgtgctttggccaggccacagaacaaagaaaaaccatgtgatttggccatatggcctctgtctcacaaagcggagaaggagcccctccaggcacctggtgcctacggagtccagaactaggaaatggcttttaaaacatcttcatttaaacattaacatgctaaaagttaaggggttggctagcccggacacataggtgcctgaacctacagcataatttatgtattaggaaatgccagactagccctgctagtccctaagaagaagacattgtcttccttcctcttaggaaccagctaaacc

SEQ ID NO: 32852 - DNA, 189 bp, Mus musculus
  source 1..189: mol_type = other DNA
aggactttgagtcttggcttcccctggcacgaagcgctcacttgctaccaagcagtaagggcaatgcatggttagcttttcaaaacttaaaaagttgtagaacacttgcctagcataatccccattcttagtaagcgtattcacaaaacaagatggttcaaccccttgccctaaggacatcaggcaggg

SEQ ID NO: 32853 - DNA, 281 bp, Mus musculus
  source 1..281: mol_type = other DNA
ttttctagaatctctgttagataaatacagacactggtcaagagcctcacgcttgctaggcccaatttcgtgggcttctgtgaatagcgccctgattactctcagagcattaaaatctggattttgtttgaaaataaaaagtttaatcatgtccttataaaaagaaaatgcataaaataaatatactataaaacacactttgtttacctgggaacattaccaatgtccccaactgtgcagtacatttagagataatttttttttaaaaaaaggaggggtca

SEQ ID NO: 32854 - DNA, 396 bp, Mus musculus
  source 1..396: mol_type = other DNA
aggtgatttcaggaaaatcatgaaataaggaagccagaatcctttctccatgtatcaacagtcaagcatggtttacagccaaagatggtaaattcactctgagactctgagactgtcatcaactagtgacatcacacagaacatagtaaggttttagagttacttgtatgcaggtaaacctcgattatttttgaaattttctttggaaatagatctgtgtccatctcatatgaaaagaagcaaaaatgcatagtttttgtttttgtttttttttttttctcctggaaacatcatgtgatgatcttgagatgacgataaagctttaaagaagacaaagactctgacatactgtatctccagtaggacagacaatgaatgccttttgtgacttcagcc

SEQ ID NO: 32855 - DNA, 253 bp, Mus musculus
  source 1..253: mol_type = other DNA
gttttaaataccctttattatctgttttaaagattttaactacaccatagagaagtttttttctggtcttttcaaagatgtatttgtttatttgagagaatcataagcgcaaagcaactgaatgtctttcagaaatgccggaaacttaaaagaaagtctctgatacgatgtgcttttatagaattccaggaaataatgacaatacccccttataactccagggacacccacctgagaaatatataaattaaga

SEQ ID NO: 32856 - DNA, 333 bp, Mus musculus
  source 1..333: mol_type = other DNA
aaatgtcatgtttccaggaagtgatttcaggaaaatcatgaaataaggaagccatggtttccagccaaagatggtaaatttcttaaggcttgctctcctaccaggatatgggggcactccattagaaattttagagttacttgtatgcaggtaaacctcggttatttttaaaatttactttggttttttgatgggctgttgacaagagcccacacttgatttctcctggaaacatcatgtgatgatcttaagatgacgataaagctttaaagatacaaagactctgacatcctgtatctcaaggacagacaatgaatgccttttgtgacttca

SEQ ID NO: 32857 - DNA, 338 bp, Mus musculus
  source 1..338: mol_type = other DNA
ctctctctctctctctctgtgtgtgtgtgtgtgtgtacaacagtgctgtttaaaacgtgatcacatgacaacttgagataaatgtattgatatattgcaatttttttgaagtgatcactttacacatgacttagatgaaatttatccatacgttgatggttgacaacatcatgttatgtacatgttttgaatacttacaactggctagcgtcccagtgtggtacactgacaggccgggatgtttttaaccctctaaggtcatcacgaacatccatgctcttatctaaacacggcataattttgattatagccttgaaaaacaggttttgtggggacaa

SEQ ID NO: 32858 - DNA, 375 bp, Mus musculus
  source 1..375: mol_type = other DNA
cttaaagcagtgttttccaaaagcattgtctttgtttgtttcatttcctgtttctacaataaaatactatgacagaagcaagaaagacccatgcaaaattagattatttttatctgttcatttaaatgttgtgtatgtatatatagtctaactgaagatatgctgcttagttgttgtattgcttttggttgcctcctcttccctgaagacctggttttagatgagggttactgtgaactaaacagcactactgtcttgaaggacattgcatgatggataatgaaggcattgtcctgaagagttctgcagcctgcagtctctgatcttgtgtccttggagaggtccagggaacagtaccaagactcctactaaagg

SEQ ID NO: 32859 - DNA, 272 bp, Mus musculus
  source 1..272: mol_type = other DNA
atgtcatgatgaaaacctgtgaaggaaactggtctgctgacatcaaggttagtagaattcgaccatgtcaataattaggattataaatttcatgtctgtctgcagtgttcaggactaaaggaaagagctctgtgcatgaggactgttctgagaacacaagctcagggcagtgtctgtgactgtgaaggcctgatcaagtcctgaagacttctgcagcctgcagtctctctgatcttgtgtccttggagaggtccagggaacagtaccaagac

SEQ ID NO: 32860 - DNA, 443 bp, Mus musculus
  source 1..443: mol_type = other DNA
agaggagcctttgtaaaaaatggcattttacagaactaagataaacgcttgtattaaaaaattatatacatatgtgtgtatatatatatatacacacacaccatatatatgatatatattacagatcatacacatcatatatattatatagcatacacaccatatatgtgtgtgtgtgttacatatatatacatgtatatggtgtgtgctcacacactatggcacacaaaacaggactgattcagaaataggctttaagaaattaaatgctgctacccaacgcctgtcctgcacaagacacgcctcggtgtctgtttctcgcctgctcttaggagaggccgccagggggcgcctgctgggtctggcttctactgccgtgggaagcctacatctgcccagcaggtgtccctgcccagagcaaacaggccgctgggagtcccggg

SEQ ID NO: 32861 - DNA, 399 bp, Mus musculus
  source 1..399: mol_type = other DNA
gatatctcttctgatcattggatgcaatcaacacacaccagggagcatccatagtgggcggaatgcatggcagccatagtttttggctgacatctgaagccaatgaattcctttaactccacgctgattgcagcgatgagtaagaggccctgtctctttccagtgatctctattagccattgatgcaattcattcattactttaagggtcattttaagcccttaatcttaaaactttccaggttccagtcatggaatgggcaccgatgtttcaaaatcccagagcttgtccagaaagtctgccacctacttctgtagcagcaagactcctgttctgtggctaagcttcctgcctgtgcaagagccacagggaggggccaaatgcatgccactggggcca

SEQ ID NO: 32862 - DNA, 371 bp, Mus musculus
  source 1..371: mol_type = other DNA
taaaaccctacattttaagctttcaactcataaatgcaccggtgaaacaacacccttggcttaatgctacgggaggaactccaaggcgtctcggcctttcatcactccaggaagggacagaggagggggcgcgtccttggaagcccaggcaggccaggcaggcggcggtcaggaccgctccgcctcttggggctctcctctgggaaggagcattccggctgcccggagtgtcgccgcccgactccagctgtagcccaattccggcccgcagctcgcgcctgcagctcccagagcagcaggaaaaaggggcgcgaacgctcctgccagtgggaggggtcgcagcccgcgctccccctccccaccctccctgc

SEQ ID NO: 32863 - DNA, 246 bp, Mus musculus
  source 1..246: mol_type = other DNA
tctttgctgcaggcatgtgcgcacaccgcccacccctgaagtaaaaccctacattttaagctttcaactcataaatgcaccggtgaaacaacacccttggcttaatgctacgggaggaactccaaggcgtctcggcctttcatcactccaggaagggacagaggagggggcgcgtccttggaagcccaggcaggccaggcaggcggcggtcaggaccgctccgcctcttggggctctcctctggga

SEQ ID NO: 32864 - DNA, 424 bp, Mus musculus
  source 1..424: mol_type = other DNA
aaagatcaaaagttttgaaagacagggtttcacactgacacatctaaagaatcttaccattacagagtaagactatttcgtgacacgtgagtattacacacaattcacacttcagttagcaggcctggaaaaacttggtcgttgtcggttcagagttgctaatcaaaaactagcgcatccgctttgatccccagctataaattgggggctaagcagtgcctcggattttaggcagactgctcatgggctgcagctcctggagctacagattgagagccggcaggcacgctgtgggcgggtccccgggcgggttgggtcccaccccagtggtttccagcttgcccagcgcagcaccccgcaggcctaagctttcccgggggaattccgggcggtgcgggggcagggctgctgcctataagaaggg

SEQ ID NO: 32865 - DNA, 470 bp, Mus musculus
  source 1..470: mol_type = other DNA
tttagaaacacactccgctcttacgaaaataaaaataaattacttattaaaacccacagggatgtggtggtgcatggctttaatcccagcctttaaacagtttcaagatcatcctggtctacaaagagagttctaggacagccagggctctgtaactgaataataaaatttataataagagcattataagattatttttagatttctatcagtaaaatttataatacacacatatactatttgagggatacttgtctccactacagtgtttcaactgaatataagctcattttattctaggaattatacagagaaaaaaaggtcacaggtgccagtcaacatatgtggcctggctggagatgggcttataaactacataacctttaaaaatcttagcttcatttaaaaagaggggtccatcttcttatcttatagggaggtcatgatcatattctgatgtcacagctcag

SEQ ID NO: 32866 - DNA, 422 bp, Mus musculus
  source 1..422: mol_type = other DNA
tatagaaacaaaaaggctttttgctggctatagagaacaaagagcttctttctggctccaggggctttaccttccaggtctgtctttaaaaaaaaaaaaaaagaaaagttcccttttgttaaatttaaattcagaggcaggcggatttctgagttcgaggccagcctggtctacagtgtctcgaaaaaaaacaaaaaaaaatttttttatattgttatcattgtatttctatgagtgtgatagtcagatgatagcttcagtcagttcttttcttccaacatgtgagttcaagatattttatttattttatttattttatttttaaagtctagacctcctaggaatggtggattttaaaaatctccctctagagggcgcgcaagacccacggttttccggaagctctcccttcccaggaagcc

SEQ ID NO: 32867 - DNA, 455 bp, Mus musculus
  source 1..455: mol_type = other DNA
tctcgagctgtcctgctcctggttagggggctgtttcgactgggccgccctctggcatctctagagcacctcgaggtgttggctccttgccggcgtgtagggtgcggcgcatcccctccagccctgactcgcccagtgcgctgacccgtagggcgacggctctgtgtggtccttaggccagctgagggaatccaaggtccatgcacttggctggcttctggagaagtcgtggccagggggcgggcagcgagcgcgtgcgcgtggtcgttgcgcgtgggccggagccggcgcgtgtgcccgcagcagctgtgcgccgggcgggggtgccgcaagtgcctcggggtgcgcgcagcctcgcgcgggcggagcgaggagggatgcgtgcggcttttcgcctgccccgcaagtccgggtcccggcgtttagaggagctgtcctccgccgccagccccgag

SEQ ID NO: 32868 - DNA, 426 bp, Mus musculus
  source 1..426: mol_type = other DNA
ttaaatcattcctttcaggaaagttagtcctagaacagattaatctattacaagataggaacattctatatctccgtaagatttggagttacaatattttattaattaaaacccaggtaattttatgagaaaattttgaacgaaactaaattttgacaatgcagcatgtgtgaaatttactccgtgatggaatcaatgctataatatgtacccatagcaacatgttaatggtggaattaatttacatggttggaggaacatgtttttatttattttattatattcttttattaagaccacagggagggggtaggacagctctgccctcaccgttgcgggcgccataggtgcgcgggccctcaagccctccggtaacctcggagtggtttccgggacggcgccggaagtcctctctcatccggcttc

SEQ ID NO: 32869 - DNA, 201 bp, Mus musculus
  source 1..201: mol_type = other DNA
ttcacagcagtaaaatgccccaatggactatcccagggagctttcagctctcactgccctgccttgccctcaggccttagaaaggtaggaagaggtccggctgcagccggcttggaagctgtctcggttcctggttcccaccagagccaagaatgacacctgtgaggtggcagggcgcccgcgctgcccgctgtgcttcct

SEQ ID NO: 32870 - DNA, 334 bp, Mus musculus
  source 1..334: mol_type = other DNA
tctagcttccgtgggtaccaggcaggcatgggctaggagaactaactggggtctcatgagaacattagtctgtactgtgccaccttggggaccaagtttccaagacttggaccccctgtaaacttcttagacaaacagtgtatgaagtgtattctgtgtggtgcttgggaacacagaggcacacagtcagtagtaactgctgttcagttcctgttgctggactgttccagaagaagccagcctggtgtgcttgttgttggaaaccgggccgcgactaacatgaatcaaatgtttaataaaagtctgcatgttgagatgctaagttgtcagcaca

SEQ ID NO: 32871 - DNA, 309 bp, Mus musculus
  source 1..309: mol_type = other DNA
cccccagccccacactcactgggtgaggtggtgcagacctgcgatcccagtctggacacaactgagtagacgtaacctcaggcctgtggacatgcatgcctctagctttcagtgaggcctctgctttagttggtggttaatctcagcagcagaaaagcaaacttccagcctccaatttgaccctgggaaaagtaagattctggaattcatataacttctgaaaagattctagaagaactttaagtggccagagactctcagcttgcggaggccctgcactgcggggcctctggggagggaacgtactgg

SEQ ID NO: 32872 - DNA, 194 bp, Mus musculus
  source 1..194: mol_type = other DNA
atctcctggcctgatgctcaccaggaatggtggcttcctgtccacctgacatactcttgggtggtgaccccccagccccacactcactgggtgaggtggtgcagacctgcgatcccagtctggacacaactgagtagacgtaacctcaggcctgtggacatgcatgcctctagctttcagtgaggcctctgctt

SEQ ID NO: 32873 - DNA, 321 bp, Mus musculus
  source 1..321: mol_type = other DNA
tgtctttgggggggagacgctccagggcgtggccatagctccatggaggatatctgatttgcctagggaaatggctcagcaggtaagggcctccttcctgagttctacccctagtattcacagtggaaggagagacagaactctctctctctctctctctctctctctctctctcacacacacacacacacacacacacacaaatttgaaaacatatatgtgaatcataagatcatagagttctatggagccagaagaaatcagaagaatctcattgttgtctgcagtttcttcagacagaagcaaactgttccaaacgca

SEQ ID NO: 32874 - DNA, 282 bp, Mus musculus
  source 1..282: mol_type = other DNA
catatgagaaagtagaatctggctgttaatattttccctttagcagctggtactggagatgcacaactaggagggggctgctcacgtgtgcacccttcttccttcatttaaaaaaaaaagtaatggtaaagagggcatgccacattaactttgagttagcattgaccctcagtgcagcatggatggtgtagagtacactttgggcactaccctggttgaccagaatgctagccctatgcagtccaagctgaatgtcattagctccacttatgatctcgagaa

SEQ ID NO: 32875 - DNA, 301 bp, Mus musculus
  source 1..301: mol_type = other DNA
aacagtgggtcatactgatgaagtacttccggggaggctccatgcacagctcccgaggagtggtctcagaattcacacctgtcagcacccagggaaggtcctctgtgacacaggaaagcttcacttccaggaagcattctttataatggtggggagttaacaccacatcacccaccagggccaggggctgaggtgagggagacactgtcagtttcttaagaactggacccagtacctctgccagcgcaggttcctggatgctccacaggagggctccggcctctgctgccccaacagccca

SEQ ID NO: 32876 - DNA, 284 bp, Mus musculus
  source 1..284: mol_type = other DNA
acaatctcatgagtatcacaagggcttgaaattgcatcaagtgcatgtggctgctgccagcggtccctgcctcagtttacccctgcatggctcacatccttcactaaagcttcagtatttaagttgagggaatctcctggcctgatgctcaccaggaatggtggcttcctgtccacctgacatactcttgggtggtgacccagccccacactcactgggtgaggtgatgcagacctgcgcccgcgggtacagcgagtccggcctctggggagggaacgtgctgg

SEQ ID NO: 32877 - DNA, 397 bp, Mus musculus
  source 1..397: mol_type = other DNA
gttggtagcccctggtaggacctaggtgttccagtggaaattctcaaaacatgaaagtatttttcaaacacgagcccttcccttagagaactgtaggttccatcttggagtccatcagagggtccatcacagactccatcatgggctccatcacaggctccatcacagctccatcatggggtccatgttctattccaattgagtttacataaatatgaactcatgacttgaccttgattttcactgtattgcacaagaaaaaatactccagaaaaatcatattatggaaaataaatatttgattaaatcagtaggtgtaatgtgatgacaactttatgaaaactgtgtaaattaattgaaaacctggactaggtaatgaataactaagagcctctat

SEQ ID NO: 32878 - DNA, 277 bp, Mus musculus
  source 1..277: mol_type = other DNA
taaaagtgctcagccttgagcatcttgcagaacatcgtgaattaggacatacatgatggtgtgtgtgtgacataagtgaaatcaatctgatgtcctggtgtcacgtgtggcgagcacgcgcgcgcgcgcacacacacacacacacagacacacacagagtaaatctttttaaaaatgagtctattttatggacgcccggcaggaccctgagagcccctaaactatatatatcgtgaggaaactactgctctgccctgatttggccagcagaggcagt

SEQ ID NO: 32879 - DNA, 376 bp, Mus musculus
  source 1..376: mol_type = other DNA
gagaagtctgctgagtggtcaattgctgactcactgctcagagcagtggatgctgtagttagatcatgacttacgtcgtgattgtaaaataaactatttctcccataagttgcctttggtcatggtgttttatcacagcaaaagaaaaggataaatgctcttcagtctagattttacattgatatatatatatggcacatactgatttctaattcagagaaacagggttatagacctttctctcacacccacatgacccaggcttctgcatgtgataggttgacctactctgcctgcagcgaggagaaaagcaggccttaagatctgaggtagatctgactcacttcaaagttgcctaaatgaacgacatttattc

SEQ ID NO: 32880 - DNA, 361 bp, Mus musculus
  source 1..361: mol_type = other DNA
ctatacagtgagaccctgtctcagactgcagatctcagtttatacggccgacataaactgatgaaaatgtgattttgtgttaggaatgaaagctaattctctaagcctaaccaggaaacttaagcttgcagtggactgggggcctggtgtattaatttgttatggattaaaacataaagaccatttctcctgttattaagtcactgaatgcatgcctctaggataaatataacaaagatagagaaaacctttagagggatatttttttaattcttgaaaaaaaacaaagactggtggtatatgcaatgtgctgatttccattcctagcaataaaacaggacctgcccctgtagggcagggc

SEQ ID NO: 32881 - DNA, 487 bp, Mus musculus
  source 1..487: mol_type = other DNA
attattatatcatataataatatcagattattattattattatatgactgcattaaagagaggcttgatttcaatcaatgacaagtcattccaggctctaagtgggaattgttttttctaaacttataaaacaagtctagctcaaggtggcttcatactttggagtagcatagcattgtgcaaaacaaaatcccaggacttggacaagtttctataaaaatcagagttgtccactatacaacagataagggatcttgtgcagataacctctgtctgtttaacagcatccgccacctcatggattcggtgtaataatttaatgacttagcccataggtcttatgtcatatagaataaggcatgaaggaagacgctttaaatgtcactttttctctgcttttcagaacacgggaaagaagcgattcttttgaaattccttgcctgggtactcatgcactcagggttcaactcaacccagtaatgctgaa

SEQ ID NO: 32882 - DNA, 381 bp, Mus musculus
  source 1..381: mol_type = other DNA
ttacacagcagaatttcacaaccacggtaatgagatctgacgccctcttctggtgtgtctgaagtcagctacagtgtacttatgtataataataaataaatcttttttaaaaaatgaggtcatggcatacaaatagtacatagctgttcttagaacagattcacgttctagatatgtggatccatgtgtgaggagaaatggatgctttctgtactcgttcttaaaaccatgagaagaaatgaattgtttaattgactcctcagggctctgtcaatcaaactccatggcggctccaccagagccgtccaggccctgaggaaattaaattcaaatataggttcaacttctcagagaacctgaagctcctcctccaaggcaggg

SEQ ID NO: 32883 - DNA, 200 bp, Mus musculus
  source 1..200: mol_type = other DNA
gtcatcgcagctgccctcagtggcatatgtggtccacagggaccaagcctgtcgaggactaggtgcagaggcccctctccagcccatggacggaacaaggaacggttccctcatggcaaagccagcaatggactggcgccagggctctggggggctgaggccaggaccttgaagcaagaaccacgttcaggaaaagctgt

SEQ ID NO: 32884 - DNA, 465 bp, Mus musculus
  source 1..465: mol_type = other DNA
aggtgacaggaagttacagcctcccccctacagtggggttcccatcccaggtcgagacccaccgaaggggaaaaaatgttttctcaaagctcgctttttctggaagagcaagaggaagctcgggttattgctgttcatttcagatcacctagctacaatctgaatccagcttgtagcggcactgagcccagggccgcacggccgccgcgttctttcgcccgcgggcccggggcccgggagcccgaggccctgcccggcccgagccccggcctcgcccgggcgccctcaccgtgagaaccggctggcccgccgcgcccgcgtcgcccagctccaggccacctcgctccgccccgccggggccccgcggctgctcggtgtcgccagtcgcccccatggcgccccccggccaaagcggcgccgtgacgtcacgggagcgcccgagccacccggccggaagcgcgacgc

SEQ ID NO: 32885 - DNA, 331 bp, Mus musculus
  source 1..331: mol_type = other DNA
gtcccacagccaatgttcttagcctttggctttgagggggttatgttatcacaccattcttgtgacccgagaagagttattttatcacccgtaactgagaattctttcacagacagcttacctctctgaggtagtgctaagaggagctctgggggagagaaggtggcaccaacaacctgagtcagactactccaattcgggggagtgaacttcgggagcctcaacgtcgtccccgacaccaaagacgaggtggctcctaggcggcagttcggttcccatagcaaccccacggcgcacgcgcgtcgcgcttccggccgggtggctcgggcgc

SEQ ID NO: 32886 - DNA, 472 bp, Mus musculus
  source 1..472: mol_type = other DNA
agtgtacttacatataataaataaataaataaaatcttaaaaaaaaaaaaaaagatttatttattatatgtaagtacgctgtcttcagttctctgtatagccctggctgtcctggaactcactttgtagaccaggctggcctcgaactcatgctgggattaaaggcgtgcgccgcccggcttaagttcttgggaacccaaagtaactaacattttatgggcgtgtccctggacggaccagcgaatttggacggaagtccaaccaccgcccggtgtggaccggtccttggaccctttaatggtcggcgtcgtccaaaggccaccaatccgccaccgattcgttagttaatggcagctttcttcaccaattggctagctgaggcacgccccgccgtccaatcgtggcgtggctggatcaaacctaagcgagcctttgattggctagcgcagcgggagggttgcaattcaaacgc

SEQ ID NO: 32887 - DNA, 242 bp, Mus musculus
  source 1..242: mol_type = other DNA
tgcctatagtctcagtgacttgggagactaaactcttttgcattaccttcatgcccagcacaagctaggtgacttagaaggtgtgccttgagggccctcaccatccgcccacattcccgtgaaacacatgtgctggagtggggtggggggaggagctcccctaagacagtggagcagggcggggccctcctcctaatttccctgcaaaggaccttggctaaattaggtactgccccctgcat

SEQ ID NO: 32888 - DNA, 494 bp, Mus musculus
  source 1..494: mol_type = other DNA
agtaaaggccaggaaggtctttccgttcatatcctccatccctctcccacgccctaaaaggggataggagatacttttgatactgtctgagataattttgaggcagggtctctatttagttctggacctcaacagtaaaccagtaacttgttttattgtctaactagccaaatctgcctgctaggtctgacatgtaagccttgggacagggatcagcaatcattttcctgactactgctaccctgcagtaaaagataaactgcagttcagatctcaggttaagttctgaaaatttagtatgagtgaaaatttagtatgagtattagtattcttgtttcatatgagatgccgcgaaattacactgtaaagttacatggcactgtatgtccaagagggggcgcggccaccacgatccggctgggtttcgggggaagccttggcccgcccggctgccctccgcgtccctcccgcaggcagcggcttgggaagctccg

SEQ ID NO: 32889 - DNA, 240 bp, Mus musculus
  source 1..240: mol_type = other DNA
accattactgctttgtggaggaaattattacttactgcgaattcgcaggcacggggaacgtggctcctccatgatatcctcgccatggccggggactggccctcctagaacctagaacgtcagaggtcactgggtaacggctggcacgggcccagctgcggtccctcagtgacagaagaggaaagacgctcatcccttttccggcccctggagcgaccttccggaagcgctgggagccta

SEQ ID NO: 32890 - DNA, 417 bp, Mus musculus
  source 1..417: mol_type = other DNA
tgctgtgtatatatatatacccctctccattcatatatatatagtgaattccaggtctccaggactatatttagtgacatcttgtctctaaacaaaaaagtaatgacttaccagacattaagggatccagattaatgtggggtagcggagtctctgtctctctctctctctcacacacacacacacaaggaagcaaggatggatgccagggacatgaggcgctaccggctacctgtagagatcttcatctagcggctcgaggttgagcacgctcgtgaccagcacactacggaggtccccggaaaggtcgccgcggtcggcgtcgccatgagcatctcccagaccctctggcgctgacattttcactgcttaggctcccagcgcttccggaaggtcgctccaggggccggaaaaggg

SEQ ID NO: 32891 - DNA, 360 bp, Mus musculus
  source 1..360: mol_type = other DNA
aaatacctgttacgtatttttattcacactaataaagtcggggcctcatgtagcccacattttaaaggaaccatcttgttcattctgtcctgtcagggaccaggaggaaagaccgacaaattcctaatttaaactttttaattttattttcgagagaagcctagcctggaacttgatgtagaccaggctcccagctgtttaagacttcagctgacaaactaaatgttgtaaaacactgctcttttctttaaaaggtgccgcctttccagccccctagaccgaagggaggcttcgccctcgggcggcctgttccgggcttacagccccgtccaggagctgccagtccaggattggtccgta

SEQ ID NO: 32892 - DNA, 306 bp, Mus musculus
  source 1..306: mol_type = other DNA
gaagggaggatgaccttgcattgggttacaggcctgtgtcccatgcttggtttccatggtagcaagtgatttactaccttgaacttggaactcatttctctgtatcagtgatcaggaggttccagagacaacaaaagcaagcacaagctgggcgtggtggtttctgatttgtaaccccagccagcaggagccaggcctggaccaggaagttgtcctttgggtagtttgatcctgtctcaacttcgctcctcagaatcctggaacttccagatccattgtgacatgtatgttccaaaatgaacaggt

SEQ ID NO: 32893 - DNA, 403 bp, Mus musculus
  source 1..403: mol_type = other DNA
tctccagagtaaattagtcttaaaatcagaaccacgtggttacaaccatttgtaatggtgatgtgtcaagacagcaacaatgtattcctatacataaaataaatattttttttttctgagacagggtttctctgtatagccctggctgtcctggaactcgctttgtagaccaggctggcctcgaactcagaaatccgcctgcctctcccgagtgctgggatcaaaggcgtgtgccaccaaaactagttgcaaggccttactccaggggtgggatacctacatactccagctggaccagatagaggggctgagcagctggcagcccccgggcgctagggcccatgtcctcctgcatgtcggcggtcccatcctcacggagaacacccaagcggcttcggcgcgc

SEQ ID NO: 32894 - DNA, 238 bp, Mus musculus
  source 1..238: mol_type = other DNA
tgtaagcagcccatccaaagcaccacggggctgttctttggtgcttggccaggccggggagacaatcgatttcatcctggtccggagctgcttcgttccgggacgcccaggacagggcagcagttcctggggagacgatggcgcacatctccgggagaagcccccgctcggatccaactccgggccacggagacagaagggttccccaggctcctggggaccccttactggtgactag

SEQ ID NO: 32895 - DNA, 346 bp, Mus musculus
  source 1..346: mol_type = other DNA
tcggcggtcccatcctcacggagaacacccaagcggcttcggcgcgctgtagccctggccggctgcggcccaccagacggtcccggggaattcggaactgctcgatgcgcagatagggaccagtagggcttggggaccactggggaccgctgcctagaaatacctggccgggggcctgaagcacacaccgtgggcgaaactctccacgcgtgtggctcgcgttcctgaggggtccatgggctccatgcacttgagggggctctgggcgcgcagggctccgtgggccacccagtcctacctctagtcaccagtaaggggtccccaggagcctggggaacccttctgt

SEQ ID NO: 32896 - DNA, 404 bp, Mus musculus
  source 1..404: mol_type = other DNA
atccttgaattctgcatttacagtcacagaagagccattctgggtagttctgaatccaggaaggtcctggatgagctggctgagtgctgagtgttaagtatatgctcagcaaacatacaaaaagaaagcaagcatctactgtctgttttccactgtgcaaagcagccacctccaagaagaattcagagttcctcaggaaggccaaacctccctctgggatgatcgcttttccaataggggaaggtctagggcattggctttcgctggcctagcggccgggagtctgaggctccgcagtgcaggaattgctgtgtgattggaattccacagcagtggtttggcaagccgctttcccctcccagcccccaaggaggagggaagcggaggcccagacttaaaggctg

SEQ ID NO: 32897 - DNA, 340 bp, Mus musculus
  source 1..340: mol_type = other DNA
cagcgtcatagacctgagaggctgaccagctgggccatctgctacgctagtccagcagcaggtggcaaacttgtcctcctttcaagttaccttaactgggcaacaaattccggaagggagcccgacgatgtgtgcagcctgagcactgtgcaggccaggacccaacgtgcagggcctcttgcgaatgcgttcggcagggaaactgaggcaggggtgtgcgatagattccttccttcccacctacgtttcaagaatagcaacgctggccagtcaacgttgccacactcaagatggcggcgcggccgtggcgaggtccttcagaggcggtaccgacgcatgc

SEQ ID NO: 32898 - DNA, 594 bp, Mus musculus
  source 1..594: mol_type = other DNA
tctggaaacaagtggtttaagtatgtacttgtcaaaaacctgcccgacgcttaatcctgggacggtcgcagcgtcgctgctgtccgcggacacagcttccgaggtgcacgcgctctcagaaggctcctcaggctggccgggccgaggggccgcgtcgctactgctctccacatggttgcaacaagtggtccaccgtgtgcccattctgcagatgcaaagactgagcatggcctctcaggctaggaccctttgggaagaagggtggtcccggtgggtgatcacggctccttgctcctcccagaggcatgaatcgaccctgggcggacacagcggcccggcgctccggcccccgtgtcccctcggatgaggagccggtggtacagcccgcaggcccccggggtcagtggttcactccccctccccggactcccctgcggagggggctgacagcgacggtcgcggggcctggtgtctcggggctgtccccggcgctgcctgagctccaggcccggcgccatcttgtggcggcgctgggtttccgctcaggcaaatgcgagagcggctaaagggcctgggaccccggggccctgttcg

SEQ ID NO: 32899 - DNA, 312 bp, Mus musculus
  source 1..312: mol_type = other DNA
tccgcatgtatttattgttatgtctgtaagtgcacacaaccatgtggtttctgggaaaaacttactacatagtgaggttagcctgcctctccggaggcgtgcgtgcatgcgcgtctatgagcgcgtcagaggacagctgggtgtcgcccaacccgggagaacccgatctggctcgagtggagcttgtcgcgacggttctctaagcgacccctggaggtgtggctagacgctgggggccacacccacgagagccgggcgcctccgccgcgccttgtccggcgagtccgggctgggacctgcgtgacgtcatgc

SEQ ID NO: 32900 - DNA, 328 bp, Mus musculus
  source 1..328: mol_type = other DNA
gttggcaagactgtgccaaagctttcctcctcagatcaaggtctgtttttgttctttaaacagaagaggaaggatagtgctagcctgagaaggatgaagcttctgcttgctcccacccccaaggagtcagcctgctggagctaggggtttgccccatggaattccccaatccagagcctgctcccagaggccacaggctgcactctggagagggggcctccagtcttttactgggctgatcagtcagggagacctagggcagtctgcagtttgcagaaactaaaccctggctgagtcagcataccgttttactgcctctttaaaatct

SEQ ID NO: 32901 - DNA, 325 bp, Mus musculus
  source 1..325: mol_type = other DNA
ctcagcggttaagagcactgacagctcttccaaatggctctgaagacaactacagtgtacttacatataataaatacatctttaacacagccttcaagaggttgattgctctgttggttcgtgagcctgccaggcaattctcattacaagtgagatcttagctcaagtcttcactacgggcagaggtctctgttaacgagcccaggtgttcaggagaacctagggaagtcctccgtgagaaatgactcatatatgggtgggctcctcacacagcgggcactaggacccggcgcggcgcgcggcaggcggggaagctcttggcgct

SEQ ID NO: 32902 - DNA, 428 bp, Mus musculus
  source 1..428: mol_type = other DNA
gatcattccacaggagaaatccccttgtctgtggtgtggacttggggttaggattctgagactccaaccagcccgaagagttctctacaactcctctagtggtcccctcggggcagcacagtgccccattgatgggggcctaggccccatctttctcgggtcaccgcagaccctcagtcaggcagccgctgcggggccgcctccccacggccgcgacctagttccctgccgtttttagggcgcgggatggcacctgcccacgtgccgggccccgcctgcgccagagtgggggggggggctgcgtctgctctagggaagcgagggccgcgtcccccgcagcatccccagttttcccgtgagggggccaccggagctctctgcccgcctcacgcctcctgcatacgggatgaggtgagcagcgccgctac

SEQ ID NO: 32903 - DNA, 401 bp, Mus musculus
  source 1..401: mol_type = other DNA
tcaggtcatcagacaggatccgatgtttaaagaaactgggcttctcacagtgtacaactgtaaattccagtccctgtgacaaactctagattaaaaggggggaggggggacccacaccttttttacaacgttgaagtcaatttttgaccttgaatatttctcaaagaaatatctcaagaaaaaaaccgatatatctccaggagcctcttggctcctagagacagctaggcaactaataggatccacaatgtatttaaatgcaaatttaaacccagtcctgcgcggggcgcaggcgtggagcgggtcctccactgaggcgttgccaaggagatggacgcccctgacccgcaggctctttacgacactgccgcggccgccgctgcgtgcgcgccctctgcccc

SEQ ID NO: 32904 - DNA, 364 bp, Mus musculus
  source 1..364: mol_type = other DNA
cccgacacccatatactctaagaggggagggggcacccagggtaccccacccctccgaaagttaatggaggaatagggagggtctctttcctatcatttctcaaagggcctttgaccctatgaaagtcaggatgagatgctgtcccctactcgtaggaatttccttctcaagaaagagaaactgggtagggaactcatttcctgacctctctggagacgctttcggttctgcagagggtaacaatagtgtccctgtggcgctccccagtaaagggctccttttgggaccctggctcctccgtcctggggaaatccctgctcagtgactagccatccgccctcttcctgggcgggactcctagca

SEQ ID NO: 32905 - DNA, 470 bp, Mus musculus
  source 1..470: mol_type = other DNA
gatagatgatagagaatatataaatactcccccatctaatacaattttctgttactgtaacagaatcgggggctgaataagttataaataaaacggtagccacccatgtgccagcctggtctacacagtgagttcctggctagccagagctacatagagagacccacagctcacagcttgtttgatcctagaggctgggagacttttggggatccccttttctagggagctgcattagttctccagaattcagacatgtccattgttcacttttggatctgtgactagcggagtcccatagcctctgtgacgtaggcatgcatgtgcgccccatgcaggtaaggcaaggccagcatcgggtgagcttggcctggactcagattcttaatctcctgtgacccagggggagcctcagggcttcactgctggccagacagaatgcccaggcagggtcctgtggtggctgaacc

SEQ ID NO: 32906 - DNA, 498 bp, Mus musculus
  source 1..498: mol_type = other DNA
cttcagtcacctggctggcacccaagcagagctgccagcagactcccagccccggggcaggggctcgcctcggtctgtgcaaagggcctttctgggcagccagccaggggtggccacttgagaagcccgcctccccttcttttgaagccgggctttcgggtgcctcggggcagctgaaccgccaggcaaggagggagcccgctcccctcctgggggcgctcccttcgcgcggatctgggctgggaggaggagaaggagcactcccccgggggctttcccgctgccggcgacgggggagacggagcctccgggccccgcaggcgagggaggggtgcggtcggggcgggggccgggctccccggctggctgcggggtccggcccggcggccgcctgcggctcggcgctgctcggcgctcctgcccggcgggcgctgcattctccgagtctccaccagaggctgcgggaggaaggaagggatccgtcccttgcacacttcc

SEQ ID NO: 32907 - DNA, 385 bp, Mus musculus
  source 1..385: mol_type = other DNA
taactgtgcctgtaaaactgcttcaaagacagtaaaaggtagtttccatctctctgctgagcggccagccgagtctctcttctggcattgtcctaaggattaccagcctgctgtgagctttaagggagatggcacggtcagcacagctgagctgtacccctctgcctctgctcagcgcccacggtcagccctgggtgtagtgagcagccgcggctgctcatagcctctgacaggatcaggtgagcaaggacccagagtctgctttagacccaatagcctgcagaagaatgggcctccgcggaggggaggggccagccggcgtcgctccagcccgcgccctcagtaatagaagcccgggccgcccttcgcagggcggggcttcagg

SEQ ID NO: 32908 - DNA, 405 bp, Mus musculus
  source 1..405: mol_type = other DNA
ctgcagttagtgcccagcttgccagctggtgctttaagctggtgctcccatcagcagctacttccccttgcctcagtcagaagggggtgagggcgaccttgggctgcgtcaggaagcattgaatcaacgaatgctttcgtgatgccagctggcaacagcctacagcagcagtgtgcacaaagcacagcttacacgctggccttgagccttctgctaggagccaggagcccagccacgccgagaactgggccagctcgggtctgcagccaacctgcttccctgggctcccgggaataattctcacaaatttaaatgtcacaaagtgtcactttgccaggacgttttactaataaaatttaatggttgtcaaaataagccctgtacagagttattagtagctgggcg

SEQ ID NO: 32909 - DNA, 337 bp, Mus musculus
  source 1..337: mol_type = other DNA
ccttcgctcccctggagagagaaacatcccaagaagatatttatgagaacttacaatcttcacctactgtgaaggcaaaaaagtatttaaagacttgcagtttttatctgaagttgtgatcttcttacaaatgtgtaagagataattaaatggagccactaaaccatttctttcatatgcatatacttacaaaatatattttccaatcttattgtttttttataaggtttgacatttttctaaagcaagactttaaagcctgtcacagaaacaactttcaaatcaaactggaaatactctaaattattaattaaaaaattccctagcatctctgctg

SEQ ID NO: 32910 - DNA, 374 bp, Mus musculus
  source 1..374: mol_type = other DNA
aaactgtctggtttaaagtgtacagtgtataaataaataaataaatattttaaaaaaataaataaaacaaaatatatacacgtattcaatttgtcctcatggatgaagagcagtttctatattacttggattaaatataattggtcatgttaaaatatattgttaagatatatcaatacatataaaataaaataaaataaaaattgaaaatattatactgttaaaatattttgccattacttattggcaggtaataaacaggatggcgattattttcttttaagatttttactcgtaaattactgtgattaaagccctagcgcctcagaggctatcggctgggtgggggccgcaactccctggtagtcctggaa

SEQ ID NO: 32911 - DNA, 413 bp, Mus musculus
  source 1..413: mol_type = other DNA
accaatgtgtgaacatctcattgggctgcctgggtggcctgctgccaactccagccgcttcacaagggcgtgcgcgcgtgtgcgcgcgcgcgcacacacacacacacacaaggccccctaggcctgtgaaatctgcatcttgtcaatgtgccccttacttagcaggggagccatcctgtggcagaggagtcctcttatggcctggaactacaccttcagggcaatcactacagggacatgtgcagttattgagcacctactgttttcaatgcaggctgcatttattatccatccgtgcatcatggctaagaacaacacagtgtggccttagcaggggtccctgtggtgactgcctttcaggagaggatgaggctgctggcccagcccccaggaggtgggcccctggcagggca

SEQ ID NO: 32912 - DNA, 403 bp, Mus musculus
  source 1..403: mol_type = other DNA
gcagagtcaggccttgtgccttctgctttgcatggccaaggccggtccaggcatctctgggaaacagaagagtccggctgatccatcactgctcagcagtccacggagaaagagtccctattttcttaaaatagtgggtccataatgccaaccctggttgtggcatctgtcactgagggaaagctcctacagaggctgcaaccatggtctgtccctacagggttggacagtgggacggtgctaggcctttagtcccacctgggctttgccccatttcccacgtgagtccagagtggggcgcgggggcgggtggggtgctctggggccccttccctgctccttgtccagaccaaggaggcgcggcccggggcggttccgcatggctcctccccgtccggtccct

SEQ ID NO: 32913 - DNA, 251 bp, Mus musculus
  source 1..251: mol_type = other DNA
gttaaagagctaaactcagcctgacttagcaagcctggctttggtcagcacctttgcacagttagatttctaaggcaaggcgctttgctggaaaacacattttgcccacacaaagggtcatagcaacccgggactcaagggcttctcttagagcccctgaagagagccctgtccctggctgctgacaggctggtgccaggcatcaggtggcgtctccgatctgagctagtgagactcgaggctccgctgag

SEQ ID NO: 32914 - DNA, 305 bp, Mus musculus
  source 1..305: mol_type = other DNA
ggcagagtgcctgcctggcatacggaaggccttaacttcagcactgcagtggggcctggtccatcaggacaaaccaacccagcccagctgcctggctcggtgttttcttctgcctttagaagtaagcgccataggaagaaggaccttgtctgccttgttccctggggcaccccaagtccaaggccacagtgactgtggaaactatttgtagagtgacagtttctccggggaaacttgaagtaagttcctttgtggggcagcagggccgccacagcattggctgtcgggcggtaccgggctaccct

SEQ ID NO: 32915 - DNA, 318 bp, Mus musculus
  source 1..318: mol_type = other DNA
tttctcccactagggactcataaggggcccagagactgactggtttggctaagggacccaaagcctgacttggagacacctaggtgcctataatgcgtcgcctaagaggcagaggcaggaggatccctggagcaagcttgctggccagccccggatggatgaatgaatgaatggatggatggatggatggatggatggatagatagatagatagatagatactctctggggccgcgcctggccacggtgaggacgctgcggggccgggaggcggcgtgggcgtcgccgcagggaggaggccggcgcgtccctcctccg

SEQ ID NO: 32916 - DNA, 494 bp, Mus musculus
  source 1..494: mol_type = other DNA
gccgcagctcccggcctggcccgctcgggacgactctgcactgtgcgggtgagtaccgcgctcggggacaccgggtgggaccgcgtctcccggggaccccgtagacaccggccgccggcaggggtctcagggcctcggggcgcagtgactgaagttagcaactccagtgcgccggacaagtgcaggacgcggccgggtctccggaggagactcaggagactcgtgctgaatctcgcaactcgctggaacttggggcccgtggcccagcctcccccatccagtcacgcgcggacctgagttactatagccaggcagctgtggactagccctagctgcttgggaagcaggactgggagaggtgtcccatcttttcttgcaaggcacattgggccatcgctccttgcctgtggaaaaagcaaggcagaaacgctatcgcctatcctaatgctacataacttttaacgactttaagtatatataatatataacgcgat

SEQ ID NO: 32917 - DNA, 336 bp, Mus musculus
  source 1..336: mol_type = other DNA
ttagctgataagagtcagctgagtgtgtctgcgcacatgcactatgcgtgtatgtgttatatgtgcaggtgtgcacacctgtgacacgtacacacatctttgagcctggaactagactgaaagcagcactggggctgccagctcacagggccacatctcgctatggctcctagcacacagcctggaaccaggctgagggtgaatccgcttcataggatgacactttttaagtgggagatttatttattcctactttcactaaaatgggaacataacctgccagtgccagggcttggctcagacctgaacctgggtatagtcacctattgggagaca

SEQ ID NO: 32918 - DNA, 323 bp, Mus musculus
  source 1..323: mol_type = other DNA
ctgcagggcttgtggcgagcatggcctggctcccagcattacaagccacaggccccggggcctagctctggggtgggatgaatgtgtttggtatcaatcccagaacctgtttcagagccagcaatgtttggtgggcaccaaaggaaggacctagctaggtaccctatagccactagtctggtggttgagggttaaacctacatgttcaaaaccacagcggttgtggggcgccgtgcacggatgacgtcctgcacagccacacggcagatacgaggccggcccggctcttcctgggtcttaagaccagagctggcctggtaagt

SEQ ID NO: 32919 - DNA, 349 bp, Mus musculus
  source 1..349: mol_type = other DNA
tgcaggccggctcccagccagcggccaggcctcgcccggctcagccttgggcatggcgccggctgaaaaggtgtcaccttagtgctagagggattctgaaactctcagaccttagcagtcacccctgccccccgactctgtgtgtgtgtgtgtgggggcagaggtgcagccctgtagctttggcgtctgctgctgcagcctgctctctaggacagatcagccttgcagagacacctgtctgcctcagtgcagggtaagggggccccagcacagtctcccgaaagggaaggcttttccttgctttggagctagcagggctccttaaacatgagctcagctattgaacaca

SEQ ID NO: 32920 - DNA, 395 bp, Mus musculus
  source 1..395: mol_type = other DNA
ccactcaagctggcttgttctataaaacggcctgctcgccttcttagagaaggacttgtgtgtgggggcaggcgtggatgggtcagccagcccaccccaaaagggcccttcccagtggcgcgctggcttcaggctttgctggagcaggtcaggctggctgcacggggagaagtgcttgtggaggcccctgtcccaagttttccctcctgcagaaggcctagcttagcctgtcttttcgattggccggggcagccatcctccatgttttataagtattgacattacacagttaacaatgcgtagccattagcctttattttgaccaggacaaagaatttctggactagtttgaagctatggtatgccaaaagagaagctattatccccccttcttt

SEQ ID NO: 32921 - DNA, 406 bp, Mus musculus
  source 1..406: mol_type = other DNA
ggtaagcctggagagggtatctcccttgccatcctgacaaagagccactttgaacagcaagctgcacctctcagctccctggaacctgggtgccccttgcgggctccctcgggctgcctgtctcactccccgcgcgcgccagaggcctgcgccactcaagctggcttgttctataaaacggcctgctcgccttcttagagaaggacttgtgtgtgggggcaggcgtggatgggtcagccagcccaccccaaaagggcccttcccagtggcgcgctggcttcaggctttgctggagcaggtcaggctggctgcacggggagaagtgcttgtggaggcccctgtcccaagttttccctcctgcagaaggcctagcttagcctgtcttttcgattggccggggcagcca

SEQ ID NO: 32922 - DNA, 331 bp, Mus musculus
  source 1..331: mol_type = other DNA
acttggctttaaatccctgctttgaaggaggcacattctgcgctttaattttttaaaaaattatttatttatttattttcctattttggtggcaccgagtctctggtttaaaaaaccttttgggtttctgtatagccctggctgtcctgatcaggctggcctcgaactcagaaatccgcctgcctcttcacctccagcggctgggtgagctgaggggaacccaggcctcgcggccacgccccctgcctcgcgcacggccccctgggacccgtagtgctgggcgtggccgcgggactacaaatcccggcggcccccgcgccgcggcttcagc

SEQ ID NO: 32923 - DNA, 172 bp, Mus musculus
  source 1..172: mol_type = other DNA
gagtgccattgaggaatggccagccaccctttatgaattaaacttaattatttacttttgagagataagcttggggggttcagctgcagaaactgtaaggacacacgtgcttctccagtgacgcaagtaactgtttctggaccggaataactatgctggagcaggcttctac

SEQ ID NO: 32924 - DNA, 342 bp, Mus musculus
  source 1..342: mol_type = other DNA
ggcggagtccctccggagctcagcttcttgggttcagatcctgatccaactatctgaccttgggccaataactatcttggaagactctgaagctactggtgggctctgtgacacccacccttggcagccagggccccctcaagcctctggtggcttcggggacggcagaaacgggatttctcagagagcttcggagacgcgtgggaaggtcccaggcgcgtgggcagttcctcccgcgatctagcttggggatcggcccgagccggcgaggcgagcgcgaggggcagcgccgggccggggctgtcgcacgcctcagttggctcctcgctgctgggagggagg

SEQ ID NO: 32925 - DNA, 300 bp, Mus musculus
  source 1..300: mol_type = other DNA
ttctcagaatctcgcgctgcaggggcccagccccttctcatgcagcactgagactggaatgctcactagccaaaggtggggcttgcccccggcttggcggagtccctccggagctcagcttcttgggttcagatcctgatccaactatctgaccttgggccaataactatcttggaagactctgaagctactggtgggctctgtgacacccacccttggcagccagggccccctcaagcctctggtggcttcggggacggcagaaacgggatttctcagagagcttcggagacgcgtggg

SEQ ID NO: 32926 - DNA, 270 bp, Mus musculus
  source 1..270: mol_type = other DNA
ttctcagaatctcgcgctgcaggggcccagccccttctcatgcagcactgagactggaatgctcactagccaaaggtggggcttgcccccggcttggcggagtccctccggagctcagcttcttgggttcagatcctgatccaactatctgaccttgggccaataactatcttggaagactctgaagctactggtgggctctgtgacacccacccttggcagccagggccccctcaagcctctggtggcttcggggacggcagaaacggg

SEQ ID NO: 32927 - DNA, 361 bp, Mus musculus
  source 1..361: mol_type = other DNA
cctcctggactgagacagggcactttcatggagatctccaccagttaagattctcaaattaggattttaagagcaagattaaaattataattctacaactaaatgcataatcatacacatatagcatgtataattatgatgtgacaatactttctctttttaaaataaccacacgcgtgttcgaactctggaagggcagccagccttttctccagcccggacggataatacgttctatctttaacttttggaattcatttttcaacagtcaagatttcaagccataaagagttctcaatgcggatatgaattcccagggggtgtttatttaaatggcgcagtcaaaggagggtgccacctc

SEQ ID NO: 32928 - DNA, 312 bp, Mus musculus
  source 1..312: mol_type = other DNA
tagaatccttctatatatagggaggccagtggtgtggtgacctccaaccacaaaattatttgttgctacttcataactgtaatttgttgctctcgtgaatcataacgtatgtatctgatacacaggatctgatatgtgagtcccaaaggggtcacaacccatagattgaaaaccagtggggagtcacaggggactctgccatgaatgcctttcccaccatgagaaagggcgctttgtcaccatgatgtcactcagatgtgtaactagtccagatgcacttcatctgaagagtgaaattcaaccttatgtcta

SEQ ID NO: 32929 - DNA, 404 bp, Mus musculus
  source 1..404: mol_type = other DNA
ggtcatcaatgaggggctgaaccccagaggctgactcgggtcccaatgcctctcgagcacgttaactgaacgtttggctggcagcaaaaaagtgggcacctagctgctcttccgggcgtctgcgcgtggtggtcgctgatccggctccagcagatcacccacggggcactccttacgggtggatggcgcgagctgctcttgcagaactgctgactcagcagaacccgactggggtctggggcgacgcatttccagccccaaactctgactgtgcggcgcgcgcacgaaccggctcttggccgacgctccctggaagccgggagggggctccgcccaatccccgcccagcccaggtcccgcccccgctccgcctgccccgggcccgctgagcggcgcctgtccgg

SEQ ID NO: 32930 - DNA, 373 bp, Mus musculus
  source 1..373: mol_type = other DNA
gtaaccgtgactgtcacgtgtatatatatatgactgttttatgtgcttgtatatatttctgtttgtatgtgtacaaatatttaggtacatgtctttctctgtacttgtttgtaatagtcagcttctgtcacaaagttgctgcatacgccccctgctgggcagcagacagcaagtgccagctcctgagaaggtacatggatgccatatgctgccgccgccgcagttgtgaatagtcccagctctgcagagaataggttacagagctaaactcagcctgacttagcaagcctggctctggtcagcacctttgcacagtagatttctaaggcaagggtttggttaccatagagacggctgtgtggacacaaacaat

SEQ ID NO: 32931 - DNA, 261 bp, Mus musculus
  source 1..261: mol_type = other DNA
ctgagaggtatcctgtcacacaagagatttattgggagggtggctgcctctgctcaagccggaagcagcagcgagctttcccggtaaagatttccagggtggggatttcaactcctgagctcatgcgaagagggcctctgtccatcaggctcttgttaaattctgatgggctgctgacatcggttggcatcaccatcacaagttcaaagctatctttaaaaagtaaaggatttttctatgctagtagaaactccgctgagc

SEQ ID NO: 32932 - DNA, 409 bp, Mus musculus
  source 1..409: mol_type = other DNA
gagaaggcaagctaagctggcttcttcagcccggtcttactacagaacactaggcttcagtcttgcttttgaaaagataagatttctcttgttcaagggtcaaatgaacacatcgtcgtctgaaaaaaaaaatttttttttgagaaaggatcttcccaagtgccaagtggtaacaaaggccggccagtaagccccagcgcttcctgtgcttaaccaagaacagacccttcgctcaggcgtgaacgagcacgttccatccaacagttagaagccactaggagccactcgcagaacctgctagggtctaaaggcacggtctcttgtgacgtcaccgcagacccgagcaatggttccgattggccctcgcagccggggtggggccaaagcattcctggctccaccccgcgtc

SEQ ID NO: 32933 - DNA, 238 bp, Mus musculus
  source 1..238: mol_type = other DNA
ctgtggcagcaggtgctgtcagagatacaaatctggaagagatatcactaattcttttttttaaagatttatttatttatttatttatttatttatttattatgtgtacactgtagctgtcttcagacactccagaagcggccggccccccacccttggggtcacagggtcgaccgacgctcaggacgcagcgacaccgccagtcacgtggtcacgtgacgcgctgcaacttggcggc

SEQ ID NO: 32934 - DNA, 254 bp, Mus musculus
  source 1..254: mol_type = other DNA
ggtggtacttacaaataataataaataaatcttaaacagttaagaacacttgaagaggatctacctcccagcactggactccgtggatgccgaggcctgtattccctgcggacccagcgcagccgtgcccggcccttgtgggccttgcgtgcctagagagcgcatgcgggacgcggcgcccgctgggacggcatggaggcgggcgggggccgggggcgggcgcggcccctcccccgtcacttcctgccaggctg

SEQ ID NO: 32935 - DNA, 337 bp, Mus musculus
  source 1..337: mol_type = other DNA
tcttctacataatttttaaaacttgataaaatgtagcaaatgcactacaggtgtgtgagctctcacaggcctacctgcttcctctcttagcccaggcagagggggaagaggaggcaggaagtgcctgggactacagctggaccccttgcctgaaagagaggacttagtcttcccaggcagacttgggctctgctggaacaggccctggcgatgttcaggcccagtttggccagccctggcaggacaacttagatggtgtcacatcacagtatggtgctttgtcatctcacacaccttcagccttggggtctgtgagcagccagtgcagataaccgag

SEQ ID NO: 32936 - DNA, 412 bp, Mus musculus
  source 1..412: mol_type = other DNA
aataatggttcataaatgcctctcttgtagtctactactgtgtacttacatataataataaataaatctttaaaaaaaaaatagaacttacaattcgaccatccttaaaatattatctattatttaaacttttatgtgcctgcatcatgcctgcatacatgtctgtggaggtcagatacggagttacagacagctgtgagccaccttgtgggtgggtcttctgcaggagcaaccagtgcccctgttaattattataattgtgtatacagcagaggacaactctggattccgagctcccatgctgagccagatggcagccctgactaccattttgttgttaatttctttcccaaaacaaagtagttttctaatctaaacatgcgcgcgacgccgagcgggtcgcggaaaaggc

SEQ ID NO: 32937 - DNA, 409 bp, Mus musculus
  source 1..409: mol_type = other DNA
aaccattgcattctattttagtatttttttttcaaaatgaggaagaagggattttcctcagaaaatttttcttaaaacaaacactaagaaaatattccctgtgggaagaaaagggactctttttttttttttttctgataagaataaaagccacctttcacagtttccaactatgaatattttaaaactgtgaggacagtcagaagttccctgaaggggcttcctcttctcacttgctgtctagcaggagggagcagggaacctgtccactgctgggccaggatagagtccatgttggcctcaggctcaggcctccagctcccaggagctgagctgagctgccagcatgcaccctgcagctagctggcacatggtgaaaggaaatgaaacctaagctgtagattaagta

SEQ ID NO: 32938 - DNA, 523 bp, Mus musculus
  source 1..523: mol_type = other DNA
agaccagggtttaaaacatcagaacttgtgctgtgtggactcaactcaccatctgggcggcgcgtgcgcctgcgcactgtgcccatggcgcgtcgcttccgggcgcgaccgcttggcgtcctgggaaatggtccccgagccgcccggccccagctagctaatggttgtccagccagtgtctagctccgcgccatgtcgcgcttggcacgcacgagccgcccgccgcgtccccctggctccggggccagccgagacctgcggccgcccggggcgcagtcaacccgccccccgccgcgccctcccctccgccgcgcccgcggggagccgccagtccagccgccgccgctaccgcgggcgctgaggcgacgccgcccttccgcccgccccgagggcgggggcgcaggcgagcccggcctctcgctggagcccgcggcaccgcctcctcgtcctgtccgggccgcccactaggctactcgccccgcccaggggctgcagggactggaaaccgaaagttcgcggtgcc

SEQ ID NO: 32939 - DNA, 618 bp, Mus musculus
  source 1..618: mol_type = other DNA
ctgacacccggccggaggcagagcgggacgccggcggtcgcagcgccgcagaagcaggtgcgtgatagggcggaggccactcaccggctcgggcgcgtcctccgcagggctagagctcagccccggccctggcaggtcgcggccccgcccggcaccgcgaactttcggtttccagtccctgcagcccctgggcggggcgagtagcctagtgggcggcccggacaggacgaggaggcggtgccgcgggctccagcgagaggccgggctcgcctgcgcccccgccctcggggcgggcggaagggcggcgtcgcctcagcgcccgcggtagcggcggcggctggactggcggctccccgcgggcgcggcggaggggagggcgcggcggggggcgggttgactgcgccccgggcggccgcaggtctcggctggccccggagccagggggacgcggcgggcggctcgtgcgtgccaagcgcgacatggcgcggagctagacactggctggacaaccattagctagctggggccgggcggctcggggaccatttcccaggacgccaagcggtcgcgcccggaagcgacgcgccatgggcacagtgcgcaggcgcacgcgccgcc

SEQ ID NO: 32940 - DNA, 356 bp, Mus musculus
  source 1..356: mol_type = other DNA
cacatggtggctcacaaccatctataatggggtctggtgccctcttagtactcgtgcataaaatatatgaataaatcttactcttagtgtacttacatataataataaataaataaatctttaaaaaaaaaaaattgtcaatcattttgtgattatctcagcaagtcccattcctttagctaataattggagacactggtattacagctgtctcctgtaaaggaggtctacctagcccttgggatcaggctcagcagcctcccacagacaggcatgtgtgatgacaattcttttaagccagtatgtctgacatgcctgcctgacagatctcaggtttgctgacagacaaaaccggg

SEQ ID NO: 32941 - DNA, 477 bp, Mus musculus
  source 1..477: mol_type = other DNA
cctgtcccaggtaggatgctaaaggcttggtattttgctgttttcatgaagaaaataagaagtggctgagaggccgggtcacgtgcaccagcggcatcctggagacaggaagcaggggggcggggctccacggccccctgctgagctctgcctggcgctggggattcttttgtgttgctcataagtcacccatcagcacaaatgtgaacaaacaaatgctttttgataaaaagtaaatagttgtgatttccgattcagatatttttagagctatctgtaaaaaaaaaaaaacctcctactgatgatatagtctattttacatatcaggaagtaaaccttctttaaaccaaggcatttcattggttggttaagcctagaaatgattgctttcttttaagtgactttaaagtagcattataccgagaaagctgcataggcagagtctggaagcaaaagaagagttttccattttggttt

SEQ ID NO: 32942 - DNA, 483 bp, Mus musculus
  source 1..483: mol_type = other DNA
gtatgtatccaggcctggaggcaccaagggggtgtgaggagccaggagcctctgtgtaggcctccatggggggaaacagactccagactcaccttggcggccaccgatgagctcctggctgaagctcagcgcgcacatctcctccatcatgtgcagccggccgtcgttgtcctcgaggctgtagtcgtcgcaccagcggagcttgcccagccgcgtgcgaggcaggcggtccagagtgcgccacagcacctcgtgcgccaggcccccgacgttgaggcgcacccggcgcgagcacgccttgctgcgcacgatctccatgggctcgggcggcagcgagctggtggagcgcgagccatgcttcgtcatgcccgccggcatcgctggtctggccgcccccgccccccctgcccccccaggccgctgtcactcgacggcaaggcccgctgccgcgggggcggggggcggggagctctgcaggccgct

SEQ ID NO: 32943 - DNA, 641 bp, Mus musculus
  source 1..641: mol_type = other DNA
gcggggagctctgcaggccgctgtggtgcaggggtgcgcgagggcgggcgtcgcggctaccgtctcacctccatcccgacggctgcgaggcaggtcagcgaaccgtactgtgaggcccctcccccagggtcccctaggccttgaccttcccaaggcttaagcggctcaggggggaagggaggacggatggctgctgttcctcccgccggtgctgaagtcagccccaccccaggacgaagggaggggtggccctccaggcgggagaggcccccaggaggctcccaggaagccccacccccgccctggcgcaatccggccgcccggggcgctgtccgtcccgtcggctctcgggctggagagcccaacctggcccccgcaattgggaggcaagggagaggcagggagaactttctttctctctttagtgccaccccaagatagtcaagattttgggtggtggaggctaccagatgcccacctgtcggaggccaccaggctgccctgtcctggggcgacccgctccggagacggagccaagccagcggggtctgcacctccttgtgcgccccctccccactctagcgcaggaggggcgcggagtcctcgggatccgcctgctcggtgcctttgcccgggctcgg

SEQ ID NO: 32944 - DNA, 402 bp, Mus musculus
  source 1..402: mol_type = other DNA
ggaaagccttaccttggggcaccatgtcccactaagggatacctacctgccggccccaccgcacagggtgaggcagggccagtggatctctcggttgagcctcgacccaacaaggcccggcaaactctgagtcttccctggcttcctccagaatctagaatttgattttgtagaatctggaatgcaaggtcgctctccagggagcccggcgacccagaggctagcccgtcctacgtgcagcgcatgcatgcagtaggcgctcagcctcgtggtggccaggacgcagtcaagcagcccgggtgggccccgcggcctgagccagggccgggccgggcacggaggggttaagccgcgcgcgtttccgacccgcaggtggcgccgtcccgcctcggtgccactcgc

SEQ ID NO: 32945 - DNA, 173 bp, Mus musculus
  source 1..173: mol_type = other DNA
tgtgtgtgtgtgtgtgtgagagagagagagagagatggtttccaactcactgtgtagccaaattacaggctcagctctggtactggctgctctcagataagtatagcccattggtctcctatgtaatatgaccacagacagcttgcgatcgtcaccacagtgcaagaatgtgg

SEQ ID NO: 32946 - DNA, 373 bp, Mus musculus
  source 1..373: mol_type = other DNA
gaggcttcccgtagaatgcatcctcccagaggaatctttgctccgtggagcatccccggccccaggacccgcagggcgaacacgaatgccccggcctctgcatccttgctctgctgcagcggcgggcaccacccctcgatccccgcgtggggagctcgcacgggaaccaagtcgtactagcgagccgcttcctgccagcatgggcggcggccgctcgaggatcttgcggctagagtgctcgcgcgtgaaccccccgccggtgttctcaggctcgcggaccttaacatcaggccccgccctcgtccggcccccagtttaggccccgcccttactcggtccccatcaggcctgcctcaggtcagactgcggccct

SEQ ID NO: 32947 - DNA, 317 bp, Mus musculus
  source 1..317: mol_type = other DNA
tgggcaatgcgcttgctaattcccaacatccacacagaagccagggatagctgttggtggggaaactgaggccgcctcggaacgcgcctgcggactccctccgctccgcacagccggcccggacgctctgagccctgggattctcacgcggggcggacggcttggctcacagctgagtcacccagatctccaaatctttcccgcccggggaccggaaacccaggccacagagaggacagcgcagagggtcgccctgggaggccaagccccgcccctgcccgcagcggaaaccggaagcagccgccggccccgctagc

SEQ ID NO: 32948 - DNA, 358 bp, Mus musculus
  source 1..358: mol_type = other DNA
gggctgcagctccaaccttttatttgagggaggagcgaccacacagtgaggtcgtctatgaattaataggaatctactatttccattaataataataatgcccagttattacttgagaaagagtttccctatgtagcaatttctatgtgcatcacgtacatgccagataaccgtggagggccacgtgggtgctgggaacggaacccaggtactcctgtcagtccgggctctccagcactgtcctgacaagctccgcgcctccccgcggtccctaggagtgaggtccggttctacggagaagcgcttgccctgcttccgccgctcacgcctgggcccagcgcgcagccgcgatccagcc

SEQ ID NO: 32949 - DNA, 340 bp, Mus musculus
  source 1..340: mol_type = other DNA
agctcaaaacatgtgtgccatgctagaggagacctcttctccttgttgatcttggactccaacaccttcaaggtactggctggccacgtacaagccataggaaaacaagccacgggagtttgtgagatacacttgtaaggcaggaagtcctgcctcctcctttccggttaggaaagacgctgagatcaaatcatctggccacacctagccatcaactgggcaagttggtgagctagctaaggtggcagctttcaaacagggggcgagggggcgttgtggactccgcccatctcagcccctagcgcgtgcgcaaacgacggcggccccgcccccagccccc

SEQ ID NO: 32950 - DNA, 393 bp, Mus musculus
  source 1..393: mol_type = other DNA
ataggtgtttataaccccatactatgggggtgtgggtttggtttccgaggccacccttccaatagacaccctcccctgtcaggtgaccgttcattgacagtcacagctgtccgggaagccatccttgcgtagggcatcctgttagacagttccaggaacccctaacccaaagtcagcagctcggttgcggggcaccgcgctcgtcgtggggcaggcgcggccaccaggggtcgcccgaggagctcggaagccgcgcggtccggtccgggaggagcccaagcggaatctcagcgccacgcggcgggagccccagcagcccaggcgcacctgctccggtctcagtctccggccgcgccgccgccagccattggctcagccttgacaaaggggcgt

SEQ ID NO: 32951 - DNA, 449 bp, Mus musculus
  source 1..449: mol_type = other DNA
cctatcttatcataggtaaaatgtatatttatctatttatattggcttactcaattgagaagagaatctcatttcgtggagacattgccatgtccctctgtatagtgggctcttggacagcgacaaacaaacaagcagaatgcatgtctcaaggttggtggttctagctgcaccttcatctggcttggggtcaaattctgactcagctacttagcagttgagttgaacttagcctgggaacaggcgcggggctccacagcccttccccccagcgcacggtcaccccggggccctcgagccgagcacctgcacgcctcccccgcgctcgggctgggcggggcttgcaggttgccccgccctcatgccccgcccggctcctgcgaccccgagcgggcgtcagcggcaccgtttgcggctgcgcctacacctgcgcctgcgcactagcgccc

SEQ ID NO: 32952 - DNA, 613 bp, Mus musculus
  source 1..613: mol_type = other DNA
aagcttaaatcttagagaagatggagccttggaaaaattcttcagatcttaagttccctctgcgggccccccttaaggactttacataagcctttagctctcttaatgctaatgccttaaagacagatgtaggcagagtccctgccctcaggggacagttacttcacagtgaccagaggagggggcaccccagcaggtggtcacgagcggcctctcagaaggcaatattacttcttatagctcaggctggcctcgaacgcgaggcagccgatgtgctgccccgtccagcagcttcctaggcacgatctgcagtagccatgcactccgtaggcgcttcgcagcgcgtactccctgcctccagcgcggtacgcgagttcgcggggcgcagcggggacgcgcacatccaccctgccttccgcgtccagctgcgtccagctgcgaccccgccccccggcgccgcggttggctgaggcccgaaggcctgcgattggccgggcgcggcgcgggcgcgggctccgattggctgtgacgcggggccccgccgacgccccgccccggccgccgcgccccgcgccggccggtcattgggcggcgtgatatcgccgcggttccg

SEQ ID NO: 32953 - DNA, 311 bp, Mus musculus
  source 1..311: mol_type = other DNA
tgtctcgggagagtgccaggccagctcgaggcggctttgagcggacgccagtgaacgccagcctgggtcttgaagctgagctctcttgtccgcgcgcaaggggcgagtttcctccctgtaaaccacacttggtgtgcccagcaagtgggcagaacagcacctgctgttagaaacagtgtggccttttaaatacagaatttacttaagtcaaagtcactagcgacggggatcctgcactggttttaatcctatttaacaaactaatgagatcttcccaagggaggacagtattgggtcggctgctgacgcag

SEQ ID NO: 32954 - DNA, 637 bp, Mus musculus
  source 1..637: mol_type = other DNA
ctcaccggagagaggctggtgatcccagcccattcaagtgcacggggtggaggggttgcctccccagcttgcagggtgactggagtggggtctaccatgctcccaccgcaatcacctgagaagcctctgggcagggctgtgcaagtgactcacccagacacagtgtggcagaacccccagccctgccaccttcatggagaggcgcagggagggagggctgggatccaggacagcgagcatccccggggtgggcgtgcacctggagagtgtgggcagcacctgggtgggaggacatgcaccccgtggaaggctgctgggggtccgggacagcggaccggagccgggacgagccaccgcgtcctccagcagggggcgggcggcggccgcgctcctccgtgttcccgaggggcgggaagggggcgggctggcgtcacccgcgtccgtggccatcgcggggctggcgggacgcccgggtcaccgctcagcctcccgcgcgaggacccccgccgcgccccactccccgccgcgccctctcgcgctcccgtggccgggcaatgacgcgcaccgaccgggtggcggggcggcgggaggggccccagcgtgacgcagcccgttgccaggcgccgccttaacctcc

SEQ ID NO: 32955 - DNA, 599 bp, Mus musculus
  source 1..599: mol_type = other DNA
tcagaagaaggtggagcagctgtcgcgagagctcagcaccctgcggaacttgttcaagcagctgcccgagccgctgctggcctcggcgggccactgctagcgcggcgcgggtggcgtggggggcgccgcggccaccctgggcaccgtgcgccctgccccgcgcgctccggccccgcgcgcgcgcccggaccaccgtgcgtgccctgcgcgcacctgcacctgcaccgaggggacaccgcgggcacaccgcgggcaccgcgcgcacgcacctgcacagcgcaccgggtttcgggacttgatgcaatccggagtgtggacacacacgtgtgggccctgagtaatcagtcttattattttttttgtattatataaaaaagttctatttctatgagaaaagaggcattaaagtgaagacattttaataaacttttttggagaatgtttaaaagcctttttagttggcttttgaaaaaaaattttttttcttccctccccccatggcagatggggtgtcagcccctccccccaggagagggggcagagtgccaggggtgactcagcacccacgggtgctgggggacttgctagaaaccctgctt

SEQ ID NO: 32956 - DNA, 456 bp, Mus musculus
  source 1..456: mol_type = other DNA
acctgtccaggctggcctgggttacgtagtgaactccaggccatcgggctagagtgattcgttgtctaaaacgaacactgaggccagccctttaatcccagaactcgggaaaaaggcaggtgaggacgtccagggctacgcacagaggccacgccctcgccgcctgactcaaccggcgggcttgaggctcgaacactccccgagtcccgcctcggcccacgcgccgtgggcgcgccgccgggggtcgcttgggcaacgggcgcgcgccctccggagcgcggaacccgggaagccgcacgcggcgcgcgcagcaagtctgctcctcgggttcgggcctcgtccgcgatgccccgcctaccgctccgcccccgcggaagtgccggccgccttttcgctagctgactggtcctcccgtacagagggcggagctcgcggtgaggcgggggtgcgtacttc

SEQ ID NO: 32957 - DNA, 421 bp, Mus musculus
  source 1..421: mol_type = other DNA
ggcctgccagcatgtggctgtaaccccaactctggcctggggtgcccagggcctgtgtacagtagacattcagcatatactcactgagcaagtatacagagggagaaatctcaggcatatccgtctgtcattcattcaatcacgagtaggccactccgcccagcttgggaatggaaattctcatgagactcccgacctgcagatatgcaggatatcttctctagccagggcttgatcaaggacggtctctgcacccccacccccacagcagtggctgctgcactcagctcaggagttcagttcccctcaggcccctctgggtcagacggtctggtaaatttagccactttacctcgaaatgaggtgactgtggccagactgaattctgtttattctggcttcacctggggcagaggcccag

SEQ ID NO: 32958 - DNA, 218 bp, Mus musculus
  source 1..218: mol_type = other DNA
ccttcaccactctgagcagctacttcccaaggatggaagatatgccctcacaaggggacacaaactttaaatttttgtaataccccagttaaaactttaagcatctttagaaatagaaaatgccctttgaggttgtaaatgagatgtataatttaactctgagtggtagcccaatggtaggtcggtgtggccactgcctgagctcaccaccacacagc

SEQ ID NO: 32959 - DNA, 366 bp, Mus musculus
  source 1..366: mol_type = other DNA
cccaggagtagaggcaggttccattaatcatgtcgtgtccccaccaaataagttggggtgcttctcattatttacctttaataccaaaatttggcaagaagaggcaccctggtcttgccttggcatgagcgtgtacacacacacacacacacacacacaaaagcatgattgtgtaggaggctgggctgctggccggttcagagctgccagcaggcgcctggaacctccccagccaggcaggctcctccccatggccctcctggggccccccgctgggggaggaggcccagctaagcctctctcctgctggctgggggtggggaagggagggactccaagcctagcacccaaggacgacccctacag

SEQ ID NO: 32960 - DNA, 617 bp, Mus musculus
  source 1..617: mol_type = other DNA
tagctacttaactgtaattttgctactgttatgaatcggtgaccccggaggaagagtcgtcctggggtaaaacttgaaactcttcagggggccgccaagaagccgcagcatgggggggggctcaggccgaagaggggccccagatgcccagtgctcgcgcgcatgcgctgaacggcagtccaggtgcgctcgcgcttccggccggcctgccggcgcatgcgtcctctgctcccccggctcaatccagagaggccccagagcttcaggtgatcccgcccctccctcgcaaggcaggaccaatcgcgagggctgtgggcggggcttcccaaccacgaggcccgcccacgggccgcgcgagccccgcaggctgcgtgccgattggctgacgccgcgggcgcaggtgcgcgcttcccattgggtgtgggcggagcgcaagccgcgcgccgaagctgcaggtgagcgcgcgcacgtgccgcggccgcggcccagctcggtgcacgagcgcgcgggcgcgcgtccgcgggggaggcagctgcggcggctgtagggctgtgctccgccctctcctcaccgccgcggccgccgccgcccccgagcctcgctgggagggaccggtg

SEQ ID NO: 32961 - DNA, 445 bp, Mus musculus
  source 1..445: mol_type = other DNA
ttgttttctagagaaaagccacacctgtgtcctaaccagtagaccagactagcctggaactcagagagatctacccccaccccaccaccttccatcacatgtgatgtttgtgagagggtgtaccatcttgcagaaggatgggctgaagattacactgtaagtggtacctcttctcgtagggagaagagattctcagctcctattctacttaatgtcctaggaagaggtgttaagcagcattcttacatctgaaggctttcctagaaaagtttggttctgaagataaggtctctaaccttggaaggtgtgcactaccactacttttggttccaaatagttcatgaaaaactagagaaaagatgatggtttatcatgtatatatttacctggaactgatctctattatcattgtgcagtagtgcacagtggcttctaaacactttgc

SEQ ID NO: 32962 - DNA, 524 bp, Mus musculus
  source 1..524: mol_type = other DNA
aggggtggccaatccttcacaactgccttatctacggtagggtaactactgttcctttaggatgatccaaagttacaaagccaacggtgctgtcacataccagaattgtgggtgatttccttgagtcaatggtaagtggccatctgatgacttgaaggaatattcaggcagcaggctcaacccttggctttggagcacgtgggccttgggcagccccaggcgccctcctgccagcccagatgggcccgcgcagggatccccagtgcagccacctgggcgtgctgcggcccgctacttctgcctccgccggcggcgctgcggtcagaggaaggcacccaggagcgcagtgcggccgcctggggcaatggagagctcccctcagtggggattatataatctcacccaggagaggctggggggggctggggccaccctgccataaggaacgccgcagccaccgaagagctctcccttgggggggggtcgccgagtagggggtccatggcccccgcccccccccagct

SEQ ID NO: 32963 - DNA, 772 bp, Mus musculus
  source 1..772: mol_type = other DNA
gcaagctggcggctgtagcggaggatctcgtcccgcgacagcgcggcccggggcgccagcggcggcggcgggacccggagcggacgctcgggctccggctcggctgtcagggccgcggccagcctccgcttgagcgaagcgcctgtaaggcagctacgtcctccggggcagccatgacagcctcttccggaaagagccgggaagggacttccgtttccggttgcctgtctcttagcgactggaaaacgaagacgcttcctggccctcccggggaccacactgggacgtcggagcgccgagcctcccccatgctccgagatttggtacggcccgtgtcggatgacgtaagtccgcttccggcgcctctcgcagagccgtcatggcttccacgggggcgagtcgcagtcttgctgcgtctccgcggccgccgcagggccgctcctcgcgacaggacactgcctacaacgaacgggagaacctgccgctcatcgtgtggctgctggtgaagagcttctccgagaggtagaaggggcttctcgcgcgggggccgggagccggccgcgggctgcaggtcggcggttggctgcgcgaggagacccccggaggcccggtctccgctccctcccgagcctgctcgcggctttccccagcggggagaaccgaggagcacagccccgcgtctttctccttctgttgacagatcgcgctggcctgcgtccccggcctgttctaggaggtatgacctcatacctctgggcggtcaggatccgcc

SEQ ID NO: 32964 - DNA, 858 bp, Mus musculus
  source 1..858: mol_type = other DNA
ggtcactgtctccggcgggggcggccgcgggaacacgcagcggtagcacggcccgccgtcgtggtggtagacggtcatctggccctcgaagcgcagcgcgctggccgacactagcggccggccggccagcacgcacgcgtcgttcaccaggtagcgcgtgggcacgttgtcgcagcagtctgccaccacgtcgtagccgcggaccaggtcgagcgcccagtcctcggcgagcgcgcgcgggtacgccacgcactccaccgccgagttgagacggcgcagcgccgcggccgccgagcgagccttgctctcgccggcctgcgcctccccgtgcaggacctggcgggccaggttgctcgtctccaccacgtcgtggtccaccagccccagcctgcctacgccggccgccgccaggtactgcgccagcgggcagcccagcccgccgcagcccaccacgagcaccgccgccgccgccaggcgcagctgcccgcgcacgcccagctccggcagcagtagctggcggctgtagcggaggatctcgtcccgcgacagcgcggcccggggcgccagcggcggcggcgggacccggagcggacgctcgggctccggctcggctgtcagggccgcggccagcctccgcttgagcgaagcgcctgtaaggcagctacgtcctccggggcagccatgacagcctcttccggaaagagccgggaagggacttccgtttccggttgcctgtctcttagcgactggaaaacgaagacgcttcctggccctcccggggaccacactgggacgtcggagcgccgagcctcccccatgctccgagatttggtacggcccgtgtcggatgacgtaagt

SEQ ID NO: 32965 - DNA, 351 bp, Mus musculus
  source 1..351: mol_type = other DNA
cctcctcagtggagaagtggagaatgcttgccaggcaggagtgcagtcattgtcaccaagcttgggtgaccaggaccagaccggggcttgatcaaaattccataatattgggtttgaatttccgtcagccggaagtacaggttacctgtaggggtgaccatagctgtgggcatccccaagaagacagggcgcccctctcctaggaaagcgagtggtccctaaggtagagctcgcaggcaacagcttctgaccggaccctgggtcagacagcagcaggtttgtctgggcctgtcgctcaggccagaccgggcggtgcccctccccgtccgggcggcgccccgccccaccagc

SEQ ID NO: 32966 - DNA, 637 bp, Mus musculus
  source 1..637: mol_type = other DNA
aattcttgttcctaagagctagggctctgcctacgtgtttttcaaacgctggctcgggactcccggctccggcggcggatcctgaccgcccagaggtatgaggtcatacctcctagaacaggccggggacgcaggccagcgcgatctgtcaacagaaggagaaagacgcggggctgtgctcctcggttctccccgctggggaaagccgcgagcaggctcgggagggagcggagaccgggcctccgggggtctcctcgcgcagccaaccgccgacctgcagcccgcggccggctcccggcccccgcgcgagaagccccttctacctctcggagaagctcttcaccagcagccacacgatgagcggcaggttctcccgttcgttgtaggcagtgtcctgtcgcgaggagcggccctgcggcggccgcggagacgcagcaagactgcgactcgcccccgtggaagccatgacggctctgcgagaggcgccggaagcggacttacgtcatccgacacgggccgtaccaaatctcggagcatgggggaggctcggcgctccgacgtcccagtgtggtccccgggagggccaggaagcgtcttcgttttccagtcgctaagagacaggcaaccggaaacggaa

SEQ ID NO: 32967 - DNA, 544 bp, Mus musculus
  source 1..544: mol_type = other DNA
cagtcgtcttgccggctgcagctcagccggctctttccagccatggcccaggtgggagccacgtgtgccaccccacacatcgtttatgcacagcatgcgtaaacacatgcgttcgagtaatactggaaaccttggattttctaaatgaatctaaaaataaactttgaggaaaaaaaaaagagtctgggcagtcagaggcactgagggcctaaggagacacccctgggcaagtgtccaagggatgctggacaacccgggggtgcaggctgaaatcctggggagccttctccaaggggtatcctctggcggtggctgtctgcgagtttgcacgcagctcctgcagggcctggcgggccgcgcccccacccctgcgcgcctccccgaacaatcagggcttggcggccgaaggagccacggagctggctggccgcggaggagacgtcatggattccacagtgagggaatcccgttattttactgcattgaaagcccgaccgcggagcgccgggagcccggggagcctgagcaggagcccggagcacgg

SEQ ID NO: 32968 - DNA, 379 bp, Mus musculus
  source 1..379: mol_type = other DNA
gtgtagccctggctgtcctggaactcactttgtagaccaggctggcctcgaactgaacagggattcaaggcgtgcgccacctcgcccggcggggaggacgcctgcccagcccacacagctctgtttcagtataactaagccctggctgtactggactggctctatagaccaggctggcttagaactcagagatccacctgcctctgcttccctaccatgtgctggggttagaggaggatggacacgttttttaaagacataattcattttaaaaattgctgtattcaaacaaacagacagggcctcttgtagcccaggctggcctcagactgcagtgctccgttgggattccagctgtgagctatcacacccagagtgg

SEQ ID NO: 32969 - DNA, 651 bp, Mus musculus
  source 1..651: mol_type = other DNA
atttagagacatcgtttctctgtatatccctggaccaggttggccttgaccaaactcagctcctatgtgccatatgcctgcgtgggtgtatgccacgtcagcgcaggtgccctctccgaccccttggggctgaagctgcaggtattttcacaatatcctttttgagatagagagagacagactgactgatacagcctttgcatgcgatcactgtgtctgggtgggtgtgtgggggtccgaaaacctgcccaccttctccccccaaccccggcccgaaactcgggggaccccagcgcgaggcgcaggttgcggggtgagtgcgcgccgctcggagcgagcaggggtggggtgagtgcggcgggacgcgcgctcgcgctcgcgcgcacggacacggcggggggcgcgtggccggggggaggcgcgcgtggggggcgcgcggcgcgggcggggacactgcggcggccccgggcggcgggcgggcgcgcgcgtgggcgcagcgcggagcggggcccatggtgcggccgtgtccgtcggtcgggccgcgcgggcggctccgcgcgtggcccggcgctcgcgacctcgcccctgcgctgcgggcccggcccgcccgctgccggcgccttctccccctgccccggggcggcgcggagg

SEQ ID NO: 32970 - DNA, 499 bp, Mus musculus
  source 1..499: mol_type = other DNA
tgacatacatactcattttaaaaaagatttgtgtattttactttttttttttttttttgcatatgtttgaatcatatgcatgcaataccaacgatggccacaagagggcatcatttcccctagcacaaggtcctctacaagtgcagctggtgattatttatttagagacatcgtttctctgtatatccctggaccaggttggccttgaccaaactcagctcctatgtgccatatgcctgcgtgggtgtatgccacgtcagcgcaggtgccctctccgaccccttggggctgaagctgcaggtattttcacaatatcctttttgagatagagagagacagactgactgatacagcctttgcatgcgatcactgtgtctgggtgggtgtgtgggggtccgaaaacctgcccaccttctccccccaaccccggcccgaaactcgggggaccccagcgcgaggcgcaggttgcggggtgagtgcgcgccgctcggagcgagca

SEQ ID NO: 32971 - DNA, 460 bp, Mus musculus
  source 1..460: mol_type = other DNA
gcttcccaaggctgggtggcagcgcgcgcccagcggcctcagggtgcagccaggggggaggggtcagggccgagagctcgcccctcctctccagaggaagcaggcgggctgagggttaacccttttggccctatgatgtgggatgcttccagttgccctggggggcaggcagagcgcgcagagtccgcacaccgcccaccatccgcggagagctggaatcgagcgggaggcccagggggactccctcctcccaacgttcccagcacggcgggcagggacgaggggctcgcccgcagctcccggccgcgctgaggtcctgaactccgtggaggctcaggccgggtcagccgcaacccgaacctcccgggcgtgtgctgagcagtgccgcccgggggagggtgcgccccagagggggtgaccatgcacccgctgcccgggccccggcccgcaccctcccgct

SEQ ID NO: 32972 - DNA, 446 bp, Mus musculus
  source 1..446: mol_type = other DNA
ccaattaaacttaggtagatttgagaaataaatttttatatccatacacacccttttaggaaattctagcattcccgattctgtaagtcagttctgtattgcagtgttctagaaagcagttaagtaaagctttagggaaccaggattactcagcagaaggtaccaccggccacttcaaaacgcagttttaacatttccgtaaaaagaaaattgaaaagggactcgagtctcttgttcaggtttgattaaaagttgaaccgatctgggaaagacctttctcagctggtagttatcaactacgccaattactacaataattttgtgggttctctcagaattcggatagtgtgctaattagcggaccctgatcaatgagggcttatttaaatgatctctgaggtcttggacccaggccaatcagctgtcagagctcatgataaatcgca

SEQ ID NO: 32973 - DNA, 353 bp, Mus musculus
  source 1..353: mol_type = other DNA
taaacctctcagagtctgacccttggagtgactttgtggcaagctcaaggttagagctaaggtcagttctcgttgcaagagcagcacagactcttaggagtctgtttccaccatgtgagctggctggcaggaaaccaggcttggtgacgtgctgagccatctcaccggctcaacccagcagcagggcaaaggccccgccccggtgttacgctgccggatctgccctaggggagcaccccgggatttggggctccactctcccaggccggcagcgcatcctcctggcatctgcgaagctggcagggagtcgggtggggcaaggggccagcgccctctaggcagcggaagtggcg

SEQ ID NO: 32974 - DNA, 277 bp, Mus musculus
  source 1..277: mol_type = other DNA
tagccacaaagcctgagtctcatggttgtgccctgatggtgaggatccctcctcttttatattgaacgaaagggagggatggtagttactagataaacctctcagagtctgacccttggagtgactttgtggcaagctcaaggttagagctaaggtcagttctcgttgcaagagcagcacagactcttaggagtctgtttccaccatgtgagctggctggcaggaaaccaggcttggtgacgtgctgagccatctcaccggctcaacccagcagcag

SEQ ID NO: 32975 - DNA, 169 bp, Mus musculus
  source 1..169: mol_type = other DNA
gttcttggaactccaggcactgcctaagggggtgctcagagcaaatagctgggggggggggtgtccccaggcagggctgccccttggccaccccttcaagagggaaactctgccggggcattgtccccctcagcgggaggcggagccccgtgagccccttcaaaccatg

SEQ ID NO: 32976 - DNA, 131 bp, Mus musculus
  source 1..131: mol_type = other DNA
tctgcggctggggagtaaatttctccctgtcatcaggtcgcagggagaagagaattccagattttctgtctttaatccactgtcttctgcgcgtggcgcgtgtgcgcccctcacacatatctgccacccag

SEQ ID NO: 32977 - DNA, 218 bp, Mus musculus
  source 1..218: mol_type = other DNA
cagctccgtgcagctataccggcagagcagtaagcggtgttcaccggcgccagcaggttccgctgcaggcagtgcagtgcggcctacgacactctcgtggagctgaccgtgcacatgaacgtacacctggcagttcgaggcctgcaagtcccagatcttaaagtgtatgccaagaaaggaaaagtcactgtctgagaccccaaacagtgagtctctgg

SEQ ID NO: 32978 - DNA, 538 bp, Mus musculus
  source 1..538: mol_type = other DNA
gctttatctattataggttactctccattgtacagagaatgctcagcttaatattaaaacatgctctcagctttttgattttaatctgtgtaatacagtattcccgttaataataacgtgtaattaagacatccgttaaaaatccataacgttaatttaatggagaaaatctaatacagttctattggaatttttacgttaaattaactttaacgggcttttaatggatgtcttaattagatctcattattaacgggaatattccacaaattaaaattgggcccttaaagttttaatgaaaaaagttgcaggaatgcgtttaaaacggacaccctgtgcaggaagagactgccagcgaagttggctcgtctgaccgtgtgcatgctgggaactaagcttacagactgcccagtacatgcacaggacaaagcctttggcatccacatggttaagcctgcaaagatgaacatggtcgggataattgttacactgaacagaaacatttcctttagacaaaaggaagagtgattggccccct

SEQ ID NO: 32979 - DNA, 594 bp, Mus musculus
  source 1..594: mol_type = other DNA
atctattttacatttgatcttctttcatctttaatacgagtcaggaacaaaacagttcactcaaatgaatttctctgcaaactaagatttattaggtaccaagtccaaattcagatatgaaactattaaaaaggctttttgaagataacaatttaagagaaaatttattctttttaggttgactctctgaaagtgttaaccttcacaactaggtgagaccggggagttgggcaaccggcccctcccctcctcttccctcccctcccggggcgcaccttgcaagggagggggaggcggcgagggaggactggctgtgcgcctgcgtgctgcgtttgcagcccccccggaaccgcccgggcgcgagcgcgccacgttaggccggatggcgggacacggcgcggggcgcgcgtgcgcgggagcccacggggtgggagtggggtgcgcgcgccgctccgcggggctcgcgcctcggggggtccgaggggggcgtggcccgcagcggtgggcgggtcggggacgcgcttgcgcacacgcgcggtcacagagggggcgtggccgggggcggggcgtcaggcggcgcggccgggggggagg

SEQ ID NO: 32980 - DNA, 247 bp, Mus musculus
  source 1..247: mol_type = other DNA
aacagttctccaaaatgtttctcaagaggacgctctgtctttgtaaaagtgttttttcttttagcactttcctagtatttttaaagtcctggtctgccaccttggcacctcaagaaatgtgccaggatgccccgggcgtggtggcaacgccttccaggctagcctgttctacagagtttctaggacagccagggctctgtacagtgccttggaggccagtcttccatgagaactgttctgggccccg

SEQ ID NO: 32981 - DNA, 407 bp, Mus musculus
  source 1..407: mol_type = other DNA
tacatacacacgtatgatttgagttataggtaattatgaccagcaacataggtgctgggcaagttaaatgggaggctgaagcatgccagagccacataatgactctgcacacttaggccatggcttcatgtgcatgagcgagcgcacatatgcacatccatatacactgaaataaataataataatgtttaaaattaaatcttttttttttggcttttcaagacagggtttctttgtgtagcccaggctggaactcactctgtagcccaggctggcctcaacaccagattaaaaattaaatctttttttaaattatataatatattatatatatatatactacatacgtatgtctatatgtatacatacatgcatacacacatgtacatatttatgaggatactctt

SEQ ID NO: 32982 - DNA, 329 bp, Mus musculus
  source 1..329: mol_type = other DNA
tgcacctcacatgtatcatatgtaaaacaatgtaactaacttgttgcatacgctcagctgtagagcagcttgcccagtgtgcacagagcccagaattccatctcttgatcatgcagcctggaatcccagcactgaaggcaggcagatcaaaggacgcccttaaactgcatagtaagatcaaggtaagtcaactgaacttctggccagcagaggaaaaggctaggtgacctggtcatggagggactcatcccaggtccacctgcacagtgttcaaatgcggggaggactcctcctggcgtgtcctgctctgtgtattcagccagcaggcc

SEQ ID NO: 32983 - DNA, 380 bp, Mus musculus
  source 1..380: mol_type = other DNA
gtggctaactctgcctgctttgtgtcgtgcattataacagaagcatcgaggaatctggtaaggaaattctgcaaatcgcattgggctttcttgcctagcggtatcccgggatgttgggaggcaggctcgctctccactctcttggcaagcgcgggcggtcttccgcactgtcctcaggaaccttgcccgccctgagtggcgattgtgcaagcgcagccttgggctcctgcaaggccggctgcaacctgcaggaggagggagaggaggcgtgctcgcagcgcacccgctgaaccctgggctcgacggggtggagtccaccacggtgcgtccgccgggccagcagcgtgtcggtcacccgaggccccggcgccctcagagct

SEQ ID NO: 32984 - DNA, 354 bp, Mus musculus
  source 1..354: mol_type = other DNA
tgcaagaccctgtctctaaatataaatagttctcaacctatagatcgggagatcagaaaatagatatttattgacattaagcaacaaaactactttttatggttcactacaacatttaactgtattaaagggtctcattgagaaccacccctagtgtcccctgcagtgatcagtgcaaatacttgaccaaatgatttaccaaatactttgaataaatggaaaaagaatttcttaagcttcccattccacacagctgggtggtacccagcgctccccctgctggccgtggctgggatctcgggcccgccctgggaagagagggacctcggggggtgacgcacgcccgagtggttt

SEQ ID NO: 32985 - DNA, 241 bp, Mus musculus
  source 1..241: mol_type = other DNA
ccctgtgctggccagctgtgggatggtgggcaagtccccagacgatgttaagggtgatcaacttaagtcgtgggaacctggctttagcacacacagctgttttttttaaaaaaaaagagtccgatgtccttctctctgtctgctatgcgcagggacgcgcagccgcccctgggggcggaggccgggggaggggatccgtgcgctcctccttctctcctcctcctgggagctggagcggctc

SEQ ID NO: 32986 - DNA, 428 bp, Mus musculus
  source 1..428: mol_type = other DNA
atgtacaataatatattagagtatataataaatatataaaataaaatatatcatatattaatataacatattatataatatacatacttgatatttatatacaacatggaaatatattaattagtatatgaatagaatatgtaatacaatatattaaatatgtgtatatatggaaatatcacaattatacccacttctttagtcgagactcttctgaagacatttcctgacaagaccagaggcagagcctgacacggggtgtgcgaattttaaaacttaactttaagatgatcccaggagattttactgtgaatagattaaagcccaaaatagcttatgattttgtctgaaaataaagttatagagtactctttgctgcttttctgtaataattatttacggacagcttttttgtgaatctcccatgg

SEQ ID NO: 32987 - DNA, 267 bp, Mus musculus
  source 1..267: mol_type = other DNA
tggtaccacccctaggaaggttcattctcttagagaccggaagatggaaggtaacctgtgagcttaaaccgataggaaccctgactaagacagaggtgaggtttattttggctctgtggtgtcagcaagatcttagtacatgtgagtgtctaatataccctcagtgacgcattacatgccagctgtgagaacctcaggtagggtttattcattcaaacccataaacacttcaaacacattttgagttttaaaagaagaaaggggttg

SEQ ID NO: 32988 - DNA, 300 bp, Mus musculus
  source 1..300: mol_type = other DNA
cttttctgttttttttttagagcttcgatgaaagatatgcaacattgttacagcacatctttatatcactataagaagttggggctaaggaccagtacgtactaatcaggaggtctgagtgatagctgcactgttctcctgcagctgaagtcaaccggggcccttagtttgggtagctgcttccccgcttcccttccgtggcttccgaaaaggaaaataattgttacatttaagggatactgccccagtgggttccgaggctcatcctcttgaccagggcacagaactgcccccgggctt

SEQ ID NO: 32989 - DNA, 514 bp, Mus musculus
  source 1..514: mol_type = other DNA
cttgagttacagattgtcaagataacagtttactattatttctttaagttataagaacagaagggttaattttggctcatgggcctagaggtccaacttcctgtgggcccaagtccccaggcagtgcatcctcttgtggttctgtgaaagtacaaaacagtggctgcttcacagccgcgttagagggcttcttcaagtgagagttaaccgtcttctttaaatttcacccattcggctgagaggaaaaacaggaaagttctgagatagacttggcaggtccccagccccgcccactccgctggcgcgtctccagatgccccacccactcatggataggctgcttctgcggagggcggagctgttgggtggagcccaaaacctgcgctccgctatagagccccgcctatcccacgctcagctccgctccgggggcgggccctaaaggtgttggggcggggcctgtcggggggtggagctcgaggccccggtctcggccccgcccaccgcgctgtgt

SEQ ID NO: 32990 - DNA, 459 bp, Mus musculus
  source 1..459: mol_type = other DNA
tcctgtcaggaaacatctaggaggttgagcctttacttaactccccgtccttcccggaggagctcgccccccacttctgctcagggcggaattccggcttggacccaccgggaccgaggccctttgagagccggggtgcaggccgggccggccaactctaggacacggacttggggcgagcgggggtctcggtctcccgctctcttctagaaaaatggaggagcgaatcgtgcccgatcgatcgctcggagtgcacacccagtgcgcacgtgcaaagggcatgcagccgagcgccgagcatccctgctccctcgcgatagaacggccgcagatcggacgggccgttggtgcaccacttccgggctccgacagctcagtgcgcctgcgcccagctacggcagggaacgagcttcccgcagctcttggagtagagggtttgactcctattttaaaaggaga

SEQ ID NO: 32991 - DNA, 259 bp, Mus musculus
  source 1..259: mol_type = other DNA
ctggaatgactcgtcgagtcgacttagactctgatttcaaaggttctccttttaaaataggagtcaaaccctctactccaagagctgcgggaagctcgttccctgccgtagctgggcgcaggcgcactgagctgtcggagcccggaagtggtgcaccaacggcccgtccgatctgcggccgttctatcgcgagggagcagggatgctcggcgctcggctgcatgccctttgcacgtgcgcactgggtgtgcactccgag

SEQ ID NO: 32992 - DNA, 318 bp, Mus musculus
  source 1..318: mol_type = other DNA
gtaagtcaggctatcattaaactcactgagattagccagcctcttttaggccagcctggtctacagaaatgaaatgaagcctaagctagttttgggtttaacttgggaagtcgtgaggactccacttcatgagttcagagcactcgctctgttaccccagctgtcacaccgcaggggacaggaaggaagacatgctgaccctcagcggaagtccagcagctttgcttcatcatggaaagtaggaacttcaccttttttgtggtttcacacagcaaaggagtgtcagcccgtgggtgtggcctgaagctctggccccgc

SEQ ID NO: 32993 - DNA, 378 bp, Mus musculus
  source 1..378: mol_type = other DNA
ggccagcctggtctacagaaatgaaatgaagcctaagctagttttgggtttaacttgggaagtcgtgaggactccacttcatgagttcagagcactcgctctgttaccccagctgtcacaccgcaggggacaggaaggaagacatgctgaccctcagcggaagtccagcagctttgcttcatcatggaaagtaggaacttcaccttttttgtggtttcacacagcaaaggagtgtcagcccgtgggtgtggcctgaagctctggccccgctacttgaaagaagtttccatgtgttggcaaacagttccatagaatccagctcctgggaaccagccagcagcatgcagtgatattgcatcattggtccctggaaccaga

SEQ ID NO: 32994 - DNA, 271 bp, Mus musculus
  source 1..271: mol_type = other DNA
aggcagactagggggtcactgaaccccatggtgagtggcgcttgttggagacactgtagccctagcttctgcccaaaatacatctggatacaggggttctttgagtaagcacaggatggaagtacactgtagctgtcttcaaacacaccagaaggcatcagaagaacttctgaagagcagtcagtgatcttttttctaagtctggatttaaaatacatgagaaggcctcgcgcggcgaccccgcccctttcgcggcgcgctggttgtgtgc

SEQ ID NO: 32995 - DNA, 468 bp, Mus musculus
  source 1..468: mol_type = other DNA
ttccacgcggcccgtggcgattcctgggcgagtagaggcttctgaagagccgcccgtgacagctgcagaaccggcgctccgcagggctgggcatcgcagcagggatgggcctgggcgggggagctcgggtctcctccagccacggcccgcagccagatacagcttcgggctatagctgcagcacgcggaatcctcccctcccttccctcagtgggcaggtcagtaaagggtgtcagggaaccccaggagttgagacaccctggaatcccagctgtcagctctgccccacgtttgggcacctcagcttggcaggtctgcggttgtcagagaccgccctgcgagcccctcgcgacgcctggtcctgcaacacgctaggcagggtgcggggcggagctaggcagggactggctgggggctgccccgcccggcgcctgggcctccgcgcggcgccggcccccggggaggagt

SEQ ID NO: 32996 - DNA, 452 bp, Mus musculus
  source 1..452: mol_type = other DNA
gatccagcaggaggcctgtgccagcatctggtcaacgccctgctgcccactggcccctggacacaggagtctgtagagtgtgtgatgcacaggtgcatatgtgagcatgtggagaccagatcttgtgttttgagatggtctcactggcccagaacccaacaagtacttgggctgggtagccagcaagtgcacgttcaggctgtttaatgcatgtgctggggactaaattcaggccctatgccccagtgagtggccttggatcaaataagtgaaaccaatggcctctccttagagggtgccaagctcagagcattccagcaaggaaacagcatcctctcttctcgtccctggaagtcctaccaggcaggctactcacggtgagtgagcctcaggcttcttaagctaaaggcatcacaatgactggagctgttggctcagggccctctgtgaca

SEQ ID NO: 32997 - DNA, 326 bp, Mus musculus
  source 1..326: mol_type = other DNA
cacccgcagaactcaactgtgggttcctacgaaccgggtctcagtgtccacggaagcttccctgccagcgacacctttgaggagtctcctccaaggactcgcgagtactctagcctgtcggacaagaggccggcggccaggctgcgggagcgcaccgcacccgcacgacctcgaggggctgcccctgcgtgcatgcccgggcggcttccgctagggggcgacagtgccccgctcctgtgacctcactggcttggctagcaaggatgctccgatcccgcgtgttccgcggcgcggccgcctcttaagggaaacgcgcccttcgtcgg

SEQ ID NO: 32998 - DNA, 406 bp, Mus musculus
  source 1..406: mol_type = other DNA
cctgggcccggatcccttggggtgtagaaagaactttatctccacattatctctgccagtcctggaaggttcccagagtggccacctccgaggagccttctcggtggccacttcggtccctgcggcgtctgtcccagtgccggacacccggtgggcactcggtaaatatttgtagagcgccctgggagcgggaggggcggggaagtcagtcctcccgctcctcccccgctccccggccccagcgcgcccaactccggggctcccgaggcggcgggcgggcgatccgggcgcgcagggcccttgtattggctggtgcccgcgggcccgagcgcgatcagagcgggaggagggagctagggttcgctcagcgcccagctgcctctccgggacttgtaggtctgcaagc

SEQ ID NO: 32999 - DNA, 233 bp, Mus musculus
  source 1..233: mol_type = other DNA
taatggaaatactattttcagataagcaacaactttttatatatttttaaaaattcactttttttaaaaaaatatttttatgtgtgagtaccacatgcatgcaggcagaaatgtttccccctagtgaaaagttgtaattattaccctgagatctgcatctgagatgggggggcgcctcagaggcccctgcgcctgcgcactctgctccgcgggctgtcccgcggtcagtggtg

SEQ ID NO: 33000 - DNA, 366 bp, Mus musculus
  source 1..366: mol_type = other DNA
ttcattggaacccccattctggaatctagtgacaccttaaacactctatgtggaatgtttcatagagcaactattagtacactcagtaattaagtgctcttgaagagagccatggttcggtttggtggtgcatatacatacacacagggacaacatccatgcacggaaaaggacaggctagatctgggcgtcagttctccaagaactggtgttggagaatctgggtcttccccaagaagccactgctcttggccgctgagccatctccctcagcagggcttctgcgcatgtgcgcccgccttgagaggggcgggacgccgtgctctgacgctttccgggcagtcccggaagtggctcgtggcgcgt

SEQ ID NO: 33001 - DNA, 256 bp, Mus musculus
  source 1..256: mol_type = other DNA
catcatggtcccagccttggcccacgttctacacaggccatgtcgtcagtgacatgggacagccgcctttgttcttcctcacagtagaaagtagaaagtagaaagctcttagctttctacaagactgtaaaaggtgtattcacgcgtgtgaattatttttataaacatggcaaattcactttgcagctggcctcaaacttagtatataggacccgcgtcctggcacgcgggacgtacgtggccggctacaaaggcg

SEQ ID NO: 33002 - DNA, 439 bp, Mus musculus
  source 1..439: mol_type = other DNA
tagtacactcagtaattaagtgctcttgaagagagccatggttcggtttggtggtgcatatacatacacacagggacaacatccatgcacggaaaaggacaggctagatctgggcgtcagttctccaagaactggtgttggagaatctgggtcttccccaagaagccactgctcttggccgctgagccatctccctcagcagggcttctgcgcatgtgcgcccgccttgagaggggcgggacgccgtgctctgacgctttccgggcagtcccggaagtggctcgtggcgcgtcagtttccaccggcttgaggcggacgactcggcggtctggggtctcccggctgcgccccctctgccccgcgccagagcaggtccgtggcttcgggccccgccgcgtgcgtgttcctcaggcggccgccgcgctccctccgggaagcc

SEQ ID NO: 33003 - DNA, 325 bp, Mus musculus
  source 1..325: mol_type = other DNA
cagatgaacaactcagtttggattttttattttaaaggagaaatagagaagccaggtgagttcgaggccagcctgatctacaaagtccatgggtttaagctcacgatggagtccaggcaggcctctaacctgcccccaactggggctcaagagagtgcagaagcacaagaaactgttgtgtctaatccttagccagcaagcaccatcaaatggtggtgctgcaaagtggtcagccacgggccatctctgagttgcaggacaatggaccctttgcctggcaggatctcagagcgccccaatttatgaaacacacttgcgtcattac

SEQ ID NO: 33004 - DNA, 393 bp, Mus musculus
  source 1..393: mol_type = other DNA
cttcttgaagaagacactgcctgatgcatactcttctggctctcgccagccggctgggtgtccttcagaacaaagcttacagccactaatctctgcagtgttcatcttgggagctgagtgggagtgacacctcacagctgtggtgttttgacaaagtccaagaggcgtctcggctaggcctgcccttgacccaggcaagagcctgcagtttgcatcagcaacaggctatggctgatagaggggcctgaggcctcccgttcaatcattatctccctggagtttattgtgctgaccatggctatgatccaaaggcctgccccttacgtcagaggcgagcctccgggtccagctgaggggcagggctgtcctcccttctatatagtatttaaagca

SEQ ID NO: 33005 - DNA, 352 bp, Mus musculus
  source 1..352: mol_type = other DNA
cgccacctagtggtcagttttcaaatggcgcctctagggaacctgggcagtgtccctcaatgggctccctggaagtcataaaaaaatcacttggaaatgttaatattttcccatgcacaggcccatcctaagctgtgtagacctggcctggtcttggaccctttcaggttctgtaaggtgaagctgactggggacctctgtcttgccctgtgcaccagtgacctgcacaccagacaggtacagaggtcccaagacgggacccagaccctcttacgtaatatggaacagagaagtcagagttctcttcagatagagctctcccggtgggagaccagtctccaccccagaggcc

SEQ ID NO: 33006 - DNA, 449 bp, Mus musculus
  source 1..449: mol_type = other DNA
aaataataatttgtctccccaagttgctatgggagcacaccagcatagctctccagtaattaattaaaacttaatgaacaacagtcggtggcccgtaactgcttgggtgtcccataatagtaacacacacacacagactaattctcagtctcctgagaccaaggcgccccagaaaccttatagtcttcgggtgcccccaaaagcctgggtggagggccccaggccgccgcaggcacgggggctcccgcggaccgggcctgcggagtctcgagggcgctgggtctacgcagcgccggcgaccggtctacatggacgctaggctcgggccctttaagagcccgccccgcgagcgacgggcccgccccccgggccgaggagggtgcgggggccgtcggcggggattggcgcagcgcgcgccccctccgcggcccccgcgcggtgggaaccgg

SEQ ID NO: 33007 - DNA, 498 bp, Mus musculus
  source 1..498: mol_type = other DNA
cgcatgggtctcctacagcttctgcgggaagagaaggctggctagagtcctcagcctgaacaggacctggtagaggcttagccaagctcctcaaggaggtggagggcagtgttctctgcaaccactggaggtggctggcagctctgttcggtgatgtgtgttctctcaaatagacatcaccaagctctgtgctaacatccattctgcctgggttacactgagcaacttaggagctcctgtgtcaaaattttaaacaagagcagttaagagcactgaatgacttatcttcctgaggcatctgtaatgggatccgatgccctcttctggtgtgtctgaagacagctacagtgtattcatataaataaaaataaataaaatctttttttaaaaaatttaaacaagtaaaaaaacaaaacagtggagcatgccaagcccccactgggtgctcagagggcagaggcagctccagtgtcacgtgtgacctggcaaccggtctcc

SEQ ID NO: 33008 - DNA, 392 bp, Mus musculus
  source 1..392: mol_type = other DNA
acaaataataaagataaaaataactatttagtgttctgagtcctatcaacattataattatccatcatttagaatgagcctctctgatataaaaggattaagagtgggtggcctggaccacctgccttagaccaaatttgtgtaactgctatacaaactatttttcaagcttctattttgttcgtggtaacaacagagttgcccctaaaggcctggtctttgagggcctacacctcccaaccctgcggtgaaaaggtttaagcctatgcgtccccacagggctagcaggctggcgaggacggggggggggagcagtctccggaagcgcgggcgcccctctcctgtcccgggggccccaggcgggggcggcgatgacgcgcgggatgacgcgg

SEQ ID NO: 33009 - DNA, 898 bp, Mus musculus
  source 1..898: mol_type = other DNA
cgccgcggcccctagggaaaacggaatccggctcccctggccctcccaagaggcgcgacgtccccgccgagccccgggtccgagtcgggccgggcggggcgcgcgcggcggggaccgtgccaggctcgcagcgccgcgggacaaagccgggccggccgccagctgccgcgagcctccgggagggcgcgccccgggcgcggcgagcgcaaccggggagcctgggcgaggcaggcgcgcggcccccgagtccccacgcgatcccgatgtcccgggccggggatcccacggggctgtcccggggggaacagggcactgatctccatgctggggaacaaagagcgctggcagttgcacgcgcaggagacattgggctgcccggcggcggcggcggcggtgccgttgacccccatcaagcggtcacgggcggcgcggggcgcgaggcgcggggcgcgggggcggctccggccggcgcgcggggctcgggccccgcatacagcgagcagcgcggcgcgggctcggggcgccgccgaggtccccgaggcgagctgggtcccccggccgccgagcgggagccccggggcggcgggccgtggccgcgggcggcgtgcggggcacgggcgggcggccggggcacggggccgccgggctcagcctgcgcgccggccgatccgcagctgagcgccgccgcccgctcctcatcaaggagatcgggttgcgccgcgcgcccgcggtcggaggcaggcagacggtctgacgtcagcgctagacggggctgccggttcccaccgcgcgggggccgcggagggggcgcgcgctgcgccaatccccgccgacggcccccgcaccctcctcggcccggggggcgggcccgtcgctcgcggggcgggctcttaaaggg

SEQ ID NO: 33010 - DNA, 785 bp, Mus musculus
  source 1..785: mol_type = other DNA
gggagggttaactttcagaaacttgtctaactttaaaggtgtccctcgcaaagttggaaggaagagggcgtcgctccggggcgccgggggccaccctgacacctgggggccttgggtggggcacagcctgctggtcccgccgccctaaggggtctgtggggggctgcgtcccgcgctgagcgtaaaggggtgcaaggggccctggagtgccggggcccgcccgcccggcctccgcgaccctccggaccccgccccctcagcgccatggcccgggaaccaggggtgcgggcccgccgccgccctaagttgaggagggagaggcccggcccagcaccagcatcccccggcgccgccgcctcaccgccaagtcccggccgagcactccgggcggccgtgcgtccgccgccgccctccggtccggccgaccccgtcacttgtccggcggagtcacctcaacagccgggacaccgccttggcctcccgggcgctaccgccgccgccatcttgggacgccagctgggtcacctgacctccccgcccacttcggcagccaccttctccgcgagggcggggcggccggctcgcagctcacaggcgggtgggcggagcaccaatgggcggagcctcagcgtcgccccaccctccagctccgcctcagccccatcttctctaaggagtgggcggggcgggatggggcgtaatcttgaagctaccacgcctcgctccaccttccacccgtcccaagatggcggcgggtgagggagcgcgagggatgggcgtggcct

SEQ ID NO: 33011 - DNA, 587 bp, Mus musculus
  source 1..587: mol_type = other DNA
acaaattggaacttgcacttcgaaggggctccatgaagacatggagctggccaggcccacaagtagggccaggaacccaaggaggttcctcccaggttgggatttttccctctcacagctcctagcgcagccagagcgaccgaggctcctgtcccgtctaagtgcaccccacagtcctctgggagggacccaaggaggggcggggcgccccaactgttacttacagggggctgcgcgggcggcgagtcccgggctcgggggaaggggagccgtcggagacccctgaccccactcacccgccatcttaggatgtgccagagggcggggctggaggcgggggcgagcccagaggccacgcccatccctcgcgctccctcacccgccgccatcttgggacgggtggaaggtggagcgaggcgtggtagcttcaagattacgccccatcccgccccgcccactccttagagaagatggggctgaggcggagctggagggtggggcgacgctgaggctccgcccattggtgctccgcccacccgcctgtgagctgcgagccggccgccccgccctcgcggagaaggtggctg

SEQ ID NO: 33012 - DNA, 617 bp, Mus musculus
  source 1..617: mol_type = other DNA
cttggaaacttttattatgaaaataacttcaggtgtatagggaagtacatgaacaacatggatattcctgccatatagagtcatgtgtactcttcacacgaatgtttgagtctattttacatagtatacgttacacaatgaaatactctcagttacttttagtcatgatttatgtgtgtaactaatttattctctcagtgaattgtatttctaaatatttcttgcataaacaagtaatgctatcagcaaatggttcagtgcagcgctttgcggtttggtaaacactgacagaatagcttttatttatgacagttactgaaagcattaaataagcaaacaataattgccagtttattatatttataattgttatttatgaactgtcacaaacattgtgtttgtaagaataataagtactttattatattcaggctcagtaaagtttattcttgttaattattattattaagtaaagcacttaacaacaggcctcgagaggccacgcgcccggtctgtgcctgcgcagtggccctgaacaccctgcgcatgcgcagtcggagccgctggccactgccggagcccggcatctgctacgtacgtgcgtacgtgcgtgcgtc

SEQ ID NO: 33013 - DNA, 303 bp, Mus musculus
  source 1..303: mol_type = other DNA
agtctggatcagcctgcttcagggctgagggaggctaccccgggagctaagctcagctagaactttgaagataacatctatgtacagatatgtgggtatgcgtgcacatgctatatacatggatgtgccaggctggctctggcaacccagcagtcaggaaccatctccccagccctctccgatgggctggttagcaagaaagacgctgcaacaggatccttccgcctaggagaggatctgattcatcttggcaaaagaacctggccagcagtagccaactgccactctgcaactgccactctg

SEQ ID NO: 33014 - DNA, 393 bp, Mus musculus
  source 1..393: mol_type = other DNA
ccggtgaccccagcctccggagctgctgttcactgagtgcggcagctgcagccctggggggccctgggagacgcccccaccccccaagccagcaacacaaagtactttttggggtaaggccagcaaggcctacggatacttttttttttctcacagtttaaagaaaaaaaataaaaaaataacagcgccaggcgcctgcagtggagcgtgcctggcctgcagaggcagacttcttccacttttcctccgcccccgcgcaggcttcggctccagggccaagcaggacgcctgccccagagtctgtacactcttagccccgggaactgtcccagagagggcggagcactcccatcccggggcagggcaataagggagctcccgctcccagggggg

SEQ ID NO: 33015 - DNA, 436 bp, Mus musculus
  source 1..436: mol_type = other DNA
agcagaggcccagcaaggtggatccttcttgggcaccttgatagaacaaggtccattggatggagtggtcatagacagatctggccatgagatgagtgtcttgaggtaggctgggacgttcctgccgtaagaggcccaggcctttggcagaggagggctgttcttccctaggaactagccgtgggccaacagcttccttccgatctccaggagaatgttgctggttgacacacggaactctaagttcccccacccatcaaggtagctggtggagtcagagatagatgtttctaaaagccatggagaactttgaggtcttgtcataatgccccctagggtcttgacagaggcagggcccctaagaggggatctccatctgtgtgcacacatgacaagagggcctttctggagggccccccctcaatcctgttgtgct

SEQ ID NO: 33016 - DNA, 472 bp, Mus musculus
  source 1..472: mol_type = other DNA
tctctctctctctctctgtgtgtgtgtgtgtgtgcttgttttgctagttttaaaggctgataacagagaagaaaaggccagcctggtctacagagtgtccaggacagccagggctacacagagagctctagccccaggcctggagttgtcaaaacaaagtgcagaggcagcttgcgcccactgctgaatggtgacctttctggcgagcgttaggccgaggaggcggcctaccaggccactgcagtagccacggctgtccctggcaagtgaggcttcctcggcggaacctactgccagccgggccagggcagtagccagagctggagcgcttccaggggctcgcgcgccacttgccccccaacggaggcccggaaggcgcagtacggcccgcgccccgcctccgccggcgccccctcgcgccccgggtgggccctgcagggcggcgcggcccggaggcggcggggaaggcggg

SEQ ID NO: 33017 - DNA, 366 bp, Mus musculus
  source 1..366: mol_type = other DNA
agtctatttatttatttatttatttatttatttatttatttatttatttgcttagctgagacattctcctgaatattccagggactccagatcatgaagagcagctgtagagtccctgggagcattattcatttattttattgtttaaatttctaatcaagaaataagatagctagcaatatcttatcgtttaattttggttttctgtaaatatttttagcattttaaaaatatgtatcagtccaaaaagacctgagttcagtagaaaagcaataatcgctatctctattgaaccgagtgactgactaagtcaggttgaccagcacaggatcctttggtttacctgtgatgggaacaccacaaatg

SEQ ID NO: 33018 - DNA, 169 bp, Mus musculus
  source 1..169: mol_type = other DNA
acagagctccgcgagtgccgggaactcaagtgtgttggttgggaggctgctctaattaattacagttactttaacagccctgacaaaagtaaccacctttgataaggttagtgtttacttgcgccatgagctatgcgccaacgcacagctcgcggggaggcactcccgc

SEQ ID NO: 33019 - DNA, 417 bp, Mus musculus
  source 1..417: mol_type = other DNA
gctatacgttgaactgcaacacaaagcctgcggctgcgcgccccttgcggtgccggggtgggctcagagcgtcacattgcccggtgggctcagcgaataatcataaaatgcttgatctgcagattgccgcgcgcccgcggcacgcgcacaccgcggggcgatgcaggctgcggcaattatgcaccatgcagatgggtatattgcaagatgcatgctgtgtgccgcggcagatttaattctctgaagtctaacatgtcccagcgtccacgtggtcaccctacctgccgaaggcgtgttgaactttggtccaaagtttggccaggtttgacatacaccgaataggccaactgggtaggtcagctattgggctggggtcacgcctcggaccggaaacgaggtccaatagggggcgccgcg

SEQ ID NO: 33020 - DNA, 349 bp, Mus musculus
  source 1..349: mol_type = other DNA
cccattcagggaaggtgccatgtcttagtctgacctggctcggtccacctgggcacaaggataccatgtcctagcgtggccaaggagactcttgagttttgaaacaattctccaaaaagttcatgttcggtaaagtactttatccgaacccccatatggggcattgcgattaatgccgccacccacatccacgagcacgcgccgcagggtgggaggggtgtgccgccgtccccgcgtgcgctatgcgtcgttgtcatcgtcgcatggcggggtcgggtgcccaccgtcttgggcgtgcccgtacccctcaccgcctgcggagcagcccatttgagcacgtcctcagtcc

SEQ ID NO: 33021 - DNA, 175 bp, Mus musculus
  source 1..175: mol_type = other DNA
tagctccctcggatcatgggtggcaaacagacagtgcctgaggactgtcctgccaggaggcctctcccttttgtagtaaaagaaatccgaacatttcgcaactggaagcatgctttttgtagaccaggctggcctcgaactgggattaaaggcgtgcgccaccgcgcccggcgag

SEQ ID NO: 33022 - DNA, 473 bp, Mus musculus
  source 1..473: mol_type = other DNA
cgcacagagcagggccgcggctgcggcttcggcgccaagcgcagaggccgtgggcgatcccgggccaggggcaccgggcgccgggggcgcgacgagcggctcatctagtcagcctcccccggccccttggcggcgcctgcccgccctgctgctgcaggaggagggggatcgggggccgcccggcccgggggtggagcgctggcatcgtgtgaggggtcgtcaccaccgcggggccgcccccttttccccccgccgcacggccaggccccggccccgaactgcgggtggggcgagggggcgacccctccgtggagccggcccgagccggacgtgggtgctgggacccctgcccggcctctgggcaccgcctcccggcgcccgcgcccgccctcccagccgcctccccccgctcccccgcccgccgcggcgcttttgggtcggggcggcgggcccgggccgaggcaataagagcg

SEQ ID NO: 33023 - DNA, 426 bp, Mus musculus
  source 1..426: mol_type = other DNA
ctttacagtgagtcaggcacacctggctgttgccaggtaactgtggtgaaatgccaacagctatttttaatttttattgcctcacagcacatgtgtggagatcagaagacctcgcgtttttactattaaagtttgcaatttaagaaggaaaactgtccagccacgttcccgaggcctgaggctggctcccaaattggcaaggtggctgaagacagcacccatggatgtcacccataattcgtggatgtcaccccaaactcatggatgtcagtgataagaggggccagctctgggttcctgccacatagaggaagcctcaccctcttaccctgactgaggaaagcagggaaggcctggggtggggccctcagccagacacacccctgggccaatgagagcagttgggtgggctggtcccaccaagac

SEQ ID NO: 33024 - DNA, 296 bp, Mus musculus
  source 1..296: mol_type = other DNA
tgttggaatcaggcaggcagcaagacagccattatgatttctgactgcccctatcggaatggcaacaccaggggatgtttctagagtaatcctggaaggatccttctctgtgaaggagagctgtctcttcaggaaaagggccaatggaagcctgctgagccctaccctgctccaggatgcgttttccgtgttatcacaatggctggtggcactgtcacggggcggggcgggggcaggagcagcggggaaggccccgccctcggggtgtgtccaacttgggcgcctcctaaaggacc

SEQ ID NO: 33025 - DNA, 522 bp, Mus musculus
  source 1..522: mol_type = other DNA
atctctgagcacttcacattgacttataaatgtcatgggtttgtagttgctaagacatcagttaagaccacaaaacagctttattacatgaagagctgtccatcatttgagacaacacatgtcacctaggacccagatcttctcaccttaactcagggcattagatgagaagagacagccacagagcacaacttcaagtttcctactttaaaggattactcagtttaataattctttggacatttgtaaaagatttttaaaaagtaaaggaaaaatcgtttgacataacattgttggacaaagtgtcaggtaagtatatacatttccactttgcaatgtggttccatcgtgaattctgcctgagtacaaatggaatccctcagagcgggctcgaggaggccccgccccctgcccgcagcacctggaaggtgaccggcatgcagcggcctcagcttccggtagccgctcggccaatgggcaaggcgcgaccggcgctcctatttgaggcgctgactggcaggt

SEQ ID NO: 33026 - DNA, 422 bp, Mus musculus
  source 1..422: mol_type = other DNA
taataaactaaatggcctaattaattcattcctcaaataactatttcctggctatgaccgtagagcaattggtccagccctgtctgggtggcctgttccaccaagggtaaccaaccctgggctggcaagggcacgggtgctgattgaaaccacccctgtcccgccacccttagattgaagaggtgggcgccaaggcccgcgcatgcgtagtgcggcgccggccggccgcctcacttttcggctctgcgccggcgcactgagccttcacgaaggagccggttgctctggctgggcaggactgcgccgcggggcggagccaaacccggcttggctaggccgcgggatggcacttccgggcgtcctagcgcctggctcgacggcgcctgcgcgctgcgaggccggccggccgggacggggcgggg

SEQ ID NO: 33027 - DNA, 393 bp, Mus musculus
  source 1..393: mol_type = other DNA
aaggcctggattctactttttagaatgccaatcattagaaatattggcattttatgacaatagtcaaaggtttgtagactcattaaactgacttttggagagaggcccctcactaaaggggccagtagatcttccagagtcagggagctggctcgggcacccagggccgtggcacaagggccctcggcaagggtaagaccattgacttttcctttagactgactccacggggagcgcggcgtccccgcctctctctacccctgggtaagcctggggcgaatgcgcctctggtcagctccccccctgcgcttgcaaagcgacccccgtgagccccgggttcaaaggcccagcgcggcagttccagcccctcggaggggcggggaggcgaagctg

SEQ ID NO: 33028 - DNA, 391 bp, Mus musculus
  source 1..391: mol_type = other DNA
cactgcagtgctggtgctgtacctgtgtccatgtagaaacaggacttgctcccttactcaggttaaggggaaagcaagaattgtctgtggccccactgttagaccattagttggacgcctcacttttccccctaaatgtcaggacttgagacttgcaaccagcctgttttcttgagtgtctcaaggaggctgtctgagtctccgaactggcggccctttggatgagagaacagttctctcatggaacggcttgcctgaggcagactacctggttgcagttacttcggcggccacgagcatcgcccccagagaagccagatgctgggggccctgggagggtggggagggtctgtggggaccctacccgacccaggctggaagggagatgggc

SEQ ID NO: 33029 - DNA, 424 bp, Mus musculus
  source 1..424: mol_type = other DNA
taacacacctttcctgagacatgattggttgggtacttttaaagatggcttaaaagggccatggttgggccccatgggtggacacaactctagagctcagacattaagagccagagaagtcgtcttccagcctgacgttaagaagcaacatggcctgcatgcctgaacccgttgcactgagtatgaggcttagggctatttcccactgcctgatgtgtgtataattaaaacaaatccttattctgggaggcattattagagtccccccccccaacaaaccctagatttgaaaaacatatttttttttccacccaggcaccatctgtcaaaaacaaataaatgttatgtatgaagaagttcaatgcacattcatgaacttctaaattaaagaacattgcattcaataaataaatgcatatgtgtg

SEQ ID NO: 33030 - DNA, 374 bp, Mus musculus
  source 1..374: mol_type = other DNA
caaattcaggaataagaatttgcctccacacttctgaaattgatagcacatattatcatgcttggcaatatcattttgaaaatgattgtaaggcactgattctaaacacctgaaatgactttaagagttattgtattgtcgaaattaacctgttattttctgtccgtgcctgatggccacaaaggccaggaaagccaggaaggctaccatgtctttcatgtgttagctttccagcttgattctaggaggaaattgatctccaaatttgcaatgctactgatctgcaaatctctagatctggaaaacaatctgtgttcactcaagactcttgagccaaccagtcagaaaaggaggcagctcttcctggttccaag

SEQ ID NO: 33031 - DNA, 365 bp, Mus musculus
  source 1..365: mol_type = other DNA
ctacatatataatagacattgaagatggtagcttttggcagtagtgcataattttgaaaattaaggtatataatccactattggaaattttaattggactggttgaatggcatcctgtgagtcattctaataaatacattaactatataatagagattcattctatcagctctgttcatcaggagaatctttgatagcacaggaggcttgtctcagaaacacctggaaggcaccaaacaaatattgctttctaaaatctttcttaattgttaatattctgatggaagctccaaatttcccatgaacttcaaatctgcagatctggaaaaggtttggccaaaagaaaaggaggcggctcttagctt

SEQ ID NO: 33032 - DNA, 424 bp, Mus musculus
  source 1..424: mol_type = other DNA
ctacatatataaaggacattgaagatggtagctctatgtagtgcataattttgaaaatttaggtatataatgattggaaattttaaatgtactggttgaatggcatcctgtgagtcattctaatacatgcattaactatataatagagattcattctatcagctctgttcatcagaagaatctttgatagcacagcttgtctcagaaacacctagctgaacagcctgaaggcaccaaacaaatattgctttctaaaatctttcttaattgttaatattctgggcacatttccacatttgggacagattaatctgattatccaacatgagaggcacttgtgcaaatgaacttcaaatctgcagatctggaaaaggtttggccaaagctggactgccagtcagaagaggaggcggctcttccagtc

SEQ ID NO: 33033 - DNA, 384 bp, Mus musculus
  source 1..384: mol_type = other DNA
cctacatatataaaggacattgaagatggtagctctatatttttggcagtagtgcataattttgaaaattaaggtatataatttggaaattttaaatgtgactggttgaatggcatcctgtgagtcattctaataaatgcattaactatataatagagattcattctatcagctctgttcatcaggagaatctttgatagcacagcttgtctcagaaacaccagttgaacagcttgcagtgtagctgaaggcaccaaacaaatattgctttctaaaatctttcttaattgttaatattctggccatccaacctaatgaacttcaaatctgcagatctggaaaaggtttggccaaagctggaagtcagaagaggaggcggctctt

SEQ ID NO: 33034 - DNA, 390 bp, Mus musculus
  source 1..390: mol_type = other DNA
ctacatatataaaggacattgaagatggtagctctatatttttggcagtagtgcataattttgaaaattaaggtatataatttggaaattttaaatgtgactggttgaatggcatcctgtgagtcattctaataaatgcattaactatataatagagattcattctatcagctctgttcatcaggagaatctttgatagcacagcttgtctcagaaacaccagttgaacagcttgcagtgtagctgaaggcaccaaacaaatattgctttctaaaatctttcttaattgttaatattctggccatccaacctaatgaacttcaaatctgcagatctggaaaaggtttggccaaagctggaagtcagaagaggaggcggctcttccaggtc

SEQ ID NO: 33035 - DNA, 428 bp, Mus musculus
  source 1..428: mol_type = other DNA
tacatatataaaggacattgaagatggtagctctattttttggtagtagtgcataattttgaaaattaaggtatataattggaaattttaaatgtgactggttgaatggcatcctgtgagtcattctaataaatgcattaactatataatagagattcattctatcagctctgttcatcaggagaatctttgatagcacagcttgtctcagaaacaccacaaacaaatattgctttctaaaatctttcttaattgttaatattctgggcacatttccacatttgggacagatttaactccattgcaatctgatttattgactgtgagagccatccaacttgaatgcttgatgggaggacctaatgaacttcaaatctgcagatctgaaaaaggtttggccaaagctggaaccagtcagaagaggaggc

SEQ ID NO: 33036 - DNA, 355 bp, Mus musculus
  source 1..355: mol_type = other DNA
attaatatggctcccgtagactcataagtttgaatacatgtttcctagtttgccttttcaaattatgagtatttacagctaagacctgtactacaagatgtactttctagatgcatttatatcctacatttttataatttatggatgatcagtttttatttgaccatcttcagaaaaggatttaacttgatattcatagaaatgcattgcaaaatcttttgaagctaatctgattttccaacccggttcttgtgctaatgaacttcaaatctacagatctggaaaacttttggccaaaatggacctgccagtcagaagaggaggcggttcttccgtaactcagcagtcatgagag

SEQ ID NO: 33037 - DNA, 402 bp, Mus musculus
  source 1..402: mol_type = other DNA
cctacatatataaaggacattgaagatggtagctctatgtagtgcataattttgaaaatttaggtatataatgattggaaattttaaatgtactggttgaatggcatcctgtgagtcattctaatacatgcattaactatataatagagattcattctatcagctctgttcatcaggagaatctttgatagcacagcttgtctcagaaacaccccaaacaaatattgctttctaaaatctttcttaattgttaatattctgggcacatttccacatttgggacagattaatctgattcatccaacttgaatccagatgagaggcacttgtgcaaatgaacttcaaatctgcagatctggaaaaggtttgtccaactgccagtcagaagaggaggcggctctt

SEQ ID NO: 33038 - DNA, 424 bp, Mus musculus; identical to SEQ ID NO: 33032
  source 1..424: mol_type = other DNA

SEQ ID NO: 33039 - DNA, 348 bp, Mus musculus
  source 1..348: mol_type = other DNA
agacagatggtagttaaattaatatggctcccgtagactcataagtttgaatacatgtttcctagtttgccttttcaaattatgagtatttacagctaagacctgtactacaagatgtactgatgcatttatatcctacatttttataatttatggatgattttgaccatcttcagaaaaggatttaacttgatattcataggagtaaacagaaatgcattgcaaaatcttttgaagctaatctgattttccaacccggttcttgtgctaatgaacttcaaatctacagatctggaaaacttttggccaaaatggacctgccagtcagaagaggaggcggttcttccg

SEQ ID NO: 33040 - DNA, 359 bp, Mus musculus
  source 1..359: mol_type = other DNA
tgttgaaagcataatagtctctctttaggatatggtatggtagttaaattaatatggctcccgtagactcataagtttgaatacatgtttcctagtttgccttttcaaattatgagtatttacagctaagacctgtactacaagatgtactgatgcatttatatcctacatttttataatttatggatgattttgaccatcttcagaaaaggatttaacttgatattcataggagtaaacagaaatgcattgcaaaatcttttgaagctaatctgattttccaacccggttcttgtgctaatgaacttcaaatctacagatctggaaaacttttggccaaaatggacctgccagtcaga

SEQ ID NO: 33041 - DNA, 424 bp, Mus musculus
  source 1..424: mol_type = other DNA
cctacatatataaaggacattgaagatggtagctctattttttggtagtagtgcataattttgaaaattaaggtatataattggaaattttaaatgtgactggttgaatggcatcctgtgagtcattctaataaatgcattaactatataatagagattcattctatcagctctgttcatcaggagaatctttgatagcacagcttgtctcagaaacaccacaaacaaatattgctttctaaaatctttcttaattgttaatattctgggcacatttccacatttgggacagatttaactccattgcaatctgatttattgactgtgagagccatccaacttgaatgcttgatgggaggacctaatgaacttcaaatctgcagatctgaaaaaggtttggccaaagctggaaccagtcagaaga

SEQ ID NO: 33042 - DNA, 414 bp, Mus musculus
  source 1..414: mol_type = other DNA
cctacatatataaaggacattgaagatggtagctctaaacaactatttgttgttagtgcataattttgaaaatttaggtatataatgattggaaattttaaatgtactggttgaatggcatcctgtgagtcattctaatacatgcattaactatataatagagattcattctatcagctctgttcatcaggagaatctttgatagcacagcttgtctcagaaacacctagctgaacagcctgaaggcaccaaacaaatattgctttctaaaatctttcttaattgttaatattctgggcacatttccacatttgggacagattaatctgattatccaacctaatgaacttcaaatctgcagatctggaaaaggtttggccaaagctggagtcagaagaggaggcggctcttcca

SEQ ID NO: 33043 - DNA, 328 bp, Mus musculus
  source 1..328: mol_type = other DNA
gacagatggttgttaaattaatatggctcccgtagactcataagtttgaatacatgtttcctagtttgtgcatattgcaagctcccactttcgtggtacagctaagacctgtactacaagatgtactgatgcatttatatcctacatttttataatttatggatgagaccatcttcagaaaaggatgagtaggcaaacctatgtaaggcattgcaaaatcttttgaagctaatctgcaacggttcttgtgctaatgaacttcaaatctacagatctggaaaacttttggccaaactgccagtcagaagaggaggcggctcttccatca

SEQ ID NO: 33044 - DNA, 458 bp, Mus musculus
  source 1..458: mol_type = other DNA
tttattataagactgtactgcaaaaaacctttgtggcatactgtgtacactgtcaggtaaaactttcactgattgtattaattatgcatggatgtatataaaactagattcaatccttgggtgacatatttaagtgagcccacaaatattaaacaggtgacatagctatgtgtgtcacattttaacaatgccattccttctaccaagaagggcctgatctttttcaaatcagtacagtgatatattttacttatatagagtgaggacaattgttctgattaatgcactgagtcatagccattaggtagaaagtacttgcaatttacacaaaacaaaatcttgtgtcctaatgaccacctgtggacagtttggtaactccagtgtcagtgattgatgaagtatgcaagctatccagcttgattccaggaggaagaaggggaaatgcctcctcttttcaa

SEQ ID NO: 33045 - DNA, 375 bp, Mus musculus
  source 1..375: mol_type = other DNA
ctacatatataaaggacattgaagatggtagctctatatttttggcagtagtgcataattttgaaaattaaggtatataatttggaaattttaaatgtgactggttgaatggcatcctgtgagtcattctaataaatgcattaactatataatagagattcattctatcagttctgttcatcaggagaatctttgatagcacagttgtctcagaaacaccagcaaacaaatattgctttctaaaatctttcttaattgttaatattctgggcacatttccacatttgggacagattaatctgattatccaacctaatgaacttcaaatctgcagatctggaaaaggtttggccaaagctgctgccagtcagaaga

SEQ ID NO: 33046 - DNA, 415 bp, Mus musculus
  source 1..415: mol_type = other DNA
ctacatatataaaggacattgaagatggtagctctatttttggcagtagtgcataattttgaaaattaaggtaagttgagatgtcaagccaaccactattggaaattttaaaggttgaatggcatcctgtgagtcattctaataaatgcattaactatataatagagattcattctatcagctctgttcatcaggaaaatctttgatagcacagctaggcttgtctcagaaacaccaggtaaacagtgcttgcagtgtagctgagaaggcaccaaacaaatattgctttctaaaatctttcttaattgttaatattctgatctgattatccaacggaagctccaaattttgaacttcaaatctgcagatctggaaaaggtttggccaaattgacctgccagtcagaagaggaggc

SEQ ID NO: 33047 - DNA, 233 bp, Mus musculus
  source 1..233: mol_type = other DNA
catgcttggcaatattcattttgaacatgattgtaaggtactgattctaaacacctgaaatgattgtaagaattattgtattgtcccaattcttcagtgccttatacacacgaagacaaggaatccacttgtgggacaaattgtatttgcaagctattcagcttgattctaggaggaagaagaagtgcctctttctaaatttgcacagcagtgaagctcctgaggaggctctt

SEQ ID NO: 33048 - DNA, 321 bp, Mus musculus
  source 1..321: mol_type = other DNA
tgaaagcataatagtctctctttaggatatggacagatggttgttaaattaatatggctcccgtagactcataagtttgaatacatgtttcctagtttcccatatttacagctaagacctgtactacaagatgtactgatgcatttatatcctacatttttataatttatggatgagaccatcttcagaaaaggatgagtaggcaaacctatgtaaggcattgcaaaatcttttgaagctaatctgtccaacggttcttgtgctaatgaacttcaaatctacagatctggaaaacttttggccaaactgccagtcagaaga

SEQ ID NO: 33049 - DNA, 371 bp, Mus musculus
  source 1..371: mol_type = other DNA
cctacatatataaaggacattgaagatggtagctctatatttttggcagtagtgcataattttgaaaattaaggtatataatttggaaattttaaatgtgactggttgaatggcatcctgtgagtcattctaataaatgcattaactatataatagagattcattctatcagctctgttcatcaggagaatctttgatagcacagaggcttgtctcagaaacacctggaaggcaccaaacaaatattgctttctaaaatctttcttaattgttaatattctgatctgattatccaactgaacttcaaatctgcagatctggaaaaggtttggccaaagctggaagtcagaagaggaggcggctcttccatc

SEQ ID NO: 33050 - DNA, 350 bp, Mus musculus
  source 1..350: mol_type = other DNA
gacagatggttgttaaattaatatggctcccgtagactcataagtttgaatacatgtttcctaggtctgcctttgcaagctcccactttcgtggttacagctaagacctgtactacaagatgtactttccagaggcatttatatcctacatttttataatttatggatgaccatcttcagaaaaggatgagtaggcaaacctatgtaaggcattgcaaaatcttttgaagctaatctgtccaacgtgttactacccacattggggtgctaatgaacttcaaatctgcagatctggaaaacttttggccaaaagactctaacccctgccagtcagaagaggaggcggttct

SEQ ID NO: 33051 - DNA, 305 bp, Mus musculus
  source 1..305: mol_type = other DNA
aggaagccacatccttacaatgtgtgtgccagccagggtctgcaggggagaggagttgccagctcacctccaagctcctcctaggaaagggagaaaggcttccttaggcaagggggagggaacttccttgctgtaaaggtgaaactccctgacaggcacctatgcctatgggcgagcatagggaagtgtcataaccatgccgccaggatctgcctggagagtgccttcaagggaggcaccgccctcgcctcagggctcctccttacgtcatgctcctcccatggcatgatgggagaatcctacag

SEQ ID NO: 33052 - DNA, 126 bp, Mus musculus
  source 1..126: mol_type = other DNA
ggcagctttcagctctgccacacacacacacacacagagagagagagagagagcccaggaacaaaagttccccctggggaaccaataggttatgctctttcctgctcccaacatggaaggaagctt

SEQ ID NO: 33053 - DNA, 388 bp, Mus musculus
  source 1..388: mol_type = other DNA
tatataaaagacattgaagatggtagctctattttggcagtagtgcataattttgaaaattaaggtatataatttggaaattttaaatgtactggttgaatggcatccggtgagtcattctaataaatacattaactatataatagagattcattctatcagctctgttcatcaggagaatctttgatagcacagaggcttgtctcagaaacacctggaaggcaccaaacaaatattgctttctaaaatctttcttaattgttaatattctgttaactccattgtaatctgatttattgactgtgaaagccatctaactgaatcccatgaacttcaaatctgcagatctggaaaaggtttggccaaaagaaaaggaggcggctcttcc

SEQ ID NO: 33054 - DNA, 528 bp, Mus musculus
  source 1..528: mol_type = other DNA
aagccatcattaatcatccatacattagatctcatgccccctttatgtatttttaaacaaccattgcctttttagataaaaaataaagatactaataataaataccattttaaactttgatttggcaccacctatatcaatatttaactctcttcacgtgaagccatggagtttccactagatcataggatgcagcatcgtgcatgatggtgaaatttgtcaaaagacggggccaccatgttataaatttagggcaaggcgccacagcactcccctatggcctgggcatgaggattgcccacagtgactgcagtggaactggcacggcacagcgccccctgctggcaggcggttccccagcgcagcatcaccactctgggcggggtaggaaagcagctggagagccctacagactgctgacccatcgtggacagggcaggggtcatcggagtgggcaaccgccgacccttcccagaagcgctgcgtgtgcgcccacagcctaagcgcttcccactccgttggcgcccg

SEQ ID NO: 33055 - DNA, 463 bp, Mus musculus
  source 1..463: mol_type = other DNA
gcgtctgacccaggcgcagtgccatcctgttgacacatagtcgtgtgtgtgtgtgtggaagttcttcagaccagagggcagctgcacaatccatcatgggtccccagggaactggcttcctggccaatgggaagatgcttcccgcagaagcaacaaggtggccagagctggctggctggccgctcaccacagtcccagggccagctcgcgccaggccaaccttggctgggctctgtcccgccagcagacctgctccgcagcctgaacacacgtgacgaggttcccgggggcggcggctgcgctgcggcggaagggtgggggctggggtggtcgcgggccgcgcggttccgacagcgtggggctgcgcggggcagccgggcgaacgcggggcagccgggcgcgctggctggacgcaccggcgggcggcgtcacgaggggcggggcgcgccgggggcgcgccggg

SEQ ID NO: 33056 - DNA, 758 bp, Mus musculus
  source 1..758: mol_type = other DNA
ggtaccttcagcacctgcaggtccgcgccactgcctcatgcgcactgcgccagccagagaaggtgtagcgcaccgtcacctgcttctcgaaggccacgttgcgcacgcgcactgtgccgccccaggtccaggtgacacgttccaggcacacaagctggcgtgccaggcgttctccgaagcctggggcagcgtgaactccagatcctggctgctgcagcacagggacaacacgtgcagcggcacggactgacctgcgccagctccaggcccagcgcgtcagcgaagcgcacccggacctgccggttgcagccagctccgcacgcggcgcccggggctcccgcagccttggcacggcgctcgggggaggtgggcagcgagcgcggatgggccgcagccgagggtcgcagcccgggggtctgcagggtcgtcgatccatgtccgagaggcagctgaggctccggggcacgagtttccgggaccccggggtcgagggcagcggggcagaaccagagccttttgacatggcccagctgggcgggcgtcaccgccgagccactaggctttagggcttgacagcctctggaagccccgaggcaccgcacccaacacggagactgtgttcgcggcctggccctggtctcagcggcgggcagcctcgagcagcgggtggcgctatccaaggcggcttcccggggcgtagcgccctgcacggtgtacttcccggcgcgcccccggcgcgccccgcccctcgtgacgcc

SEQ ID NO: 33057 - DNA, 317 bp, Mus musculus
  source 1..317: mol_type = other DNA
tcttatcatctgaaattatttccatagtcaattttttccaattgtctcaataattctttttatatctgctttaatttttaatccaggaaaaaaatccagggtaattaaggatcagaaattctttgggtttaattaatttgcacagtccactggggtttaagaagtcaccaacctttgttcagtctcttgagcttgatcaccactctggagtgttgccctcagtaattaataagtaaccattgatgttctgaaaaaaaaaaaaaaagctttttcctgcctaactcgtatttatttgcacatgggaccactggagtctc

SEQ ID NO: 33058 - DNA, 519 bp, Mus musculus
  source 1..519: mol_type = other DNA
ccaagttaactatgaccttgtattgtattctggacacagattttctcagaagagccacttttctgtacattgcttagccaagggagggatggggaagccttcactcagcctgcccagggagctgacgtgcctgacagctctgcccatgggtaggaatcctcccaaaccttggaggatagccaggcccacactataaggggtcagccgagccagcccagctggagagtgacccctcccctctccctctcttccgatccctgagctgttcagagggctggaggccatcacaaaggcctgtgtccggagacttagatgacacagggatgaaggaagtgtccactcttcactgtgggctctcatcacggtgtgatcacgtcccacgggactgaggccgccctgccagcgagcaaccaggccaagcggctgagcgagtgggcgcgggagcggctcctttaaggcccgcgtcaggcccggccggaggggcggggcctcggcgaggccgccgctcagcttcacctg

SEQ ID NO: 33059 - DNA, 590 bp, Mus musculus
  source 1..590: mol_type = other DNA
cagtgtcaaattcctcattccatctgtgcagaccggctcttcagactggaatttgttttcggccttttcaaaaaaaaaaaaaaaaaaaaggaataagacggccttttggttgggtgtgcacggccctcgtactaaccgctgtaagtcaggggagctgacccgtcgtgtccgcggcgtcctctgcgcacctctccgccccgaaactgctcctctctgaccgccggggccccgggagcgcccgcgcagctgtcaccgcccgccctggccgcagccattttggaagggtgcagaccgaaccccgcagccggctgccgcgacccacccggcgcctagagccgccgctctcccggcccagcacccagcgcctagcctgctccccggcctctggcgctcgcagccattggccgcgtcttttaagagcccgccgcagccaatcggaggccacaggggcgcgggcgtgggcggtgcgtgtcggcgcgcctgcgcagtgggccgcccctcccccctccctgcgcgccgcgcccccgcccgccccgcgcaccgccccccgccccgctggaacctcctcctgcccaggcgcgctcggccga

SEQ ID NO: 33060 - DNA, 702 bp, Mus musculus
  source 1..702: mol_type = other DNA
actacagtaagaagtacgttttatggctcacatttaagagaaattgtttcacaaaacagtacttgtttatagtaactaatattgggctctaatctgatggtggagactaactgtaaattagcatgcgctcatacatacaaagttacccgctatgcatgatgcggagctttgggccgcagtctgaggacgcgcgcacgcgggcgggagtcacccaaaacagtcagggcttattttagggatatcaggcttgggagcgcagggctgccccgagctccccctgcacgggtcgcccccgccgtgagcgctgcagaactgagcagcacccgcctgccggttccttagccccggggagcaagcgggactgaagacgcacctggcccggcgctgtcggggtccagccagcggcacgcgcggagggaggagcctggcgctcttccaggtccagcccccgcccccgcctgccccgcgcacgcgcgcttcgccccgcccgctcagtctcaggccccgaagcggtgagcgaggcccgccgggaaccggctgggaagacccggagaggcaggtccccggccggcagcttccaaatgcgcaggcgcggccccgcccaccgcctgcggcgcggccatatttaaagggagccggcagcgaggagccaataggctgcgagcgtacgggggcggcgcgcggtggcgggaggccccggat

SEQ ID NO: 33061 - DNA, 914 bp, Mus musculus
  source 1..914: mol_type = other DNA
tgcccgggcggccgggctggcgcgacaggcgctgggggcgcgggcggcgggggcgcggcgggcgcgggcgcggcgggcggcgagggcgcggcgggcgcgggggccgcctggatgacagagccggcggcgggcggcggcgcgggcccgttgttgaccgggctgacagcaggtgcggcgtgcggcgcggtgggcggcgcggcgctcccattcaaagtttgcgcggcgccggggccgggcgggccaggcgggccgggcttggaggcgccggggccggcgggtggggcggcggcggcgggatccggccccgcgacggcggcggcggtggcggcggcagcggcagcggcggcggggcagggccccgcgctggcctcgggcagcggcctcagcttggcgggcgccggcgcgggccctgcggggacaagcaagcggcgcggtgagctggagcccgggcgccgcgggcccccacccgccggccgcgctctacctgcggggggcggctccggcgccgctgcgggcgcgccctcggcggaggcggccggccctgcgcccgcggctccggccgggctgccgctcacaacatggttcccgagcgcgccggcggccgcggcccgcagctcgggcgtgcgcggcgcgaggtggtggtggtgggccgcgctggccgccagctgcgactcgagcgagcccgttgaagaagacctcgtttcctcctcgccgccgccgccgccgccgctcggccgagcgcgcctgggcaggaggaggttccagcggggcggggggcggtgcgcggggcgggcgggggcgcggcgcgcagggaggggggaggggcggcccactgcgcaggcgcgccgacacgcaccgcccacgcccgcgcccctgtggcctccgattggctgcggcgggctcttaaaagacgc

SEQ ID NO: 33062 - DNA, 805 bp, Mus musculus
  source 1..805: mol_type = other DNA
cccgagcgggggcggggctgcgctagcctcaagtccgccgcgtgcagcaagctctggacagcggtgcgggctctgcacgccactttggatgcgttcctttgtgcagggcaccgcagtacctcacaagagcggccagctcgccgcagcggcgcgcctccaggctgcctgctccccaaaggcgcgcgaccgtcgctaccacggctgtcagcagagcgcgacaagcccccgccccggctggaggggccgcgggccctggcgtctcgctctgttgcgtctgctgcctggggcgctctgggagaagaacgcgcaacgcgctccggggtccccaccccctgcggccgccgggcccccgctgccagtgcctccagcaaagttggcgcaggctttcctgggggcgcggggagccgccgtcagggctccgtgcggcgggctgtgccccggctttgttcccctttgcctctcggccgcgccgacgcgaaggccacggacatggtggtggcgcggactcagcccgtcggctgcgccccgcggcccgaggtgcccattctccgcagagcgggggcggggacacggggggcgcggtgccgtgggctcgcccgcctgcctgtcgccaatgcgcgctcgagtcccccgcgcaggataccgcgcggaggccccctgcacccggcctgcgctcttcgtccagccggtagccggtacaccgccccctgtgctgagcttcggtggttccgcccgccctgccccgccccgccgtgccgcacgtccccctgacgccagacgccagcagcgtggcccgggagggcgg

SEQ ID NO: 33063 - DNA, 663 bp, Mus musculus
  source 1..663: mol_type = other DNA
taaatgccaggattatacaggcctgcacttccaagccctgtcattccagagttcttgtggtcaccaaaagctttggggttttagtttcaaggagataaaatacctgggaaatggaaccacgtgtgttccggaagatccggtgactcggagtccttttccaaacagtgctaaggactgccggcgtcggtggcgcatgcggaacgcccacctgggcctagctcgagtccccgccggcgccggctacagccagcctcccgccgcccgcgcgcacctgcggcctccgccgtccgcgccgcgcgcacagcaccaagatggccccggcccagccccggggatgcgctcgcctagatgctccgcagtgtcgcccggctctccgggaagcgcggcgcggtccccgcgacctggtgcccgccgccagcagatagcgcggcccccgcgcccaggtctgcgtgccccgcttcgcaccccgtcgctcaggccccgggccggctcaccgcggtggagcccaccgcctcctgcgcgtactccacttggaagaggtggccgtccgcggtcgtagctcatcactgcggacgcactagctcgggccgccgccgctcaaccgtcagcgccccgccctcccgggccacgctgctggcgtctggcgtcagggggacgtgcggc

SEQ ID NO: 33064 - DNA, 333 bp, Mus musculus
  source 1..333: mol_type = other DNA
tgattttggtgttaatatatttaatgattaatattgtttatttaatgttttattgattgaatgttaccactgaggactggggttcagatgtgctgaccactacgcgctgcggcagacttagcatatagcacagtgggagatgggagatgtccgcagaggcactgggcagacacaggcctggcccaaggaagactttctattttaaacacttcagactggaattaaaagcgtacaggatcactgtgtgtctcaggctgggcactttggagccacagagaccacgggattcggggggcggtgcctcgccttccggtttgctgctgcactgcgcgt

SEQ ID NO: 33065 - DNA, 699 bp, Mus musculus
  source 1..699: mol_type = other DNA
agtccttttccaaacagtgctaaggactgccggcgtcggtggcgcatgcggaacgcccacctgggcctagctcgagtccccgccggcgccggctacagccagcctcccgccgcccgcgcgcacctgcggcctccgccgtccgcgccgcgcgcacagcaccaagatggccccggcccagccccggggatgcgctcgcctagatgctccgcagtgtcgcccggctctccgggaagcgcggcgcggtccccgcgacctggtgcccgccgccagcagatagcgcggcccccgcgcccaggtctgcgtgccccgcttcgcaccccgtcgctcaggccccgggccggctcaccgcggtggagcccaccgcctcctgcgcgtactccacttggaagaggtggccgtccgcggtcgtagctcatcactgcggacgcactagctcgggccgccgccgctcaaccgtcagcgccccgccctcccgggccacgctgctggcgtctggcgtcagggggacgtgcggcacggcggggcggggcagggcgggcggaaccaccgaagctcagcacagggggcggtgtaccggctaccggctggacgaagagcgcaggccgggtgcagggggcctccgcgcggtatcctgcgcgggggactcgagcgcgcattggcgacaggcaggcgggcgagcccacggcaccgcgccccccg

SEQ ID NO: 33066 - DNA, 340 bp, Mus musculus
  source 1..340: mol_type = other DNA
tctaggagttcgaggcccgcctaggccacatgcgctactagggaggcattcttttaaagatgaggtaaagaagaacagtttcggagctgtcgggaggtttccctgcctgcagaaccagtctgggtgggaggtggcagctgtccctccagtcagtgggcagccttgctggcctggcacccagatgcctgtctggcttccggagtgatataattaagtaagtaatgacaatactccagtttctaaatgttttccacatgaagaacgaagtattagaattaagttagttaactgtgaatactgttaacactgaagaaatgaaaacattcctcaagaatgcttt

SEQ ID NO: 33067 - DNA, 343 bp, Mus musculus
  source 1..343: mol_type = other DNA
cagtatctgtgtcagagaaggggggccggcggctttcctcctccccctccctggcccgaaccaagctgctttgtgggtcgcccctccacccactgccgctgagtgggtgaatctgtctaactgcctagagctgcggggcagccaccagcttctaggtgcgacctcagacatgggcccgagtcgggctctccgccagccacggtgcgcaccggggcaggggttctagtcggccggcgggcacgcggcgctgtccgtggtgctgcccgcgccgggcggggcggaggcgggacggaggcgggagggcgccagccaatggcgggggctctgcgcggggcgcgggggg

SEQ ID NO: 33068 - DNA, 431 bp, Mus musculus
  source 1..431: mol_type = other DNA
gtaattactcaagtaactggtgtcaggtgcagctggccctggatgacctgggggacagacaagagacatctaacttgcttccctcaggtttgacactgagctgaacttgcaattcctgtgccctgcaaagtcctatgccccacattccaatgtgatgaggaggctggggactggctacagagaaaactgagtgttcagagaggtcagatagcttttctgaggcagagattccggccagggaggccactggaggggtaaactggccccggtgggtctagcccagcgccagcctgggatcgttcacgcccagccgattggctgggcgcgccgccactcccccgtgtggtccggagaacgtgatcggcatggttccgcccccggcgcggcctgcgggccgagcgttgattggccaggcggcggctgacggacgg

SEQ ID NO: 33069 - DNA, 496 bp, Mus musculus
  source 1..496: mol_type = other DNA
gaaaaactacttttcacctttgtttctgtggagcatgccagagaattcagcactgctcctacaggaaggtggtggcaccctctttcctataatgtatgtcaaattagcacaaagtgacatgaagctgacactttcctcgctctcgtgtcaagacaggctgtctccctgcggtgtgcggacatccgtcccacgagcacgttggtgtacggtccggtgcccatcactggtctcgacctctgcagcgccgccccgcgggggccctttctgcgagtcgtggaggccggggcgctgttcccagcgctgccgccaggggccaccgccgctcccctatggggccgctctggcccgcgcttccgccggaaacaggccgccggcgcggaggcgggccggatgcgatggacggtgaccagggccaatcgggacctggtcggggccggccgcgcggctgacggaactcaatccgcggcgagagcggcggcggggcgggccaagcacg

SEQ ID NO: 33070 - DNA, 380 bp, Mus musculus
  source 1..380: mol_type = other DNA
gcttgatgtctaagccgggcggcggtggccagcgcaggccagcctggtctacaaagtccaggacagccagggctatacagtacagatcttagcttcccaaggagcctatggagtggcacctataggccaatgagcatccttggatatgctcttgatcccctattgcagaggagtttaaaaccccaggtgcccggcatgctggaagttcccgcggcctggcgggcggccagcaggtgccccttccaggacgctggtctggccggggtcggaagggttaaggtccccaggccgcccccccccaaccccctctccagggcataaggctcgggcgccaggcgggcctgggcggggcctgacgtcctcggacaggcggggccagc

SEQ ID NO: 33071 - DNA, 305 bp, Mus musculus
  source 1..305: mol_type = other DNA
gccaggctggtctacactatacctccagggcaactgagatgtcagctgccctcagaccatagacgggtgtcttcagcagtcagtgagcagcccaatgaacattcgctgaagggtgccctgtacaccgagtcctggacgggagaacaggacacaggttccgtgccctcatttgcatgcaggcgcgccgcacggatatttgcatatgggcgcgccgcggccaatgggcgggagcgacggactatatttacatatgggcgcgccgcggccaatgcatgcaagcgcgccgcggccaatgggcagctgcg

SEQ ID NO: 33072 - DNA, 304 bp, Mus musculus
  source 1..304: mol_type = other DNA
gtgatcaccagtcagtgtgcacatggcagggaggttctccccaagaccatgtaactgggtgtgtgggcagtcttgtgtccgggctgctctttccctaggcgtgtggatcccaggctctggcggcgcctcaggtcggtggagtcagggatccagcagcggctgggctccctctgacaagctagcctcgtccaacctctccagcggaggacggaggggctggactcatgcctgtgctttgtgcggaaagagccaggctttctttgcagtatggtggatacgagtacccctcctgcccaatagtgct

SEQ ID NO: 33073 - DNA, 268 bp, Mus musculus
  source 1..268: mol_type = other DNA
cgagggagcctgcttgcttctgggcagagtcaggcaaggggtactgcagagccccagacccagttccagaggctttgtttgtttaatccacaaagtcaggactatgtcattctgcagactaagatgtagatagcacagcctgcctgtgctctgggctggccagtactcctgtccagagctctcccagagatggccagaccagtctggcggctttagtcagtccctgcctccttgcagctcccggctgggagaatcggaaacctgtcag

SEQ ID NO: 33074 - DNA, 368 bp, Mus musculus
  source 1..368: mol_type = other DNA
tatctgtctgcagcacccgggggggccagcaactgagctaggtgctctatcatcagtctcttgctgaaagagactcttgccaagttcctcagcctgtgaaagccgcgggacttggagtctaacagtcttcaattgtggccttaggactctactcagattcccacgtaggttcttgtgtccctagattcagaagggaggctcctccaccccctgtttgttcgggctcagccgagggtacgcgggcgagctgtggtgccggacagcagagcctgttcgggtcacgtggccccgcggctggagccccggcgctgaccctgagcggaggcacggcgggggcggggcagcccaagttcccgggattccctaca

SEQ ID NO: 33075 - DNA, 353 bp, Mus musculus
  source 1..353: mol_type = other DNA
acttctgatcctggcagggctgggagtttgtgagcatccaggggcgctgctttcttgcaaaaagctgcagagaaactccaggcgccccggggctttcctagctggtgggcagctgaagcagccagctgagagggactcaccagggagccctgggcgcccctcgggctgggctggtgaccgcggcagccgtggcggcgggcgcagggtcgcggctccccgggagatgctgcagcagcggcagcagcggtagccacctcctcccggagccaatcgcaaatgcaggggtgggggcgggccggagctcccattgcgtccgcacttggtggggcctcctgcagcagcgcagacttagc

SEQ ID NO: 33076 - DNA, 314 bp, Mus musculus
  source 1..314: mol_type = other DNA
gttcctacgaccatcttacatggttatgctcctcattggtctctcaggccagactgccatgaattcaagatcactatctttcttcttcacttcaaagaaagaggcactgagaccttctctcggggactctctgccaggggagccatcgcctgtccaggtaagccctcagggagctgggctgttcaagtccccaggaaaagccctcactgtccttggtggtgacaaggtgggacttcccggttttgcatgtgtgagagagactgagacacagcaaaagggggccagcttgtggagggccattatatgcccatatg

SEQ ID NO: 33077 - DNA, 253 bp, Mus musculus
  source 1..253: mol_type = other DNA
agaccatgtccctgtgcgccagttttctgaagggaacgtggaccttctgtgacataaaccagtccatactggaatgggcccttcagtgactgtggtatatatgtatatagcacatagagtgtctgaatgtacatgtgacccctcacacacaccctgaagacctccaaagcccttgggtttgcatgggttctcagaaccatcttcttcctggagtctggtaaaatggaaccaaatcagctgttggatggatttg

SEQ ID NO: 33078 - DNA, 447 bp, Mus musculus
  source 1..447: mol_type = other DNA
atgtattttcaattaaatgtaatacaccccttggctaaattcagaccatttccatttccttcagtgatgtgttggaatcataaaattaaaaaaaaaaagaaaaataaaaaataaaaaaggttgtttgcttgattttctgatgtagcccaggctggcctagaatcacactcgtatggctaattatcttagttttacagatgcgtcaatttgaagctcaggtcaagagtacccggaactggaacagcgccccgttgcactgaactcactggttgacctgagcagagagtggctggagctgtaccccacgcctgaggggatcgctactcgcgcccgctcggccccgccccggcgcgccctcgcctctggccccggcccgcccgagcctcgctgccattggtggcggtggtgaggccactacccccatccctgcgggagcggcttgggcga

SEQ ID NO: 33079 - DNA, 415 bp, Mus musculus
  source 1..415: mol_type = other DNA
ctagagggcccccctgggtgcttctggcaccccacaggcacccagaaggtcactaagggagaactagcccaggtggtccccgggagcgtgggtggggaggggacagtggctgtggcgtctctgactctccaacacccaccctcctccactgctgggcgcgccgcgcagccgccagctcagtggaagcgcgaggagcccggcaggctccggcgcagcaggagggagggtgagcacgctgggcagccgtgcgtgcgctcctctctgcgccacaggctcgcccaacgaagcacaagccagcagggtcgcggtcctgaggacatcgctgccacccagggtgccctggaggtcggtagcagccccgatctaggcaggctcggagccaggggggcggcacgtctcgagccccagagctccc

SEQ ID NO: 33080 - DNA, 246 bp, Mus musculus
  source 1..246: mol_type = other DNA
aaatccttctatcaggtttgaaggaacctctcagctcccaacaggtgtgaattcactctgctgaccttgatgctcagctacttcctggagagaaagaatgaagtcatccttctctcctctgagtacgggaagctccctgaagaaggacgcactccaaattgaaggagtatcctacctggtagcagagaataaccaggatattatcaatgacatgtcccacagctgcatcgtggcattgtgggaact

SEQ ID NO: 33081 - DNA, 365 bp, Mus musculus
  source 1..365: mol_type = other DNA
cagccaggtccatgcagggacggcaatccctgagccttccttccctcctgccctgggactctccaggatccagggagaagatggcagcaagcctggaagctctggccagggcccctgccaaagaggctttgttccccgggtccctgactggggcagggtcccctgagaaaagctttcctgcaaggacagacgcagctctgtgtcgccctagagggcccccctgggtgcttctggcaccccacaggcacccagaaggtcactaagggagaactagcccaggtggtccccgggagcgtgggtggggaggggacagtggctgtggcgtctctgactctccaacacccaccctcctccactgctgggcg

SEQ ID NO: 33082 - DNA, 560 bp, Mus musculus
  source 1..560: mol_type = other DNA
gacctggatttctgtcttctgatgccaaggaagcacttaattctgggactgtcgtgcactccctacaaaatgtgattgttgggctttaaatttttaaattatttatggttgtgtgtgcaagtgtgcatataccatggaatacatatagaggttagaatacaacttttttttttttttttactctgtagctatcttcagacacaccatgtgagccaagcagtcagtgctcttaacattgctcctctcctgccagctctaggatccaggggtggaagatgggccatctcactagcccatggggtttaaactatttttcttaaacagttttagtgagatgtaatttacatattgtacaatttatctctggcaaggagagacagctgagttcttttccaaattacctaaccagcctgcctctctctcccgagagctagaattacagcttctccggacagagccgtaggaggagtcgctgctgcaccggaagccagtcttcgctgcgcctgcgcggacgcgggcacgcggcgttctccagcccggcgagtgcgcgccctccacac

SEQ ID NO: 33083 - DNA, 259 bp, Mus musculus
  source 1..259: mol_type = other DNA
aaggctacctagccacatgagcccaggaaacagacggctggcaggaagaggttcctagcatccctctctggatagtctgcagagaggcaggaatcccggtgcacgcgcctccagggttgtccttctgggcggggggcggggggcactgccttctccaggacaccgcttcccgcctagctccgagcgtagcagcccctgctgggggactccgcgcaagggcggaaactgagcggtgggcgggacctggcgccgccccgcc

SEQ ID NO: 33084 - DNA, 275 bp, Mus musculus
  source 1..275: mol_type = other DNA
ggccagcctggtctacaaagtgagttccaggacagccagggctgtacagagtgtcaagagaaaacctaaactgattttggtcatgttttaccacagcaaaactgcagaggcatggctagctcctggcaagtgggcaggcctgggcgtggccacgcggggcgtggcctgtccatgttgcgcaggcgcactgctcctgaggtgctcagcggtttccctcccccaacggcgcgcccgcggtggccggcgcgtcgtctgcggaggccgcgaccccgcct

SEQ ID NO: 33085 - DNA, 292 bp, Mus musculus
  source 1..292: mol_type = other DNA
aagcagccttctactgtactgctcaagacttggaggcctcctgtgtgcttacataaataattaactgccctcagagcaaagtccctgtagggctggcgcccctccccgctctgcacacgccctgccgagagcaatccggtgctggtttgttccgaagcaccagtccctgcagacacataactgtcaagcgtgcccggccaaccaggctggcgctccggggaacccgggtggcgcatgcgtgcaagaagggcggcacagccgctctagcctcgccgtagctcccgcgcggcct

SEQ ID NO: 33086 - DNA, 352 bp, Mus musculus
  source 1..352: mol_type = other DNA
ttaccatgtcctggaaggagctagctagggagttagatgagctagttaagcacttgcagcatccacctgggtgtttataacctgggcaccaggcatgcacatcgtgcacatatatgcaggcaaacattcatacctgggtcacagggtgccgcgtaagagaccagaacctggttctaagctctagagtatacagaagccttgccatggtaggctttgggaagggagatctacccaccgcgcgttccagcccacgcggcgccccgccggctcaggtgggcccggctgaatgacgcgggtggggcggggcagggcggggcacacggcctcgcgccgcccccagcccctctccccg

SEQ ID NO: 33087 - DNA, 586 bp, Mus musculus
  source 1..586: mol_type = other DNA
cgggttgatgccgctccattagatcagtgttggaaaaatgttccccaagaaggtcccacagtcgccggggatgcagcctaagccccgaggatcgggtcccggcagcacccggactaacagcgcggcctccagtcctcccgctccggggcccggccgtggagggcagaactgaccgccccgatccccgctcttgccttgggcttcggataccctgggcagggcagcctgtcgggcacagacccccgacctctgacctccgcgcctcggtccaccccggagccccgcggagacgctcggcacggccgtcagggcccgctgcggccatcttaccgtgcggatcccgcctcccgtgcgacagtgtctgggtggcggctccgcggccgctcccggggccggggaggggcggcagaggaggcggcggcggcggcgggggcgggggcggggcgcggagcggaggtagctacaccggcgtcggcccctcagacacctctcgcgagatcgtaagatttcgagatgcgaacgaatcgaccgcccgggcggtcgccggaaaccagcgcagaaccggcagggctctggctctggcgcg

SEQ ID NO: 33088 - DNA, 386 bp, Mus musculus
  source 1..386: mol_type = other DNA
caaggcattgaataggggtcccttctccggcggcagaaatcccctccgccgaagttcagtgtgagcgcccagaagtagggagtaccctcggcggaggggtccccactgtgagcacttctgaagcatggatccgctctgcttcgatgattgccttagaagagatcgctctaggcagggccgttctgacctgatcaggggaatgccctcctgactctcgcgccagagccagagccctgccggttctgcgctggtttccggcgaccgcccgggcggtcgattcgttcgcatctcgaaatcttacgatctcgcgagaggtgtctgaggggccgacgccggtgtagctacctccgctccgcgccccgcccccgcccccgccgccgccgccg

SEQ ID NO: 33089 - DNA, 284 bp, Mus musculus
  source 1..284: mol_type = other DNA
ggttctaatattttagtacaagtgtgtatgaccataaactgagatccaactagagcctagtctgtggtcagtgctcagaacaagttctccaagagatccattttaaaaaattgactgccttaaagttatctttacatatcactcccctccacccacccacggagcgggggagggggtagaaccaagaaagttatttctggcgggtctcgggccacaaaacccccagggatttctcttccccagcccctggccctgcctcccgggacatcagtggggcggggact

SEQ ID NO: 33090 - DNA, 306 bp, Mus musculus
  source 1..306: mol_type = other DNA
atgtttggggctaaatatgaagggccagcctgcagcctgcagctcctcatgttctttagaacctcagagagtttgagtctccaataaggcagagactttggcttcctgctcctgagtgtgtaacgggaatccttcacctcagaagtcgagggaaacgtgaggagaacccagctgggagctcccgctcagcgcgcagctcctgcggaccgcggctcccatcttcaggcccgtgggtccgcatagagggtggagcggggctgggaagatgccggcagcaggtcccctctgattggacggcgtgaagtc

SEQ ID NO: 33091 - DNA, 390 bp, Mus musculus
  source 1..390: mol_type = other DNA
ctcctctgcaggaggcttgtcattcctccagaaaggggagggttgatcccaccctggctgtgaggaaaggagccttcaggctgccacagggcccacagtccccctctacatgcgtggcctggggatggagctgggctgggtgcaaggactctaggcccagctagtctcagatctaacatgggtggtcaaggcttgaaagccttcacacaggaatgtcacaggccttctcctgagggcagcttgtctcctgatgcagctggagttatgagtgactcccacccaacaagatctggccttgctcctcctagtcctttgtagaggtgggggggggcgggacccccaccatgactgagtgggggggcacgaacagggccctgggccctccacatg

SEQ ID NO: 33092 - DNA, 688 bp, Mus musculus
  source 1..688: mol_type = other DNA
cggtgccggagccgagcgcggatacgagcggaggcagcggcggcggcggcgagcgcggggacggtcgcacccggtctaggcaaggagagtgggagtcagactcccgcagtgccgacctcgcggacgccgggctcccacccggccctcaggaacacccggggccgtagcgtgcgggtcctgcgggcgccgacagcgcaggctgtgctgcggagcggaggcggcaaccgagaagcagcaggcggcggcggctcgcgcccggacgggtaactgcgctggcggcccgtgccggggcgagccggtctctcagggagcagcttctcgccagccagaggagaggcttgcgccgccggggtggagagggctctgcacccgtcagaagactgcagcaggccggagcacgcgcgctcaccccggccggctcctgcaccctcgccgcggctccgaggggtccctactgcaggaacgccccgagggatttgcccgggcccttctctacctcggggaggggaagggcggaccagggcagcactgccagcttagcgcggagccccgccccgcccgcccgccccgcggcgaagaagctggagccgcagcccggccccgacccggtccagccgctcgccgcccgccgcagccctgagggcccctctgcgtgttccggaccttgatttaatgtctatacaattaa

SEQ ID NO: 33093 - DNA, 394 bp, Mus musculus
  source 1..394: mol_type = other DNA
ggtctgaaattttcaaagaattaataaaaatattatatatatatatatatataagctcccaatattaaaagcttcacaagctgcagcagagctggccccttgactcacctggggctggttaaacattccatgtgacagtgcaaatggaaatgtggccagggcacaccctacccttgatttgcctctagactgtccagacagatggtggactgaccctgactcagggctgagccaagcagggacctctcctcagtgctggggagatgaggtcatccctgtcctggacagctgtctgggtctatctccacccagaactagatggaggggtcccaagcttggtccctcccctttgttatgtgcctgccagcaggccccatgacacgctgcaaagagt

SEQ ID NO: 33094 - DNA, 361 bp, Mus musculus
  source 1..361: mol_type = other DNA
agagaatctaggttcaattctcaacacataagattaaaattaataaatctttttaaaattacattcaaaagatttgttttattttatgtgatgcatcacgtgcattcaatgccagaaaaggaactagccccaggtcctgctctaaacctcaaataaaactttttttaggaacccaaagggggccgtgaatcagagaatctaaggggcaggctaggaggccagcccagcagccgccgccccaggagccccacgtgactctcgagtcgccccgccccatccggtccggtcccgcccctccagcgcgagactgagtcccgacggtgcgcaggcgcaatggtggcgactcgacggcgctcccggc

SEQ ID NO: 33095 - DNA, 285 bp, Mus musculus
  source 1..285: mol_type = other DNA
tgctgctagcacaagattcctgccccagggacggatatgagggagaagtacttactgcacaaagagctccggaccaggtcggggcttctagaagatgaggcgtcttaaagactttcacactgaaaacacctcttttcatggggtacctctgaaccggacagactcattgacagatcaagtctgtcctgtggccactattcagccctgcagaagggtcccgaccgtttgaagcccctaagggctgcaaggactaggggcagcgcagctgttatctacccgaggcaa

SEQ ID NO: 33096 - DNA, 451 bp, Mus musculus
  source 1..451: mol_type = other DNA
cataagagcctttctcacaaaactaaattaggctatgatgtgaaagtctatctcaaataacaatatcaggctgtggttaagtgacttaaggcttacacaaagctctaaaagggatccactgtccctgtatggatctgaatttgataaaatgtttgatttgacctcaataaaacattgacttttggccaatttgaaagtcaaacgtcacatcttttgacggaagccagctagctccagggcagccagggcttgatttgaccagaactgcttgcccaagtctattttaaaagccacgggaagtcccttgttcccgggcttggtcgagaccgtggacgccctagactggagatagcgcagcccggatccatctgcgctgccctgccgcactgcccacgcagaggcactcgggctcgcgcacagaggcggaagtaccgcctcggaggcctcccat

SEQ ID NO: 33097 - DNA, 117 bp, Mus musculus
  source 1..117: mol_type = other DNA
ttttctaggagcaggcctattccttccaagcctgcatgggtcaggcaaactctctcccaccaaagattctatcagtctcaagtcaggcttcactccccgaggccacgggctgccagg

SEQ ID NO: 33098 - DNA, 276 bp, Mus musculus
  source 1..276: mol_type = other DNA
tggccagtagctcgctgcccacagagctacaaagatggaccttggtccctagctggccctgcgaaggtctggatgcccaacagggcgccctcctcgcgcgcacagtccctgaatgcgcacccgcagtcttcacgctgccggcagggttagggcggagtccccagcccctcccggcatgtcgggagcctcaggagcccaaggggcagagcacggcctctcggggcccggtcccctcctcccctctcgccggcggctggaggctgcaggtccgggcgg

SEQ ID NO: 33099 - DNA, 468 bp, Mus musculus
  source 1..468: mol_type = other DNA
taatcacttatttagttattttaaaaatactattttgagatttgtttattactgggaaccaaacccaggtcttttcaaagaacagtcagtgctcttatataaaacttacagttcttttacagagacttgaatgtaaagccagcccgtgcaaggagtgggcagcacttccctccccccacccggtgggcacacccagaggaagtgctgggcttgacaatggccaggatccttccaaaggtgtccacttgccgactccaggtcaactctggtgctttgccctctcagcggtgacggcagggctggactccccctcaaggattaccggggagcaggaagggttgtcctgtgaggcagtacacctggaccagctctccctgcctgccactacaatggcgtcgtaggggttaaggcgggcggggcggggcggcgggaggagccctcgcggaagccggccaggcaccgaggcgc

SEQ ID NO: 33100 - DNA, 307 bp, Mus musculus
  source 1..307: mol_type = other DNA
ttgggatatcctaatctttctagaaatctcaagggctccctaccttagctaagaccatctgagaacgggctttgtaaattccctacacctaagggaataggtagaaaaaacctcgccagcaatggatgcccacatcaaggcttgcagggatcttgacctggccggcccgcgtccgtgggtgcgcggcccctgcgtccacgcatctagccgctcggcgctcccccctccggtaccgcattgccgtactgcaggggcgcagtgcattgcgccggcaccgtcaagccccctcctggagagataaaaccgc

SEQ ID NO: 33101 - DNA, 300 bp, Mus musculus
  source 1..300: mol_type = other DNA
tgggatcctactagcctcagcctagtcggttaggagaagcatgctgcacgaagctggctcatgtccaagggaagggtgggcagggcatgctggccagccctaacttgagaagctactagagactgtctctgttagagctctctggttgggaatgatgcaggaccgcttgggggctccaggcaccatccagtgaacctcttctatccgggttcgagtccgaaccaggcaggaaaaaagcagcagagctggtttcgagcccgctgtgaagcgggaggggctttgacgcgcgccccgcctccc

SEQ ID NO: 33102 - DNA, 311 bp, Mus musculus
  source 1..311: mol_type = other DNA
aattgggcacccatctccagggtcccctaacaggcgctctcagtaggaggtgctgggccctgacctgggccttctatgtctagatctactctacaccagggtagaaggaataaggctgtcacctttgcttcctacttgcaaccacaaagacttgggatatcctaatctttctagaaatctcaagggctccctaccttagctaagaccatctgagaacgggctttgtaaattccctacacctaagggaataggtagaaaaaacctcgccagcaatggatgcccacatcaaggcttgcagggatcttgacctg

SEQ ID NO: 33103 - DNA, 260 bp, Mus musculus
  source 1..260: mol_type = other DNA
aagctactagagactgtctctgttagagctctctggttgggaatgatgcaggaccgcttgggggctccaggcaccatccagtgaacctcttctatccgggttcgagtccgaaccaggcaggaaaaaagcagcagagctggtttcgagcccgctgtgaagcgggaggggctttgacgcgcgccccgcctccctaagtacgcgcgtgcgcatagcgcgcgttgggctccgcggcctagcgccctggcgtcttcttggggcca

SEQ ID NO: 33104 - DNA, 233 bp, Mus musculus
  source 1..233: mol_type = other DNA
cagatgcttctctgaagcatctgtagatggaaggaataggaatcatacctgtttgatatgtttgaagtataaacagtacatgaagggtctgtacatacattatggcaggcagcttgcttcattgcacagaataagctggactggtaaagagccaccatttaaaaagtcagtgtttcacagaaatactagttgcacgtgcccagctagcccggcaaagcaggtccctgcaacct

SEQ ID NO: 33105 - DNA, 434 bp, Mus musculus
  source 1..434: mol_type = other DNA
actagcctagatgagcacaggagggctgggagctctagctataattcaagttggtagcaaacttgagttacaaccaggtaagcagctttcaggtggctgagaccctgagacccttgctaggagtaaccccaagctagctcataaagactgggtgttaaattccaaagcccagtttggagtatgagactgcaactccagtttctggaggcctgggaaaaccagaccccaggacttggaatgtcaaacaggtggcggcttcttgagtcccagcagccagctctgtgttgcatagaatcccattgcaagccaagctgctgacccagccaccgcaggctcctggactattccactagcccgtggcgcccttacacctgggccggatgtgcacagcgtcacaagggccagtggttcccatggcaacaagtaggcctttg

SEQ ID NO: 33106 - DNA, 336 bp, Mus musculus
  source 1..336: mol_type = other DNA
catccttatatttttggatagttaagaaattatatattttcaaattcccgtatttagatcctcgactcctggactctgctgttggagtcattaatgttaacagagaggacattcctcgaaggaatgtgaaatatgtacattattatacaaacttgccttatgacactcctggagcaggacccttccaagggtaggaaccatgtcactctgtccccacgggccaaagtctagtgccttttaggaacaggtcctgccccccaaggaccctagcctttggctatagcacccagagtaaatttcccaaggctctgtcagagttctgagtcgccccagggg

SEQ ID NO: 33107 - DNA, 377 bp, Mus musculus
  source 1..377: mol_type = other DNA
aagtatgatctcacatgcacaagtatgggcattgctcctattagtagtggagagccagccactgaaatgtcaatttctttctaatacctatgtcagctagtgctaggtgctagatggattttatatactccagctgtgaaaagatgccttttgtgacttgaggtcagtaaccacaagaaagctttagatttgtttagttgtgcggacaatgtaagtggcctggccaaatgaactatgagtgtccgggcgtgcacgcctttcatcccagcacttgggtcctcccccagcccccagccccctggcgtccagaggcgagggaacctgctgactcagaagtcgcggaacccggtttccgcccgggtgcaaagtagcggacc

SEQ ID NO: 33108 - DNA, 236 bp, Mus musculus
  source 1..236: mol_type = other DNA
gaaataaattcttcgtactggaatgaaagatatgtttattccagcatatgcatgtatacacgagtctgacactatggctccatcttataaactctttctccatcagatagagaatgtgagagctggtctagaacctgactcactcactctctggacagagttaccccgtgtctgcaaacgtgaatcccttcctttcagtacttaacaggatccatggctgcggcagatgaaatata

SEQ ID NO: 33109 - DNA, 480 bp, Mus musculus
  source 1..480: mol_type = other DNA
taaacaagtctcattttgacaggacctgatgttacctttgaaccacacaagaactgcttgtctttggctttcaactgtaaggaacttaataaatgttggttaccttaaatacgcgaagaaattcttcgggcacccaaggccctccatgagacttttatggctccaagatacttaagacacttaactttttgtcttatcaaacccagggccttgtgcttgccaggcaagcgctctacacttaacttttaaatttcatttaaaactttaaataatgggcttaatctcagaactcggggctctttgagttccaagtgtagtttgcgcaatgccttcaattttaaaaaaaagaaacacgattcgctcggttccctagtgcgcgctgggcgccaaataagtctccaggcccgcccggcccgtgcgtgcgcggcctcggtgttgcgtcactaggaagcgcgcgcccgagccgccgccgccgccgcc

SEQ ID NO: 33110 - DNA, 287 bp, Mus musculus
  source 1..287: mol_type = other DNA
ccagtgtctagctagaggcgcctccctgggtagttccaagacggcggcctgtcagtagagaacagatcatgattgtattcctggctgtcctggaactcgctctgcagaccatgctggtctcgaactcagagatccatctggaactaaggctggattaagagcatcaaaggttggagacattccatgaaaatgtgcttgtttttacatagccctggctgtcctggaactccctggacatgcttaggctctaagcaccttttgatagggaaataacagattttctgacc

SEQ ID NO: 33111 - DNA, 555 bp, Mus musculus
  source 1..555: mol_type = other DNA
aactagttgtggcgacaggccacagcaccactttccctccaggaagaacggacagggcaagcgctgtagtaggtcctcctcctcctcctccagtgcagaggaggtggatcccggctgcacctcgctcccaggggccgtctccgagtcattgcagggggcgccgggcgcttccactactgtagacagcagcttgctctttctgaccgacaacaggctggcctcggtgagctcaatcagctcctttagatcgccctgcagctgacgcaggtccgcctgctcagaagcgtctaggccagcaccgagcgccagctctacctgctgcagctgggcccggtaggtctgcaggccccgctagggagcctgaggagggccgcggttccgccgagggggacctgcacgtcacccgccccgtcctctgcggcccgcaaccccacctccggccggcgctcgcaggctagaagggcttccgccctcgccagccaagctcacgcgctagccttctgccctccgccgggcacttccgccggagagccgaagctgccggaagtacctgcg

SEQ ID NO: 33112 - DNA, 475 bp, Mus musculus
  source 1..475: mol_type = other DNA
agccatgcacgcctctgcctgtggcttgatcttcaggaggctggtgactactaacctgtagaccgtcttcccagcattgtccaggcccaggatcaggatgcagtattcatccttctggaacatgtacttgtacaatcccgaaagcagcgtgtacatcctgttctggcaccctgaccatcgctgaccacgtcataatgcaccatcatcggagtcctgaaaagcccgtggcggcctgctctgctccgccttgctcctgaggagggtcggcttcggcttcccgccgccgccgggcccacggagcctgggaaccagcagctgaagccacttccgtccagctgaggcccacccgtacctgctcagatcttggaggaggagccgccgccgccgccgccgccgccgccgcgttcctaacgggcggaatcgcatcccagcggcccccgcgcgcaggtacttccggcagcttcggctctccggc

SEQ ID NO: 33113 - DNA, 270 bp, Mus musculus
  source 1..270: mol_type = other DNA
tgcaggagaagctggagggagcccagcggcagctgggtcagctgcgtgctcaggaggctgacctcggccctgcctgtattgtggatagagccctgggacccagctccaaactgccttggcagaaagacagctgtcaagcctagagtgtgaacactgctgagtagaggtgggacatcagggctgattttgaactccttaggacattaaagtgatttcatcacaatgacacagggatctgtctgcctcccaagagaaaaacattctcccttt

SEQ ID NO: 33114 - DNA, 805 bp, Mus musculus
  source 1..805: mol_type = other DNA
gggaatgcccgctccaggttctgctcctcagcggatcgaagacactggaggcaagaaggacctgcgggcctcactgcaccactgggggcggggtgatgccatcactggctaggagctgcgggccaagacagggtggcgagcaccacttatctgagccctcctagttggtcaaatatgagtccctcttgcagacatcgccacgtggcccgcttcccaacgctcgcctctctgcgagagcgccggaggcgggggaccagccctttctgggcaccgcgcccctagagcgcgttttctccgctcagcgcgcccgaaagtcgctaagtttgggagacgccgcgacggttccgcggggctcgggcacagtcgtgacccagtctcgtgcgtccccagggacagtgcaccgcggggtgcgcccctgctggtgaacttgcccagcccacctctcccatggggtctctggttgtgagactctcgtggggcgcgagcgtcgacccacggaccccattccttgccactcgcaagcccatgggagggggttctccagcccgcacttccgctgtccagccccgcgggaggggggcggtgggccgccggtgctccggcggccactcggccccggccagcccgctgcgcccagccggcggagcggggggcggggccggcaggcgggggcgggggcgggactggggcggtggccgaggccagggcgcagtgcggaccaatcagcggcggccgggcgcgcgccgggggcggggtcagggtccgcgggcggggcgcgtgggggccgcggggctggagcagcgcg

SEQ ID NO: 33115 - DNA, 268 bp, Mus musculus
  source 1..268: mol_type = other DNA
tacttacatataataaataaataaatcaaaaaaaaaaaaagaacctcaaagctctggagtgatctttggaaatttacaggtccctgaggtgttcagtgctgtgtgaactcttccagtaccagaatacacccagcagcccccaaacagctggcctactagtgtgggaatccagctggagacagcgacctgcagcttttagtgcacaaacgttgtggaaccagactagaagcattgctatcaaattgaaaggcggcgcgtcgctgattac

SEQ ID NO: 33116 - DNA, 511 bp, Mus musculus
  source 1..511: mol_type = other DNA
gcggcgagcccggccctgggcaccactaggccctgctcgaccttgcgcacggcggggcggcgcggagacgaggctttccgggccaactccggttcgcacgcgcggccgcctccgcggctcccggaacgcagaaggacgcagaaattgccttatagttgtaaatttcaaaggcatttgatgtataaaaaaacccctagtttatatacctaggattagggactcattcgagatgatttctccgaattcattaagtgcatcttcggaaaaataatgcaaaaggtagctttaatttgttttgatcattcatccatggtttgtctgtttaaacatcaaaacgctacttaataacacaaagaattatattgtcccatatattgtcgaaagacaaaactctaatcgtaggataattttgttcattttgacattaaaagccaggactttccgcagtttctaacttaatatgtgttacgaatctgttacctgtatcagtatcacaatttaagtgctcaac

SEQ ID NO: 33117 - DNA, 423 bp, Mus musculus
  source 1..423: mol_type = other DNA
atacctacttaacatacagactgaataggctgtatttatatatttaggagctatatcataattataatccaatcactaggtttattacttagtaagtgaacgtcttttctgggtggccttgaagttttttggtaagtagtaataaattttttgcagttttactcgcggagtgccacttgcctgccttccagaggcgaacccgcaagcctaggccttgcctctgctcccgggctgtagcttccggcttagtagctgcaggccggtgatcgtcaactggaccgagttctaccggagctccggagctttcgtgcggcgctgccacattggctccgactatgggcgggtctaggcgcttgcgcagccagctctgacctgccagaacacacgtctttttccgggggcgcgcgtgccagtgagtgagcg

SEQ ID NO: 33118 - DNA, 287 bp, Mus musculus
  source 1..287: mol_type = other DNA
tacagtaaacaaatggatctgtgaagcttatccactgggctaccctttttccccagggaatgcttttggggggaaactactccaatgtagaagcaggggctgttttctctcacagtagcagcttctctgggagaattttacatgggaagagtgcccagttgctgcttcaccctgactgggctatcaggctgtgcacccatttctcacaaaaggtgccccttgatgggaaagttgcgaaagagctcccaggagcacctggcagcttgtttgttttcagatatccatgg

SEQ ID NO: 33119 - DNA, 357 bp, Mus musculus
  source 1..357: mol_type = other DNA
cagcaccctgagatcctgatgccagttctatcagttagagtatcactacctcttagattacagctctaaagacagcttgggagttctagccacctgaactggtcttccatgggtggaaccactcctatgggcagcccagctgagagctaggggggttggacccctacttgcgcacagcagctaggaggccctgggagccctactgcagtcagggctatgcccagatatatagtactgactctggcctgcaaggccagttgctgtgagtgtacttcagtgttagctgcttgcacgaaccactagtacctctccccaaattttctggaagaaacactgcccacagcatggaaagggaag

SEQ ID NO: 33120 - DNA, 319 bp, Mus musculus
  source 1..319: mol_type = other DNA
gctgtcaaaagctgctggtggcagggctcatcggtcttctacctctggctcagcgcttgccctgcccttcatgcagaaccagggtgcactttatgttcctgcacaggcagatgatggtgcctcaaacccaggtcccttgccctggagacctggtttcccaggtcacccacacaagtgcatttctggctatcacttgtaaccatagatatacatgcatatatattctatctacaaagtgttttattccggatatgtattaaagtcactgtatcaaataaatgtttattgatttttttttgcagcgtgcctgcctcccggt

SEQ ID NO: 33121 - DNA, 558 bp, Mus musculus
  source 1..558: mol_type = other DNA
ccaggctcggggccagagaaataaggcctatcggtcttcggccccctgacagcctacagatgtcctataacccttcacaaccacaccggttgcttaatccgtcaggcaggatttgaagcgactcttgcccaaggcacgcgtgaccgatcgctcggccctggaggccaggaccacctgggccacggaccgcactgcccggagcggcggaacggccccaccggccccttccccgcagcggcggccgcgtgaataccgccccccctcccccccgcagtaaaactgtcaaaggtaggaggggcgggagcgcgcatgtgcgcagcacggcgcggagtgtgcgccgcccggaccccgcgccccgcgccccgcgccccggcccggctctggctccggcctggcccggccgcaccccttgggcgctgcaggtaagcgccggccctgcccgctttaccgcggccccggcgccacacgcgccccgcaccagccctgtgcccagcccgcctccccgccgcgcccggacccgcgccgcgccccgctccccgcgtcggcgccgtccccccc

SEQ ID NO: 33122 - DNA, 393 bp, Mus musculus
  source 1..393: mol_type = other DNA
ctctcagaatgcatggcgatatgtggcttgatgtgggaatgaagcacctagcctcacagagacttgaagagtgtgtgtgtgtgtgtgtgtgtgtgtgtcccagggggggcccacctgcccagataactaaaaaaaaattaaataatctcaaatatatatatatatatatatatatatatatatatatatggaacgagttagtggaaatagaaatatgagaatttctcattcgggtttacctcttctggacaccaggtatgtatgtagtgcacaggtatacacggccctggtgcgcaaggacgcctttcgctctggcggacatcctaagcatacgcagccccgcgcgccgcgcacctccgagctcccggagcgcgccttgcgcccagggctggg

SEQ ID NO: 33123 - DNA, 341 bp, Mus musculus
  source 1..341: mol_type = other DNA
gagtccaggctgcacaacttgcagtttttcctgtcgggagaggcagactgtctcaacgggctgagactgctttatttacacacagagtagctaccaggccaggggtggcatactgcttctgcaggtaacatcgccgaggctctgcacacagaaaatatctgtgcaaagtagagtggtgtgagtccactcaagccactaagcttgtcacacactgttgagtgaccgtcggtgccgcatacggttcagtacagtaggaacgctcctgaacaggatgcgttcctggcgcgataccgaataccgtcacgcgcacgcgcgtcgacttccgcccgaagctctaggtg

SEQ ID NO: 33124 - DNA, 282 bp, Mus musculus
  source 1..282: mol_type = other DNA
gggctatcctgacatgacagggaaggcctctatgaagttacacttggcagtgcaaagggggcccagaccttttaaaactcttttccttgtctggcccggggaagggaaacagagagagaaaagacacatcgtttcttcagctgagctcagcatctgggagggtacttttggggtgccagcgcggctctgaaaccgcgctggggaggcctcagctggatcctgccgggaagggagccaccgcggaggggggcagccccgccccggtccgccagctctgctgcg

SEQ ID NO: 33125 - DNA, 304 bp, Mus musculus
  source 1..304: mol_type = other DNA
ccttcaagaagttccatgcctttttcttatggtaaagatgtcataactgattaaaacggttgggtacaaaaaaattcagattgactttccctttttcctgaggtaatgcctcagtagcggattgcctcagtagcctctgtcattgtcacttcacaggttgggagactgaggggtttctctgctccctccccctggcattcggtgggcacgtggggccgtggtccggcggagatacctgcggaactatccagcgggcaatcaggccgcaggccgcaggccgcgcagtcgtctgggagttgtggtc

SEQ ID NO: 33126 - DNA, 208 bp, Mus musculus
  source 1..208: mol_type = other DNA
gcacccagcgtacagaccccatgtccagtcggctgactgatctcagaaatttccgaagcattcaaaactgcctccaaggtgcttttgaatcagttttgaggcagctgttccccgagtactctgggtagcatctctacccagctccctagaggaagggagtaatcaaaatatctgataccctccataccccagtccccttgggaggggc

SEQ ID NO: 33127 - DNA, 480 bp, Mus musculus
  source 1..480: mol_type = other DNA
gggcagtaccacaggccagtccttcccacaggcctcttctggcgagccaagtagcacacagggctcagctctgatgccacgctaccgcgggacgacacgccagccgcgggtggggcacaggagccgccgcggggcggggcactgcgggcgagcaagcgctggggctcgaggaagtcccggcccctctctttggggaagtaccgcggaggcgcctgcgcactgcgccccctccccggcgaccagcaggacttcggagcgcgcgggcggcgtgactcggggacgcggcggtgagtgctgcgccggaccgtggacgggccctggcgatataccggctctgttcccggcagtgaccggtccacgtggatctaggtcgcagtaggaccagacccaccccttgcgcgtgggggagggagagcgctcagagcgttgagatcaaaggtgggggccggaagaacccaggtttccgcgtctcctgcccgc

SEQ ID NO: 33128 - DNA, 211 bp, Mus musculus
  source 1..211: mol_type = other DNA
aaagtggtgacttaagggcagtaccacaggccagtccttcccacaggcctcttctggcgagccaagtagcacacagggctcagctctgatgccacgctaccgcgggacgacacgccagccgcgggtggggcacaggagccgccgcggggcggggcactgcgggcgagcaagcgctggggctcgaggaagtcccggcccctctctttgggga

SEQ ID NO: 33129 - DNA, 510 bp, Mus musculus
  source 1..510: mol_type = other DNA
taaggcagcctagctagaagaatatatccccttttaggatagccccactccagttgtttgggactcacacaaaaaccaagctgcacatctgctacatatgtgctacttattacagagatgtcagtctctgtggtctttgtgagtgagagtcttttggcagactccaacaatgcacagagttcaaggccagcttggtctacagatagatttccaggatagccaaagctacacagagaaaccctgtttctaaataaataaataaataaataaatattaaactactgtagttattttttttaaatcactaaattgagtgcactgtagattatagaactctaaggcctgccatccaagtttagagacagggtttagcaaaacttaggtagcaagatttaagtctcattttggtatgggccttagccacaaaggtattttgtaggagctatgcccagaaagctagccagtgaatctgagactcagagtcacctgcaccttaatgcttgcattggg

SEQ ID NO: 33130 - DNA, 281 bp, Mus musculus
  source 1..281: mol_type = other DNA
caaagaaagaggagcttagtatctctgtgttttctaagatctaattctgggagttttcagagacatgatgctttcatttttagtgtacattaggtataaatagcacataatagattcagggcagtatttggtccttagtccagacaatctcttgcttacttgcaagaaagcctttccttgtggtactctgctttactggacagttctgggcaggaaagctggcaaatatggctggatatctttgagttccaggacagccaaggctacacagagaaatccct

SEQ ID NO: 33131 - DNA, 301 bp, Mus musculus
  source 1..301: mol_type = other DNA
ctctgagtgaagactcatatgtgtagtaggttgccattatctctctgtgactaataggcacccagacattcataaaaagccatagatttctgtcctgaacatgctcgctctgcatatgcctcttacagagctctgaacagttcagctgggagagaagagcttagggctctcaccaagggttgtagagtcccaccagactgcaggcttgatctagtgtgacaactatagtatagggaggggctactcctcctgctttggcctgcaggcggggcccattgtttgggcctgaggcccacccagg

SEQ ID NO: 33132 - DNA, 364 bp, Mus musculus
  source 1..364: mol_type = other DNA
acgaacccggggttctcctgaggttgttcctgtgttcagctctgtaaactgagagaaacttttgtttgttttgggagaactttagtatcaaaacattaaaacaaaaagaagtgtgtcattgaaaaacatcttttctaccttaggtatcatttctgaaaaaaaaaaatataacacttttagttcatttgagaaataaattctgcaatccattttttatgatgggaggttgtattcctaaccaccaataattttgtgtgttttacatttgataaaacccaatcatgctgtatattgattatagatatatttaggcagaatgttatactgtaaatttatttcacctcagagagtaaacagatatatt

SEQ ID NO: 33133 - DNA, 393 bp, Mus musculus
  source 1..393: mol_type = other DNA
ttatttttacacgtggatgtctaattattccagcatcttttgttgaaaagaccagcactcctccattgaattgttgtatagctctaacctaacttgattactgtaattttaatagtaagtcatgaaatcagatgttaaaaaatagtagaatcatttcaactgcaggttgagtgactttcttacagctattgactcaggcgtccaatgtaccctccatatagaggttgaaaggtagccctaaagatcacttagactttggtctaccctggaccaggtagcctggcaggcaggagagtgagtggacataagcaggcaaaatgcccttctcccgtcgcttctcatatattaggtggaaagttgccctcctccaaccgcacatgctcagttcaggtg

SEQ ID NO: 33134 - DNA, 288 bp, Mus musculus
  source 1..288: mol_type = other DNA
ccactggcttggtggtgacaccgcccccaatgggctgcccccagagacttatttactggtcaatttatggtgagatatttagtttgtgtatagttaaagcaaacagaaaacaacacacacatacatgtgcatgttgcagggagctgctggtagtgtttccggatgagaatattgcggagcagcatgatcctcctgtaacacgtcctgtgcacacgcgcagagcgtgcaggcagcatgggagtgtgcgaggctgcccgccgcagtgcctactgggaacgtctggatccc

SEQ ID NO: 33135 - DNA, 351 bp, Mus musculus
  source 1..351: mol_type = other DNA
gtggtatcgttttttggttgattcatatgtaaaaagatacttactgatctgcaagaggaataaaagccttcttccttccaaagtgcaatttaaagaagtggtcctctggtctctagaggtgcatctgcagtgacttagatttccatcatatgatcataggcttcatttcttagcctgaataaatatgcgcagctaaattcaacctggcctggttcacctagccagagagagggagcgacccgctcaagctggaggcttcaagccaggatggctgtgaacggccactgaggtccactggccagtcagattgcgcccgggaggaggctgcctcgccgctttcagtttttcagt

SEQ ID NO: 33136 - DNA, 427 bp, Mus musculus
  source 1..427: mol_type = other DNA
gaaaaaggagctaattataaccaccttttaaatggagctaatttgactgaatggatgcaaatgtgctttacttatggatgaagaaacaagcctttctgcatgatcacatttttatttccagagaaggtatttatatgtaaacaagttgcatgcagcatgttatgatgtatattttattaattttagacttttaaatatgtcaattctggattatatggcaataaatcactctttaattataaaagaatgataaatttttgacaattgaaggattggttttataatgggaaaatataatcagtaagagaagaatattatatttcctctgtatatgcagtgacaatgcattgtgcctgtacaaagaccttgtaagaataatgaatcctcatttgcatagacatttgtattcagatttgccaggctataa

SEQ ID NO: 33137 - DNA, 176 bp, Mus musculus
  source 1..176: mol_type = other DNA
aagaagtctgagcttgctccgtcagttttgtcatggaagcgatcgatgcccataaaggcagcggcagcctcagcctctccctgactatactacatatgaggtctaaccactccacgtgtataggatgatccttgattaaacatggaacagagtctgagtcagtgtcaatacacttg

SEQ ID NO: 33138 - DNA, 443 bp, Mus musculus
  source 1..443: mol_type = other DNA
aaatgaacagtctagaaagatgaaagcttttcttccataagtccttttaaaccattacattcaacttatgcgattctgataaaatattcaagaatattacataaaatctaggctgtaccctgaagtttactttgggttttctctagcgtaaatgcaagtgcccagagagaaatctctcctttgaaagaacattgcatatttgctcaggccttagtatttagcttacttctgaggagaaaagctcttttgttttttttttttttaatctagaactctaaaaaggcatttcttaggaatgagttgcaggggcgcatggggtgcgagccccggaggtccccatcctccggctccagccgcaacgctaggagccctggaagtcgcgaggctcccaggctgctttgagtcctggctgcgcgcattcccagagtgcatatcgggaatag

SEQ ID NO: 33139 - DNA, 197 bp, Mus musculus
  source 1..197: mol_type = other DNA
cttcagctgcaccaagcatgccttctgacctgatatgatcagttaggctaccaggggctggattccttttgctcttttctatcagaaaaaataaaataaaatttttctataattgtataaaagttcctcagtgatggccaagttccggaatgttatgaggctccagaggagccttccgctgtgtctccacagttcaa

SEQ ID NO: 33140 - DNA, 442 bp, Mus musculus
  source 1..442: mol_type = other DNA
gtttttttgtttgttttgtttttttaaaaacacacattatttaaaaaacaaaaaacaaagaatcagaattgtactgagtgcatgattctgagaacagacaattgtattcactacctccacgagcctggggatcggtaggctctacctgatcctcccatcgggtggcctgcagcctctgccccagtggctgcccgatggggacctagtgtgctgccgacccaaggtcagtccccggccctcaggtgcgcaggcgccgggtcgccagccggcggcacttgtccagcggccgtcagcggcgtccttgggcccagagcctgcccgcagagcccagacctccctctgggccgggacagcaaagcctcttcacgcccggccctgaccccgcgctgaccgctcggtgacgcttctgccaatcagaggcagctttgccttccgggtcttc

SEQ ID NO: 33141 - DNA, 493 bp, Mus musculus
  source 1..493: mol_type = other DNA
atgtaaatgagttaaatacctaaaaaaaaaagaatatttgagaaacgtatttctctgtataattagcatgtgtgaatagtttatataaaatttgataaaatgccattgctactataacatttctcattgcacatggagtaatataatattatttgaaaccaaatttagattaattttatgtgtattagctgaaatagttttggagaaatatggatttatgtaaaatactcaattaaacatacacggttgaaaaggtatatttgacagcaattgtggtgaatatattgcgcactattccaacttctattaattattacctaatatgtcagtaacttaattgtactataaaaccaggtatatatttaacatcgattgattgatttctataagtgttttccttctttgttaaaatggaaagaaaatcatttctcaaatattctctttttcactaagtgataggtgaaaggcaaaaaaccgcaggttactaaaccag

SEQ ID NO: 33142 - DNA, 400 bp, Mus musculus
  source 1..400: mol_type = other DNA
ttgcttctatcctgatttcaggatgaccccagcatgctggatcaataaacctcttgttttttgagaggcttgtgtgcatccatgcttagtttgtcaccaagggaaattctgagaaatcccttgggagttacaggtatctgcagatggatgcgcatctgtccatggaagaaccccattctatcacaatagcaagaataactgtttttactctgtgttaaaaatcaaatgactcatgttatgagggttcttaaaaaggagtatatgactgtttatttcaatagacaatcatccctctccactccggggagcagcgtctttcgggtgcagctggcagacagagcggcgagtctccccccgcggttcgcaccgagtgcgctgctccggcgggcgatgacttcat

SEQ ID NO: 33143 - DNA, 354 bp, Mus musculus
  source 1..354: mol_type = other DNA
tgtttaaacaaaatcagagagttactgacatatttaagtgtatacagaattaagacaacttttgaattaaactaaatatattgataacttagtaatcagaatcagtaaacaatatgattggtttattcttgctaagtaaaattttcgaagagttttagtaagggtaaaaagcaaaacccagaaagcagaactgcagtcctaactttttatagttagaaaactgtttcagaagttaaggcccccttatcttgttacaagagctcagagggacctgttaaaaagacattcagggtggttggaaaggcgcagccccgcccttagtactcgcccccacccgcgcggaccaataggagg

SEQ ID NO: 33144 - DNA, 656 bp, Mus musculus
  source 1..656: mol_type = other DNA
ttgtatactagaaaatgtaactagttgaaaaatttacctctcagtattgtgtgtgtgcatgcaagaacaaaagaatgggggtggaaagcattttcttatgcttttacagtccacattgtaaaaaaagaaaaaaacaactttacaaatacctgaaaaggctattaaagttctcttcactgttgtaaacctaaaagaaaaatcgttatgaggacaggttttcctcacatgacatttataaaagccagagttacgaatgtaaaactatacaaaatttctgtcatcatttcctttttcttttaaaaacatatttcctttacaaaacaagtgtttatgtaaatatatattaggtttattggtatatttcagagaattaataaatacttatatttggccagttctttcattttttcacatggtaaatgttagcagatttgtttcacataaatgaaagctcattgacaccaatgtgtactgagtactgaacacactgggaattgcacaggatttcattattttaacatttgagaatttttgtcactgaatttgagagtggaacaaggtaattttttctgtttctgacatttagacttcatttttaaaattggattgttcactctacttcagtcaccatttggctcatgactcaaagtcactat

SEQ ID NO: 33145 - DNA, 414 bp, Mus musculus
  source 1..414: mol_type = other DNA
atttcatctcagtgtgtatacttcttgaacaaaaatggaaagttcttttataaaaccaatctcatggcccatgggtatgaagtagataattttgttttttaattaatttatttttattccttactctcactgaggccagaccaggcagtcctctgctctatatgtgttggggacagacaactttataatatgtagaaatatttactttttcccttgaatagctaataccctagaaaaattgttttggagaattgttctttaaactgctagtgacctgtatatatatatatatatatatatatatgtatcatgaaatggctataaaattgaattatttgttgaaatagacgtcctcaaggtctcaaccctatgtgcaagtaaggttatacagactggcaggttgactttatgtat

SEQ ID NO: 33146 - DNA, 359 bp, Mus musculus
  source 1..359: mol_type = other DNA
agaaaaaaaaaaagccacttactttaactcccgtgagtttaatattttcatattttctttactaagaaaataaggcatgtccgatatggatgtatctcaatgggaaaagcctagctgtacagtgagctcctgcaggggcaccttggcaatgtttttaccaatacaatggtttgcaaaagagccttaggctagatcctgcacctccatattgaggaagtatttacttatttaaaactaatgcaagcctattagatttgatagaatttgtactcatgggtacttaaagttctgcctcccttaagtagcaaatatatgggttcccagcaaacaagtccggaaactcccagacttactgcggg

SEQ ID NO: 33147 - DNA, 352 bp, Mus musculus
  source 1..352: mol_type = other DNA
agagtccacaggccagtgcctctgcctcttttcactgttaacagacagaatctgagcacacccaccaccctagggcgagattccaagcagactctttgaagccagcctgcaggtccatgtgtatctttcaactgcagataagaatactagatatatgagagatatggtcctgatctcagatctctcaagcagtgtttctcctgattataagaaacaacactaaatcaggtgaaaatcacaatggtgattagctatgtcaggagataactgtgggagatagttactatgcagaacttctatgtgcccccaactaatacgagttttggtggactcacaagaattatttgttctt

SEQ ID NO: 33148 - DNA, 527 bp, Mus musculus
  source 1..527: mol_type = other DNA
ttttgcctgtgccatagcaaattcaggtattaccttcagtcttagaaaagactttgaatcaacttagacttttgagatgaactaaatgcattttatactgtgagatgattgtcaaatattatgctttaatagggaattattgaatcacaccttcaatatatctgtgaaggtatttttaatatatctgtgaaggtattttcaaggacgattaattatgcgggaatgattcaccctgaatatgggcagtatcctgccatgaaaagaaagaatataaattgagtgctgacattactcattttttgctttttgagcaaagtggtactgctacactgcccccctaacataatggattagataaactgaactgtgggcaaagtaaaccctttgttacattttttccattcagatatttgaccacatcaatgaaaaaaacaaaaagcaattgatttgaagggatacaattgacagccttttatttttttgtctcttgagatagaatcttgtcataaaccattctgacctcagag

SEQ ID NO: 33149 - DNA, 358 bp, Mus musculus
  source 1..358: mol_type = other DNA
tgcacatgctcagaaaatataggaattgagaaagaatggacatttgctaaatgttttttgagagtgaatgagtgaataccttgttttagtgagaaaaattctcctctatgctaaagggaggaaaagcacagccagacatgggttggtttgggaattccatcatatattagggataacacaagctttaaacagatttttccaaaactcagcacactggggtgggttctcaggcccctgagtgtgccaatctatgcaatgacacatgtttgaagcacagcccagtccttagctccaaggaggagcaccactccacttggactgtactattggcatttcaaactgcattctggtaaccctg

SEQ ID NO: 33150 - DNA, 826 bp, Mus musculus
  source 1..826: mol_type = other DNA
atgcatttcgtcccaaagctgagaagccttgcaggattagctttagaggctcctagaacccaaaaagcagcatcccttgagtctctcaggctctgctcccagagctggtggccaccatccaaaggagcggcgccccaggcgactgttcctgtaggacccgccaactacgcccgcctccagccgcggggcaccggcagcagtgcagagaacgggacgcgggcggtggcttccggggcccgccggcgcccggactccgattacaggttcacaccaggagcccggcaggcgcgccctcgtgcagcccggctcccccgcctgcagccgcccagagcagccgcccagagcagccgccgccgccgccgccaccgtcgccgccgccgtcgccgtccgtccggattggctggcggccggggcgccggcactttcccacggcccgcggcgcgtgcggctcaccggcggcgctgcaggcgcggccctggcacacggccaggccaatccgggcgcgcggggtggggctgggcggggcggtggctatcgccgggctggtgtcccgggccggccccccatttctgcccgccgccggcccaccgccgcccgcggcccccagccgaactcctgcggagccgacgcactgccgccgggcaggggcgggctccgggggcggggagcagccagcctcggcctccgctcgtcccgcccccatgcggctgccaatctgcgcagcgaggcgccaattggccggggcacgcggttacccgggagccgtggccccgcccctgcccccttccccgccctccccctatccatgggaaggggcgcagcgtgg

SEQ ID NO: 33151 - DNA, 423 bp, Mus musculus
  source 1..423: mol_type = other DNA
aagttatccacaaaactatgcatcaggaagacttacactaagagtcaaagacataaaagaggttctgtcctggccctggtagtgacagtacttgtaaaggagggtcaccctcaacatttatgtacaaatagtaatctgtaggttaacattacattgattagactagtggtccacttaaaaggcaaacacttttgcaactaggttcgattctgaagcttaattcacaggaaagctaatgtgactggcaacagaagtgcctggagtttacaaaactggagggtgaacactaagaattatttcaaatctaaacatccctcaggaggcatgcgctctctggcgtccgcgggaggcaactaccggactagtaggctcgcctgggattaaggcggtaggcggggctctcctcggcccgccccctgacct

SEQ ID NO: 33152 - DNA, 508 bp, Mus musculus
  source 1..508: mol_type = other DNA
ggtttctgagtaatgtgattatggcatgagcaaagttttaccaaaagaaacaagttctttgtagagcggccagctgtgggagtttcagcccccccaccccccaccccggaagcggtgggagctgcctgcaccttccagctacttcctatcattcttccaaagagtcagtttaaaattgtttgacagttattcagattctgctttagaaaaaaaaaaaaggatgatgggtctagctttatttttgtattaatcctgtataacagatggcattttcggggagattactgacagataatctgaccggtctaaaaaagttgtattttaaacaatattcctgctccagagtggggggcctcctttgtgtacagagggaaggccactccctcgtgactagggccctcctaaggcgtgggagccggagccacgccggggccggagctgggcggggctttaagcccggttcctctgggccggagctgggcggggctttaagcccggttcctctggg

SEQ ID NO: 33153 - DNA, 393 bp, Mus musculus
  source 1..393: mol_type = other DNA
catactggtctcagatgtaccatctttgcacatgctaggcgaaattcaagttcttttttatattacagatattaggtattttcttcatttacatttcaaaccctgtactggggcatatgaggtttgcaagatatataaccacttctacacataaacatcacttcaagaggagtaagagtttattctgagccaaatatgattagccatgactcaaaaacacggattccagaatcctgggaggaaactttcccgccacccgtagctgcttgtgcagcgccagtgcaaagcgccgccgcccgagccgacgtggcggagcgcacaggtcgcggtcaggtggtcggtgacgcccgggaccggctcccgggagggcggcgccgacgcccggggtgggga

SEQ ID NO: 33154 - DNA, 563 bp, Mus musculus
  source 1..563: mol_type = other DNA
aaagtaaactaatataacttagggaggttcatttctttaatcccttcgcggccgcacgcggcgcccgcagcagctgactcctccctaacgctatgacatactgtaatactcacaaggtggttgtagaagttaaagggcggtgcattttctgcgaaacgatcgtcgcccggggccagaggtgctgcccggcgtacgagcccaaggaggtgtcctcgcgagggaggcaccgcctggtcgaacattcagcacggccacccacccctcccccggcagatgacagggccgggcgcgctcccaccgcacttactcctggagtcccaggtgaagtcgtggcgagagccggggaccgtgcgcacgggcgcgccgcggcgagccggcccctgacacccgccagctgtttgtcctggccgagccggccccgccccgagaccccagcccgtgccccgcccgcttttcccgtggccgcacccccgcccgcgggcccgagcggccggcccctttcccggtccccgggcgcccccggcccagcccagcccggcccagcccgccccctcccccggccg

SEQ ID NO: 33155 - DNA, 404 bp, Mus musculus
  source 1..404: mol_type = other DNA
gacatctgtcacctcactgatcgcagctggctggctaggcaggggtctagcccttcccttcagcataagtctgctcttcaagggtatacgaatagtgtctgtgaaacatattatcatttctattgatatgggagggcctagcgcactgtgggtggtgccatccctgagagcaagtcagtaatgagtactcctttgtcaggcagccagagtccctggttagtcagggttttatattgcacatagaaatcctatggaaaaattgtattttttacattaaactctttggttttgagaaatccttttggtttcccaaagattcatgcgattcagtcaaactctctttgaatttcctgctgcaggaaggcagtgccttatgctgggcactcgtgtgtcagcaaaagctg

SEQ ID NO: 33156 - DNA, 394 bp, Mus musculus
  source 1..394: mol_type = other DNA
taaaacacaccactatttttggatgtgattacttaaaattaatgaacattactcaattgttgatgaataaggcctagccaaaacctatagaaggttactccctccgaaagcagcagtcattcataacatggcaaactggccttctgctagcttacattttctctagactgggacagtgccagtagaccacaggtaaggacctcaccatgactgaggactcaggctgggaactgaccccaaacctggggttggcacacctggtcgaactccacttgagcaccagtggtcgccatctgagaagggagacatgggcccaggggcaagggtggcctcagtgtcccagccaactgctgggaagccggcagaggaaaaaaatccagtccgggttttgtct

SEQ ID NO: 33157 - DNA, 331 bp, Mus musculus
  source 1..331: mol_type = other DNA
gttgcttgtttaataagttaaaattcaaggccaaccagtggatacgccttggaaattccaagttaaaagcattttcacctgcacacgccagtagctgctctggggtctctgtccagccctggaatagggaatagggattccccatcctccaatgtgcgtaggcaagtgttgtattaccatacaaccaaaccttgaaggttaagcaaccatctgggttaaacttgacctaggcagttccccatagactgcttcttaagggaactgcagctggcagccaggcaccgcccccgtgacgtgccgcagcatcgcgaactgcgcactgagtcccgcg

SEQ ID NO: 33158 - DNA, 395 bp, Mus musculus
  source 1..395: mol_type = other DNA
cccacacactcagattctgtgactggcgatggcatcttatcaaagtgataattttttttttatagtcagtatattctaggcaatttactaataagttttgatccctgagtgacagttacctgaggccccagcagtttattaattcagtaatcagccattcaattcccctcccaggtacttatcagtgggaccacggcgcgcaggctgtcctcagatggggggtgatccctgggcccacgggactgtgccgcagcgccagacgagtcgcagcttgcaggagctgcgggaaacgtgacgtcccagtccggcgcagccaggccagggtggcaccttcgcacaagtccgggcgtggcgaggggcggtaccaggctgaggcgcgcctcctattggctgcc

SEQ ID NO: 33159 - DNA, 334 bp, Mus musculus
  source 1..334: mol_type = other DNA
gccctcaaagtgtgggctccccttgtcatagtatatgaacaacacaaactgggtttgtttctcctttccttcttcttgagggagggggtggtattatatgaaattcccaaataatcaataaaaattaatgcaaaacaagaactcttaatcgtgctgagtcagaattaaaagtcagtaagatacctacacacatgcaaacgtgtgcgtgtgcacacacatccacactcacacactcatataatatatagaagggcttaagcatgcctatcataccaaaaatatcttaaaggttcaaacaatactttcagttgtttttgtggttttggaaacacaa

SEQ ID NO: 33160 - DNA, 127 bp, Mus musculus
  source 1..127: mol_type = other DNA
ttactttgtaaacacaaaaggtgagttttctttttttgagacaggatgtaataagacattttaaattacatttgtccctcggcaaataagatttatcaggtgactcctggatagatttttaaaagaa

SEQ ID NO: 33161 - DNA, 529 bp, Mus musculus
  source 1..529: mol_type = other DNA
tctttaggtctgcatgaaattaaaacttacaatatatttcaaaaatgaaatgagggacatattttgcattgggacccatttttgaagggtctgtaaaaatgagtactagaataaggcttaacttttaatgtaattaaatctgtgcactacattcctgagcaatgagcagaatgtattttaagtatgtattaaatatttgaaattataaatctaggagagaccagcctggtctaggtagaaatcaaaaaactaggctactttaaaatgtcattatttattttgttaaaattcctgagataaacactattctaacaaaagagccattaagactaagaatctctaagatagtttttatgttctcaaattcagaagaactaaacacattattgcagtattaataaaataaaaactgtccaagataattgtctcctccacaatatgcattagcttttgacagtcaaaacaggaacctttaaaatactctgttcatggttaaaaataatttgtactctaagtccaaaaagtgagc

SEQ ID NO: 33162 - DNA, 288 bp, Mus musculus
  source 1..288: mol_type = other DNA
aaattaaaagtaaatttttaagggaatctagttataattctatcctcagaggaggaatcgaatgccgccggctcctcctttctccactcctgagttccaggccagtctggctctgaaaaccaaatgtgagtcctatcgttaccaaactttgtagtgtacttacatatagtaaataaataagtcttttttaaaaatctgagcaatgaatttgtttggattttattcaaaaagaataacatatgttctgctctcagattatgagatcctggaaatcacatagaagtgttg

SEQ ID NO: 33163 - DNA, 468 bp, Mus musculus
  source 1..468: mol_type = other DNA
ttaccatggtactgttaccataaactagcctttgttggtcatccagagcaagtggttgacgttctaacacttatgtttaagcacgtaagagcacaagtgctgtctgggcctttgaaagcggctcaaagacagggtgcttgtatagtatttacaaagcctatggtccttagtattgagggctgcaggtgcggagagcaactgcctgccgccgtctttaggcttacaggtttaactgagagtgcccaatgacagtcacaactccaatttagctgtagaaatataaactaataaagaaatttaactaatataatttatatataatttaatatataatatataatatattatatatatttaatttcactaatatataacatatatgatataaactaataaaaaaatcggcccggcttacacctccagtctgagcgaagacgtggacttcctgtcggagcaatccccgttacc

SEQ ID NO: 33164 - DNA, 261 bp, Mus musculus
  source 1..261: mol_type = other DNA
ctagaactctagaactattagcatccagggtgctctggctcttgcttcaatttctggttgtacccctgaacaaggaacagtagcatcagtctttcgtcacaccagcatgtagttaggcaatgactattttataatttcctgaggaccaaagagacccaaaaagtaataactctaagtgtttatccttagttaataagtaagtgacacctgttaaatacaagggtttatttttatgttttcttaactacaagttaaactggt

SEQ ID NO: 33165 - DNA, 394 bp, Mus musculus
  source 1..394: mol_type = other DNA
tatttttttttttccttactagaattttaacaaataattaaaagaagcctttaaattaaaaacaaaagcctaatgctttcatggtgagggcatttacttcaaactaaaacatcaagacaatataattttcttcaattacatttccactggggcttaagaaatcaagaaatcttcgtgagggagttctcaattttggagactcaatgtagagaacagcgagtctacaagaattgagttctactaagtctcttctctttctggagagtgctggaacctccaggaagcgcgcaagtgtcttcaaggccccgcctctcctgtgggccccgccccgcatgctcgcctcgccccatcgcggagtcccgccccaccccaccgggggtcccgccccgtcctg

SEQ ID NO: 33166 - DNA, 462 bp, Mus musculus
  source 1..462: mol_type = other DNA
tgtctgtatcacaaatagattctgatgatattgatcaaatttaaggtgaatcattgtaaacagactaaatgccgcaggctgcttcttggcagtgtacttcaaataggtttccagttgccaaaggcttttcttcccctccaagaggtggggcagataaaacctccatggaggaaagatgatttctttttctccaggggttacttggatatccatgtaaatgtgtttgacaaagacccaaacagtcacactgtacacttggtattcctaattatagaaacgaatttttgagaaaagaggtggccaccatcttccacctactactggctgtcctagccagcacagcctctgctgtgcccacaccgtcgtggtgggagaggagagggcggtggcgtcggctgccctgccccccctcccgggtagttattcgagggcggggccgagcccggccaggaaatgcccaag

SEQ ID NO: 33167 - DNA, 503 bp, Mus musculus
  source 1..503: mol_type = other DNA
ctggagccctattaagaaaactattccaaggttcattttttcttccctttattcaattatattaattcaaggacaaaaagggcaatttcatcctgaaaatatctttatgttttcaacgaattctgtttatctcatacttatttctccaataaaagctacacctatgtcagaaatcacattattagaaatcattgaatgatctttaaataagacaactcgattgtactgacaaatggttctgtaaactttgatatataatattaaataatagtgttgctgaaacactaaaggttttcaaattagcaaatctaagcagcctaatactgttttcacttgggctaaattcagaaattcaggcattcaggaatctttaccatagtcctaaaacaataaaatagtgttccgaacttatgctagccaaagtgccttctgcagagacagggaccagcaatcccagtgtgggcctccgggggcggtgccgtgctgtgacgtcacttcctgga

SEQ ID NO: 33168 - DNA, 473 bp, Mus musculus
  source 1..473: mol_type = other DNA
tatataataataaaataaaataaaaatttaaaaagataaaaagatctcctggagtcattgcaagtgctcttatttaattcccaggtatgtaaattatctggagactaccctgctatgcactgtctttcagaacaaacacagaaagcagagtgacttaaaacagcagttttaatttgtttgtgaatattttcaactagatgaagtccacaaactgagtgaaatgattaaactatatttgtagctaaacagatcttatagcatctatcatttatactgatggtcacactattttgagaagtttgactcacatcttgtgttgtatatatagtaccagcctaacctatacattatgttctaagttagccaaattggtcttgttgggtgaaaacttttatctccataagtctaaattcattatcaattccaatagtgacaaaagaactagctgttttaaaatagccaaatcaaatcta

SEQ ID NO: 33169 - DNA, 491 bp, Mus musculus
  source 1..491: mol_type = other DNA
tatttttttccctttgtaaagataagaaagcatgtttctaactcttttttacgtacaaagacattaattttgcatttttatgaccgatatcagttgataacatgaaacttttcttgcagctagttaaagggattatttttaattttgcatatttgacttttttatttaaaaaacccgagataattttatgatagatatcctgatatctatattatcgtaaatcaattttcaaatgatggcagtggaaggtttttctggaaaaaaaaatgaagtgcggtttggtttccttgtcaacccgcttctgggctgtgtccgagcccgcaatggcaccccgtcccctggtggcgcctaggtttgggtggctgcaggggaaccagagcacagccggcggtccagcaagttggccttagccacccgcagcgccggaagcctagggccccgcggggcgctgactgtgcggtcctccgcggggaccgctgccgcccggaggc

SEQ ID NO: 33170 - DNA, 569 bp, Mus musculus
  source 1..569: mol_type = other DNA
aatataaattgatttttacactcaaataatcaaagatattttctctaccaattctcactaaaaaaaataataataattttaacagctgaacatggattctgttgctctaaagaaagaatttaacatatactttaggtgaaatattccactgttgtatatcttgtattttacagccacatcattgagctagatgctcaagactgtagagtacactgagtcacagtggccacacttttgtttcaattcagtattgtcagggtagaggactgaacacaggttctagcaaaactttctgcaaggagcagcacagtttgtagcatgcacaagtgacaattacttcagtaattaactatacaaaatgcaaatttcagcattttccagtgggcaacgcaggatactttttaatatttgaaaacaccatacaaggttcttcatgtttcaaactgtaattttcagtgtttcagttctcaacattgcttagagcacaacactttagtaatctagatcttattaaagaacataactaacattggttggggtgttagaaaattagtggcacatccctgttg

SEQ ID NO: 33171 - DNA, 336 bp, Mus musculus
  source 1..336: mol_type = other DNA
tctatacagctgttattcatttatgtggtagccaggaaaaccacttcccacacgtgtgcactaacaaaggtgtacaaactctttggcatcgttagaatatctttttcaacatagtctgaacatcccctaccattttgtgagattttctgaagaactgtggaaataattatgtcatgactgtcatcattttaatggaaaaacgcattgaagagtgtctcttgagcgaattctttaaaaagctgaacatttttttcctttactttaaaggcagagccggcgccgttgtcctgctttgcggccgcgcagggcggggaaagtgcggcaggcggttagagt

SEQ ID NO: 33172 - DNA, 305 bp, Mus musculus
  source 1..305: mol_type = other DNA
agacccaggaggctagagagtctcaggactcagggattgccatcccatagtcaaaaactctgactcagaattgttcctgtctaaaagaaattgagactcataggctccaggtgcctagcatggctggcctctgagaggcccacagctactgagccaccaactaggtagcatatactagaaagtaataaaaaaattattaacaagaaatctgtttggtatgcttttagaaagaagtcacaattcctcagaataattcagaagttaattattatcaaacccaagtttttagtaacttatataaagaa

SEQ ID NO: 33173 - DNA, 476 bp, Mus musculus
  source 1..476: mol_type = other DNA
cttgcatgaaggatatgttcattaatctacttgttaaggatattcaacaggtgcgaataccaagttgtttaagatcttgaagattttaatcctgagtctcaagtttgcaaataaaaaatgtgggagcacatttcctcctcttatatccatagtacgatgtcaataagtcaaaagatgctgcgattgtctcaataatagaattattggggagcaaaagagtataattttgtaacttccttcaccaaaaggcttactgaaggtcattcagggatgagcgctccaggccgctcgcccctccgcggagagtgcgttactaggcaacgccgcgcggcgtcactgcccaccctcgcggcgctggccgctcgtgtgaatccgcgcgctctgtggtgccgtgcgcgagccgcgcggctccggggactggtggacgcggggcgcgccgtgggcggggagcggagtccgcgcacctcctctgccgg

SEQ ID NO: 33174 - DNA, 541 bp, Mus musculus
  source 1..541: mol_type = other DNA
atatgtagccttatgtcaccatttcaatacaaacatgtcaataacttcacatttaaggaacatacttcataactctagttttgcaaaatagtttaatgtttttctataagtttggtttttattgttttgcctttctcgatatgagcttcacagtacttatgtttttagaacttcacaggcattttgaatacaaattggatataaatatatatatataattttgaatgatttcttgtacattaggaaattttcttttttgaacaagtaagtaacttgaaaaggatgcgaactttttggcgccacctctcggacactgcagggcccgcggcttcgattggtagacttctctggcgagaatgtttttcgcgatgcgtggaacctcaccggtgggaggcttcttctcaagctagtaggcgaagctccactgagtcgactcctcctccccttcgaaggcggctccttccgagtgggcggggtcacggcggacacgccaggccccgcccaggctactgtgaagggccgggggcgtggcccgctcggg

SEQ ID NO: 33175 - DNA, 425 bp, Mus musculus
  source 1..425: mol_type = other DNA
tctgaaggaaaatgcttcccctacagaagttttgctccagacgcctggaaaaattttggtttaaaattgttttcaggatttcttgcatgaaggatatgttcattaatctacttgttaaggatattcaacaggtgcgaataccaagttgtttaagatcttgaagattttaatcctgagtctcaagtttgcaaataaaaaatgtgggagcacatttcctcctcttatatccatagtacgatgtcaataagtcaaaagatgctgcgattgtctcaataatagaattattggggagcaaaagagtataattttgtaacttccttcaccaaaaggcttactgaaggtcattcagggatgagcgctccaggccgctcgcccctccgcggagagtgcgttactaggcaacgccgcgcggcgtcactgcccac

SEQ ID NO: 33176 - DNA, 311 bp, Mus musculus
  source 1..311: mol_type = other DNA
gttcaacatccttaaggtgggattgcaggcttgtacaaccactctggaaatttcagtactacgaggatccagcaatacctctccgtagttcttgcacagtcagaatggcagtaagagaaagtttggcttcttcttcctaactactccagcagcagctcctgcctgggtgattttctgggtggacttctcagaactttccccactcgggcgccccctgcgggtgacgaccgtgccctcgggtttcgggttcccgggttcggggtgcgggcggccccgccctccacccaggcccgcccagctccttggcgcgg

SEQ ID NO: 33177 - DNA, 744 bp, Mus musculus
  source 1..744: mol_type = other DNA
ctgagtagatgctgagatactcacatgcactctttagaaaagcaatgcagaattgtgtaattttttcctagaggattgcctaattgataatagtaagaactttcaagagtgctaaacttctattagtaagatctagttcacagttattcatgaagagagtactgttgaattgcttcaacttgtctcagctatgaaatgataattcttactttataggatttttatgtgtgacagtaaaataaagtaatatggttattctaggtggaaaatattccaccatattcaacattgattataatgttttatgaatttatgaatttcattatttctcagaataaaagaactatttctaacctgactggctattattgtcctaagagtttacattagaagaaaacttcacactggaaagatctttggaattcatctataaaatgtatcattatgaataccattgtcttatggataattaattactagttctattacctgattctaaattaacatcatgatagtcattcagtcaatttatttcatattaaattagtgttgctaacacagcttagtacttttattcaaagaaatttgataagatttagtcaatagtcagaaaacaagaccagtttaataatatctatgattttgatatttcatttttatattacaataacataaaacaattcaagacattttacaataccattttattttatgtgtatactaagacaagcttctataaaagcc

SEQ ID NO: 33178 - DNA, 603 bp, Mus musculus
  source 1..603: mol_type = other DNA
ggtccttaccatttttatccctagatatctaatgcagtatgagcatatcctttctattgccaaagctaatatggtcttggatttttcaaaggcaaatcagtataaatgaacatatttataattccttaagaaatataatataagaaatatgaaacctgactgaattataaattgtagattgtaagatagttagttttataaaacaatctatttatccaggcagctagatgatgcaaaaggggggcaccctgttatttctctatcagatcagctagagccctatctgcttacagagaactaaatgttacttctagtctgtatgaaatagtccagcaggagtaggagtatttactgtgcagggtcacaatcactccctcttaggaagggattatatggagtctttcttaagttgatgtactacagagagatgctgggcaacaatctactccaagactatctgcctggactataactgaacataaaggaattttgagtttaaaatctccatataaaactgattaaatcagaagaaatcatcttcttaagttgtttcctttgacaatgtgaatttgtttcaaaatggttaaatattcaaattcaagg

SEQ ID NO: 33179 - DNA, 415 bp, Mus musculus
  source 1..415: mol_type = other DNA
cctgagacagggcttgtcactgttgcctgggcacatgccagaatggtcacaggaaccattcctcagagtcaacaaatttgttatgagttctctactacctagttcagctggtatatgtaacattaattgttcttgttaaagtaaaaacctgttatttaagcaaaaagttggtaaagtctcacttgactttaagactaacttaagtcaaatcttggacacatcatctatttaatagttagaaagattattgtctttcctccaagctaaaaactatttcaagtaattgagtttgatagttagatatacaaattcaataatcacataaggcttcttaaacagttgattaaccaggcaactgacaactttgggcagtccttgggccccacagcttaccaagattattattaatcagcca

SEQ ID NO: 33180 - DNA, 405 bp, Mus musculus
  source 1..405: mol_type = other DNA
tgtctctaattatgtcttagaaagtgaaaattttatgtagtgtactcatttttgattgccctgagatgaacagagcaaagctctgtggctctgtcccagactgctgctgactgagcagagtccctccctggccagggatccagtactagacaaactaagctagactggtgtgacgcctaagcagtctaccttaggattcctgcagggaaaggaaccccagcatccggagactgcagcgggtcctccattctgctgagagaggctgcgggtgcaacttttagttgctaagtaacaccagactgcagcatgagccggctgctcctccagcagctgcttggtgcagagccaagaaagggggggctctgtccccctccgttcccctgcaggagatctatataaaagagc

SEQ ID NO: 33181 - DNA, 601 bp, Mus musculus
  source 1..601: mol_type = other DNA
cttctcaatttgaattctaaataatatggcctcacaaaaaaattgttctcaaagtcagtgtgtccccgggacacccacggtccctgggaaggtcaaatacaaattcctttgccaggaaggggaagttctcatctccttggaagacatttttaaaatccaattccaaaaagcaaagcgatttttgagaattggggcgccctggcggcaaagccgggtcgtcttcccgcagcccggcagcagggggcccccccgcttcccgctcccggctccaggatccccgctcccggagcctctaggaccaaactccgcagccgcgtgcgtgcgggccgcggccgggtggccggctggcccgccagctctgggaagcggagccccgctgtgcgggcgggtgaccaggtcggtgctggggagtaggggcgccggcccgcgaggctgcgcagcgccggggcgagctggagagcgcgcagctgctgcagagcgggtcggacgcagaagcggagagcagccggagggcgccccgccccaagcaaggtgcgggggccctcgaacaccgaggcctccgcctgtcaccggtccctcccctgggccgcccagagcacca

SEQ ID NO: 33182 - DNA, 663 bp, Mus musculus
  source 1..663: mol_type = other DNA
aaaacattcttcatcaaaaatttcttttgacatcaacctgaagagtcttgtatagagaagaccataattttctgagtcttagtataagaacaaggagatctacatgtgcatcatctttgtgtggcactacatgatgagtctgagaacacttaaaatgtagtcagatatttttcattatacttacacatagattctaatatataggtaatgtgatgtctaggtgcctccttctcaatttgaattctaaataatatggcctcacaaaaaaattgttctcaaagtcagtgtgtccccgggacacccacggtccctgggaaggtcaaatacaaattcctttgccaggaaggggaagttctcatctccttggaagacatttttaaaatccaattccaaaaagcaaagcgatttttgagaattggggcgccctggcggcaaagccgggtcgtcttcccgcagcccggcagcagggggcccccccgcttcccgctcccggctccaggatccccgctcccggagcctctaggaccaaactccgcagccgcgtgcgtgcgggccgcggccgggtggccggctggcccgccagctctgggaagcggagccccgctgtgcgggcgggtgaccaggtcggtgctggggagtaggggcgccggcccgcgaggctgc

SEQ ID NO: 33183 - DNA, 467 bp, Mus musculus
  source 1..467: mol_type = other DNA
taaggtgttcccatttgctatctagaaaaaatcaaaataatgggtgttttggggctgagaactccaaaaatcttgatgcagggtgtcacattatatccaaccaatgtattaatgcatgcatgctagtattcaaatgagttttcccaaatcagttaagtagagataatcctaagatagagtcagacttagacaatttctcacagaagttggcaattgatactaattataacataatttactgtagcaaaaagactcctaagtttctcttggactacatttactgatatcagtaaaagatatactgatcttacaaatattatatgagacaaactgggtgtgttaccaagacaagatataagcagtatggttccttttttcacataacattgaagtaatctttatgcagaataagtcacaatacttcctttctctacatgtaagaacctgagatctcatgagaactgatt

SEQ ID NO: 33184 - DNA, 608 bp, Mus musculus
  source 1..608: mol_type = other DNA
atttgaaatgtaaataaataaaattcccatttcctctctgaaaaaaaaaatcatagatcacggatttattgagtttacaactccaaattataatttatcattggtcattatatatccaagagtttatgcatatatgctataattcatctaacccttattgttcaagatgccctacctagaacataattttgtccaaaattaacatgagttttctcaaaccaattaactaaagacatcccactcagatggtttaaaaggccttctaaaccttatcaaacttacgagaattaatactatttgtaacatatactaagttacatgtttgtgtatgcaaaaaaggcctttaagtctcactttgactacatttatcaggatattagtaaaagacattcaaaggatgagaaaaaacatcttgtttactccagcactgagctgttctcacaaatagttactggggagttactaagtcaagatatcttgaaacaaggattacttaaagtataaatatctgagtttctctgcaaataactgttaaaaacaactcttgtaatactgtgaatctatttcaaaataacctaacactgacatatcctgtttgcagaaaaagc

SEQ ID NO: 33185 - DNA, 486 bp, Mus musculus
  source 1..486: mol_type = other DNA
aaaaataagctatttaatattctttgcagtataccatttcaaactccatcaagcatatacttactaaagtgttcccatttgctatctagaagaaatcaaaagatcatgggtttttttgggcttagaactccaaataacagtggcaagatcatgatgcagcgtgtcacattatatccagtgaattaatgcatgcatgctagtattcaactaaatcagttaactagagataatcccagatatagtcagacttcaacttttgagaagttggcaattgatactaattataacataattactacatttattgatatcagtaaaggatatccaagggatcattcccagagaaccactggtcaaatattatgagccaaacttagaactttatgtgtcactgaaaaaggtgtgttaccaagacaagattatgttatgcatatctgagtccctcaaaataactgttttcacataacattgaagtgatctttatgc

SEQ ID NO: 33186 - DNA, 483 bp, Mus musculus
  source 1..483: mol_type = other DNA
aataagctatttaatattctttgcagtttaccatttcaaactccattaagcatataattactaaagtgttccaatttgctatctagaagaaatcaaaagatcatgggtttttttgggcttagaactccaaataacagttagatcttgactcaggatgtcacattatatccccaatgtattaatgcatgcatgctagtattctactaattaagatgagttttcccaaatcagttaacttgagataatcccttacagatgggctaagatatagtcagacttcaacttttgagaagttggcaattgatactaattataacataattcaaagatatcagaaccattgatcttacaaatattatatgagatagaactttatgtgacactaacatctagtatcttaggtgtttgggaagtgtgttaccaagttatgttatgcatatctaaaataactgttttcacataacattgaagtgatctttatgc

SEQ ID NO: 33187 - DNA, 524 bp, Mus musculus
  source 1..524: mol_type = other DNA
tattaaagtgttcccacttgctagctagaaggccaaagacggttttttgggcttacaactccaaattcaatagcagaggccaattaattaatgcatgcatgctactattcaacctatgtaggacaatattttatacaaaattaagatgagttttcccaaatcagttagctaaagaacaatttctcattgatgactttcttcatctgtgagaaattggcaattaataataatcataacatattttactgtgcttgcataggcaaaatgactcctaagtttctcttggactacatttaccgatatcaataaaggatagagaacagctggcttactctagcattgagctgatcttataaatattatataggcccaattgagaacttttatctggtgtgttaccaatttgagtcaaactgtttatctatttcaaaataagcagtatggttcctgttttcacataatattgaagtgatctttatgcagagtaagttaaagcacttcctttttgtacatataagaacctg

SEQ ID NO: 33188 - DNA, 484 bp, Mus musculus
  source 1..484: mol_type = other DNA
taggagtaaagtcaaggcctgcaagccttttctattccttgaaaaccaaaaatgtttttgggagcacacctaaaattgccttttgaggatttgcatgagaagcaatcttgacacagtgattctaaaatattgtggtactacatatagaaaactgtgattttcctaatttcctgcttcataggttagcacttaaactgggaattcaataaaaatgccaaaattataattggactgactttctttgtttttgccaacaggtaagaaagtaacattaccagtttctagggacattttaacattttattcaataaaaacgttagaaagcattcattgagagcgtgctcccgcaccccgcacgcacgcacgcacgcccggtggtggctgagcggacaggcgctgctggaccgcttctgtagcctccacccccctcccctctccgatgacgtgcacggcgggggcggagcccgaggccgtggccggagcg

SEQ ID NO: 33189 - DNA, 282 bp, Mus musculus
  source 1..282: mol_type = other DNA
gactcagcaagcttgaaattctgatcctatttcatattaagaacatacttacgtttttatttagtcccaaatgacttaatttcttcctgaggcaattttaaaaattcagaatattattgttttttaaaaggaaagaaatagaaaggctctcatttagagcactgagggatatgttctcgttgtatttttatatttcgtgaaattcatgatttaattatactcctcaaacctgatgcatgagtcctgccctcttttgaaaaaaaagaaactccttctttgcag

SEQ ID NO: 33190 - DNA, 348 bp, Mus musculus
  source 1..348: mol_type = other DNA
cctgtaaaggcctggaaaaaattaaaaaaaaacaatttacatttaaatttgaaataaaattcaagtgacgttgagatttgtaaggcaatgaaagaaactgcaattctttgaatgtcatagatatgtttttgacacccgcattttaaaaatttaaatatttaaaaagcatttgagaaggatattaaatggaattgtccagcctgtcttcattcataagaataagcataaaaaatttagaccttggcctgcatctggagcttagctgtactgtctcttaagcaagggcaaggagggtgccctttgctttgcccaggcgcagctcttgggggccagtgactggtgacgtca

SEQ ID NO: 33191 - DNA, 499 bp, Mus musculus
  source 1..499: mol_type = other DNA
ctcggatctcctcctgactcccgccgcagtcagagagagcgcgctgcgctgcccttaaatctacgcccagagcgggctcagacccgatctctgctctccagagccagatgggccccagctctcccgggactccggcctgggattctgaaggcgtatacgtgtgtttgtcggacatacaaacatgcatgattatatctgcagcagaacactcatggtgtggtccttaaagattccttacaaatgtcttaggacggccaactcagttaattgccttcagtaaaatccatcatttgaaaactagatttatagacatatgtatgggtttaaatggcatgcagatgtatgcataagaatcgcagactcatgcacccgcgtactgctcagagctacaactctaggagtagggactccaagcctagagcttatagtaatagttgcaatgagtcacttgcttctagatcaagatcagagactctgtgatttaatgtcatacaattaa

SEQ ID NO: 33192 - DNA, 411 bp, Mus musculus
  source 1..411: mol_type = other DNA
cagctgagtcagatgcagatatttgcacccaaccaatggactgaagcagctgtgatcctgtaggaggaccagcagtctcaattgagagagggtctgtgttcattcatacacctaaccctcaagagactagaggccccggggagtttagagtgtaaaaaattaattaattaaagaaacatataactttgtttaaaaaacaatgtaatgtatatcttgcactgcactaaattatagctctgtactttttcatgaaagtaaaatgagccttcttgagataacatgaccagaacttatagaacatagtttcaaggaccatggcagtaggtacacattacatgacttatgtacttgcaagcccctcaaaggggtcaaaggtaggcctttgtgaggtttgttgaccaatcaaagctg

SEQ ID NO: 33193 - DNA, 236 bp, Mus musculus
  source 1..236: mol_type = other DNA
gtgtgagaagattccactctgaatgttccctcttcaacgatttaatcttgaggaaagttagcgtgggggactcggcaaaggcctcccccactccgccccatctatataggagctattaacagggagatatagaattctctcctgagcaaagaacatcctcggctacccagcgccttgcaaacatatgcgctaagctgtgtatacagatataatggagcaggcgccttttataaagc

SEQ ID NO: 33194 - DNA, 384 bp, Mus musculus
  source 1..384: mol_type = other DNA
aagtgactaacatgaaatgtctcaatgttttacatgtagatgtttagtgctatgaacgtatcccttacaactactatttttatttttttcacttctaaaaaggttataacatttttaaatttctgtctagacccccctatgatggtcagatagaattaaacttgaatacccttgtgttgggaacatacatgttaaaaattgtgatattctttcagtggctattttgtaagatattaaaatatttacgagcgtgcgtgttcattcagccacgatgcctgaggaaagacctttgcctttcaggcagaaatgttaatgtccttgatcatcaataccttctactcgaacaaagagatctttctgagggagctcggacgccctgacacc

SEQ ID NO: 33195 - DNA, 278 bp, Mus musculus
  source 1..278: mol_type = other DNA
ttcatcactttctttctgagactgagacagggtaaaaacagatctgagtggcacagagacccctgtccagttaggatttaattagatgcgtaaatatttatcaactaagtcggcgcctgtcctgtacagtgtgctgtacactacggcaaagcacagtggacactggtggtgaagcacaaactgcagtatctgccagggcagggtctcttctgcgagctcactgcagggttcctgtcaccggagcggagcggagcgggaggcggtgcgaggcggaacgc

SEQ ID NO: 33196 - DNA, 297 bp, Mus musculus
  source 1..297: mol_type = other DNA
acatagtagaatacacggtgtggtgtctttcaaattccttgtaacaagaataacaacaaagtaactacttggataacaatttcagaaatactttggaaaatagtatcgataaaacaagtatgtctttactttgataaatagaaaacagcattaacctctcttaacacaagtctctgacaagagaaaagacaaaattcttttcaatgtcaaagacttctgttcgcgtgtctgcacacagaagcaccgtggacggcgcaccaatgagctacattttcagccaatgggatagaggtgaca

SEQ ID NO: 33197 - DNA, 442 bp, Mus musculus
  source 1..442: mol_type = other DNA
ttgctgagtaactgaattgaagctctaggaggcgaagtagcaacagctgctgcccacttggatcctccagcctccaacttcaaactactcgttttacatagcaggagccgccacgcccaggtaggagcggccatgactaggttatctgaaatctagaataacccttcattaaaggggaactgaaggcaggaaaagtcttcactccctcgggatttgagggctcgacacaggctaggctaggctaggctaaggacctagcgaatgtgggtattcctacacccacacacgccccttactgggcaccgcgcgtgcgcacagagcccgggacaggtagccggcgtggccggcgagcagacacgccttccgccggcctctcctgagcccgcccccgggcctcagcgagccgttcactggtcagcctaggccgggccaggggcgggga

SEQ ID NO: 33198 - DNA, 244 bp, Mus musculus
  source 1..244: mol_type = other DNA
aagaccaaagtgtggacactttgccccttcttagaattgggaacttgtgagatgccggggcctagcactcacagtcagctattggatggatcacagagcctagctgcatatgtatcaaaagatagcctagtaggccaaggcccattggacttgcaaactttatatgccccagtacaatgaggaaaatacctaataaaaatttttttaaaaaaagataaacagaatatctatgacatcacaatac

SEQ ID NO: 33199 - DNA, 271 bp, Mus musculus
  source 1..271: mol_type = other DNA
ctttgtttcaatgacattttaagtacagagtatcatggaacttgaggaaatttctgtgatttcattaaatttttctttttaaaaattgatatagtctcctacttatattcaatagaatttgaaatttgtagccatgctaatttttatttgatatttgaattatattgttgattatttttataagtaagcatataaactattctcaaaatatagaaatatacttaaaattgattaaagactggtcatataccagtaagttctcaaacttgaa

SEQ ID NO: 33200 - DNA, 560 bp, Mus musculus
  source 1..560: mol_type = other DNA
tctgatgctcaaagcatcagaaacggttggctatgcaggccccgaaagtctggggcctcacttgccaagggaagccactggaaccttgcctaggtagggcacggacggtgacatagcgggagcactgagcccccgagatctgctggcgtcaccgccgcagcggcctcccgcgacgccctagtacgggttccacaggggacgcgcgcggtgccccgacgggcggagcacggagagggcgcccggtgctctgggcattttggatctgtcggacgaaacagcgccgatccggtaggccgaacaaactccgggtcggtgcgcccgaggatgccccacgtaactctcctgcgcacgcgccgcgggttgcggggagggagctgcggggaggcgggaggggccgggggggcgcggggcgcggcgcggcgcggcgcggcgcctagcgcagcggacgcgagcagccctgtccggacagccggcgggctcctgggcgcggcggcggcgcggggcgcggggcatgcggcgcggcgtcgtgacgtcacggtggcggcggccgtggttggcgc

SEQ ID NO: 33201 - DNA, 409 bp, Mus musculus
  source 1..409: mol_type = other DNA
gagagccacatactcaacattttggttcttaatttttttaaaaaagaggtggactcacgccagttgtggctgcccacctgtaatttcagggaaaccacttcatgaataatatagagtgatggaggaagccccacatgcatgtgcacaacatgttcacccacacatgtaaacatgcacacacacacacacacatacatgtgtaagtgtctaagtacactcttttatggtgaaagcattcttaaattggaattttcctatactgtaatattggcaaacatgaaatttttaatatcatgggtttcctgctgtctgaagaaacaatgcttcttatacagttacactgtagcgctgcatagggcatgttaacaggcctgtcactggcttatatggacaagtcagtccagggtca

SEQ ID NO: 33202 - DNA, 376 bp, Mus musculus
  source 1..376: mol_type = other DNA
gaatgattctcatttacagactcaataactgattttttttcaggctatcaaacagcttaagtttttcaacacaaggtttgcggtgtagactccgaacagagtgtttaatatacacagctagattctaagagaaccataggaggcctgagattcacttgaaactgaggcttttaagagactttgtttatggccttcctcgttagaatagctcttttcttgtgaaggaaaacactaagctggtttcaaaaaaacggtggataaaaactcagacctggaaagatcattcaaaaatttttgtcaatggacaagtcagctcgttgacgtcaccaaggaggcgataaatatgtgagattcagtgagaactctgtccctcatt

SEQ ID NO: 33203 - DNA, 412 bp, Mus musculus
  source 1..412: mol_type = other DNA
cattgtaacaccagggtcattattgaaaataacagcagatctcatctattgagaactttctcagtaccagttattaactaaggttccatatttaccaatgtattaacagaactagagtaaaacacttatctattgaattaaaaacggatagccagttttcactggtgtacacatttaaaacagtcctggatgaggagtacttcaatcttaactaagtatctcaggatcaaactcactcctagggcgcaaagacctggctatgactctggggagataatttgtctcgccccaaatttacccgcagtgtgtatgcatactacctctgtattgggaagcccgcgcgtcctaccgcgtgaaccctcagcgcctgtaaggccacattcggttgcgaatccggggccggcctctaacg

SEQ ID NO: 33204 - DNA, 470 bp, Mus musculus
  source 1..470: mol_type = other DNA
ttctaaccaaaaatcttttaccttaaagctctcatacatgttacagagagaaattctaggttaataaacaaagctctttttccagttgagtaaaatcatttttttttttttaaagatttatttattattatacataagttcactgtacttcagacacaccataagagggtgtagtgctcttacattcaaacaaaattatcatttcctggtatgttcttctattaatttctacatagcaatccatgtaaatctataacacacagtacaaaaaaatttttttaaatgaaatttttattggctacttttacgatgtgctaaatatgtttcatatcttcaaaattacaagtaagtttttgttagttttctaaaaatcattaacaatgacatatttgattcatttttccttggagatggtctctgccctcctggaattgaagatgcagaattgcgcatgctgtgcatgtccaaca

SEQ ID NO: 33205 - DNA, 415 bp, Mus musculus
  source 1..415: mol_type = other DNA
gatgaagtacatgattcctcgtcatctggaaggtattcgaaatggcagcagttcaacttcagtccaattgctcgaattgaagtttgctcttttcagtgtaaaaagaagagcatcaatacgtacatatgtgcatgcaaacacatatattttctagaattgttaaaaaaacattatagatctggtttattaaatctcccaaaatagaaaaattccgacggcaagtttcttcaatataggaaatacttaggtatctaaggcttagaggaaacttttgccaaatgcctgcaaaatgttttcatagatcaccctacgttgggagtttaacatcaggttatgtaaatgagctcgagtgttaaacacgctgaaccacttagggtagcacttcacttagcgcgcggcctctttaaggagcggt

SEQ ID NO: 33206 - DNA, 510 bp, Mus musculus
  source 1..510: mol_type = other DNA
tttttttttttaaagatttatttattattatacataagttcactgtacttcagacacaccataagagggtgtagtgctcttacattcaaacaaaattatcatttcctggtatgttcttctattaatttctacatagcaatccatgtaaatctataacacacagtacaaaaaaatttttttaaatgaaatttttattggctacttttacgatgtgctaaatatgtttcatatcttcaaaattacaagtaagtttttgttagttttctaaaaatcattaacaatgacatatttgattcatttttccttggagatggtctctgccctcctggaattgaagatgcagaattgcgcatgctgtgcatgtccaacacaaacagatgacattcctttgtagttaattaccagaaccaatctgagttggaaaatgctatttgctttaaagaaattagttactcttttgcaacattaaattgtgtcagccaagcaaatgaagccctatttataaaattg

SEQ ID NO: 33207 - DNA, 482 bp, Mus musculus
  source 1..482: mol_type = other DNA
cctactgttggtgcagcagaagatgcagcagttaatggctgcttcatcaaaagtagttttatggtctttcaagatgctggaattacctttaccttgacaaaactccaaagtgaaatgtccctttagattataaagtataaacatataaactttatatgccccattggaaatgtaaacgaaaaaaagagagaaaaaaaaagtttctttatagtgcctccttcattttcctaagaaattggaccagtctgcctttttcagcaagagctataaggttgtattactttatggctttcttctaccaagggaaaaaaatttctttaaacggaaattcgtaagttctcattcagatttccagaactcaagggctcctactggagtaggccctgttaggctcagaagcctcgatgttttaccgtgcaaggcgtctcggacccgcactgcctttgaatcgcagcactgggcggagctccccaccctgccga

SEQ ID NO: 33208 - DNA, 341 bp, Mus musculus
  source 1..341: mol_type = other DNA
aaattcgtaagttctcattcagatttccagaactcaagggctcctactggagtaggccctgttaggctcagaagcctcgatgttttaccgtgcaaggcgtctcggacccgcactgcctttgaatcgcagcactgggcggagctccccaccctgccgatggacacgtctcaccgggcggacgcggcctggcggtctctgggaagatctggggagcccagggcatcccgaagtcaccccgccccgcgccatgtcctatacgttcacgaggtgaagggctgaggtgcgcgcccgggcgctggaggcaccaaccagagtggctgcgacctcggagaatcttatcc

SEQ ID NO: 33209 - DNA, 432 bp, Mus musculus
  source 1..432: mol_type = other DNA
taccatattgcatatcactaaccaatgaaatatcaaaattcaaagtggtttctgatgatggataagtgcaggctacattagaaaagtatttctcaacttccctttatccagaaccaaacaaacctctcctcttaaggcttattatcatagcaaagtaacttaactttctgagccttaaaagggtcttaactacctgattaaaaccagtggtaagattctaaatatttggcaaaaccgttctcttcagtttaaaaagtttaaatgaataattcccaggccctggaaggaacgcccgcggcgcagtccccaacaggtgtcccctgggcacagcagcctgcgggtccccagggtcgccccgcccgcagtgcgcaccggggaggatgcggcctgggcttgagcctgcgcggccacgtgacggccgctataagagcg

SEQ ID NO: 33210 - DNA, 354 bp, Mus musculus
  source 1..354: mol_type = other DNA
aagccaggcagtggtgacacatgcctttaattccagcacttggatttcgaaatctgagttcgagaccagcctggtcgacagagtgagttatatagagaaactctgtctggcagttactcaaattcatttgaggttataaatgtaacttttaaaatgtaggaaaaacacatactcacaaaaattaagtatattaattgttttgtatttaaaacctatgagtatgcttcaacctatttaattgaagctagaggtacgttactgtcttatctctgtgaatagaatcttttttagagacatttatatctcctattaataagaagagaggcctggatattcacaaccctgccccctctc

SEQ ID NO: 33211 - DNA, 691 bp, Mus musculus
  source 1..691: mol_type = other DNA
aatttagccttaaacttatctgtaagctcagtgcaaattccagtgaaagtttttcatgaagaatgaaattaaaatgtatgtaaatgggaaagtcttatcaaaactaaaacaatattataaaagaactaagtggttgtctgttcttaaggctttaagtcaaagcttaaagtcatataaatatttggtaggatggtggtccctgcacctaaattactatttatcatttctacccagatagctatatgctgtgcaaatgaaagcatatgcccacaaaagaacttgtataaaatgttcgttcaagtattatttataatagcccaatgattagaatgtatatggtaaatataacctcatttatatgaagtttgaatggacaaaattagtataaagataaaaactttaatagcagttgcttgaagaaagttgaaatatctttgaagaaaggtacttaattaatccagggtttacatttgtcaacactcattaagcatgcttaaatctatctcactgtatgtcgatctcaaatcaaaatgagaataaaaagactacaacataaatttttgtttgacacccccacactaatgattctaggaaatgtggacgtgagatcatttgctcttcaggtgctcaaaagataacttcttagactttaaacacctaccaaaataactgtgccaggaaaattattaat

SEQ ID NO: 33212 - DNA, 412 bp, Mus musculus
  source 1..412: mol_type = other DNA
tgggcgcacaacttctctcgccgtgcgcgctgcgcgtctccccacgcgcggtgctccgggtcaggtacgctccggagcgggcgtgtttacgcgcatccaagtgtgcggcactttgaacgcggagtccatgtggagcccgcgccgagctcccgcagctgccggccgcctccggggatcggagcggccgcggctcgcgggattgctgcgggcgaagggactcaagcgccacccaggcagcgggacagccccggctgcgggctctggaacgaatgcgcggcgagcccagcccccagcgccgcgagcgagcgagggaggctgggtgggtggaacggctcgtcggccgccacccccaccgccaccgccgcgctgcctccaccgcggccccgcccccctcctccctccccgcgcgccg

SEQ ID NO: 33213 - DNA, 499 bp, Mus musculus
  source 1..499: mol_type = other DNA
catgagttcagaaagtcttctgtgctaatgtattcaagagtatttcacaccatggcacatgcctttaatccagcaggcagatttctgagttcaaggcctgcctcgtatacagagaaactctgtctacaaatacaaaaggcttgagttcctattttgtctgtagacttttaaaatttcctttttgtttttctaactacaaagttggatacaagtcaagagaccgaaggtacttatatgacattactgactttctaatacgttaacaagaatagttgtaatgaatgatattcaagaagcattttaaaaaatagatgaaaatctaccctttcattctatgcaagcactgtcaaattttgattagtattataaatacaaggaagctcctaattcatccttagaagtgtttttaacttagtaataggaatattttctctccacctctctaggagatggtgacactgaagtacattggagtcctccttgccttagtcagattgta

SEQ ID NO: 33214 - DNA, 516 bp, Mus musculus
  source 1..516: mol_type = other DNA
tctcgccgtgcgcgctgcgcgtctccccacgcgcggtgctccgggtcaggtacgctccggagcgggcgtgtttacgcgcatccaagtgtgcggcactttgaacgcggagtccatgtggagcccgcgccgagctcccgcagctgccggccgcctccggggatcggagcggccgcggctcgcgggattgctgcgggcgaagggactcaagcgccacccaggcagcgggacagccccggctgcgggctctggaacgaatgcgcggcgagcccagcccccagcgccgcgagcgagcgagggaggctgggtgggtggaacggctcgtcggccgccacccccaccgccaccgccgcgctgcctccaccgcggccccgcccccctcctccctccccgcgcgccgggcgcaggccgctcgggtttgttttgctgcgcggccgtcgccgccgcgggcccggagctcatttgtgcctggctggtccccgcgctccccggtgccgagccggagccgttggccgctcg

SEQ ID NO: 33215 - DNA, 444 bp, Mus musculus
  source 1..444: mol_type = other DNA
cactttatcataattgtggtggtgaagttacattattttcaatatcacttgctttattttggctaatgaaatctgtccaattagagataatctttttctttaaaaatattcagttgtcaaaaacaatcttattatggcccacaaaggtatacttatccctgtctcaatcaccaggagtaagaataacaggctcatcttgagattcatcttgctcttaaagtggattttcttcaccctgtggaaaaaacacaaatagctccccgggatctgattaagataggatccgggccataccattatccaattttaagaaattaagagtaaatattatttaaagaagttaatagtcatatatactatttagatttacaaaataaacagctaggacttatctgtttagtctttagcttagaaattttttccttgactaggagccaggtaatg

SEQ ID NO: 33216 - DNA, 423 bp, Mus musculus
  source 1..423: mol_type = other DNA
aatttctcttggtcatgatgtttgtgcaggaatcatttttctctctttttcttcctcaaaaaatcaaacaaacaaaaataaatatagacaaacaaacatggtatttgttttgggtttggaaccctggctttatgggttggcataaccagggataattcattggagggcaattattttccctttgcttaagtagtataaccatggaaaaattttctcatgttccagtgcagatcataattaaattctgccatttctaaaataatttcatatcaaagtagagagcagtttcctgagaagaataatttcgtaaaagtttaccaaacttagggtttacatgagacaaactaatgcatgtaaattctggacttttcattttgatgaaaaaccaaccctgctcagagatttccttctctgtgaacatgt

SEQ ID NO: 33217 - DNA, 362 bp, Mus musculus
  source 1..362: mol_type = other DNA
tcaggtaactcagtttcctattttaaatacatgaatattatttgtctatacaaaggaggacacagaatggaaaactccttgtatttcaacactattttacaatagagtttctgctacatggaccatgtgaagtgcaggagggtcatgcatgacacactgactcagtctgaaataaaataataataaataaatatatagcatagctaaaaacgagagaagaaaaatgtcccttcctttatctttagtgtcacacattattttgaaacaacgaaaatttgcctgtgacttatgtagtgttggaaatactgccaacactcagggcaaaacaaagccgtgttttgtgagccggtagtgtactgtta

SEQ ID NO: 33218 - DNA, 295 bp, Mus musculus
  source 1..295: mol_type = other DNA
aaagaccttcagttttccagtaaaaggcaaaacccatcctgattactataactgccaccgatttggagtagaaacctgtacttttgcgagcagtgcacccagaatccaaaaagatttttaaaaaattaaatcatctttgaggtcaatttccaatcgagataaatctattggattagtaggaaagaagtaacgttgtttgatcgtttgtatttcttgctctccaggattctggatcctggcagcatctgaattctgaattccagaaagcatctgcaaactggtaaatactttgacc

SEQ ID NO: 33219 - DNA, 520 bp, Mus musculus
  source 1..520: mol_type = other DNA
taggcatctgcacacacagggagcatgtgcataggtgcatgaacatctatgagtaaaatgataaacatacacatatattccaaataaatctcattccaaaatgagagctggtttaggtccccagggtccattaaatagtacataggtcctggcatatgtgcttgcacatgcaactttctgcatgcatatacacacagataaaaagtagatttaattgaagatattttaaaattccaaatgataaaatattatctagataatcctttattatatttattcaaaggaaacaaaaggttaaatggttttctgaaacaatacatttcaaaagaacagaatttatgggtgtttaggaaacaaatatatttccttgaaatcatagtgcttccctaagttgacatattagctactaaatgttattggggaaaaactttaaatgtcgaaaagaccttcagttttccagtaaaaggcaaaacccatcctgattactataactgccaccgatttggagtagaaacctgta

SEQ ID NO: 33220 - DNA, 362 bp, Mus musculus
  source 1..362: mol_type = other DNA
tgaagaactgtttaacgttctgccatccttaggctgaacgctaggcaccaagaagtatttctggttcaaaatccccggggcccaggaggagggagtccattacagtttaaatgtgtcggtttaaaatacattttgtcctttatacaacaacagtaacaaagtcgatcagatcaatgttttaaacacatcttggtgtttactatcttctgatgaaaataaaaacaataaaaattaatgaactttaatgagctgggtggtttcttcaatactaggtttcatagaatctccaaaatgcagatagcgagttttttaaaaccgcaaatcgccggttttgcgcaccctcgcggtgggcgttctccacg

SEQ ID NO: 33221 - DNA, 426 bp, Mus musculus
  source 1..426: mol_type = other DNA
atctacttcatacactatgtgtaagaggctggaaaatagtgtaaggaccagagtttgatttccagaactgacactaaacaccgagacttgttagcctgccagtctagccgggcaagtcccttggtcctgaggaacaagactatcttcacttgcacacgcgcacacaagtacacgcgtccacatttaaaaaaataaaggacatgcaaaattgtttaaagtatatttatggatattatatctcatagttttatatagccaaagatatatagcaaaatgtttataatgtttctcaggtaattcttgtgaagaaaacggattcctcctctgattattctgtcttcattaattttagagtattaaaggaaactcacagctccccgatggtgggccgagcctggaggcacgtggcaatgggcggggccacgt

SEQ ID NO: 33222 - DNA, 398 bp, Mus musculus
  source 1..398: mol_type = other DNA
aatatgtataggcaaaaagacacataaaatttatcaatctaaatttcaaaagtgctttaaaaacctcttaatgagatttggccgatccaaacacttggtaaggttttgaaagtgaaaaataggcccacacccagctagaatattatagaacattccatctagaaacaaatttcaaaatagcaatactgagttggggtggggagggagcaacccacccagaagcagttttgcttcaggagattctaaaatctccttatacacttttttatattaattactcagatgcaagcttgtcttcaaaaataaaatgtttacggagtaaacatccagaggcgctgcagagccccggcgcctcccgaaggcagacgttgggattgaccaatcggcagtccgcccga

SEQ ID NO: 33223 - DNA, 367 bp, Mus musculus
  source 1..367: mol_type = other DNA
caatatgtataggcaaaaagacacataaaatttatcaatctaaatttcaaaagtgctttaaaaacctcttaatgagatttggccgatccaaacacttggtaaggttttgaaagtgaaaaataggcccacacccagctagaatattatagaacattccatctagaaacaaatttcaaaatagcaatactgagttggggtggggagggagcaacccacccagaagcagttttgcttcaggagattctaaaatctccttatacacttttttatattaattactcagatgcaagcttgtcttcaaaaataaaatgtttacggagtaaacatccagaggcgctgcagagccccggcgcctcccgaaggcaga

SEQ ID NO: 33224 - DNA, 482 bp, Mus musculus
  source 1..482: mol_type = other DNA
actacaatagtgtatacgttattgataacagtgcaattagcgattctcatttacttagagctcaatattttagtcactatctcctaaaagacaaatgtcactgtcatatccagtttgtggctaaggaagttgctcacacagcgactcaactgactaaccacacacatctgtggccggcctgtgttttatatttttaaaaattgaaaatcggaattctacaggaattcagctcggggctgcggcgggcgggcgggaggccaaaatcccggtcccggtacgcagccgtgggagctcaccgcggcgggggcgccggccttggtcgccacggcccgtgctcagttccgggttcccgaaaaggaaccacgacggcgcagtcctcgcttatctccccctcacaggcgccgccatggctcgagagaggctgccgcctcgggcggactgccgattggtcaatcccaacgtctgccttcgggaggcgccgg

SEQ ID NO: 33225 - DNA, 363 bp, Mus musculus
  source 1..363: mol_type = other DNA
agcaaggtttcatataacccaggttggaggtgctatcaccaggagctctctctctctctctgtgtgtgtgtgtgtggtgcaatgccccccatatagccatgtcacaatgtgaaccaggctgtgtgcacctaaaccgcttactgactttatcaagtgttttctttgaaagttgcacagtgcaactatctttgttatgcagtccaagatgaccttggccttcatccgctgcatcgcaggcagtcatactcacagtgtccgccgctgcaccaccctgcttcctgcaacctggcgagcccgcccgcggagggggcacatccgcgctcccacttcctcccgacgcagcctgtgattggctcgcagcct

SEQ ID NO: 33226 - DNA, 447 bp, Mus musculus
  source 1..447: mol_type = other DNA
cacactgtgaacctgagattgtgaactgtttctaactgtgctcagccctagcaaagccctttaaaggattctttccttctctgcctctcagagctaggaagttatcatctcagcatctggctcctgagttttcattggtaaaattgaacagctgggatttctgttttttaaaacagttttaaaaaacaaacaaacaaacaaacaaacaaactttgtgtgtgtgtgtttcaccccaccatggaagctgtggtgtcctagcacttgcaaatgtctatagcaatgagtcattgttgccttcagcagtctctggctcctgtgacgccttaaattcaggagatcctgcagctccttcaggtgctccagcagttcatagatgggttagatctcagagcgctggatctaggctttccagcaccatcagggcgagctctcctagctgaacagtaa

SEQ ID NO: 33227 - DNA, 365 bp, Mus musculus
  source 1..365: mol_type = other DNA
gaggtgctgaacagttcctgttaatgagcaggaaccatgaagaggctctgagctctcaaagggtcttctcggattcccagatctgaacagcagatgcgcaggtcgttctcgaaacgctagcccttattaatttgtcaaatggctcaggcatctcagatgttcttctaagtagctgatctctccaaaccaagcttttaagaagtcagcctggcagcacaggctgcttctgccacaccaagtcctagggctgggatttagaacagccagctctggttttgatctgtgatctcagagcagattctgggtttaaaatccaacacccactggggtgtgtttgatttgaatacaaatagaagctaggggaa

SEQ ID NO: 33228 - DNA, 418 bp, Mus musculus
  source 1..418: mol_type = other DNA
ctcaatgtaattattttaaaaatgtacttagtggcacctcatggactctgatgcccaaggatgccagaagaggtgtctgactccctgggcctgtagtacaactacagctgtgagccctcaattggatgctgggaatctaacccaggtcccctggaagagcagcagataaatttagtttagttttttgttttttttaattaaacattaaactttgaaaggaaagactcctttgctttcaaccatttacgttaaatataatgatcagtgctgtaaccaccaggcagggctcagtcagtgagcctttgagtctgattaagccaggaagtggttactccctgagagtgttagagtctaacccatggtggaacagagtaaatattgtctacagtctctaagaaacttgtgaggcctgcctggc

SEQ ID NO: 33229 - DNA, 684 bp, Mus musculus
  source 1..684: mol_type = other DNA
gtacaacaagagtgacagaacccttttggtctttgtttattcagaataactataacagaggagggtaaattatttgatctaatatccctgcttctagactatgcagcaggaatatagtatatatttaattcatacacaatcgatagctagtaggtgtgtaaagacacttgcccaccgtgtctgacaaccagagttggagtcccagaacccgtgtaaggtagacaggacttttaagtttctaaaactcaccatggcatgtgtatacctgaggtcacacacacattcatttttacaatagaaataaagtatgcccaaactaaatattaataaaaactagaaggaactgtctttagtctttcgagtaaagagaactgagacaatagacatttaaattttggtatcataaaatttgcttatgcaaaatgaaaaaaaaaatcactgaaagattcttctgggaattacaattggaaaaggaaatatgtgttataagtgaaaaataacaagtcagctttagtaattactgagcaaatactgcatttgcagtgatgattccagaacagacaagagaagccccgctgtgtgtagcctggcttggcttatggtaaagggaggcctcgccgagctaccgcgagcttgctcttggggcccgaatccccatgtggtcccgacatcattgacatggcg

SEQ ID NO: 33230 - DNA, 761 bp, Mus musculus
  source 1..761: mol_type = other DNA
cctggcttggctggtaaagggaggcctcgccgagctaccgcgagcttgctcttggggcccgaatccccatgtggtcccgacatcattgacatggcgcagcggcggcggccggaggaggcggcggagagcagcggcgggagcggcgcaggggacggcggggatcccgcgggcggctggctgggacggcgtgggcgacccggattgcgggcacccggagccccgtttcagcctgggcgtgcgggagcggcggcgggctgccgggggacgtgccacccacagtcgctctcgggtccctgcgcttcggagcccggccggactccgagtctgcacgagtgcgctcccggccccggagcactcggggatgcccgaggaaaacttggctgccgagtcccggtcgcgccccgaccgctcggctgcccgaagctcccggccgggtagggggcgacccctccagcccccgctcgctcgggaagaaagcggaggatgcggggctcgcagttcccctcctccccgggccgtcgctccgaggaatccgctcccccgcccagatccccgcggcaggaccgctgcctgggagggggagggcgcgcggccaggccgaggaatcttcgaccttggcccccttgggggtgccgggctgtgacccgggacccgggatgctcgcggggagggtccctgggcgaccggtcgcccccgcccccgccggggcctcttggggacactccccgcccgtccccgtcctgccccctgggctccccccg

SEQ ID NO: 33231 - DNA, 280 bp, Mus musculus
  source 1..280: mol_type = other DNA
tgcatgtgcatgtcactgctgcagaagctcagagctatgattgccaaagatggtaaaactcccagcacagctgagaaagctggcatgcaggaagcaatggctataagcctctaaaagccagtggatcttagggactttctttctaaagtcagttccttttagtgaagttaaaattgtagctatttgacaatcttctcaggaaatgacattgtgaatgctaggttctcctgtgttacacacagtcatctgacagttttcttaatccattaagatatcatag

SEQ ID NO: 33232 - DNA, 299 bp, Mus musculus
  source 1..299: mol_type = other DNA
ccagttttggaactgacttgtgttcaaaattatattcccaaaggatagttactgtgcccagtactgataaggatcatgtagtttgagttctacctgttcttcatggcccacacacacacacacacagagagagagagagagagttggtgggatttgcaggaaggccacagttgcttgtaacttgcgggccagtcttggacaaggcgtgcgcccctgcgccggaggccggcggcagaggctgtcaccgaggctggccggcgccgccccgccccaccctgcagaccggccgagttccgggc

SEQ ID NO: 33233 - DNA, 451 bp, Mus musculus
  source 1..451: mol_type = other DNA
attaagaaacagtaatgatgcatttgaaaatatctttttaaggagatatggtggttgtaaatttaaggctagcctagtctacagaataacacagagaaactttgtttgtttgtttgttgccagaggatggcacctgggagccggttctctcctgcttgaactcaggccatcagtcttggcagcaagcgccatctttttatcctacaaatatatcttaataagatttatacaaaacagatttttcttgtgacctatattaatatttgagcatttgtaatgaagttttcagcttgttctatattatgtaaaaaatggaaagctagcgacagtatgagtctgactctcagaaacaataatgctgtatatcttattatacagtctgaagttacagtgctgtatgtttctggcgcaaccagtgcaaaactgaagccttaaagcttataggctaaag

SEQ ID NO: 33234 - DNA, 319 bp, Mus musculus
  source 1..319: mol_type = other DNA
ccatccagatggactgtgtggatggcagtgaccacagctggcagtcccagggaagctacccaaactttggtatctcccccagtatttttgtatcagatgccacaggggattcctaggaagaaataataacagtagaaagcacattgccactatctactgagaactttttcagtgtgctatcttccctattttatcaggctttgaccacactctgtggccacagagcccacagaactaattttctgcagaacaaactgctctgtgccctttatcaggctgaaagtaacttaaatgtataaccaggtagagtgagcactct

SEQ ID NO: 33235 - DNA, 423 bp, Mus musculus
  source 1..423: mol_type = other DNA
tccgtggggaattgcggcacgcgcaggtcttgggtgtggcgatatccagacaggtggccacagccaggctgccggctcggcgcgtgtgagcttctccccaactcgctctgcgcggggaggcggatccccttccctgcgcaccaccctccagccccacaaataattaatgggggagggaggacgctgctgccttttcccgctgcctctttaaaaatatatattcagcattggctcaaaaacggctgtttagattcagcactatgctggggcggaaagggtgcgtacccctcccccaccctggctagtggcggagggacccggtcaggaagcgcggcctctccccagtcggagaccacgcctaggaagcggtgatagacgtgtggttctccacccccacctcccagctgagtggaggagttgata

SEQ ID NO: 33236 - DNA, 511 bp, Mus musculus
  source 1..511: mol_type = other DNA
cgcatgcaggagtggagctctgaaaacttttccagcccagtgaaggcgacaccagcgcccagccggcaggtccagccacgaccttcctgcgccgggatgcggggcccggcgcctccctccgtcccatccccgctgccaaggtatcagccaggccgcaggttcggggaagactgggacaggagcacccggccggttgcacctggccctcagtgcgcctaggacccgcagcggcgccgccctggcatcccggttcggcccagcggtaaagggccctagctccggcggtcccgcgcttgccgacccggcccgcaccgcacgcctttgctgcgtccgccggtccctgcggctgcggcggcgctggcggccgcggctggtccaggagacggggcggggccgccacgcttcccacacccggctccccgccccggcccgcccagcccgggcccgccccgccgcgaccacacttccgggataggccccggcgcgccacaggccccgcctctcacgtgaa

SEQ ID NO: 33237 - DNA, 498 bp, Mus musculus
  source 1..498: mol_type = other DNA
ggtttaaaccaatgtttcaattcgaaactaagtaccttccaagtgtaagcttattttagtagagaaatcttgcttgattatgaagaactgcttcctactgtaactgatgttatttccaatttcaaattaaaacacccacctgggtgcttttcaagttttatctgaacttaaaacaccatttttaggtctttaattgtaattggtccaaacagagtctgagtgaatgactcgctcactgccgtgcattactcagcaaccttatttttaacaattttggttatagtgactttccaaatgtttaaacacagggtgccgccgatactaagctagtcgcgggcccggctcccgccgcgcaggccgcacggcactcacggacggctccgcaacccggacgtcccagtcgagccgccaggcgcgcgcgcgggaacgggcttgcgccgcacgcacgcttttatataaaaacgtgctgcgtcatacgcagagcgtgcgaaatacgca

SEQ ID NO: 33238 - DNA, 454 bp, Mus musculus
  source 1..454: mol_type = other DNA
acaagaggcagagaagccatttgcttctagacaacacaaatgaaatgtgttcccaaatcactgaacaacatgaactgggttgtggttctcgagaatctttgtctttaatcatttaacaacaaaaacaaaaacaggtcaccgtagagtctcgggtcgagctccaagcacggattccagccccaaggagggctgcaagctgtaccagaagcttgaatcaatcttgcaaaatcagcaggacttgagagtttgaaatccacgcacctgcgtgctagggcccagagcaaggtcaactgggcgccggcgaagcttcaaacagtcgactgcaggcagctctgcacgcttcacgtgagaggcggggcctgtggcgcgccggggcctatcccggaagtgtggtcgcggcggggcgggcccgggctgggcgggccggggcggggagccgggtgtgggaagcgtg

SEQ ID NO: 33239 - DNA, 313 bp, Mus musculus
  source 1..313: mol_type = other DNA
caaaacaaaaattttaaatgtcaattaatggcctattttcaaaatatctaatgatcattttgatctgcagaacagtgaacatttggaacgaaaagtttttgtgattcttaaggcaaaaagattttaaaatttaatgaaattgatttcttctaaaaaaccgctcaaaattcaaatgcttttttactttctggctgtttgtaagtttgcaaagtccacagccagagtcggctccggcttcccactcgaagacgcaggcggaatgcgtatttcgcacgctctgcgtatgacgcagcacgtttttatataaaagcgt

SEQ ID NO: 33240 - DNA, 316 bp, Mus musculus
  source 1..316: mol_type = other DNA
aataaagattttaaagactgcttttcttttaatatatgttcatttcaaatgagttcacattgttaataaacctgagttttcatgtatatatttgatagtttaaaaaaagaattaggtattgagaatggttgagaatgttttgcaaaaaattctttctcttcttgaacaggtattattcctgaaattatcatatcatgtatatttttatgaagatctgctatttaatatagatacctatggttcaacaattgttaaaagaatattttttcaaagctaaaagattgaaagacacagaaggctcttgtgcccttgtcag

SEQ ID NO: 33241 - DNA, 488 bp, Mus musculus
  source 1..488: mol_type = other DNA
cagacagcagctggcgccaggcaaaggcatagcctccggcctgagaagctactggctagctgcgcatctttggcagcactggccagcaccacagccgaagcttctggattcgagcagacgctgtccccttctggaagggccttggggggctagccgcctcgcgattatctcgcttttcaatatccaggacttctggatgcgccagcgatgtgtgcagcaactgtcgatttggcagcaaactggctcagagcggtgctccgactgtcttcacagcctccaggtgggagggagcgagaaagaatcaaaagtcagcttgcttttgctctctgaacatgatgtagcatgctagatgcttccccagccaccgcccggagccgggccgcctgacagcccaaggagcgcgtggtggccaagggggcaagcgctccggaggggctggggccagagggcggcgagcgcgttgccatggtaccggggggctgcaggac

SEQ ID NO: 33242 - DNA, 545 bp, Mus musculus
  source 1..545: mol_type = other DNA
cacatattgatattggctatagaatgatgccaggaacagcatgagcctcatcccgtagaagagttatctatatgatgtgcacaacagttgtcataattgtgattaaaccatagtattcttgactagacatgaattaagtcaaatgaattattacttgacttaactgcagggaaagagcatttcagctgtgcagtatttgcattcaagtatagagtctgcatttgaaggctttcttccttaaagaaatgactgtttcaaattatgatgactacagaatagccagaaatatttcaatcttcactcttttgatgacttcatttacttttgaattttgagactacatcacaatacctaaagaagaaaagaaattgttttctggctttgatgttcaaatgtcaagacaataattttttctgttacaaaatgatgactgtctggaaaatattttttctattaatattataggatttttagggacagttcatttgaatggccacaagagagtgaaattaaagctcactcagtgactcagagtcacactgatg

SEQ ID NO: 33243 - DNA, 412 bp, Mus musculus
  source 1..412: mol_type = other DNA
taaaggaaactggtgaagccgcttaaatgcttccctggtctcatcatatgctagacatggaaattacatactgtgcacataaaattataggtgtaattttatttcgtgttaacatcctgctccactgaacagggaggctaattaaaaaaaaatcatttccaaagaatgtctctctcttttttttttaacataatgttacacgattattcatgtctcagtcacctcaaatctgagtaagatttttcaaaagctgttaagcttcaaaataacaacaataataatttctttaggtggacttgagaaaaaggccctttcaaaaagtccgaatgtgactttctcaaggcaacacacgcagttggccagtgaagctgttacttggcaatgcttggctggtgccaggaattctgacttt

SEQ ID NO: 33244 - DNA, 403 bp, Mus musculus
  source 1..403: mol_type = other DNA
tcccaaacttattataaagttatctaatatataaaatatgaatcactaaattttgaataacttagaaaatattctcaatctactacaatctatttgtgagagagatatgaaaataatgctttagattttaagatttttaaaatgtacacaaaaggaataaatttaagtagaaacttaaattatattttattttaaaatatgcttaactggaaactggaaatgtgtgagttttcacttgcctggggaggcacccttctctctctctctctctcacacacacacacacacaagagatttccctggggaaacaaatcctgcctggagaaatttccccattggttgtttatcagaggaggctgctgtcactttaaaaatttactgaaagaggagcccgcctttaaag

SEQ ID NO: 33245 - DNA, 376 bp, Mus musculus
  source 1..376: mol_type = other DNA
gtattcaaatagtcatatgtggctagtgactctataatttaatttgccttccgaatttgcattcaagtcagaggcttattttaactctagtagcatgaaataagaaaataccagattctgcttatttagatctcagcagtgatgtttaccagacacatatccttccttcttttaaaaaaaccaggcattattttaaagtgacactaatttttattgatctctgaagagctttggaacctttaagtacttcctgcatagaggccctcctccatgtaacctgctgataagtagcacttcctgctgcctgtagtaaacatgaagattactggctgcatacacccttcacacgggccgcctgaagggaccgcagggttcc

SEQ ID NO: 33246 - DNA, 678 bp, Mus musculus
  source 1..678: mol_type = other DNA
tctgaaacattttttcaatgagaaaaattgaggtgaagaaaggattgaagatattctaactcagcttctggactccataggctatcgcatgtgtgaacatagatgcatacatgtgtataccacatacataaacaaattaaaaaatagaaagtgtattttgggtactgtaatcaagaagacgattgaatcccaaccttactatttcattacctgggaattttctggcatagtctgaacttgtggagcctcagcacccttaggtatagaaggtcaataataatttactctgctttgtttttctccataaaagaggacatgtgtgttagctcttatatgccacaaagagctatgcaaattaaataatctagaatatgagtattgatgtacactgcattgaggtcttggctggatgaccataaagcagctacatgacccactggagactacttgtcacaatgagaataaatatatataatatgtcttcattaaagatgaacacttcagacaggtgacctgtttgctaggtctcttcacctgaagtgtaggtagagcccaggaagttaatgggaacctgtattcttttccatcctgaaataaaggcagagtaggcatttcaatgctcataaaaggtaatagagaagtgatttcatacaactcttcgaagaggagttctgctgc

SEQ ID NO: 33247 - DNA, 313 bp, Mus musculus
  source 1..313: mol_type = other DNA
tgtgtgctgttttaaagcccctaaagaaacctgaacttcataatgatctaaggcatttatattcttaccaatggaattccgctgagtaaatgcaccatcttacaaaacccaaaaggttttgcctttttgtgtatatctttagaaaggacaggaaagatgtaacgttgtttactttactatacagaacataaactaagagaatttttttttaatagacattcagcgtgtttgagaaaggttcttaggagcagtgtcatgcgggccagcagatggccgggtcctctgtgacgcgcacctgtcaccgcacagcctg

SEQ ID NO: 33248 - DNA, 182 bp, Mus musculus
  source 1..182: mol_type = other DNA
gccggaaggtgccggccgaccttaggcaaggcaggaggtcggccgcagagctctgaagttcaaacggaaagatttatcctaaagtttttacaatgtaatttatggtggagaaaacattaataataattataatgcaggtcgctccaaactttttttggcggcgctgatgttggaggggcgtc

SEQ ID NO: 33249 - DNA, 510 bp, Mus musculus
  source 1..510: mol_type = other DNA
aattgcaaacaagttcaaacttttaaatagtctcagcctgttaagttaactgttaatattttttctctctcctcattgaaaaatgcataaaccttaaacaggtgtgaaacgtatatgaggttcgaaaccgggcggaaacatatcttttaaaacggtaaccccttgaatcagctgttttaatgttgtagctactgattcaaattttgttcttaatttatatgtcaacttcactaaatatttcagaattaacacattatcgaaagggtttgacaatgaaataatttatactcagacatataaaaaagtagcctcaacatttttcttataaaaacgactcgtggttttattcacaaattcttgtatggaaaaaactctcagagtttttgagactgtcttttaaataaagtcacaggtaaattccttaaaaagcataaacgtaacttataccaacaaacgtttcagttgtgaaaacttaactttctaaaattattctggttcagacgtaggaaa

SEQ ID NO: 33250 - DNA, 493 bp, Mus musculus
  source 1..493: mol_type = other DNA
tctcagacatataaaaaagtagcctcaacatttttcttataaaaacgactcgtggttttattcacaaattcttgtatggaaaaaactctcagagtttttgagactgtcttttaaataaagtcacaggtaaattccttaaaaagcataaacgtaacttataccaacaaacgtttcagttgtgaaaacttaactttctaaaattattctggttcagacgtaggaaaaacagaattctgggggtcccaagagctttcggatatgcaaaaaggaaggagtgattggtctcgacttaagcatatccctccatctccactggagctcccagcatgcagcgcgcagcgcggttcccggagaggccggctctgcactcaagcccggtctccatccagaatctgggccgacagctgcgggctgacaaggtgagcagctcgcaccggaacctgggcatgccgggaagtcagggctctgagacccagctcgccggccctagtag

SEQ ID NO: 33251 - DNA, 340 bp, Mus musculus
  source 1..340: mol_type = other DNA
ttcttctaccttcttaattcaaaagaatctgagacagaaaggggaacttagggactttcccaaggacttacatatttagttattcacatctcagattagtctggaagtcgccttctcaaggaaactcttccacttagcccttcggaaaaggtgagacaggctgggtcaccagggtttgtagtcctagtccctgatccaccatcagaatgtgtaacctagagcggataggcttaaagtgatgatcacaaaaggaagcttctgtggttgccatgggagcgactctacatcggggccgagccctgtgaggactgagcaggggcagactgttgaaaaagctcag

SEQ ID NO: 33252 - DNA, 417 bp, Mus musculus
  source 1..417: mol_type = other DNA
ccgtgactgagaaggctttaaaacaatagtctaaaagtagtggcaggatgtttaattcgttaaattcatggatgcactcaaagtgcacatggaattatatatatgaatggaaatgtcacaatgaaatcccttcttctatatgatatttaaaaaaaaataagataaagtgcagaaaaactctgaggagcttcttgcttatctgaggtaaattcaggggcgcagagccgagcaaagccactctcctcacgaagacaggggaccagcgttggtcaagggcggctcgctttgcggacctcgacctctaaagaggaaggccgccgtggctgagctttttcaacagtctgcccctgctcagtcctcacagggctcggccccgatgtagagtcgctcccatggcaaccacagaagcttcctttt

SEQ ID NO: 33253 - DNA, 392 bp, Mus musculus
  source 1..392: mol_type = other DNA
agtttgaatcagtcagcctaggttagattttacggaggctaggagcttccaggactaggcctaggttagcagactgaggagacagtaaaagttacatttacacaactttaattttaaactctaattttgtgctttgccctagtttagtacaagctatatattatactctataatatatggtatgttatcagaacaaactaacatgaactgcagaacaggacatgtttttaaagggttttcttactgtccacaaagaaaaaaaaattggaagcagctgttggttctagaaagttcatcttttttaaatgcttaaaattaaatcatgctgctctatagaaaatgaagctgagcagtgagaattaagcaacttagttggattcgtatttaaggga

SEQ ID NO: 33254 - DNA, 392 bp, Mus musculus
  source 1..392: mol_type = other DNA
gtttttgcagacacagttttgaagaaaaatgagtaaaatgttttctcagagtgagtgtagtaacttcctgctcaaaagactgtgtgctaagaagcacgcagaagctagttttctttccattttttcctgaagaggaacataaatatttatttatttatttatattagatattttctttatttacatttcaaatgtgctcaggaccaagggcctgtccttggtgtgctacatatgcagctggagccaggggaccttgtgctcagtccaaaggcactggcagagcctctcaggagacagctatatcaggctcctgtcagcaagctcttgacccagcaaatagcctggcaaggctcgttaactgggtgaatgcctgagccttgtacatcatctga

SEQ ID NO: 33255 - DNA, 475 bp, Mus musculus
  source 1..475: mol_type = other DNA
acgatctattttcaatttagaaaaacaaacagctgattggttcaagtgaaagaaattaaagaagccacaacattgttaagtactgttacatttttagttttcagaccatccaaatgaacttatacctatttaaaaaaaaaatcagtgaacttcctgctttttccatggcagggattgaacccagggctcttttttgtcttagatttttaagatgacaattgagaacgaaagagtggtttaatatttaaaattattccaaactgagaaacttaaggtacctcagacatgttttaatgcacatgaacatgacttggtctcttgttctaattaaactatcatattaattagatatcgctttagtcattaagaggataatcttatccactatataggaatagtttcccaaagactgcatttccacctttggaaatagtaagtaagtaaatcacttggaagattccaggactgcttcagt

SEQ ID NO: 33256 - DNA, 417 bp, Mus musculus
  source 1..417: mol_type = other DNA
ttaagcaagctatacttagactggctaaaggctgcctcatccaagttcaggtttcagaaagcagcccctcactggaaagcatggttttcaggatatcttaggttgaaagcttacccttgcaaggtatggggacaccatcccgagctgatgcagaggctgatgcagaggctgtgggcttgttcagtctgctttcttatagaaccaggatcatggggtttctgttttacattatatagtctaggatgactttgaatttttattcaaaacaacactttcttgaaagtattctagcaacttctacatagaccccgggctaagacaaagattctgagcctcagagttgaggtgggagggagcctggcagtcgctggcctcacgtgacctctgcgccccccctcttggctcttgcagggggaa

SEQ ID NO: 33257 - DNA, 483 bp, Mus musculus
  source 1..483: mol_type = other DNA
tggggagctctgggctgctgagctgggagatgggcacaccccagttccccagccagggtacctttactgccctgtcaggccataagcttgccatgtgctaaatgtttaaataactaacaggccataggctctcaacaaatatttgctgagttaataaaagaaatgcaatatatgttatcgcagactttaattttgaaaaatcagaatttatagtgcactaaggtaactgcttaggagcatttcaaactgggattagatcctcagggggcgtcctacgcactgtcaactcggaagtgcccgcatgcaagctgttttttccatggatggaagaccacagtgtggagtcacgcaccttaccctgagcagtctgggcctgacggggcggggcgagcggaggtgagcctcgcgtggccccgcccctcgaggggactcacctggggcgggcggggcgtgggtgggcggggcgagcggaggtgagcgacg

SEQ ID NO: 33258 - DNA, 625 bp, Mus musculus
  source 1..625: mol_type = other DNA
actacatattattatgtcagatatatgaaatagaaaactttaaggattttgaaattaagtttacaatgcaaaactgaaaaaaacaaacaggctaccaggttccatgatgtttcatcccatgtacacgcaaagtggatttaaaatgattaactgactcaagggatagaattaaactttattggttttatctgtacctaagcacttaactacccatgtctttggttctggatatagaagtggcctgcagtctactgcatcccagccttctggagtctaaagactctgtgccacggggctcgctggggcaggaagcgccacaggtgacgctgtgcgccccggtggtcccggcggcgtcagcgactctgaggggcggggcccgggcacgcagccaggtgactcgggcgttcagtcagggctgagagccgacgcgacttgccagcctccagcgctctgactcacgtggcgccggcctccgggaccagaagcagaagcagcccgcgtcgtccgccaccgcacggacggcgggaagaccacggaggccgcccccagcccagagcccgcggcgggttacataacgggccgcgagccgccgcgctctcgcgagatctcagccgccccctccccg

SEQ ID NO: 33259 - DNA, 444 bp, Mus musculus
  source 1..444: mol_type = other DNA
tgcacacgcacacacacacatactatttcagtgtttgtgggttacttatgctttaggtaaaagtaaagtcagagcatattatcatcaagggaagtatcatttgagctttccttgcgatcattgacttgctaggaacaaatttattattagtttgggtcatctcatttgacacagatttctctgatatgaagcatgtgtttgagcaggcgtcctcttgtcgggctgcattcttgcttccagacagaaagcaggtaaggctaaaggataacaagtgtcattaggtgtcatactttttggcatgttatataagaagactccataattcttgaagtaggaggactacttataatttcctgctacaatcagtgataccctcgccttatgacataatgtctcattacctgaagtgacatttaaacatgacgggtcacatgtgtccactaa

SEQ ID NO: 33260 - DNA, 421 bp, Mus musculus
  source 1..421: mol_type = other DNA
atatctttgcttatttcaacaatttgcacatgttgctacctggtggctagattcaagctaccttaagggtattttttttctaattctcgaccagactagtgtaagtaaaataaattaatgaactgacacactagttaagtattcactgggcacattattaaattctccccgaaaaggatttgctgagcaggtaatcaaatcttgttcccgaactgtttaatttcaatgatcaatgaaattgacatggagaatttaattggaaggagattctacgttttgtagaaatccttccatttaaaggcgtggtttacaattacttatattaatatccaagtatactcttctcccccccgtgaggatgagagcgccggggctccgcgactcctgagcccgccctgccgcggaatgcggccttgggagc

SEQ ID NO: 33261 - DNA, 435 bp, Mus musculus
  source 1..435: mol_type = other DNA
cttctgtgtagaattgacagttgtccccactgcaaagtgtggacaattcagtaacacatgcacttatcaagtattaataacagtgagtaatcgtcaccattattgtgaccagagttaattctgctggcatctgtgtacacacgtgtgcacgacttagtaagcaccatggcgtgccagcgcagtaagggccctcacttactaagctatttccttaggggcataggaaaatgtactaggtagagagagactacttctcttggacgcgcccccttcactctgcgggtccctatcgggatgggattaatttaattcccagcgagccgtggggcagcctgctgcccctccaccgaagcctggcttgcgattggccggctcgtctcgggggctgtcgcggattggcgcttgccagcccgggccccggagtttaaagagggg

SEQ ID NO: 33262 - DNA, 824 bp, Mus musculus
  source 1..824: mol_type = other DNA
atggcggccgggtcaggccaccccagagcggccaggcggggctgctcaccggcagctggcagggcggccgcggcgggaggccccacgggggcgagaggccccgcgacgtcggcactgggcgggggggggcggtggcagcgcgggggcgtctgcgcggcgggctcagcccgggggtcgcggcggggagccacccgcaggccacctccggggcggggccgggcggccagctgcggccgcgggggttgaggggggctgctggccgagcctgacctcgggcgcggccagctgccggggtcgcgcacagtgcagcccgccgcgccctgccccctcaccccccccgcctcgcagcgcggcggcccggcggccagggcgcccccaggtctggcccgtcgccacacggcggcgggcgtggcgagggcggccccagacagccggctgacctgtctgagccgggcaccgcagacagcgccgtgcgccagccgcccagacggcgcgccgggccagcagcgcggggtacgcgcgaggggggcgggggagcgggagcacgcgcgtgcgcggccgaggcgccaggcgcgcgccccggtcggggctggggacgcgcgcgcagcctgcagtgtgcagcccgccgggagccacaataggccagacggcgcgcgcgcccgaggggctggctggcgcggggccgcgcggcgccgctggcttcgttccctcccctcccccgcccgccgccctcgctgtcccccgggcggccggagacggcggcggcgtctgcgggaagccgtgtctccgcagtgacgtgggcgggccgcgggccgggtgacgtc

SEQ ID NO: 33263 - DNA, 314 bp, Mus musculus
  source 1..314: mol_type = other DNA
tccgaaatatcccatcccatgcagcagggtagcatagcagagggtagtgccctatcctgtctggttccaggaaaactctttcctatatacctacattagtcagtttttaagcagattattctaagactcttgaaaatttttttaatttaattttattttaattatgtattttctggactaggccatctttagctgacgtttgctaggccccggcaaagcctctcaagagacagctatatcagggtcctttcagctcttgctagtgtgtgcaggatctccaaagactcttgaaatttaaggatctttctcatcag

SEQ ID NO: 33264 - DNA, 398 bp, Mus musculus
  source 1..398: mol_type = other DNA
ttccatagtaactactatataactatggttctggcaagaactttgtttttgcattcctgtccggaaaaacacttttcagagtgatgtgtgtttgcacacacagaacagcctcctctctttccatggagagagcagtgtcatctgttttctgatgcataactagaaataatgtctttttctaacttgggaaagcaagagtcccttgctgggactaacaggatcacttggggattccaagggtgtttactcccaagttcaccctcctagagagagcttccgaagttagaggatttggaaatctaatctagtaggtgagctaggagggaagtcagatcaggctccgctcccttttcagtatgagcctattacagtatttaataaaaacagaagcagcgtgc

SEQ ID NO: 33265 - DNA, 278 bp, Mus musculus
  source 1..278: mol_type = other DNA
cagccagggcccagcatggtccgcttttaaaaccactattaggctgttagtttatggtttacacaataaccacacacctgcaatccatcccttgaaggtatcccggggacttctgcagtccttctaggctggggcagctccgaggagccatcagggccagggtaccctttcgagtcgctgttccgcacctgctcggcgtcccgggtctgcgggagcagccgcttgtccgtgcacatgcgcagtagcgctgccgggagctccgccgccgccgccgccgc

SEQ ID NO: 33266 - DNA, 353 bp, Mus musculus
  source 1..353: mol_type = other DNA
tgtccgggccatgcaaacttagtaacttttatttctcatagaagaggtttaacataaataacatgcttcttgttttctgaaatgtattattattttaatagaggcaagagaaagactctcacttaccgatctctgcgtgtgtctagcactcctaggagatgttcatttcaatagattgaaaatccttgtagatcttcacaaatccatgaaatgttgtggactctaaactagatctaacctccccatcccttgtttacagtgacagtgaggtggagggaccaagaccacctcaaggaggtagtgagcaggccttggcagaagactgcccgggctcctctgctccaagcaccaga

SEQ ID NO: 33267 - DNA, 251 bp, Mus musculus
  source 1..251: mol_type = other DNA
ttacacgtgagctcagacgacctgaatcccctattgttgcttgtaacgctgagggctcacacctcagcacaaaaacaatgttcacagttatttatgctcaggatttaaatgacagaatgcaatcctttgtgatatgcggaggcttcacatccctttgtgcatgctttctctagaagagaaataaaactctcttaacttgatcctgaagaccctgaggatcgaccacggcccggatgtgcccgtaggatgaa

SEQ ID NO: 33268 - DNA, 274 bp, Mus musculus
  source 1..274: mol_type = other DNA
ttttctccagatattcccagtaacagtcctgaaatgacctgagaaatgacatcctttcaaatgttttaagaattcatgaagtaggcattttattttatcaccctcgatcaatcaatcaatggtttaacaagattccattcctaacaaagtttaaatcatgaacaattaattttcttgagtaatacctcttacagtaactatgtggttttggggtgcctttgagctttgaaaactctgaagggtccgaagcgccggaagtagccgcccctagccc

SEQ ID NO: 33269 - DNA, 395 bp, Mus musculus
  source 1..395: mol_type = other DNA
attgtttgacgtcagaaagagaatgctatagcaaccgtctgtcaaatgctggctgcagactgcatctgtggctctcctggctcaaccctgcagcccgccagagcagagcagcctaggccaggcccaggcgtctgcaggggatgcgctttccgcttcccaaagccgcagaagctgcacgccttgccagcgcccaccccctgcaccctggcccaggccacgcgcgcgcccccgcgcgttctgggttccccgagcccctgcaagcgccccccgccccgaccgcgctcgctcccgccagccccgacccgagccacgcgcgccgctctctcggcgcgttcccggcctcgcgcgcccccgcccccgcccccgcccagcgcgccgcgcccgggtccccgccc

SEQ ID NO: 33270 - DNA, 422 bp, Mus musculus
  source 1..422: mol_type = other DNA
ctatctgcgggttggaaccagctgcaggtgccacgcaccctgattctgccctgagcccagcgacgcagtgcaagcctgcaatcccagccctcgggagccgggacaagtgcagcctcggatccccgagaccgcagttgcccttggagacgcgggcagcagctccatgcctgcctagcctggcagcgagggagcagcgcccagcatggcgtggcaaggcgcttcgcaaacgctgagcttacaagggaggccagtcttcggaaagctccgcgtgaactccgagcgcggcggcaagacagcgctgtcagcgcggagaccgaagcccgctgcagcaggctcatggccgccatggctacaccgttcctgcgagcttcacaggcaggcgctcccaaacctcacgccgccagcggaagtgacctcgtgga

SEQ ID NO: 33271 - DNA, 352 bp, Mus musculus
  source 1..352: mol_type = other DNA
gttatatagatcaggctatctaaggcctatgaatagtgctccacttggtgaatgattttcacagaaatgaaagaaactgaagtcatgatttttaaatgctatctaaatctagctggaaaaatgtactgtcttttaatataaatagccattgtttaaaatgatggatcctattattatatctgatttgctgattaattcaaagtgaagtgcacatttctttttcaagtataaatgttagttgaagtatttctgcttaaaaaaaaaaaaattccgaatagattccttgcactcaagttcctttggctcctggggagcagtcggtccaccctaccggccgctcgcgaagggggtt

SEQ ID NO: 33272 - DNA, 416 bp, Mus musculus
  source 1..416: mol_type = other DNA
gaaatcatttattcaagtttgccaccctgatcaaattacaactctgcaaggttttaaaaagctaatttgcaaagttagtgtaataatatagaagagactgcttccttcaattaactgttggcaagtgtcagtgaagagtaagctgtcattctcacactcgcagacgcagcttctgttgcaaccgagggaagccttccggtccgaggaagcaccgagcagcggatgctcccaccgcccgcggcgacagaatcctgcaagaagcgagcagcgtccttgggatttactagggaacaagctgccttagactggtcgcagccatgtttctaatggagacccacagtgtcggtgtccacgaggtcacttccgctggcggcgtgaggtttgggagcgcctgcctgtgaagctcgcaggaacgg

SEQ ID NO: 33273 - DNA, 416 bp, Mus musculus; identical to SEQ ID NO: 33272
  source 1..416: mol_type = other DNA

SEQ ID NO: 33274 - DNA, 374 bp, Mus musculus
  source 1..374: mol_type = other DNA
caggatagtcttatctggagttattttaaagatagctaagtatttacttttttttttttaagaagatgatagacatgagagtagtagaattcctacagtctaccctcttttacagagctttgcatgtttaaaaaaagtactcctgagtcccacccacccctgggagggatcctgggcagttggggattacatccccgaggggccatggcgggtcgggaggcgtgcgtggggacccggggcctccctggttcccactcctgccgccctcgcggcatccccctccccggcgctgcggctggcgcgcgccccgcctgacgctgcagctgggccggcgactcgcatagcagctcccgcccgccggccggccggggcag

SEQ ID NO: 33275 - DNA, 433 bp, Mus musculus
  source 1..433: mol_type = other DNA
caaacaagtaatatcttttcatgtaaaggattttttttttaccactgagctacatccagactcaaactctgagcatttttataacttacattctaaaataagcaagttaccgatagcattgccatacaatttctcaagtgtcgtgatttatttaattcaagtgaacagatccatttttcaattagattcttgattggatagcatttcaaggcaatcttgttccaagctagatcaaacccagatagaatccaaaatgatgtcacttggatgacagccagcctgggctgaaagccttttacaggcaaggagacaatgtcagcaaactgtgactctcagacgctttcctcagatgcacttagtgaaaagaggggcctcacctccttgcctttgaaactctcagcttcagcatcttaccagagctgtgggtggggaa

SEQ ID NO: 33276 - DNA, 398 bp, Mus musculus
  source 1..398: mol_type = other DNA
gtgctagagagtagaaacataattctaaatccagactcactggccagcaacagatgtgtatatacatacacatcctgaggaatacttgcatgttcacacatgtacctgcacacaaatgagcacaagtaatgtaaccttttctctttttaggtgtgatttgaagaggctgtattcaaaacatagcatctaaaaatgcttccctaaaaatgtatttttactggaagcgtactcagcctctgaaaccataggagactgcttgaggcacctctcaggttgcttctggaagggattagtggattaaacactccttaaatccttcagacttttcagaagacatatgtatttaactatttaagagacagttcttaacacttagctcaaagctccttggctctcat

SEQ ID NO: 33277 - DNA, 293 bp, Mus musculus
  source 1..293: mol_type = other DNA
tagttatttttaaaatggcaatggttagcaatatgatattcttgtgctttaaaacgtatttcaatatatggaacaggtcattcagcaaatatttgttgggtacctaccacctgccaggactatgctgtgctgggatatgctgatgtcatgaaaggagctcaatcaatcagcttaacaaaagcccagacatggcctatgcacaagcggagcaccgtccgggagcgcgctcgctggagccgccctcccgcccccggctccgcgagagcgcgcgcgccgggccagcggctctcggc

SEQ ID NO: 33278 - DNA, 267 bp, Mus musculus
  source 1..267: mol_type = other DNA
cttggagagtttttaagttaaaaaaatgctagcatgctgatttgtaagtgtagccagcaaacgctggccagttttaagtagtagtaggcagagcatgcgcgctgcgctttaaagctctccgggctggcgcctccagcccgtcggtctagcaggcagctatcctgaggggacgcgggcgccgccccgggcagacaggacctccgcgggcgcttcctgcgggttcccgtagtcccgccaggtctcgcgagactgaggcagctcgccgcc

SEQ ID NO: 33279 - DNA, 311 bp, Mus musculus
  source 1..311: mol_type = other DNA
ggcctaatagaatgaattaaggaccttgaagccaggtgctctgtacagagcactcagaaaataaagccttaatttttaaatttccatctctaaagtgagacagtctttggtgatgttttcatcaatgcattggaaaaatgccttgaattgcttccttttcttctgcaattacaaaaacgtagtgaatgtgttcccagatcatggtcccttatatatgacttaagaacaaatctgaagccacttttgggtattatactgtggtcctctggagcacccgagcttccagatttgcacgttttggaagtcctggg

SEQ ID NO: 33280 - DNA, 642 bp, Mus musculus
  source 1..642: mol_type = other DNA
atttgagctccaaagttatgtaaagatgcacatacaaatgaattcttttaagtactatttccaaaagccttgctttcagaagtttctagaactggtggcgtttctggtaaagtcacacaacacaaaacccaataggttcttggatcctcttactttcccattgtttaaaattttttaaaagtaatgccagctaggtttcccgagcctttaataacgtattaaggtaaccgtgctcggtacagagtgagctgccttcgcgcgaggcgaggcctgagaactgcgtgaggctcgggggaagccccgagtcccgggttcgtcctgggaaaggctcttcaaggggacggcccggagtgtcggccggccatgcgctctggccgagcccgagcgcccgccaggccgcgcttcctgacgggaagagcccgtagggagcgtcgccggccgcgcggatcctggggcgagggtggcgcgccgggcgggtccgcctcactcattgtgcgcgaggcgggccgcgcgggcgtgggcgtgggcggaccggcctgccgctgggtagccgcccaaggacccgcgcagagcggcgccgctagcggagagcccgggagcgggccgggagcgtcccgccctcccgcccgcccgcccctcccc

SEQ ID NO: 33281 - DNA, 303 bp, Mus musculus
  source 1..303: mol_type = other DNA
ttacagcctttatgcaaaaagacagctcctagtcactttccttctagtcattttcaggagctgtatttttaaaaaaaagactggaaaaaatcattttccatatcgtttctgatgtttatagatctaactacgttccaagccagaagaagaaagatgtctctgcaggccatgaagatcagccttgtggcttcttgacatctactggaagcctgtttttattggacttgcaagtcgggcagagggcatggccagtcccgccccagtccgacctctcctgcggcactttgtgcgacagttccgacg

SEQ ID NO: 33282 - DNA, 371 bp, Mus musculus
  source 1..371: mol_type = other DNA
aatgccacctccgcgcctcgcggtgggatgccaggaagttgcgtgaccctccccgggagcagagttccagctttgcctttgttccttgagccacacctgcggcctaggaaaaggctgggaacaaggcctggtcctagctctgctcctgaggcccgaggcttgggtctaacttctcggacagagcgcagtgccgcggagggcgggggggggggatacaaaggttccccagcggccggctgcgggcccgcctcccccgcgcggttcggggcacagcgctctgctgggctcggctcggcggcgcggcaggccccgccccctttggcgaggctgggctcgggcgcaggagccggcgctcgctgattggccgccgg

SEQ ID NO: 33283 - DNA, 449 bp, Mus musculus
  source 1..449: mol_type = other DNA
aagacagatttgtctaatcaccgtagcttagatttaggtttttgcagaatgttacttttcaaattacaaatgtctgacagtataaacttatccacacccttggcatgcttagcaattagctttccgaggaaagtctctccccttagcctttccagcttaattcatcaggatacaaactgtgaagcaattaaatgcctttgacaattaaaaaaattttttttaccaagtctataagaattttgtacaatttagtttgatcataatcattaatggtctgacctctgtgacagggcagagccaactcctcttcgaggagttgcagcctgagcgctcacgttttcgcgacaaaccgccccggaaaggggcgggcaaacccggcgagggcggggcggcgccgtgggggcgggcccatggcgggcgagggcggggcggcgccgtgggggcggcgg

SEQ ID NO: 33284 - DNA, 548 bp, Mus musculus
  source 1..548: mol_type = other DNA
atagtctaatgaagtgtagcaagagactgagtcctcttcgttaatattttaatcagcgcacacacacgcacacgcgcgcgcgcgtacacacacacactcgcattgatggtgtagcagtgccaaagatctgcctctgcagggctctgggagcccccaccacgtggctagttctaaacagttgttttaacagaaacttttatataaacctgggcaatcttcagggagtactgtatttcctcagcaggcaggctaggtcaagcttggcccgtccaccaggcatgaggacgcggccgtgacgagggcgccctgagtgggggcgcaggcagggccccggcgcttcgtcctcactgtgcccgcggccgcccgccgcgcgggtctcagcgtgtgtccgcagcccgggctgccgggtcgcccggccgctcgtgccacggatgccggcaggccaggccgcccaccccggggcccgcgccctccgcctcccgcggcccggccgctccgcgggccgccgcactgcgcatgagcgggagcccggcgagcccgtgagaggc

SEQ ID NO: 33285 - DNA, 350 bp, Mus musculus
  source 1..350: mol_type = other DNA
gaaaacctacaagctattgttgcaatagtctaatgaagtgtagcaagagactgagtcctcttcgttaatattttaatcagcgcacacacacgcacacgcgcgcgcgcgtacacacacacactcgcattgatggtgtagcagtgccaaagatctgcctctgcagggctctgggagcccccaccacgtggctagttctaaacagttgttttaacagaaacttttatataaacctgggcaatcttcagggagtactgtatttcctcagcaggcaggctaggtcaagcttggcccgtccaccaggcatgaggacgcggccgtgacgagggcgccctgagtgggggcgcaggcag

SEQ ID NO: 33286 - DNA, 257 bp, Mus musculus
  source 1..257: mol_type = other DNA
atataagatatccttcctgaaggaaggaattcatttctggtgaactcctttggccaatgggctttgtatccagactttctaaaagttcgaatctttcaagaaaacatcttagattttaaagacagtgcaggactactagcccagactggtctcgaacttggtctgcctcaggctggcctgggactcactgtctagtcaaatacctacacatagcttttacttttcctctcatgctctgtgctaaaaaaaaaaaaaaa

SEQ ID NO: 33287 - DNA, 367 bp, Mus musculus
  source 1..367: mol_type = other DNA
gttagctttaaaatcaccatgtaatcaagaagtacattaaattattaaagacttctttgatacttttccatgtgggcaaacatagctatgagcttttcacttagaactgattagtttttcagaagacagggtttctctgtatagccctggctgtcctgatttttagatttattgctaatatatggaattctttcaattattttgtaattgttaaaaatcacattaagaaactagcaaaaagataagcatgtcacttggtgctttgaaaaaatccaacagtttatcatgttcccatgcagtgaatatttgtactaacaaggaaaatactgaagaacttttacaaacttgctatatttgatagactccc

SEQ ID NO: 33288 - DNA, 529 bp, Mus musculus
  source 1..529: mol_type = other DNA
gcattgactgctcttcttcaattctcagcaaccacatggtggctcacaaccaggtgtgtctgtagacagcaatggtataaacaaacaaacaaacatggtgtttatagtttcataggtaggtcaccgagccaagggaaatgccttgccctggggactgtggccaataggaaacagcatgctcttagtgcttcatgcagtactatttaagaaagtgggttagtaaaataggtcccttgtcattttgttatacccatttagcaatattctaagtatgagaataacaaaagttgtacttctaggtttatttgatgaaatctaatctgctctttagaggatgtgctgagaatagcacacaggcacaatattttcgttttcttactggcaaaagtataacaagaaagaatgaattttaaaaaactacaatttctaaattacatactcagacattacatacagcaatgcttggcgtaggagacatttattaaacatattctgtcaggaagtgcgagctagcttccggttgcagcgg

SEQ ID NO: 33289 - DNA, 509 bp, Mus musculus
  source 1..509: mol_type = other DNA
atgtgtgcatgtatgtatatgtgtatatgtatgtatgtatgtatgtatacatatatgtatatgtgtgtgtgtgtgtgtgtgtaaccaattccacatatgatgatatgtttggttttattacaatcactgttttaactttaatatgaacagtagaaaattttaaattaagtaagtgtcttagtcagggtttctattcctgcacaaacatcatgaccaagaagcaagttggggaggaattccatactgctgttcatctgctagcttgctcagcttgctttcttaggggcctttcccccttgatcactaattgagaaaatgccttatctcatggaggcattactgtgtcaagttgacacaaaactagccatttttccccttttaaaatttgaaattcaaggacatgcgaataatatacatatatatgattcataaattggtctgactttatatacaatagtaaatgggaatgattcttacatgctgtgtttctgaagtccaggatcttggaa

SEQ ID NO: 33290 - DNA, 185 bp, Mus musculus
  source 1..185: mol_type = other DNA
ttacaaatttcttaagtacaattgatgcacgtgcgcgcagagacagagagagagtcaagtccctggatctgtgttgctgcatatttaagatacagctgatagcaggtgggtggctgctctgccccaatcctcgctcagatgttcccacctatagcagaacttttgagaacttcaaacatttgttg

SEQ ID NO: 33291 - DNA, 250 bp, Mus musculus
  source 1..250: mol_type = other DNA
cttccagactcaaaaacctgattttgatccttctagacaggctgagtttggaagtgaaaccatttccgctctgaggctttgacactgccaggtacagctcttaaaagagcacccctgggcctgcagcgcctccagcgtggcagggcgtgtcctgatgggggcgcggcccgggctgggacctaattaagtaccgtatccagggatgtggcagctgcctgggacaacgtggcgtggcggggccaggtcgggc

SEQ ID NO: 33292 - DNA, 382 bp, Mus musculus
  source 1..382: mol_type = other DNA
tttggttcactgcctttagcagaaaaagagaaagaaaaggcacagtcggttcctgttaaactggatttggggcggcctgattcaaccggctggttccggacactccgggcgcggtcacacggctaccatgatgcaagagagacagggtcactggagctctggtcccctgaccccaaaagggccctgagcccttggtggaggagtcgctcccgggactacggccacttaccaggcagtagagcgcagcgccctgggcagcccagcctagcccgacctggccccgccacgccacgttgtcccaggcagctgccacatccctggatacggtacttaattaggtcccagcccgggccgcgcccccatcaggacacgccctgccacg

SEQ ID NO: 33293 - DNA, 296 bp, Mus musculus
  source 1..296: mol_type = other DNA
accaataacaaagaacttcctttctcacagagcttcaccacggaggtgtgggtaattctctctctctcacacacacacacacacatggaaagcttttgtaaaatatcacattcgaaatgtcgaaatgtccttttggaaaagtgcaagtggcgctccccagtgagagtcttaaagacacctgcactgaagagctagcacagaagatctgcggcgctcgctggtcccgggtcgggcgctcctggggagccgcggaggccgggcggaccacagcggagctagcgtgcggagcctttcca

SEQ ID NO: 33294 - DNA, 365 bp, Mus musculus
  source 1..365: mol_type = other DNA
tcctgacaactggaacgtttcagagttgttaaatctttggggccaaggtctcagaccctgggccaagagctgtagcattttgttgctgccctggaagctgctagctagccatagccaagagctgggggaaatccctatctctgttagttccagtgatacacagtgagactctgtaattaaaataatcacctactgctgcctcactcgttgcgcaagctctgtctttaagcctgtcggtttaaatcagctcctcagtagactgtctcgagttcagtcagagacagagtgagattctgtctcaataaaggactgcactgcagatgctaatctccactgcgatgccgggccacgcccccgagcctgcg

SEQ ID NO: 33295 - DNA, 365 bp, Mus musculus
  source 1..365: mol_type = other DNA
ccagactggttgccaccaagcccaacgatcctcacacacacacacactacataaatacagtttatggggggttgtaagagcacttgctgctcttcttaacaaacacatgggagtcccaaggccctggcctccttagcatgtgatgcacattaatacaaaaataaatatttgaggggaaaatttgtgtttcattcagagctgaaggaacatgcatgagcgaagctccagcgaagctccaagcagatcgctggcccagcggcccagagctgggaggcagagaatgcgccccggttgccttggaaaccggccagcgtctgagccgcccccctttcctggtgcagctccccgggagagggcggggcttc

SEQ ID NO: 33296 - DNA, 387 bp, Mus musculus
  source 1..387: mol_type = other DNA
gaaatttgagtgaccttgaatttcaaagtgcattcccttaagttttaaaaataatggaggaggggcaagttccattccctgcaccctcgagatagacagatttgtggcttgctggcccacaacctagtctagtctaatccaggaacccctaggttccagaaagtttgacctctggtctccaccccagcacacatatgtgcacctgctgctggaccagcctgtgccagatgctgacttccatgccatcctgggccctcccttgaaaaacgcttcttgaaaagtacagaagctgtgaggcacagggatagcaatgctttgctttgaaaaatctagatagctgtgtctacagatgcatgagcgctgggcagggaaaccgcgccgtctcgc

SEQ ID NO: 33297 - DNA, 525 bp, Mus musculus
  source 1..525: mol_type = other DNA
ctcactagctgacttggactaacttgaattcagagatctgaaactctgggattaaaggtatgtaccacaatgcacttcatttctaaatgtaatatctaatttcttgtagtacaccacttgttatcaacaatagctcatgttggcattttaaattaacccatctttaacgcctttaatcccagatcagtgagctctgataacggatatcagtgacgtttccctatgttgtcgctcctgcctaggcgccacccagcgaccaggagaaggcgcttcaccccttagctgaggcgaaggccgacacctcgaggccccgagggcttgtctggaccgcccagcggctccggcaggatcctatgcagcagagatcggccgaaagcggccgcccgccccgccctcctctgcgcaggcgcgtcctcagggtcgggccttcgctcgcggcgaccggcgcttctggtgacgtcacggactccggacgccctcattggtttatttcaatagtcgcgggctacttgaactacaagacca

SEQ ID NO: 33298 - DNA, 490 bp, Mus musculus
  source 1..490: mol_type = other DNA
cactcactgtagaggaagtctgctgtgaattatatttgttttggggaaactgaatcatatctcagtcacttctagttcaaagaactgctaagactttatttatttatttattatatacttgccttaggttttaatttgtgaaaaattaaaatatttggttaatttcctattcatacatcaaatgcatcttctgtgagatgcatgccatagctagcaatactgtctacattatcaggacgatctaggctacgccctgtggacatggccccgcccctctgctcaggcctgttctcttgtaaaaacaggagcctctaggcacaggttccaactttagtctttagctagatctcatccctagggcctaagccctgctgccccggccttccaaggccccgcctccgccccggcccgccccgccccggccccgcccccggcccaagcggcgcttctccgttcgggcctggtgccagtgaggggcgcggcgctggcg

SEQ ID NO: 33299 - DNA, 409 bp, Mus musculus
  source 1..409: mol_type = other DNA
aaacagttaaacctaatttaaagtttcaacagccttgtgtgtacattctgagaccctcattctagctgcctagaagtcagtattctgctagcagagtacctacaaatcatatcatttaaggtctaattgttgtatagacaattgcaagtctttattccagctggctgggactaaactcagttattcagtacccaagtgaagtcccaagtatttaggataagggattttaaaacatcctgatatcttgcttggcatctgtaaggtagacaagagttggataattttccacaggattttccatcaaggtaaaattttagataaacttaaattgatctcagcaagatattctcagaattgaagtgtgagttcagaatcttagaatacactcacctattctatatgttacagg

SEQ ID NO: 33300 - DNA, 367 bp, Mus musculus
  source 1..367: mol_type = other DNA
gtcatcacaatcttgtgctaacaaaacacaatccttattcactatttaaactattttcaactaccttttagttaatacttttgacctgtatgagaaacatcttaaaaggggacagagaagggtaaagggtatccttgaaacaagcctcagctttccccggctgtctccaaggaccctggggaagacggacacctggtgttttatgaggtgttgtcttctggaacctgcgccccattcaccgtgacccaggcccagctacacacgcagcccacgcgcatagggcgcgggggcggagtggacgaggggcgcccacgggggcgtcggccccgctcctcagggtcagctcgaggggcccttttgaaagacg

SEQ ID NO: 33301 - DNA, 509 bp, Mus musculus
  source 1..509: mol_type = other DNA
ttggtctctgacctccacaggtgtactgtggcaatacatgtgcacaaatgcatgtacacatacatacacacatgcatacatgcacaaacatgctcacacacacatacatgtgcacgcacatgcacatactcatacacacatgaacacatgtgtgtgtacacacgtgaaaatattttttaaaaatgaaagtgcaactgagaatttgttggacatcatactctttttaaaaagcataataaacatcaagacacttacacaaaatatgttaaattaaatttaaaacgctcaacaagcattttagcctgtgtgcaattagctcattgtgtagtaatcaacaaatctaaaagatttattcttttcatcttttgacaaagagaacattttcatgagttacttttgtttgtttcatacagaaggcgttcattgtatgaatgaccaagagggatttcacctaaatccattcagtcagtgtatgggggttttgaaaatatgtgtaatatgtaaaacat

SEQ ID NO: 33302 - DNA, 377 bp, Mus musculus
  source 1..377: mol_type = other DNA
tgcaattagaagcatgctgctcagacccagtgagaaaggagcatttacccttttcatttgtttaattggtgcattaaatacaagcaacaaataaatcggtccttattttaatgaagatagagcaaggtcttcacggagagcacgctgtcattagttcatcaaaactgtttattgtatttacaatccatattgttacataaagtgtcaggaggcaccattagtgctatttaaagatacactggtgaaaattggacaaatcctattttaacacccttacaaaaagataaggatctaaaatactcttgctaggttagaaatttcctaagaagtaacctcttccatcattgcaatggatttatgactgtcagacaagatgg

SEQ ID NO: 33303 - DNA, 538 bp, Mus musculus
  source 1..538: mol_type = other DNA
agaacatccaaattcctaaatcatggtgatgtaagatttatttaggttttgatagtcatcagatcaaatgatattcaggaacaccccggtgttattcgtttctgggtttcagaaatctatttaaaattagtattaattatgactctgaaaactgtccaagtgtaacttttcgaaaaaaaaccaatagattataggtaaatgatttaatactttacttcactcacaaaatattatgactttacatcctttgagttcccattgggaaaacttaaggcatcagcacactaggaaaagattgctttgcactgttttcagcccggagaaggcccacgccgtcctcggtcccaggctggcgtcccgccccgcaaggacgccgggctccatgccgccgcgcgccctcgggcggctctgggccggaaggccgcagggctgttggcccggtgtgtaaagagtctggggacacgcgtgacggagcactcgcccgcgccggaacccagccagtcccgcctgcttgagcgcggtcagagctctggcttgc

SEQ ID NO: 33304 - DNA, 438 bp, Mus musculus
  source 1..438: mol_type = other DNA
actcctctgcttggtacacaacggagaaaaggctccttcaggatgacctacagctaactcatagtgacacttctagaagctagtgaggtactcctgtggtgtgtgcctctccgcagagccttgcaggttttccaaatggtagtttggcaaacaccctcactgtagaggtgcacccccacaggtaggggattgtcgactgaaaattgccaactgcaattaactgcaattttgtgagactcggttctttccaagaaacatctaacacaagcgccagttctgggctgggtgcccagaaaggaaacccaggcacttaaaaggcaggagcggagaaagttagaaacttgcatttaaacttgaaagctctgcctagcgggacagattcgaggcggcgcgcggggcgggggcgcacggggccggggtgcaggcggggacgcgggg

SEQ ID NO: 33305 - DNA, 166 bp, Mus musculus
  source 1..166: mol_type = other DNA
gggccctggtcccctgatcatcagtggttagctaggtaccccacttccagtcagcagatgacaaccgcccgcgcaacagccgctctcccctccgcggcccgcgtttgctcccgacaggcggttgctatagcagcgctcagcgcgcaagccagagctctgaccgcgc

SEQ ID NO: 33306 - DNA, 391 bp, Mus musculus
  source 1..391: mol_type = other DNA
aggcgcctcagccccgcggagttggtcaccaccagcatccccggcgccgccgggctcggctgggcgaaaggaagcgggacggagccgcagagagcgagggcgaggcgccctccgcgccctccttctgcttcttggaagaccccgagccggctcaacgtgcgcggcacggggatcaaacttccgggtcagaggtcagcggcgcggcgcgcacgccgtaatgctccgcgtagaagcgccacccacgaggcggagggtctcgcaggcttaaaggaggacagtcagcctcaagctagtttacggtcggccctcctcccagcgaaaaggggcggagcgagctcgttcgccgcgagatccctcccgatgagaccaggctacgtctggcgtggtagac

SEQ ID NO: 33307 - DNA, 468 bp, Mus musculus
  source 1..468: mol_type = other DNA
aaactgcaagcacccatcccggttaggaaaccgttttgcttggcaaagaggctgtcagtgtttactaaccgacaccgctgcgaatcccgtgtcagtctcagttcgggccgggacgtggctgagggcacttccaggtcacagcgagaggaccgctgggtgtcctttcagctttcacctcagagcccacacgctccgccctggtttccggggcccgagacccgcacttgccctgcaagagcctccggaaggcggcggcatccagcccgtgcaacgtgctcggccccgcaggagcccggggtctccaggccgcccgaggctgtgcgccgccccggccggagcctggctccgcccgcgcagtagcgggtcctgtctaccacgccagacgtagcctggtctcatcgggagggatctcgcggcgaacgagctcgctccgccccttttcgctgggaggagggccgaccgtaaact

SEQ ID NO: 33308 - DNA, 376 bp, Mus musculus
  source 1..376: mol_type = other DNA
gccctgcaagagcctccggaaggcggcggcatccagcccgtgcaacgtgctcggccccgcaggagcccggggtctccaggccgcccgaggctgtgcgccgccccggccggagcctggctccgcccgcgcagtagcgggtcctgtctaccacgccagacgtagcctggtctcatcgggagggatctcgcggcgaacgagctcgctccgccccttttcgctgggaggagggccgaccgtaaactagcttgaggctgactgtcctcctttaagcctgcgagaccctccgcctcgtgggtggcgcttctacgcggagcattacggcgtgcgcgccgcgccgctgacctctgacccggaagtttgatccccgtgccgcgca

SEQ ID NO: 33309 - DNA, 329 bp, Mus musculus
  source 1..329: mol_type = other DNA
cttgggattgaacccagggcctcacgtgcaacccaagtgactatggccgtatctcggcaagcctagttcctgcagtacttctgcctcaggcccccagggttagcacattcactcaatatttattgagtattgatacattgttcgagatcctcaaattaggcatttcaaactactcacatggtctccctcagcctttaaagaatgctggctcagcttatctattcggtgcgagaagctgttccctgtgacagagaatcttatgttctcagagagggttcactgaggtgggaagacccacactgaatgtccagcatcaccgctctctgctt

SEQ ID NO: 33310 - DNA, 508 bp, Mus musculus
  source 1..508: mol_type = other DNA
aaaaaattactttgaacccaaaatatcctaactcacattcacaggtgatttagatcatggagtttttgtttatcaaataccattcctgataaaattccctggaaaaatattttctatcaatattttggggtttttaaaactctatggaatttttaattcctgatgagttatgcttattttatttcatttaaaatgcattggtgttttggacaaaattatacaaacattacaaagcaggaagaacttgggccccgttttccccaccctttagtgtgtaattatattacatttgcaaaaatgactgttctttctgaaactttcatatttcgcatgatctgaacttttttttaaatgttcttcacaactctttttaaactcaactctaaggtggctgcaccagtccccttaaattggaggctgacagctcacgactgacaggggccctggaatgccccacgatcgctgaaatcctgctccgggttttcgtgcagcccgcccgggggcatgc

SEQ ID NO: 33311 - DNA, 560 bp, Mus musculus
  source 1..560: mol_type = other DNA
gaattatactcaaagttctgattaaaaaatattattctgtttgtttttgaaataagatatgactcagagaaagttatggaaaaataaatgaatataaatgaatgaaaatttgaaaatatgtcttatcatattccatacctgtcccaggagcctcagcggctgcctgacacagcacaaataaaaatactttttttaaaaaaagaattctatctgtgttttcttatttcatcttttgaggtgaaaatgtattaattagcagaatttaagaattcaacaggtggattttcctccagaaattattaacatgtaaaattataacatgggattcaaaattatattaaggtagtataatttcctttgttatgtttatttctttccagaattaaaaagtacacacacaaactaatgcatagtctacaacagttgcaatgaaagaatgagttttgtacttagctgaatgaaacataattaggaagatagttcctaaagcaattaggaagctaattaagcttgctttaaatccctcaatgttgaatgtattgtatactggcagatggact

SEQ ID NO: 33312 - DNA, 356 bp, Mus musculus
  source 1..356: mol_type = other DNA
ctggctgtataataggcgcattatgaggctatgcacctggctcccgcggagcctgggagaggccttccccgggaggccgaagggtgcctgccagtcacttcccagccactgggacttcgaaacagttttactgtggcccagtatcaaagaaattgtcagagtcaagaaaagtcagataatatcctttctgccgtcctggggcattggcagttataattacacagtaaaatacctaaggttaatgagtaacctccaaaggaagttactaatttctctgaactaaatgttaaaaattggcaattggcaaatggaaccccgttgcttgttcccgcctgcagtctgagaggcagacaacc

SEQ ID NO: 33313 - DNA, 312 bp, Mus musculus
  source 1..312: mol_type = other DNA
ctctgggatgtgtctccccatgatctgtcatcccagctcagcagtgaaatgggaaaagaatgttctggaccatgaccccagacaaggtctctatcttccagagaatcacagtgctggcactaggcagcgctcacagatggtaacactgggctggcagagcctgtgcctgccagagcagctgagctgtttaggtcacgtgcctcccattcggaagatgaaggagagggcagcgtggcgctctggcctcaagccgaaatgccagtccagcctttcatttgtcccgatcaaagcatgcagacctgagtttgcaaa

SEQ ID NO: 33314 - DNA, 410 bp, Mus musculus
  source 1..410: mol_type = other DNA
cttttaggtttaaaaaaagcaaaagagcgccaccttgtggttttcttgtatttgctgatttggaatcctctacagcaaagctgttgatgcagcctggaaggttctagagacttctctttcacaccttccctgcacactgcgtgtgatggggaaattacaccggacggacagtaggggtgaaatccctacctcctggtgaggtcacgcctcccctaggctgctgacctagcacaggagggctgaagatggactctgtccacttaggacagctgttcttgagatcccatctgaaagtctcatggaaagtgaggatagatctaccttgttatcagtacctagtgctgaaagatcacaggcagtacttctgacgtagcctctgccttgaatcacactcatcgattgttacgttt

SEQ ID NO: 33315 - DNA, 415 bp, Mus musculus
  source 1..415: mol_type = other DNA
aatgacagttatagcttatagtagtctttcagcaggcatgatccatgcaggatagccaaggtcaaggctagcctatgctattattccgtcaattaacttagcaagtagattaatggaaattatatatacagaataaattaaaacatatattaaaatctctagagacacaggctaagtaatgactaacgcagtttaagcagaaattaacccaaatttagctttataaaaatcagtttcatgaagctctggagaatactcttcttcaggttcacttgcaacctggacaaggtgccaggtactgatgaagtttagctttctcggaaaagcccaccacccgcttcacagcgacccggctctatacgggtgccgggggacaggggcggagcggggcggggccgtggcgcgtggggcctgg

SEQ ID NO: 33316 - DNA, 377 bp, Mus musculus
  source 1..377: mol_type = other DNA
atgtgcatcatttaggcactgtaacctactgttgaagtcagcgactataagtgactaacaggtgcgttacatagagtgctcgttccattctggatcacactttgtctgatcttggaagatgaaataattaatgcttataattcattaagccctgtttttaaatttaattacagaaaaatatttacttcattgtatgcaaatatttagaatggctatgaatagagacagaatgtaattgagtcatagcgattatgtacctaaacatagttgatgtaactattcacaaatcagaatcttttggatcacaattttaaaacataatagaaaagcctggctcggtaccgggaagcttccccgtctcccaggcaaccggcgcc

SEQ ID NO: 33317 - DNA, 583 bp, Mus musculus
  source 1..583: mol_type = other DNA
tcctgactaacaatttttaaaaatgaaaatgattctaaatttattaatgtactttgcatttaactggatacgtgttcattttaaaagatctttaatgtacttgtcagcatatttaacaataacaagaaaaaaggtttctgtagactttaatatgtttttaagaggggaattgctcttttagaaagtcggcaagcattgctacatagagaaacagaggatttaaatattccataaaacctaatttaatgattaggactagcttaattcgtttcaatctagaatcactattcaatagaaatttcagtttaaataaaatatagtctattctaggccataggctcacgtagcccaggctagtgtctgcacctgccggggattacaggcgcatctggccagagtgtgccttctggtaagtaaagcagtaggtaaattaactgtggactaaacagcattcagttaatcaccgggttggtgtaggctgaagggccacgcggccagcaggagcactccgcgcccccgcccctacgccaggcgccaaggccgttgggcgcgcctgcgcagcttttccgcccgtgccggatgc

SEQ ID NO: 33318 - DNA, 570 bp, Mus musculus
  source 1..570: mol_type = other DNA
cctcctcacaaggcaggcttcttctctgaagctccctgggcaagcaggccgaccctggcgcagcaccacctcacagaggggctgcaggaggagcctcagcacgagccgcacgcgggcggcccctcggggctgcgaggccggcggtgagatcccaggctgtggctctcggggaccctgggaggatgcgggcgggaggcgctgctaggagggcggcgcttagaagagcgtccgcgagacaccgctgccccggcgttgccgggagacggcttcgccccccccccccaggcgtcgcccgaccgctgccccgccccgtcccgccccgccctgccccgcggctccgcggccactccgcagcgagccgttgccgagcgctgacgggagcggccgagggcgaggccgcccagcctcagccgaccggtggctcgcgcctcccggggccgagcgcgcaggcgcagaccgcagtaactgccggttgggggcggcgaaccgcagtggagactaggcggcgggccgggcggaggcggcgcggctcaggcgggcggctccacctccgcagttccgacgccctgc

SEQ ID NO: 33319 - DNA, 251 bp, Mus musculus
  source 1..251: mol_type = other DNA
tggggatagcaatctagacctggattggaaaacaagtcactactttggatctttttgcatctgattaaaaaatctcaaaacaatatttactagaatactctttcttcaaaacatttttagaggaaaatgacttagcctaggtcactcacatatggctcccaggttagcctggaactccttagagtccaagaatggactgactcgcttggtcagtcgtacactgcctgctgcgcatgcgtgtcggtctccgc

SEQ ID NO: 33320 - DNA, 528 bp, Mus musculus
  source 1..528: mol_type = other DNA
gtcagtcgtacactgcctgctgcgcatgcgtgtcggtctccgcctgacgtcaccgccaggctggctcgttcggggagctccggggcgccgcccaggcctcgggaggtaccgggggtacctttcggtggcgttggcggcgtcgccagcggcggcgtagagaaggcgtcctgatgggcgccaagacctgctggcttctcggagcgctgcctcggagggactgcgagaaggccgagccccgggcgccggcggctcgggaacatggcggcgtgcggcacttagcgggctgaggctgaggcccagtctggctcaggcgctcactgggtggcggggctgatcgccgagggacaggcgaagcgacccgccccctggagccccgcccggaggggagcgccttgtaccccgcaggtgtgtctccagctgcgggccccgcccggtcctggtcccttggcgtcgggtccgcactcggctccgcttgccccctccccggggatggcggttaccgtggcgggagctgcggcgggagaggag

SEQ ID NO: 33321 - DNA, 474 bp, Mus musculus
  source 1..474: mol_type = other DNA
gggccccaactctgagatcttgatcagatagataagtatctgctttacccgtagagatgtgatccaatgaaatcacatgacaatcttatctatagttaagaaaacattactttaggaagcagcaattagctgagtcaacagtatctgagtcttctggggcccggaaccagcgaggttgtgacccgaccttcagtcccctcaagtgaggagccggcgggggcagccgcgactaggcgctgatggccagcagggttgggtcacaggggtccccaacgccctctgtcggaccactgctgcccgccttgcacgtaagcagatgacagaggctgttacttacaggccttcgcctcagctcggacagcagagagctgaatctgcaggcgagctgccagccagcctgacagggaggacgtcctcggggcggggcgtggcgtccgcgggacacgcccccagaggccggctctggccttgctc

SEQ ID NO: 33322 - DNA, 315 bp, Mus musculus
  source 1..315: mol_type = other DNA
atctaaaaaaaaccccaaaacatgctgggtgttttggggcatgctaggtggatctctgagattgaagccaacctgctagttaaatgcactagctgctcttccagaactgtctgtaatccagttccatgtgatttcatctacgaatttatgactagataataattataagtcactgaaaagattactgatgcatggtacttgtggtgtgagatggcttgtgtgcctacccacacagatcacatactgcataattccatttctaagaagtaccctaaatatgagactccatagatacagacactcaagtactagctg

SEQ ID NO: 33323 - DNA, 483 bp, Mus musculus
  source 1..483: mol_type = other DNA
tcagatagataagtatctgctttacccgtagagatgtgatccaatgaaatcacatgacaatcttatctagagttaagaaaacattactttaggaagcagcaattagctgagtcaacagtatctgagtctctggggcccggaaccagcgaggtcagacccgaccttcagtcccctcaagtgaggagccggtgggggcatcagtgtctggctgccatcagccgcgacccccaagtctcttaggagcggagtcaggtgaggcgctgatggccagcagggttgggccacaggggtccccaacgccctccctcttcgcctcagctcggacagcagagagctgaatctgcaggcgagctgccagccagcctgacagggaggacgtcctcggggcggggcgtggcgtccgcgggacacgcccccagaggccggctctggccttgctcgccggtccgcttccggcctcgcggcgcgcacgcgcactcatag

SEQ ID NO: 33324 - DNA, 473 bp, Mus musculus
  source 1..473: mol_type = other DNA
aataatacttactgcttcgtaaaggtaaaaatacatattgctacagtaagacttttctaaattagtgctcatgaataaggatcaaaatgaaaatactaatgaaacgcttaaaggtgtgttaaataactcaagtttagctcttgagtgtcggttaaaaccaccatttggggcttttgtgacagtggacagctacacagggtcaacagaatgcagtgtctgctgtaaaagaggcagcttaggttttttcatacaaaacattcccaagtacacgcgattatcccggagcctgtcctaagcagctccgaaggcgttgctgggcatgcgcatgtgcagccgggtttcgggtccggacagtggactcactgtccggtgatcccgggcccaagaggggctcccgctcagctaggcggcgcgctgcctatgagtgcgcgtgcgcgccgcgaggccggaagcggaccggcgagcaaggccag

SEQ ID NO: 33325 - DNA, 486 bp, Mus musculus
  source 1..486: mol_type = other DNA
aattcacagttctcagaaccgggaatctttactagatatcttgtcaagcccacagctttcacacacaatcttacaatcagaattacttttgtgaagaccttgttctccaaacaaatattacactgctggcagctagctgctgtaaccaatgaatttttgtttcaaaacaacctatcttaaaagttttcatttgtaacttgatacttttctgaagagacatggcccctgacacaaataaataaaaaaaaaatgttttcacttgtctcagtcttatctatcacagtacatacatcccggaatttatatctttaaagagtgtctctgttgtgaaatggaaagacacttctaatgtgaaatcggtcatttaaatttcctataaaatgcatccagcctaaatgtataccttgaattctgaaaatatgggttgtatttaacaaatctcttgtttaagtataaccactatttataatatattttgcttagctg

SEQ ID NO: 33326 - DNA, 614 bp, Mus musculus
  source 1..614: mol_type = other DNA
ttttctattatacttttaaaaattatttcattctagctctcaataaaaattatttgagcgagtcaggtagatctatttgaagctagctttctctacatagtaagcccaaaataaataaaattttaaaattgattggccatttgtcttaagttacaaggctatcttgcaagttctttatgtatatagtattttcatttaaattatgttgtatttataagtcaatacattttgaatccatttttgtaactttcataggtaatattttttcttttgtattttttaatagtctatcccaaagaaaggatttattttattattttttagttatttcttgtacctaaatgtacattgtagtacagacatgcccatcaaatttttagaatgtctggaattaaaacagattatagctatgtaacctgatgcaggtaactttactctgttgtcctagaactctgtagaccaggctggcctcagactcagagatctgcctgcctctgccgaaacattcaacagaaatgtccatagtaaatattcctacatgaaatttatcatttaaaagatgctattttaagcattttgatggtccagttcattgacagcacactcacagctgt

SEQ ID NO: 33327 - DNA, 456 bp, Mus musculus
  source 1..456: mol_type = other DNA
ctgtacccacagggaaggtgaacttgttagttttaccatattaagttgaggtccagtattataatgctgacaaaacctaatctcagctaaactggtgattaacctgtgagagtatagttctaagtgatcctatgtgtgacacacacacacacacacacacatatatacatatatatatacatatatatgtgtgtgtgtgtatatatatcatttccacatgtgtgtatgtgtccacaggcacataaagggactcaattactctctactctactcgttaaggcagagattttttggtcaaacctagactcaccaatatggctgatactgcgaagctgctagacaggatcttctgtgtccacctctgaagctggaagggcaggcagcttccatgtccaccagcattcacacgagctctcgtgatgagctcaaacagcagttcaaatgcttcaccttcag

SEQ ID NO: 33328 - DNA, 902 bp, Mus musculus
  source 1..902: mol_type = other DNA
gctcaggccgcgcgcgcctccgcagctcgccagagatccttcagactggctggagcgccgcgttgtcgcccgcgcccgctgagggctcgcggctcgggcgcgcccggcgcgagtggcgagctccggccgtgcgctgcgacgaggccaggcggcgggcggttagcgctccgctcggcgggcggggaggacgggcacgccgggcgctgcacgcctcggcgggcgggttccgcgtcccaggaccgaagcgggtcggtgcccccgtgtggagagaggggcggccgggctccctggacccggacggcccccggctgggcaggaggctggggccaggggccggccatgtccgctcgcgccccggtgcccgccgctgccacccgggaggacccgcccgccgtggccggagaccgggacgcgctgttggcagcgacgagccggcgggcggagcagccggcgcccggcgagcgggagaggcgagggaggagcgggccgcggccgccaccagcgcgggtgcgcggggagagccgtcgccggcgctcgtgctgggacacagcgtgccgcaagcggccgtgcccgtgaggccgctggcgctgcacctggcgcacaaggcgcgtgcgcccgggggtcccttcggcggggaggctccgccgctgccgccgccgcctccgccgccgccaccaccaccgccgccgctgccgccgccagcaccgcgggacccaccggaggacgcccgcgaggacccagcggcagccggcccggaggacaagccgccgccgccgccgccagaagctgccgcagcacctgtccaccgtgggcaccggcgtgccgtcgcccgctcaggactccccggaggccggtgagtgcggtccgcggttcaccgtgccgatttacataaatggacatct

SEQ ID NO: 33329 - DNA, 543 bp, Mus musculus
  source 1..543: mol_type = other DNA
agttataaggaactggccatgctatggagctagagccacaggctgctttatccgcgcacgcccaccgccggggagcaaagcgcagatgcgtccgactcctgttaggagcactgcccaaaagcagcgtgggccgggacccgagtgtccggcgctgctagggctagtgcccgaagcccagcttcacacgcggccccgcagctcacgctctattgcggcctccgccgtgcgtcgtcacagacgcgaaccagccgtctcagagagaagccgcttctgggcgcacgcgcgcgcagcagggaggggtgcccagcgcgtggcgtcccagggcccgcgcacgcgccctgacggcgctccgcccatacgcgcgagtacgcacgcgcacagccggctcggcttacactccccaggctgaaagcgttggggctgtgggcgaggtgggcggggcgttgcccgcgcgcgctgccagccagagcccgagctgcgagagccggcgctgccacgccccagcccctcacgtgattggctgagcgccgcctggtgggcagg

SEQ ID NO: 33330 - DNA, 435 bp, Mus musculus
  source 1..435: mol_type = other DNA
taatctatctatctatctatctatctatctatctatctatctatctatctatctatctatctatctatctatctaatgtttttttcgagacagagtttctctgtaagggctagcaaggttttatttttaaagggaaaaatttcaccaaacaatggtgaaacaaaagcagaatttgattttctttaagttgatggcttcttaagtcacacaggttgaggtcagaatgggtattttacaggtaagcattgatataaatatttcagaaattacatgataatccatagataattaattttctcattgctcattatatattcactttcatactaccaaccgtaattttagttttggagttgttatgttgttctaatgctttgaattaattcagtcccctctcaattggcttttggtcgatcaatatagaaccaatagcca

SEQ ID NO: 33331 - DNA, 353 bp, Mus musculus
  source 1..353: mol_type = other DNA
tggaaaaagaataaataataataaaaattatttttttaagaactacatagcatggctgtcccagcctttgctgggacaatgtgtgccaacttctaacacaggcccagcctacttgcgggtggaaggctgagcgagcaagtcgctactacgtagtacttcttatggacaaacagtattttggtcttgtaaaccaaataaatcctgtccgggcgcgcgcgcgcgcggagagctcagtgcgggtgacccaaggagaacttctggagccgttctgctccacgtcgtccggtggccagccagccaggccaggcgccagccgggcgggggtaaaggcaggctggggtcggctcctccca

SEQ ID NO: 33332 - DNA, 568 bp, Mus musculus
  source 1..568: mol_type = other DNA
aaaaataattgaaaggcacaaggttttattctccatttatcacactatgacgtctgtgaatcaaacctgttttattcagaattaatatctgattttgtaattaataatcattgttcttattttctaaatggaaattttaatgtgtattttcctcctttggatattgactgtaatataaatgtatttccttggggactccatgaaaataattattctccataaaaaagttagtttttagtatatgaaaaaccaacagccactcattttttacacatatgtatcaacagtaaagtttgacataaaaatcaagacatttttcagaaggtggttgtcttttctaattttcaatgagttcagtacaaatttaggtaaagctagaattagattgtgtttaaaattgtcattcgaattcataactaaacaactatttcttattcatcctagaaacaaaaaacattcgacctgatttaaaactaatttgcaataaatgcatttctgcacttcctcctaggagacacctggagggggtgaggggggagagcccctctggctgcagtcagcagcagtg

SEQ ID NO: 33333 - DNA, 418 bp, Mus musculus
  source 1..418: mol_type = other DNA
tacagactcttttcgtttcaaatacaagcagtgttttttctgtaggagaaagggcctcgtgagtgccaggcacaagacaatttatcctccttttcaattctttatgtgaacccagtgagtgttcagaggattaattaggtatggtttccaaatacgaatacaaatatccaagtttttaattggttaaaaatccattaacatggaatgcagcaagtttcttgaacacccttccatctctgatggcacagtgggacatgagagtttctttctcgttgtcaaatttctcagctgtgctgcttgtgttgcggagaggcaaaccgagtggcatcgcctttccgatggtaaaagatggctattattttaagatatgccaaccctgatcatgaggtcgctcggccagcatgacatagtgacatta

SEQ ID NO: 33334 - DNA, 544 bp, Mus musculus
  source 1..544: mol_type = other DNA
tagattaaaggccatttaatctttaaattaaaggggatttggaattccatatttaaagaaactgtatttcaatgcataaaaatataatcaattaaaagaaaagccaatgataaacttcaagtgagcatttttttgttttatgtttcaagctttacagctcaaatactcataatatcacttcgtaaaactgtgaacggtagtttatgccccagtacaaatttcattttatttttgcagaattttatctttccttaaatccgaagaaacatctctgaaatacctgctagatttgcaggctatcctggatcctgaccaggtgccttcttgaagccacagggttaaatattggacaatagttctcttttctaggggaccttgagtcacctcagcccgaggactcacagacctctctcccacagacgcttagtgtctgcaaaaccaagactcgggggtgggcaaaaattaattaaattacgctgcgccactgcgggcgcctgagacggcgcaatgacgcctaccgacgcacgcgtgatgacggacgcgg

SEQ ID NO: 33335 - DNA, 437 bp, Mus musculus
  source 1..437: mol_type = other DNA
acataccttacagatgaattttccatcagggaacagagcgcgcttactttggtcgtcgcaggggcagccgagccctggcgcggagacatccactcacgcggcggcgcagcccggcccgccgctccgcggaacccaggcgacgcgcctcagactccgttccgcgctcggccggacccggccggacgagaagggccgcggagccgcgcgcggccggagggcgccgagttcccgtcagaccgcgcgggaggatgaccctgcgacgcgcctggctgggcggcagcgtccccgccggctgaggggcgacgccagggccgcgggaaagcaggagcggccgcggagtccactcggcccgccctgcgacttaagcggtggagacggtgacgccgcgtccgtcatcacgcgtgcgtcggtaggcgtcattgcgccgtctcaggcgc

SEQ ID NO: 33336 - DNA, 228 bp, Mus musculus
  source 1..228: mol_type = other DNA
ataataataatctaaaaaatataaatgtctccaaatcgagcctcagcagaaagggtgacagatgtcccctatgctcagccgtaatctgggcgcaacaggaaatttcgatatttcaagactgtcctatttgtcttcaaaatttttgctggaaaaacacggagccgttctgcagcataaaactttagctccgagcgcccgagcgactgttcgttggctgctcgctttggc

SEQ ID NO: 33337 - DNA, 236 bp, Mus musculus
  source 1..236: mol_type = other DNA
ttctttaagtgagttattaaagtccttcttgatgtcccatcatcatgagatatgctttaagtgctcagagtactctctgctggcaagctctcttacagggaaggtgcgcagatatcttgtgtttggacctcctcctggccgaagaagaaggcccaaaacaggacctttctcagaagctgtgttactggcaggtcccagaagttgtcagcttctgtgatgtttataataatcaaaac

SEQ ID NO: 33338 - DNA, 349 bp, Mus musculus
  source 1..349: mol_type = other DNA
cccgcgctcgccactgctgcctggcgcggggccaggcgaggcgcagggatattgcaacagttaatttagtaaccaagcattttgtgggtagacattagatgggtagacgttcaaccatctgcccgtctccccaagtcccttggtctgaaccgctttagggggaaccattttatgccggcatttaaagggttcccctcttcttggtgatttctttccacgatcagcaggaggggtatttgctgatgcaaacaggcctgcggctggggactgggaactttccgcggcagagtcccctgcaagcgcctcgggacctgcggccaaagcgagcagccaacgaacagtcgctcgg

SEQ ID NO: 33339 - DNA, 528 bp, Mus musculus
  source 1..528: mol_type = other DNA
tgtctcattagttagaatattggaccaaaatctgcttttaactaaggattttaggcaatgtctatgttgattaaacttcgcaatgtattaaatttattttttctgaccagttcaattcctcaagtaaataattttgattttctaagggcatcatgattcgaattgtttctttcttttttatttaatgttagaagaactggagccactattacaaggattcaattacactcttgatactttgtcaacatttctaaatctattaatttatttaacatctgctgcaccacagggtgaggtattcaatacatagtgggcaccctgtaaatcactcattcccagaaatctctgaaaataaaatacacgtggcatatgtttcttgaaagtagtttcttgtaatttgaatctgccgtttaaaaggaaaatcttttaaaagttgacttgcaagaaaagcagattctgcagaaagtccggacctggtcaaggccatcagcgcgcgctctggtggtgggtttcccggccacaccccca

SEQ ID NO: 33340 - DNA, 622 bp, Mus musculus
  source 1..622: mol_type = other DNA
cttaaggagtattgaaaaccccgtttatataattatttgtctaataaaaataaaagcgctgcataaaacatcgctatctaaattttagccaattttagaaaacatgtgtttgaaatgatggcactctccttttaaagtggttttaaggtgatattaattgatatattttattgtaaattaaaacattccttcaatagatgtagttagtagatattgcctccttttacggaacagtttaacaatacgtaatgttctcgcaatctacagagcataaaaatagctttcttttgttatcacttgagagttttctaatttattcttcttattaaatcttcaagaaaaagtaaaagggtgaaatttgtgacttgccctgtatttaacacatattttgaaatgaggtgtacagttttaaaattatgcaaatgtttataagacaatattaacaattaggtgaagactgcaaacaaggttgaataaattcatgtatttggcgactgacttaaataacttctgacaaaaatatattgacaaaggttatttaaataaaaaaacatgcatattaagccaatatgtttccttacagaggcgcccagctgctcccccaactctcgcgagacttgct

SEQ ID NO: 33341 - DNA, 616 bp, Mus musculus
  source 1..616: mol_type = other DNA
tcattgtgaaaactcactatgggtagatagtactctattggaagaattcgctaggcgaaggctaccaattttacccaagctatcaattttgcccaaaataaataggatttttttaagtgcaaggctatatatatatatatatatatatatatatatatggaacaattttgctcaagctaaagaaagggctgaaataaggtagaatttttttgctaattagttccaaacttcctttaaatcttgctaattaagagaaatcgggagtagataggcccctttcttatcttcaaagagtaaagatgaaagaaagcactccacttgggctgttctttaaaacagagctccaagaaaatcggcttgctgctccttggaggagaaaagaccttattaaattcctccaccgacaaaattcacttggaggtattttaagtgaaatttaatgtgccatatataaatacaggcgaccagaagttgatttaaagtttttttcgatggaggaggggcgggagggctgaaccccacccccggccgcgctcccgcgcccctagcgggtccccaacccgcgcccgctcgctgattggctggaagcgattcaacacacgccaggcaaagagct

SEQ ID NO: 33342 - DNA, 419 bp, Mus musculus
  source 1..419: mol_type = other DNA
ctaactaaaagttagtacctgttgattgtaatacatttcaaattataatcagaatagcttatagatccaaaaaatatggttataagtattgcctaagattcaaagaggagtctttttaattcgtgctgacaagaatcagaaaaagactgttttctgcagtcacttaggtggtgatcttaaacacccttgtattacaggtcttaagaaataattgtgtcagaaactttctgactttgtaaatattagatttgacagtatgaagtataaactttgctgttgttgtcaaaacagctgtgaatacaacattttttatgcgcgccttaaagttaagaagcaactccttaaaacgaagtaattgttttctgtttctctctctgagagcggaagtcaccgggacagtgtctatttgcatcatcatg

SEQ ID NO: 33343 - DNA, 419 bp, Mus musculus; identical to SEQ ID NO: 33342
  source 1..419: mol_type = other DNA

SEQ ID NO: 33344 - DNA, 266 bp, Mus musculus
  source 1..266: mol_type = other DNA
tgtaagtgctccaccactgagcaacatctccagcattttcctaatgggaatttccttcaggaaactcctgctgggaaaaggaaaaggcctttgcttagtcagatcgctttgaactttaatctcattttgggatcccagagaacagagcttcactgtgtagctctggccggccggatctcccggtgcgagattaaaggcggtcgccctcaggcccatcccaagcagttgttttgggttggggggggttgaccagaccttctggcagg

SEQ ID NO: 33345 - DNA, 429 bp, Mus musculus
  source 1..429: mol_type = other DNA
atgttaaatttactagggcagctaatttgtcaaaaagtctttttcagtatatgttacagaattggaatttgaacagacaggtcaactccacgcgcttggacctgtccaccaactcagcattttctttctttaaaaaatgggtgggattaatatttctgtaagcttaaggcctaaactatatctacgaggctagtctcaggctaagcactgcaatggaaaggctctgcgcatatatgagcctattctagggagacatgtcatctttcatgaaggttagtgtcctagttcccttcccccaggcaaaacgacacgggagcattgctctgggtgtggcctatttgctcttattaaaagaaaaagggggagatgttgggagccgcccccacattcgcccaaataatctgcgcatgtgccaagggtcgatgggcg

SEQ ID NO: 33346 - DNA, 497 bp, Mus musculus
  source 1..497: mol_type = other DNA
acagagcttcactgtgtagctctggccggccggatctcccggtgcgagattaaaggcggtcgccctcaggcccatcccaagcagttgttttgggttggggggggttgaccagaccttctggcaggactgacgctcaacgcgccgtcctctcgtgcctgaggggcggatgcttgtcgcagccgccacacaagtagccagcgcgtcctggtgcctaatctccttcagcaccgcggagcgtggagcccacagctcggggaggacgtcgctggcaccaacccgggattcccagcctgtggacgctcccattgcagccggcgggaggggacagaggctcccggaacgcctggagatctacagtcgctgtcactgatccagacggtccattctcggccggagctgtccgggtctgactgcgccctggtcgtgcgcgcggatccccccctctgcagccaccgcgtggtagcgcccgctccgccgccgctcgccggttgctcccc

SEQ ID NO: 33347 - DNA, 607 bp, Mus musculus
  source 1..607: mol_type = other DNA
ccaatccgacatcgatggagatgtgaaaccctcgctgcgctgtctgctagcaagtaaagctgctccttccgctgcagcagtggcgcagcacatcccccatcattggcccggctcgggcccgtggtcccgcccccagaaatcaacgttcttatttggaacagctcagggcgcagattggaacctcgggcctgtcaatccttcgggccgagccgagacttccccggggccaggacgccctcccgcccgccgctgtcccgcagccccgggccggctgcgcggaatacacccggtgtccttcccgtccaccctcagtcacccgccccacgagggaaggaagggcagcagcccggttcccccacggccgccgttagccgcggcggggaggtgccgggtcggcggcgtcccactcggcaccgggaagtggcctcgggaccgttactcgggcgccgctccgggagggacgaggcgggaggccgggcgggcgcgttttggcgggtagcgcccgggggggccgcggcgtccatgcggagaggcgagggcggcgggcggccagcgcccccggccgcgggcaggggcggccctctcggccggacagcgtggcaggcgg

SEQ ID NO: 33348 - DNA, 658 bp, Mus musculus
  source 1..658: mol_type = other DNA
acagatgattactttttattcagcaacttttattgaacgaagaataaaatgtattggaggtgcattttacataaaacgtgtgtcaaataacttcggaatgacattttatttcagtttttatgttaagaaattctgaaacaggcaaggcatttaattaggtcttattccctgtatttccactaatttatagccactaattggccattattttccttcaaggtaaacgagttttttaaaagctgtctgaagatatctttaagctatgaacgaatacgttcatttgtccacgactccagtctccccgaggctgccgggcggcgtactctgacttctgtcgagaagacaggagtgatgcttctagaatattttctaggtacaagttttttaaagtgcagttctttcgactgaactttctaggaagaaaaatttgatttcgcttccgcagaacgtgaagcgcgcctcttcctgccgaggcgaggcccgcgtccccgagggcggcctgcggctccccagcctcaggtgtccgtgcggccgccggctgccggcgcccgggactgacttcctgtctgggcgcggggcggaaggatcgcgttgccagccggggccgccgccgcccctgccgttaggtggtggggctgctgagcccggcggcgggagg

SEQ ID NO: 33349 - DNA, 614 bp, Mus musculus
  source 1..614: mol_type = other DNA
ctggggcgggcggtcgcggctccccgggacccccccgaacgggggccgcccgccgcgctccgcagctgcgcgctgggccgcccgcccgccggccaccgcgggcaccaaccgccgcgcagccgggccgttgggcggtggtacgagctgggaggcggagcgggcggcgccccgggccgcgaaacgggcggggcggggcgccacgtgcgtcagtggccgggtggggcgggccgcgcgctcctgcccgccagcgccgccaccatccgcggagcccgggagacgcgcggggactctgaacacccgggcgtgtcgtcccggccgggctgcaggtgcacgcgcggccccgccgtccccacgcgctggtcccgcgtccgcagcgcagtgcagcgcgcgacgtgggggagtggggaagccccggggacgcggagcgggacgagtggcgagcgtctccacctgagcaggcgggttcgggcgacgcgcaggcgctgcggtgactggcggtgtcgcctcccccggcggcgcgcggggagggaggagcgcgcggagcggccgggcggactccagtgtcctggtggcggcggcaggaggaggcgggtgcggagggcgggggccggccg

SEQ ID NO: 33350 - DNA, 230 bp, Mus musculus
  source 1..230: mol_type = other DNA
gccctcttgggtgtgtctgaagacaactacagtgtacttacatataataaattaagattgttttggtcagcccacctagaatacattctgcgcatgaatcctgaatcaagcagctccctagcctcttctgagatgcagccattaagcccccttcccacatcccccggggctgggacgcacgggatctggagtcccacccggggcggggcgctccctggctcctccctctg

SEQ ID NO: 33351 - DNA, 462 bp, Mus musculus
  source 1..462: mol_type = other DNA
ggactctagatctagagttctgaggaccacacactggattctgccatctgaaccagtcagatcactgtcatctaacatctataaaaattttttttaaagatttacttatttgttttatgtaagtacactgtcactgtcttcaaatacaccagggatcccagccggatggctaagcagtgctattaattgcttagatatataagaattttatcagggcctggtgacaaaggtctataatcccagctcctcaggtccaccttaggaactgttaagagcctttgcaaatacaaagttcccttcgtactcttagtagatgctaataatcacagcacatcctacagtcactgtaatgactcgtgtttttggcagatggacgcccacctgcgagtcccagttctgctgccagggggcgctgcgctctgcgccaccaaccggagatgcgcgcgcagggagaaggcggtg

SEQ ID NO: 33352 - DNA, 337 bp, Mus musculus
  source 1..337: mol_type = other DNA
ctaaactgctgcacatctttatgagttttatgttagcctgaccttgctcagtggagtctggctggctatctctagcaatagtaggggtgagtctaccccaccgagagaaaggcaggccggtctagcgaggcggcggcggcggaagcgtcattggcggccctcccaggcacacggcactggcaggaccggcagagccaactctgaaatccgcggctccgcaggccggcccggcctccgcgttcccggcaggctccggtgcatcgagggtggggaagagcgggtcaccgcgcctgcgcgttgggaggtgtgacccgggtgggaaagccctccgagtccg

SEQ ID NO: 33353 - DNA, 456 bp, Mus musculus
  source 1..456: mol_type = other DNA
ctctgagaaggtgccttcattgacagttcatcaactggcactggaacttgttgacttacaaagttaacatgtcagatccttcagagttgactttacattcagcttaagtggtacttatttttaattttaaaccaatggtaacattcacagtgaggttctataccgagcaagttactcctcctggaactctatggagttgaagagaatcacagagatttaagacttgtgttgctcaaaccagccgaaaacaatttgtctcttttacaaaacaaactggttcaggagctgagtagcctctcaccctcctgcccacgccgttccgccccgctccacggaggcccggaggaagcggtgagcacaggggatgctcagagcccaaccaaccccggctgcgaccaggcggccacgacgccactgcgccgccgcctctcgcgagaccacagccgggccgcgcct

SEQ ID NO: 33354 - DNA, 529 bp, Mus musculus
  source 1..529: mol_type = other DNA
taccgagcaagttactcctcctggaactctatggagttgaagagaatcacagagatttaagacttgtgttgctcaaaccagccgaaaacaatttgtctcttttacaaaacaaactggttcaggagctgagtagcctctcaccctcctgcccacgccgttccgccccgctccacggaggcccggaggaagcggtgagcacaggggatgctcagagcccaaccaaccccggctgcgaccaggcggccacgacgccactgcgccgccgcctctcgcgagaccacagccgggccgcgcctccccccgcccccgggggctgcgcagcttcctccagagctcgggaacctcggacgcacatagaggtccctcgggcggaccttctgagccgcagtccagccagggagcgccgaccgcaccgactggcggaggcctactgcgcgtgcgccggggccttagcggggcgccacacctgggtgggcaggggctgctcgcgcacgcgcgccgcggtgcccgcgggctgtggggagtgagc

SEQ ID NO: 33355 - DNA, 456 bp, Mus musculus
  source 1..456: mol_type = other DNA
gacagtggcactttgttaagaacactttttctgtcatagcagaaatttacaagaagtcaataactttggaagttaaagaaggcttcctatgattggctcaaacaatgctagctgggcctcattaatcccaacactgggtttatttagagaaataactatgtacttaaaagttgttaaaatgaagaaatacattttacaaagtaaattagaatggatgcctttccggaaattcaaaaaattattgcagtctgcaaaagttgtatttatggaaagtacatatccatatgcatttgttaagcgtttgtcagacctgtttatacaaatgagaaccaccgacttaaaattagtcagttgctgtgtttaacaaattctggaacaacacaatacgcttaagagtgttttccagtgttcgttgttacaaaatcataacctgtataacgtcgccacggacgtgat

SEQ ID NO: 33356 - DNA, 446 bp, Mus musculus
  source 1..446: mol_type = other DNA
ctatctctaggaatccaggacgcaggacgccccctggagtcgagggaacgtggaagggggacggggcacctgcgctcctgggcccgccgcactttgcaggaaccaaaggcttccttagttccgacatgacgcacttccaagtccctggtggcacatcgtggggtatcaggtgctctgagcccctcacccaccccaggcgggtaccctcgaggcccccggcgctagcgaacagccggcggcgacctggaccgcgtggccccactgcctggtcttaagaggcggcgcagctccggagcaccttgggttctaaggatcctcaccaccggcgcccaccccagagcctccgggaccggggacgagaggagagggggcggcggctgcggctgccgcggctggcggaggtgtagggggaggcagcgcgagccgccccgactgctcctcctctt

SEQ ID NO: 33357 - DNA, 306 bp, Mus musculus
  source 1..306: mol_type = other DNA
gcaaacatgatggctcgggcccagccccccagggcagatggtgtcttggttaaacacctcaggaccctagagcaggaactacagatgctcgaggaccagaggtgtgtgtgtgtatttggtaaaaaaaaaaaaagacagtagtgtgtgtgtgtgtgtgtgtgtgtacacaagaacacttaatcctagatcttcaatttactaggtgaatcaagtcatcttcgagagatctcacccaggctctgaggctggaaggctcaccgaaagaaacagatatggttctgtgccagcagcccagctgcctttaaa

SEQ ID NO: 33358 - DNA, 361 bp, Mus musculus
  source 1..361: mol_type = other DNA
aatgacactcagacacagggtcctggctccgctatctctaggaatccaggacgcaggacgccccctggagtcgagggaacgtggaagggggacggggcacctgcgctcctgggcccgccgcactttgcaggaaccaaaggcttccttagttccgacatgacgcacttccaagtccctggtggcacatcgtggggtatcaggtgctctgagcccctcacccaccccaggcgggtaccctcgaggcccccggcgctagcgaacagccggcggcgacctggaccgcgtggccccactgcctggtcttaagaggcggcgcagctccggagcaccttgggttctaaggatcctcaccaccggcgcc

SEQ ID NO: 33359 - DNA, 232 bp, Mus musculus
  source 1..232: mol_type = other DNA
tggatcagagtcatgcagctcggaggtggggcacggcgcatcctctctcagaatgcctcagctgaaatattgaagccaggcccgtggggcaaaacaggcagccagtggccacacaggcatggctcagtagcctctgggtcagccagtctagctgaatctagccccaggcactaggagggaagggcctgccccctcgtcctccaagggtgtgggcacttcctcgggagcccca

SEQ ID NO: 33360 - DNA, 471 bp, Mus musculus
  source 1..471: mol_type = other DNA
tgcttggttttattttttttcaaggataaataaaacaataatcgtcataataaccacagtcgttatgtacagagaaataaataatatcccaaggttttgttttgttttgctttgatgaaatttccaggaggttagaggactccacaaagctgtcttctaaggaaaaaaaattatttgagttgaaaacaagccactcgtgctgggaagctgcactgtttctgcctggtcatgcacatttctgcaatataatgcataaatgtatgcctggcgcgtccccgcgcactcgcgcgcgcgcacacacacatacacgcgcgccgcgccccctcttcctggcaggtcggggcttcccagcctggggagcagggcgggagtcaggtcggtgcgcgccgcgcccgctcccgccaggggagagtccgggccgggttttgcaccgggtccccgggctagccgccgccgctgccgtgtttactg

SEQ ID NO: 33361 - DNA, 486 bp, Mus musculus
  source 1..486: mol_type = other DNA
gttaaacttaattaggggtaataaagtgacaaagttgtctcttggcgatgagtggaggctgggggctggaccgagccgcagaggcctccggagccgcagagcgacgggtcttcaccgaaggatctgcgcgcctggggcggccagggagctgcgcgaagacgcgtgggcggagcgggcttgagtggaatccacgaggcgccccaccgcccacgtcgcgtccgggagcgcgcagcggccccgcgccatcccgggagtcagggtctgggctctgcctggagtggtctccacgccggtttgcctcctagcaatccgatcgctgagacgccagacgcctcccgagggaaggcagcgcccgcccaggcccgcgttcattggctgcttcggcggagacttcgcgcgtccattggccgcgcagcctgtcagtcaggggcggggcggcgcgcgcgccgccgcgggcggggagcccgctgcagatcccgtaagacg

SEQ ID NO: 33362 - DNA, 305 bp, Mus musculus
  source 1..305: mol_type = other DNA
ttttctaagaactgctactctcatagcagtagaaaagtaactaagacataatgtttttcttgttaataagaaacctgagacattcctcatttaggagactcatttttccaggtttagaacttgttcagtaactcatctgaagattcatcacaggtcatcgtttattagatgatgttattgttcttaaacataattgcttgctcagaaaattgagaaaaaatccaaaagtctttagtctatggcagagctgggtgttggtccctgatctctcagccacacagagacacccaacgaagagtttccaa

SEQ ID NO: 33363 - DNA, 372 bp, Mus musculus
  source 1..372: mol_type = other DNA
ttaagagcacagctgctcttgtacctaggttcagttcttaggtgggactgcatgtatacagtgcacatccatgcatgcatgcatacacacatacacacatgcatatgcctttgatttggagatttctcacagctctaggtctcttttaaatctgaaattaaaggcttcgattgatgcttttcagaatgatgaattcagataaacgaaatttaattgcaatcagttctgttgatcatgcatgcatgcattttacatatactttacattattactttacatattttacattatttctctgtatagccctggctgtcctggaacgggcagatcgcggtgcgcatgcgcggccaggtgtgcgcatgcgcgagtgag

SEQ ID NO: 33364 - DNA, 588 bp, Mus musculus
  source 1..588: mol_type = other DNA
tacctctatagaacacaatacagtaaggaattcttctcagcgtatttgatctagataaaaactacgcagtaggttgttattctttttaaaaagaacaatccctacctttcattgcactgatttgataaacctgcagcagttttgtagaattaacttaagttcaccttgaccttctgaaaattttccaagatgcctttgtttgtttgtttgctttaaaaaaaaaaaaaaactctaccgtacagtctccttttttatttataaagttttattttatgacaaatatttaatgggataactttaaatacaaagttttttatttcaataatgtttgaaggacacttgttcagaagttatctaaacgtataggaagttagtttggcaaatgtttacaggtttatagaaactgactgtcaagtctcttgttacattgtggcttctcatttgtaatccaaaacctgaatttccagtgtgaattcatttccataggcaaataataattctcataaatttttttctccttaccatgcgcatgtgtgagtgagagagagccttttccacccatgtgtagaatctagaggccaaacgcag

SEQ ID NO: 33365 - DNA, 264 bp, Mus musculus
  source 1..264: mol_type = other DNA
aaattttattatgaaatatattcctgtaggcaagtatgtacttcaaaagtgataactgtcctctgtggagactccagaggtcagtcagtcacttcccagcaggggagtagcctgccttcgaccccagggtttgtcgggtgtggcctcggcgcccccggggagctgcggggaaggcgagcaacgcccccactctcgcgcgtccaggactgcgcggcggggccgaggggagggcggggaagaggcggcgcgtgcctcgcctgccaa

SEQ ID NO: 33366 - DNA, 643 bp, Mus musculus
  source 1..643: mol_type = other DNA
ggttcgtctcgtggataatacaccaggaggagtcccagaacgaaaacttggaaaaagttgggtttttttttgttgttgtttgtttgtttttttaaataaaaatcagacttcagtagcttcttcacacaaagcttcagctgctcagagcagagcggtccggagggtgccgacagccgggtgctccggggaaggccgccgagccacgctccgctcaccgccgtgatccgggacacgtggccccgcgggcgctcagacccgccgatccgcccgatcccggggtcccgcagctccggcaaccggcggcccccgcaggtcctttgttagcttccgggagcgggcgggcggccggggcgcactaggagccggacgaagggggccagagccttgcgaagggaggctctcgagcacctcagcgctcatacggccaggcgcccagcgggtgctcccctaaatgccccaccagctccaggggacctttgatagagcgtgtcgcgcccacaagacgcaatggtgcaccgccaccttaagtcgcttttgcacaaatcgtccacggcagaagcctacgccgccatcctagtggccaggagcacctcggcgtggggaccagggtcactcgctgggcgcctgactcggggcggagcaa

SEQ ID NO: 33367 - DNA, 446 bp, Mus musculus
  source 1..446: mol_type = other DNA
ctggagttaaggacgagtcgtcagctgctgagccccaggggagcaggtttgggaccccaggggctgtacccctcggtggcacccacacggcgcccgccaggcagacccaggctctcgccatcgcgagggtctgggaggaagccggctcttccttgctccgccccgagtcaggcgcccagcgagtgaccctggtccccacgccgaggtgctcctggccactaggatggcggcgtaggcttctgccgtggacgatttgtgcaaaagcgacttaaggtggcggtgcaccattgcgtcttgtgggcgcgacacgctctatcaaaggtcccctggagctggtggggcatttaggggagcacccgctgggcgcctggccgtatgagcgctgaggtgctcgagagcctcccttcgcaaggctctggcccccttcgtccggctcctagtgcgcc

SEQ ID NO: 33368 - DNA, 462 bp, Mus musculus
  source 1..462: mol_type = other DNA
gacaccaggtagccatcaactctggcctgtggtgctccagagcctcctggtgtggtagagtatagtccaccacccatatgatattgaaactacagttcataaggcagacaagagtctagcattgtgtttacacttatctgtgcaagaaatcagtgcctcgtgcctgaaatcttaagcattcctgggagtctaaagccagctttagaatcccccgtactttcaaactttgcgtgggacacctatgacattagtctcgactgtcaattagtagttgagttataggttgcattattgtagtataacacctgaggacatatatatcagataatgagttaagtaactgatacaggaaccatatagcatataggaagcagcccctggcagaaggctctcttcttttgccttttccctttgaacaaagacagtactcctcagggtgtacgccaaggagagggaacctct

SEQ ID NO: 33369 - DNA, 257 bp, Mus musculus
  source 1..257: mol_type = other DNA
agaggtttatctaaactcttctttgccctccgggtatttatcaattctctcggcgtggaaaaagaagctatgctgctgacagctgggtttagctttttaaatagctcaacaacaaggtgtgttcaactttgtatgcactaatctttagacctgaagacttgaggctggtggttgagccgcagccccaggtccggtctcagagcagctctgcgcagtttccccgcctgggagctgattgacagcaggactcaaagttc

SEQ ID NO: 33370 - DNA, 490 bp, Mus musculus
  source 1..490: mol_type = other DNA
tactgcagtatatattttttaaaggtatattgtgataaagatgaaagacagctttacacagtgagctcagcctttagtttagtgcctgctgtacacaaggttcattggtcagctgaacaaatgtacctgattggcaaccttgcattagagttaaagttttttttctgctaggatacaattttttcttctgggccctaacaggaatctcagcataattctatcgtgataactttcttttgaaattattaaaaagtctgtagtgaagtgtaagatcaaagaacgttgttagttaaagcctaggttgcttagcaactcgcccggaccttgagtcccggccccagttccgccgctcagtccctacttccgccgtaaccagccagtggggacctagcggccgctctgctgactaaaaatgtgtctcaacttgatacagacacactcagaatgaatagcctgtgagctcgccgcgctggagggcgacgtgggccgc

SEQ ID NO: 33371 - DNA, 356 bp, Mus musculus
  source 1..356: mol_type = other DNA
ggcaagttacatgaacttttccatcttatttttgtgtatgaatactacaccaagagataagctgtatctggaagctcaagattagagttagagatgctgagtccggtggcagacaccgtcgttcacttgatggtagtggcaagcacatccctgcactagagagacaatttgttccaatcctttgaccagcaccaagccctgatctgtgtatgccaaacacccgacctcgggtgacttagctgagtgacaagcagacatggcgagccaccatgcgcatccattcggcagacccaggatgggtgggggcggcagtgcctggtgggcgaggctgtcgtcctgggcaccccgccccctcc

SEQ ID NO: 33372 - DNA, 340 bp, Mus musculus
  source 1..340: mol_type = other DNA
cattcacagagtctggtcatgtgtgaagatgttcttacagaaagcagaaggaatgcatttaaattatgattagtgatagatagatagatagatagatagatagatagatagatagatatatttcaaaagttagagaaattctcccaaagtagatctagacaaggggcatgtgtctcttccacataagctgtggaaatcacactttaaatgcattgtacatctatccaggatttgtgtggagtgatttaagtgcaatcagatcaaacaacccaggagatttccagggacagcccagggctgctggtgcgtcgcaagcttcaggttggccctatataaactc

SEQ ID NO: 33373 - DNA, 609 bp, Mus musculus
  source 1..609: mol_type = other DNA
aaaagtgaccagaattctccttgttaaaatgactttgttagaaatgagtaactcagaaaaatatctcatccaacacatgaattcttttcatggatcacaaatcatatgcacaaaaatacttttcaaacacatacggttctttatagtaatgatgttatttgggttttgttatgacaaacaagattttagactgaaaacatctgatatactttagtattaaggtatttgagatgcatatttggatactatgagcttataaaacagatattaactgtttctgggtaaaaacatctaacctttaaaatcactaaataactctctgataagaaagaaattattattgacttctaaaaatagttttgagtctaattctctgttttatgaatacacaagagtataaggaaacaagtcacttagtcccaggtatcacctaggaaaagaatggcaacttaaaaataaagatgtttttttccagcttcctagtttaaaaataccacccttgttgagacttgtaatgattaaaaatagctcctaagtagagaagttgtgttttcctaagattcatcagacatttgatgccaaagacttttaagaatcagcattcatatt

SEQ ID NO: 33374 - DNA, 294 bp, Mus musculus
  source 1..294: mol_type = other DNA
tgcctttaatcccaaaggccagcctggtctatcacagagaaaccctatgattagatttttagaactcaacactgaggtggttaaaacaaaactgcggccaaccctgactttctgagcctgaaccccaggaatgtgccgcatgcatatatgcacgaaataagatgtttcacaaagtttggaacttgagaaagccagggttcctcggctgcgctagtagcgccaatcagaagagcggccgccggaactcgctgttgaggcccgccccttcaacgcaccaatcggaagcgcggccgc

SEQ ID NO: 33375 - DNA, 316 bp, Mus musculus
  source 1..316: mol_type = other DNA
atgattagatttttagaactcaacactgaggtggttaaaacaaaactgcggccaaccctgactttctgagcctgaaccccaggaatgtgccgcatgcatatatgcacgaaataagatgtttcacaaagtttggaacttgagaaagccagggttcctcggctgcgctagtagcgccaatcagaagagcggccgccggaactcgctgttgaggcccgccccttcaacgcaccaatcggaagcgcggccgctggccggcgggggcgggcacctcggcggccattctgcgtgaacgcccctccgcactccgcggcgccgc

SEQ ID NO: 33376 - DNA, 540 bp, Mus musculus
  source 1..540: mol_type = other DNA
tggatcggccgctctttccagctgcagtgcaagccccgaaaagctgggcggaggctctgggcagcgcggcagccgccagcgccacgccgagccccagcagctgcagtagcagcgtagccatcccgcagctccacacttgcggaagcgcggtgcggcgccgcgccccgccccagccggccccgcaggagaggccggcctagccctcgcccgccgcccgcagcgcccccgcctggccgtgccccgccacggcaggaaagccgaggcctccccgcagcgcccccgcgcggctccgccgaggactgcaggccggtcaccggtgcggcaagtcaaagccctggacctgtgcactggcttcacccctcgcgccgtgcagagcagccatctaaggatgcccggcgccgtggagggtgtgtgggagtgtgttcgtgcacaagcgcgcgggcccgtgggaccccgcgagattggcgactagcgggacgctcggggcccaggatccctccgagtgccctgggctggaggcacgcctggcgaccggagggc

SEQ ID NO: 33377 - DNA, 687 bp, Mus musculus
  source 1..687: mol_type = other DNA
gccgacccgcggccacaagtgactgggtgcacgcaccgcagacgcgagtttgcaggctgcacgcgtgggcggctccgggtttaaccagagcgcgccccccttccgagggcggccctgcgtggagagcggcgtggccctcggctaagaggtccgggccgtcctggatgcagtgtccctcagcgcctcgagtgggcagagccctcccgcggccccgcgagtcctcgggggggcccccacccgccgccgcgcgccacacccgcacccgggccctctttgcgcgcggctctgcgcctgcgcagccctccgcgcctgcgccctccggtcgccaggcgtgcctccagcccagggcactcggagggatcctgggccccgagcgtcccgctagtcgccaatctcgcggggtcccacgggcccgcgcgcttgtgcacgaacacactcccacacaccctccacggcgccgggcatccttagatggctgctctgcacggcgcgaggggtgaagccagtgcacaggtccagggctttgacttgccgcaccggtgaccggcctgcagtcctcggcggagccgcgcgggggcgctgcggggaggcctcggctttcctgccgtggcggggcacggccaggcgggggcgctgcgggcggcgggcgagggctaggccggcctctcctgcggggccggctggggc

SEQ ID NO: 33378 - DNA, 490 bp, Mus musculus
  source 1..490: mol_type = other DNA
aagtaataacaataataataacctaataatcctattgaaatgggaacaggtgtatgtaatatacatccctaatcctgaagaacagtgttatctatctcatcccagatgaaacggttattatcagagataagatatcatctcattactggggcttgtgagcaagctttcctccatgtcgggaacctaatctatccagagacgttccaggagagacgcgttttgaacccagaaagtgtctcctggccgctggtgagcgccaggcgagcggaggacagctgcgcatgcgcaatcgggacttctgtcagccgctccgccccgcctggaaggagacagggtttctctgtgtagccctggctgtcctggaactcactttgtagaccaggctggcctcgaacacgaccggctgtcagccgggttgcctgcacctaggaatcgcttgcggatggccgccgcgcaggcgcagctcgccgttcccaagcagaggctcgcg

SEQ ID NO: 33379 - DNA, 660 bp, Mus musculus
  source 1..660: mol_type = other DNA
gaaacctatcatagctcggttacagactttcgatttgaagttaaagaggcatttaaagcaaggccctcctaggctacacttggatgatgatgcaaaactacccgtgttccagaaagcggaggttgaagttcaaccgaaggaccttcgtttacatttcaaaggtgcctcttggaagacgccttcgggtgccactttccaagcggcttttcgccctaggagatagccaggccactgggcaggaaggttcctcgtgcccatgatagattaggtagcatgtattctacgctggataagaaatcacaacctacatattatagaactggtttgatgatgccagggccagtcatgccgcctccagggaccaggactctgcggttcaggagacaggcatggttggtggtcctgtctgcctctcctggagcaaggggaggggaggacaaccgcccccctccctctgctgcctacagcctgtccaggtgggaaggacattttctggggatgacccggagactcctctgtccctgaaggctctctgcaggcatgatgtgcagagcgcgcggcggggcggggagcgtggcgcggccagggcgcttggcccctcctggctggggctgcgcgcacggccgcctggcgcccttccagcgcggcgcactcacgcgg

SEQ ID NO: 33380 - DNA, 239 bp, Mus musculus
  source 1..239: mol_type = other DNA
tctcgaagatttaggcagcccagtgctttgttggttcacttttaagccaaaaaaatagaccaggtgggtctttgaaatgattaaccaaagggatgctttcccctgagcctaggtccctcgttagaacgccgtgctgtcctagctccagagcgcctgggctgcctggcggcggggagtgggcccagctctctgccattggtcgcatggccccggagggaggagggacagcgcagagccca

SEQ ID NO: 33381 - DNA, 625 bp, Mus musculus
  source 1..625: mol_type = other DNA
cagtcctgggactctcctttcacacgtggccgtggccgggtcatcggagcaatgccgcaccagcggtgcccaaggggaagacgggcacctcgagttacattacggccccaagaaggctaagctgtggcacagccctccgccgcccagggtcgggagcccgtggggcaggcgtcgggagcgagccgcgccctcgggccggccaggagggcgccgcggcctcagcccgaggaccccgcgtcgctctcccgagccagggttctcgggagcgggccgcgcaggcccagggaggctaccggccgtgccctccctggtgacatcgaccagaggggtgcaagtggcgacgtgcggtgcagtgcggttcggtgcgcctggcacgcctggctttgcggttcaggagcccggggctgcgcggttggccccgcccggcagcgccccgggggccgagcatcagcgggcagagctgcaggtgagcggtcgccaggacgatgaggacccgggcgcacgcccgccgcggttggcatggaagcggctctgctggccgtggcgagcgcactagccgaggctgctggaaccggcccccttcccctccctccgcgcacggccccgcccgcccggccccggccgg

SEQ ID NO: 33382 - DNA, 356 bp, Mus musculus
  source 1..356: mol_type = other DNA
gtgagctgggtcatgccacatcactgaattatttgaatcaagataaatggataattttatgaacaattctaggttggtttctaatgagacagaagttacatctcattttgatttgaatagtcacagtatagccctggctgtcccgagaccaggctggcctcgaactcagaaatctgcctgcctctgcctccagagtgcaaagaagtttaattgcacttataaattattatggtgtgttctttatggattacagagcaaataaaaaataatgacctgtctccccctggcggccggaagcgattgccgtggcactgcgggtcccttcggcggccccagggcagccggtacggagtgcg

SEQ ID NO: 33383 - DNA, 374 bp, Mus musculus
  source 1..374: mol_type = other DNA
cccattcttttctattaaagaaataagacagatttcctcttagaaaaatggtaaaccacttgcagaaatctgaactgtcagtatttcttgaagtcaaaatatcaaaatgaggcacagggcccttttaaacattgtgttgtggttgtcttgggacccccacaccacacagttgtctggattcatgaatttttatggggacaactcatatcaccttttaaaaacgtctccagccaaactccaaggcagagaatttcttggcccgaaagttcacaatcgtcaaagttcagaatatcttttcagagtctgggggtcagaagaagttggatgttctgacaacccactggctcagaaccctgacctgagacagtttcccg

SEQ ID NO: 33384 - DNA, 377 bp, Mus musculus
  source 1..377: mol_type = other DNA
tttgctagatagaccaggctggtctcagaacccacagttggtgtggatgaaggaggatccctcagactatctcacctctttccatgcaaaaggcagagacccggagggcttgctgggagacagaccacctgcagtggtgggacacacaaagctcttctgtgttgtgttcaagtgagctgcgtcactgcacaacaggttaagctaaaccttagacacagtaacaagagaaaagatcttgtttcagtagctcttcactgcctcagtttctaagctgagaaaacgggctggtttgagtggcgtgcctggggtgtccacgtcactctgcccagggctcccacagtccccggggggacgcgctccctgcctcttgctccgcc

SEQ ID NO: 33385 - DNA, 518 bp, Mus musculus
  source 1..518: mol_type = other DNA
agaaaaaattaattttgtgttttttattgagcagcccagagtcagtaagacaaacaaatacatatattggcatgtgtctatgtattgtctaatgacttttaaatatatatatttaggctgcatacttcagagatacctgggatggggtcccagtccccagaattgtatccagtggaagcagatttccaccctgacagactgccagtcttgcagccaagaggcctccaaggccttaagttatcaaaagcttattgtgaaataaagccctaagaggccaccatctcaacagtgactcatgtcttggggtcaatcgcgaatgacgagtggaacgtggccctccccaagtccagatctggtctcccaggacagttcagaaaaagcactggcttccctattcctgggaagggttgatgaaggcgacctcaatacctggcaagtccttctagcgactggggaggctccagaagcctggcccctggactcagccacggtgggcgcgccctgccaaggagggcgga

SEQ ID NO: 33386 - DNA, 406 bp, Mus musculus
  source 1..406: mol_type = other DNA
cagcttcacaggtgaaaatatttacttggtgcgtgcacacagaatctaaggtcatttagaagcaagtgggcgctttgatgataatttaataaaaggtgccctttagcactaggtgcagcaactcttctcttggtaggtatggattctgcatctacaacaatgctgatgcaagcaaattaaaacgctcacagcttgctgttgtgccacgtttttaaagaaatagttatcaatatacttcaaaggaaaaactaccaattagtacagtatgtggcattttaaagattttttttatgagaactcggtgtatgaaaaataaaatcaacaaacacagagacttttgtgtgtccctatcacctgcaacttgccaggtttgcgcttcattatgattcccttacgcaggaaaagg

SEQ ID NO: 33387 - DNA, 347 bp, Mus musculus
  source 1..347: mol_type = other DNA
ccattaatgttcattgtaacatgaattgcattaatgattagtacatagataatagataggtcagatagatatactatgaagccatggattattcttaagaaagttctacttagtcatgtagtgttcatgcaggaagcatgcatgtcatgttctttttctggacagaaacaagtttgttttccagataataagacacaccctattgtctgtccattcatctactgatataattatttattaactgggcactatccctggccacaagttttagctaaaaggagctttaacatggactgtgtcataatggcagagtcataattgcagatgatctgaagggatttaaaact

SEQ ID NO: 33388 - DNA, 306 bp, Mus musculus
  source 1..306: mol_type = other DNA
ggaacctactgttggtcaccaccttctctacaagacagctcactatgagatggcactcaagctttctctaaatctcagaaaacaccttttctacagcatacagccctatctgctgtcactgcaaacaggtgaacttgttttaattaaaaggctccatttttaggttgagaacgggcattaattaccttactctaaatgcaagttagtgacttgtgaacagacaagtgggcttttcagcaaagagaaccacttttataccaaagctgggagatttcatctgagcccagtggcgattggccgcccgcc

SEQ ID NO: 33389 - DNA, 543 bp, Mus musculus
  source 1..543: mol_type = other DNA
acttttgaaatgtttataagacaaagaagatgaatagtaataaattatgcattatgattcatttgtataccaatttaaatgatttgaatacaccttaggatttctaataaatatccttgatgttataatgttttcaattgaaattttctcacgaggacctccaatgtattttgataattcatacaattcttgtgctgcacctacccaaccacctcatgagggtagtcagggaggcagagcttggcagagaggctcccggtttgacagcatcgtcagcctctccacgggctgtggcaagagcccggcgacattgggcctgtctccagacccccgcagcgaggtggggccgcggacccaaggcaaaggcggccgggagcaggtggccctccactcaccgcacgtggcccgcacggcgaggccgagggggaaggagagcggacgggcgagccctgtccttcccctcgcgaccgcacctgctcacctgtcggcccggtcccagcgcgtgggggagggacgagagggggtgcagcgaggactccgccc

SEQ ID NO: 33390 - DNA, 255 bp, Mus musculus
  source 1..255: mol_type = other DNA
gagataccactgatctaagctggagtctctagattctctgacctaccaaggaagggcaaatgagtcccctcttctctgaggcagatgccctcagccgcgctgacccagggaacccagaagaagccactctgtaattttcccagcagcctccttaaatctgtgggtgacagcttggacacgttgttaggaaacttgccccaggtcgcaaattaaatagagatcacagctctgacaaggatttcatttgaagggcga

SEQ ID NO: 33391 - DNA, 481 bp, Mus musculus
  source 1..481: mol_type = other DNA
tgattatttaattttaatatttcagagttacagcactgtactcatatacataaaataaataaatcttaaaataaatatttcagaattacttatttattcactttatatacataaaatttattgaaaataggtccttttcatatatatgcatttcgtatatatatatatatatatatatatatatatatatatatatatatatatgtatctatttatctatctattacacatacatacatacacatatactattttatttatttatttatttatttatttatttatttatttatttattagtagcattgtttataaagcaagtcaacacaagtggttttgaagacctgtttctagccctgtgtagaaagccaggataaggggcaaacaaatctttctttttcattagtgtttgcagtcagactgtgcagcctgttgctgggcatgaaaaacacagctgaaacctgagattcctcagctgggg

SEQ ID NO: 33392 - DNA, 326 bp, Mus musculus
  source 1..326: mol_type = other DNA
aaatattttacttattgtccttagttttgacctctagactgtcagtaaagtgtgtctgagacaacttaaatcaaagcctctgcggtttctatttctgtatgaagtaacaaaacaatccaattagaaaagttggttttgccgattcggaagaacatggtatttaattacctaattgagtaaacaaataaagaaataagctgttctgatttaggcctgaattcaaaggaaagcaaggccatctggataagcctgtgtttcaggctttcccattaatattaggatgtatataatgcccagggaatactggcagtgctgagcactgctcc

SEQ ID NO: 33393 - DNA, 515 bp, Mus musculus
  source 1..515: mol_type = other DNA
gaagggcaaggcctcctccctctcagcaaaggctggggtctccacctctggccgggtcactggcacacaggctccctagagcgacccagggacattccatcctcccactaccctcgcaaacgccgcgggaggagggaagggggcgcaagccttctagaacgcaggccttctaaggattgatgaaaggcttgaaagttggtagtttacaatcgactcctcggtgaagccgcatcttcagcaacagcggcactttttgggaaaccgtctcgcattgtctcccgcagacctggcctcgcgggtgtctccctgagccagggtgcgccccggtccgacctctggcagatccgcgccccgtgccgggtgctgggcgctccccttaagacgagggcaagcgctcacttggaccctcaaccgagggccggtcggagcggcgcggcggggcgggggcacggtctctcccgagctgcgaagtgcccagcccacccccgccagccgggctagggtgggaggaggag

SEQ ID NO: 33394 - DNA, 355 bp, Mus musculus
  source 1..355: mol_type = other DNA
tgctttaatttttttttttatttaactgaatgaatgtatttattttttatttatttatttatggtttctctgtatagccctggctgtcctggaactcacttttgtagaccaggctggcctcgaactcagaaatccgccgcatgcgcgcccagcatgaatgtaggcccctgtagccttggctggcctagaacttgcccatgcctgtctaaagaatctttccacaccataagattgtatttacaatcttttttttacattttttaattagatattttcttcatttacatttcaaatgcactgagtaaagtgagtgtactttaagtgttatctatgcagcatagttactagttactgt

SEQ ID NO: 33395 - DNA, 509 bp, Mus musculus
  source 1..509: mol_type = other DNA
agctgctgccacatggctcattgctgctatagcacaagggatacagtgtagggtgtgtctatccctacctgttcatggtgtttgcaccatttgaagcaaacctcacatgtaaacaaaggtatgtttggttagcatcttcccttttgtactaagaaagtgctcccttcttgcctaagtggacacgttcacatgaaggcttgtggggctgtatcttcagaaattaatgcaaagacctaggtatttgtggagtgtacaaaatagtcactacatatatatttatgtatatatacatgtaatatacgtatacatatatacatatatatacacatatatatacatatacacatacacatacatatacatgagtatatgtatatacatatacacatatacacatacacatacatatacatatacatgagtgttatatacccaaaactagagttggaaccgaatctggttcttctgcaagagcaactgagtggaagacttgtaccttcaactctttt

SEQ ID NO: 33396 - DNA, 490 bp, Mus musculus
  source 1..490: mol_type = other DNA
attaactaaaagtagttggcttttaaaataaaacatggcttttaaaataaaacatgactttggacattttgaagttaggaactaataattccactgtttggtcagctattggtaattgaggaaaatatgtaataaaaaatatttaaaaaaatgagtaagccaaagtagtgatttccattgtttgaaaacagggttaatagacatatgaattcactttaataaaacacgttggtgaataatggttctaaaatcatatattctgtagataattattgaacaaataaaacagagattttttgcactgcacaaaaattgattagagaagaatgaaagtatgtgattgcttttgtcaaaatttatatgtcatagtatacaaataacaaaacataatggctaattttattatctatgggttactttgtatgatcacattcaattctcaaattcattaatatggcaggtaatagtacagttatgacttaaaatttat

SEQ ID NO: 33397 - DNA, 254 bp, Mus musculus
  source 1..254: mol_type = other DNA
ttctgaaagaaaacttttgttcttagtagcacaaagactgaaagaaatatcatttctattgtgttgcactttcatttgaatgcttccatgcagacgttttacagagaattttcaggaccacctcattcaataaaatcaactttatttgctttgctgtacagcaccctactgaaaaagtcaggggatggcaattacaacaccaaagtgtcacttgtgtgtggaatcttatacttgccttggccattgtcaaagaa

SEQ ID NO: 33398 - DNA, 426 bp, Mus musculus
  source 1..426: mol_type = other DNA
atttagagtagattctagtttaaaaggcacaagaaaaaagaataggaaatctttctattcttgttcccccaaacatgttaattaaatatttgatgccagtatgggcctcaaagatgctttattagggccagttcggaaaaagtatgagaactcaagggatgagattttcgttcctcaaagcagtgagctgatcagcccggctccctgccaggcctcgtggttcttgcataaacctcgggcggttagttctaacccgacctggattccagcgccctcatcggccctctcccgggagggtgcatcgctgcgggccctggggcagtccagggtggcttctgttcctaatagggatgatgtagaggcaggctgcgcgactccgcgagaggggcggggccgtgacgggcaacatcacagcccatgggaggc

SEQ ID NO: 33399 - DNA, 630 bp, Mus musculus
  source 1..630: mol_type = other DNA
aaccactggtctagttagtctgtttttagaatttctggacgactgagccacactcattccactgaacctgaagttcctcatagagctgctctgagtgggcgactcgatgctcaataccgcgtccccgagcgggcgcttgagaggtgagcgtggccgctgggcgcccagagctccggcaccccacggcgcccactcaagctgcttcgcctcctagccggtggtgaggcctccgccgccgcgccccagccgcacgcccactcgcctcccgcacgtgtgggccgtgattgtccccggcggtatccctccgcgcccccgcctcggctcccccgccctcccggggaccctcgccggctgcgctgcggaaggatcgcacgcacgcgcgcgcacatcccgccggccgcggagagccgagggagctgcggcggtgtgagacggccgtcaccagccccgctgccagcgtcgctccgccgccggctcctgagccccgcggccgcggccgcccggcgctccccgctgcgggtcctgtcaccgcccgccgcagttccccggagaggggcggtcggtgcctgcgcagagccgcctcctccccgcccccgccccgcctccaccgccgccgccgccgccgccgcc

SEQ ID NO: 33400 - DNA, 517 bp, Mus musculus
  source 1..517: mol_type = other DNA
tgaatgttcagagacccttagcctcaaaccctttggggtcacatatcagatatcctccacatcagatatttacagtatgattcataactaacagaatgtcagttatgaaaaccactggtctagttagtctgtttttagaatttctggacgactgagccacactcattccactgaacctgaagttcctcatagagctgctctgagtgggcgactcgatgctcaataccgcgtccccgagcgggcgcttgagaggtgagcgtggccgctgggcgcccagagctccggcaccccacggcgcccactcaagctgcttcgcctcctagccggtggtgaggcctccgccgccgcgccccagccgcacgcccactcgcctcccgcacgtgtgggccgtgattgtccccggcggtatccctccgcgcccccgcctcggctcccccgccctcccggggaccctcgccggctgcgctgcggaaggatcgcacgcacgcgcgcgcacatcccgccggccgcggagagc

SEQ ID NO: 33401 - DNA, 289 bp, Mus musculus
  source 1..289: mol_type = other DNA
acgtttggtcagatccaaggctggacaagaatcaggcttgatattttgtccagaacacttgaagaaaattatatagtaatttaaaataacggaagtttaatatacagaattattaaaataataataggggcctccctaaggccggacttttgacattgttgaaggcaaaggtaggtgcatgttcatacttgccatgcaagaagggatcacactttcctgctgccttgtcagccagctgcagacaccaggagtaaaaccaagtgaaaagaattccttcaatgaatgaggc

SEQ ID NO: 33402 - DNA, 434 bp, Mus musculus
  source 1..434: mol_type = other DNA
tttgttgttgttgtttaagcaccacaatatgtgataagggagcatataatttttaataatacttaagttcagatgttgtttcttctattaagaagactttctgttacctgtctatcttcacttcccattgggatgctattaccaaatatggtccttccaggaggaacttgcgaagagtctctcaaagaaacccacgcgctggggtgagagttcaagaaaggccgaacccggcctctgtctgcgagtcggtgtttccggcgccgccagcctcggggccaatcccgtctggttcccgagcgcgcacgcgcagctctggctcctcgttttccggagcggggaagagcctggctgcggtggcggccggcgctcgccctccctctccggagcgggcggagtccacacttccgcggggcggggtctgcccagtgctgacg

SEQ ID NO: 33403 - DNA, 470 bp, Mus musculus
  source 1..470: mol_type = other DNA
cctgtttcacaattttattaatactcagtatctttcaaattctttcctataggatatgcacaatctgccaagtgacactttaggaatgttcctttctgtgcatttgtcagaaaaagtaacattcctaagtgtcacttggcacaggcctccctaatttgcaaacaccttggattccaggattctggagcaggtgtaaacattttgcaggaaacataaaaattgttttaaatattcttttggaagagataaatattttaagagtaaaggaatactattaaatacatttggtcgatataatgatgatgctaatttaatcaggtattcaagtctataactggcttcagtcaccctgtcaggatgtatgcacacatcccagctctccttcccagaacgggcgcaggctctggctgcgcatgcgcattccggcttccctcgccgaccttggcggagcgcgcctgcgcagtggggag

SEQ ID NO: 33404 - DNA, 640 bp, Mus musculus
  source 1..640: mol_type = other DNA
tcttcgggggcatttctctgcaaaaagaaaaaacccgtcggatcccgggctcccaaggcctgcaccccaggccaggtggccggccggccgactcaccccagattccaccgcagcgggagtccggagtcaggcgggtctggggagaactcgccgcggccccggccgggcgcggggcgcgggcctcggctcccggccacgacatggagcggggtgcccctcggactcgctcgctcgccggtcccgggccaccgggagggaggctcggctctgatcgcggtgcctacgccgtctacagccactgggccgggacgcggagcgctggaacaccggcagccgccgatcgcggcggtctgagcagcctttggggcggcgtgccggggagagcgggccgcagggccgggttcggctgccaacgtcagcactgggcagaccccgccccgcggaagtgtggactccgcccgctccggagagggagggcgagcgccggccgccaccgcagccaggctcttccccgctccggaaaacgaggagccagagctgcgcgtgcgcgctcgggaaccagacgggattggccccgaggctggcggcgccggaaacaccgactcgcagacagaggccgggttcggcctttcttgaactc

SEQ ID NO: 33405 - DNA, 289 bp, Mus musculus
  source 1..289: mol_type = other DNA
aaaacaggatcatgtgggtttgtctaataggtcctctcccaaaacactttaggggaactaaaattacaggccactattccatattcatcaatatccacaaatatcttaaatactttcctggatactatttttagtatgtgcaaatatttcacaaaagaaaataataatttaaagtactggaattttctatttccaaaaagcagagttttactggaatttccaataatcatatttctaataaaaatcaaatgacattcagaaggtctgaggctttaaaccctgaaaggtt

SEQ ID NO: 33406 - DNA, 548 bp, Mus musculus
  source 1..548: mol_type = other DNA
acctctaagatggggatcttagagactttccagctgagggttggtaaggggtaggttgacctcacccatttccttcttcccaagctaaaagcctaaggtttggaccaggactagacgttaaggactcaggcaccagagggtctctccccagtgggctttcggggccacacccgaggccttcgcgcggctcccgcccgactccgggtcccgcccccgcgtgtcaagctaccggccgagtagcctgatcgccagctgcgccccgcccccggcgcactcgcgcgccctccacgcccacgccgggccagcagttgccctcgcgtcctttccctggggtcgcagagaagcgaccccacgcggcggcgatcgactcattcaagggctcccagcgaggaaaccgctcgggcgctgccagctgggtcgggcggagctgcgcgggccgcagggtggctctgccagtccctgagtgccgggtcggccgcacacgtgtcttagcgtcacgtccgcgcgcgcccccggggcttgcgtcagctgccgctcctgaagcgagt

SEQ ID NO: 33407 - DNA, 374 bp, Mus musculus
  source 1..374: mol_type = other DNA
atttatgggcatgtgtgtatataatgtgtactggtaccaaatggtatcagatcccctggagctgggaccaaagtctggtcctctaaacacctctaagatggggatcttagagactttccagctgagggttggtaaggggtaggttgacctcacccatttccttcttcccaagctaaaagcctaaggtttggaccaggactagacgttaaggactcaggcaccagagggtctctccccagtgggctttcggggccacacccgaggccttcgcgcggctcccgcccgactccgggtcccgcccccgcgtgtcaagctaccggccgagtagcctgatcgccagctgcgccccgcccccggcgcactcgcgcgccctc

SEQ ID NO: 33408 - DNA, 791 bp, Mus musculus
  source 1..791: mol_type = other DNA
ggtgcccggcctggcactgccgaagagcgaggtcagctcgtggtgctgcggggacaccgggtcggccccgccgccggctccggggcctgagatcaccgctgccgcggcgggcaccgcggacgagccggggcccgctgccgagatggtggcggcggccgggggcgcagccggggacggggcgtgcggggtctgaggcggcggcggctgccggtggaggacgggcggctcatcgcgctccgagcccaccatggacctgcgggcgtctgcctgccgcggggccgcccgggttaaggcggtgcgcgccccgcgggtggcgggctccggggcaacgccacggcgcccagcccgggggacccagcgcggacccgaccggcaccgggagggcggggaccggaccgcgccgatcctctcggcggcacccggatggtcgtcgctctcggggctcgcggccgtgcggtgccctcctccggcggcgttctggtgcgcagagccctggcccactcgcttcaggagcggcagctgacgcaagccccgggggcgcgcgcggacgtgacgctaagacacgtgtgcggccgacccggcactcagggactggcagagccaccctgcggcccgcgcagctccgcccgacccagctggcagcgcccgagcggtttcctcgctgggagcccttgaatgagtcgatcgccgccgcgtggggtcgcttctctgcgaccccagggaaaggacgcgagggcaactgctggcccggcgtgggcgtggagggcgcgcgagtgcgccgggggcggggc

SEQ ID NO: 33409 - DNA, 482 bp, Mus musculus
  source 1..482: mol_type = other DNA
agaactagtcttttacaatcccttgggtgctttaaaggcagcaaagtacatgctctcttatgtgaggtcggcttttgcagcttttcctcatttataaagaaggtgaagggtttgttgctagaagcaagccatcattcttggccaagtgctggcgcgttctcctgggcgcgcctcctgcagggtcccttaggacacgctgggcccgcctcgggcgccgtcgccccctccccgcggttcccatccctgtgatgcgagcaggtgaggtttcgcctaggctgccgggatggcgaccccaggaggggtcgaggcggagggcgcagctcgaggcccggggtccctcctggggctggttccatagccgggttaaccctgcagccagctggggcgcagggcccgtggaatgcgcgctctgcggctgcgaaaacccggagaggcagatgggagcgctcgaggcgctcgcagccaactcctccgcggtccgg

SEQ ID NO: 33410 - DNA, 455 bp, Mus musculus
  source 1..455: mol_type = other DNA
tgttttaacaccaataaatatagggtcatgttcttgaagcttttaaaagacactttcataaaactactcaaaagcactttcatagaaataggtacattatgttcaacaagtttctctactagatgaatttaaacagtaaaaagaaaagtataatgtaacaaaaaatattacatgggtactcaatatgaaatatgacagttaaatagaatctttaatgttcatttatagtgttcaccagacacttcacgggtctataacattataaattgttacatgatgacagaggtcccgggcatcaattcagaaccagggtctgacccttcaattcttttcactgaataatatactaatctccatggcatttcctggaagtcattacttttgcgtataagtgattctaagaaatattttctgattttagttactaacatcttccttatgctttttttaacaga

SEQ ID NO: 33411 - DNA, 568 bp, Mus musculus
  source 1..568: mol_type = other DNA
tgtacagtcacatttatgtggttcatgtaaacgcagaaataaaaagggaacagcggttatctctctgttcttgtcaagctggctcaacggattgaaacgtgctggccaccatgcctcatacatacaaaataataaatgtagaaaaatgtttttctatcatgaacaacaacatggagcccaggctgcctcagatttgtggctatctgactcagacaatgtggttgtgttatttttcaatcaacaaataccttaaataaatacaagctgcaacaatattacttaataattgtacctctgaagtactgatatcagtaactaaaaaactatctgcttagttactgtctttaattcataaactcaataccagtttcaagagtttaacactatttttttaaaaaactattatgaaacagaacagtatgtggtacttttactttaaaaaaaaaaaagatacatgagcgttatcatggataatttaaaattctttttcctaaaacagtaactgacaaatttgagttacttagacagatgaaattgttttcttacaaaaacttcctcaggagacttt

SEQ ID NO: 33412 - DNA, 245 bp, Mus musculus
  source 1..245: mol_type = other DNA
gccagtacagggcacccacacaggtgtgctttactctcagataaatgttcagttttccagaaaaaatagtagctattattacacccttgatcaggccttgacaatctgtaacccttagcaaatctacatcagctccaacttatataagcacaaactagagccggcctccaaaagctggtggaaatcgaatttggcgagccatcaacatttcagatacctacagggactgtaggtaatgaagcatt

SEQ ID NO: 33413 - DNA, 278 bp, Mus musculus
  source 1..278: mol_type = other DNA
ttgtgttaatccagagtacaactaacaatttgttaatcagttagctacgtgcagactggcattgccagtacagggcaacccacacaggtgtgctttactctcagataaatgttcagttttccagaaaaaatagtagctattattacacccttgatcaggccttgacaatctgtaacccttagcaaatctacatcagctccaacttatataagcacaaactagagccggcctccaaaagctggtggaaatcgaatttggcgagccatcaacatttcaga

SEQ ID NO: 33414 - DNA, 491 bp, Mus musculus
  source 1..491: mol_type = other DNA
attaaattgatttaataggtataaacacactcaaaattcagaatatatggaatatatgttccaagtagcagcacctcctcacttaacctacaatttcactccaagtgtatcttgcctttttcgtttaaaagttaaaaactgcatgtaatagttaccaagctgattaattcaatattatctttaacagtaaactcaattcataaagaaacactgtctgttacctaagttcgttttttccctaatgtaatttggggaactaataatttattgttgttttacccacaaagacaataatcatacttgtcagacagtagacatttagattggatttatcatttatggaaaactttaatgatactatttcaagttttagaaaaaaaatttataaaaacaaaaacccacaatatcttaaattgctttttaaaagacaatgttttctacagaatggagtctgcagagctctgaatattcacagaaggtaaacaatcttc

SEQ ID NO: 33415 - DNA, 296 bp, Mus musculus
  source 1..296: mol_type = other DNA
ttcaaggaacccaagcaatgagcggctggcatgtttggtatatagctcttaaaacatttgtttaaacataataccgagaataatagctaccacttcttgggaaatgtgactcataatctgccacagatcggacagaagatgatttgattttcagatcaagtcttctcctcattttaactcctactattacatatgaagtattcaatacggtctggcctctgagggcacctgaatgcatatgcgcccttacacatataatttaatataataaaatagaccacatgttaagagcactg

SEQ ID NO: 33416 - DNA, 290 bp, Mus musculus
  source 1..290: mol_type = other DNA
tccacaaagaactttttagaacagtattatgttctataccatgtattgttatatcattatacatttatgttaagtattatgagaaatctagagatgatttaataagtataggttaaatgcgaatatatcactttttataaatgacttcctataagtgctgtatgcagtgcatacaaacttaccaaaattttaacaagtgatgtgttcatctatacttatgagctacttgccagcaataattaaatattttttttaaatgtggaaaaaagagtttttcttctcttcttgaa

SEQ ID NO: 33417 - DNA, 685 bp, Mus musculus
  source 1..685: mol_type = other DNA
atgtaaaagtgcatctacttgctgcagtgccaatggcattttaaagaaccttccaaagcgttgtatagaaagaatactgcttcttagagactacgtagtgttgtaacacaagttttactaaatactgcttactcagcaaatgaaaattcttatcagcacacattttcttatataaacatagcttgtttcctatcctgatgtaaaataataattttattttacttttatttcttatgctttaagtttttggtagattctagaaatgccctgaaataagataatggctttttctttttctttttgcaatgccaatagctattgtgctttgatgacaaaaattaagaaaagtcacttggcttctataactagatatatttatatatgtgggaaaaaacatttactcttgcctgttttttatcaatagagtcaaatccagcgatcaaagaacccatgggttcacacgtgatgacatcgcaggtctgctttggcaaaggcagcaactgtcgaactttgcttgtctcctagttctttctagaagaaagaggggggatctaaggaagttccccagtgacacatttctatggaacagctgcaaattggactggtgaaatgtttcatttcttctattcaagtagaaaatcagggtgcacacaaaggcagtcttgttctccatgacaaatcagag

SEQ ID NO: 33418 - DNA, 310 bp, Mus musculus
  source 1..310: mol_type = other DNA
tatatatcaaaagatggcctaatcggccatcactgagaggcccattggacttgcaaactttatatgccccagtacaggggaaatgtaaatgagttaaatacctaaccacagtgattgaagcgtctttgaatgttattgctgttgttgttaccaccatcattagcatatattcattgtgacatgtttttttattcaagtatatcacatgctgtcatccccctccccctgttaggagatgggagagggggcgcaaactcgcaggcgagcctgggttggcgctggtggtcccgggtcgatggcccgcccattc

SEQ ID NO: 33419 - DNA, 455 bp, Mus musculus
  source 1..455: mol_type = other DNA
taatgtttcagaatctaatgaattaattctgaaattttggcaatagcttccttcagattaattaaataacatccaatattgcatctttattacatcaaatacacacacacaccatggggagggagagatacaaaaataccatcagtcgcattttgtgttctccattggaagaaactatgctttaatttgcaatattggagccaattgaagataatttttggagaacctgtatatgtacaacatatttttacaatatttgcaaaatactatttcattctcatttcattgctgatgtatggttaagaaagagcagtcagcttctagtgttgactcatacttagatattagtttcactagacacgcaattacaaaatcattataatatgtcctctaaagaaatggttttttataggtcaaagactttactaaagccctttgacttaatatttaatgat

SEQ ID NO: 33420 - DNA, 161 bp, Mus musculus
  source 1..161: mol_type = other DNA
ccgggattccccacaaatctcccttttctttttataagggagagatgtcacccaatgctactcatctgctgctctgtaactcctgctaaggaggttcttggaagtcactgaccagacctgttcaagcagagggatgaagatgatatctctcttcattcggc

SEQ ID NO: 33421 - DNA, 575 bp, Mus musculus
  source 1..575: mol_type = other DNA
taagattgcttaattccaaaggaataaataattaatcatagagacttaggaattttgggggagttctctaggcttaaaaacaactgcctgattaacattaatatgattagacttaagagaggaaaaagtgtagaatgactctttttagttttcttctactcatactttcagtacatctgatggtatccaatcacatctgtgaacctctgactcattaatttgattcatgatatcatactatatcttctaaaagccataatgtttgctaaaatacttgttctgaacaattctggtccaggtttaaagttttagcttggtgcatgattaaacttgaacaagtctccacattgttaacatagctaataatacttagtgatgatattagtgtatattttgactggattcaagtaactttctataaacctgttagagaataaagattactttaagaattatccaatgctaagactaattcatgctggcattaataccacagaatgaccgaattttaattacatgttataataaaagctacctgacctgatgtatttcaacatctctatgactaaaggtta

SEQ ID NO: 33422 - DNA, 371 bp, Mus musculus
  source 1..371: mol_type = other DNA
tttagacttttgatgacttaagtattctctacacagaatattttggtgtattgctcttgacagatgtatcaaacaggtgatagcactccttttattttgtcctcataatctgtgaacgttttatgataagcagaggtattatcttcacgttttagtggtgaagaaacaaatagattaagaaatactttctttccaaagatggctctgagagagcctctcagggaacgtctttacttcagactatgctccagcccagtggtaagggagtccctggaggctccatgccccagtaataacatttgaaatgtaaatcatatgtatatatacatatttaaagtcccataaggcttctacagagaggccactcagaa

SEQ ID NO: 33423 - DNA, 579 bp, Mus musculus
  source 1..579: mol_type = other DNA
tgagattcaagtagaatttaaaattaatcatagggtcctaagaattattgtggacatattttcaaatacatgtatgaccatttatatgattaagaagagagaaaaagtgtgtcttctactcatactatgagtgcatctgatgatatccagtcacattggaatttcaatcatcgtataatgcagctttctaaaagtcagactgctaaaatacttgaactttctggtaattctggtctaggcttaaaattacagcttgctgcatgatcatgatttgttaacataggtaattatagcgatgatattagcatatattttaactggatatcaaataacttactataaatctgttagaaaatattgaaactacaaaaaaattacttcaaaaattatccagtgcttacatttggattctgatttcctaaagctattttatgctgacattaatatcacagaatgaagaaacactgcaggaaatttaaattacatgttaatttagtgggtaccacacctgatgaatttcaacaacaagttagaaatgatattgcttaattcaaaatgactgtttgaaataagaatcag

SEQ ID NO: 33424 - DNA, 531 bp, Mus musculus
  source 1..531: mol_type = other DNA
ttacattgtagaggtctatgaactacaactggccactggagaggttcctctacaagtagaaaatgcctgtgattgtatcttagtcgctaccatgtacaatccagatttttgcttgaataaaaaactgatgtagccttgagaaaaggccaggtttgtttcttatctggaataatcagtcttctggatgctgttcagagcaacttctttatgtttcctgaatttaatcacagaaaataaaacggaattattgtatgcttagtatagaagtaatgagttcaactatatatattaaccataaaatgtttgctgcattacctaaatgtgcgtacacagttccatgcacatacacatgggaagatagaatgcttctatgttgttttgggagtgtatcaactaaatttaaattagcttgtcctcaaatgtctttgttaaaactacctctgaatgacttggaggtttttctgaataaattatctttgaattattaatcttggctgcataatatgcaaatcagactgcactggtcatgtc

SEQ ID NO: 33425 - DNA, 634 bp, Mus musculus
  source 1..634: mol_type = other DNA
tttcatagtgctatagaatatagcctttgtgaaacaggggatccaatataaaatattagctttagaaatatgtagtttactctttaaaaagtagtctggtaatagtcatattgatatgaagattatttgatgcaatctacttattgtgaaagttgacatggaatatgcttgaagctcattgaaacagaattgaatacttgagtcattcaacccttgactcattcattatctaattaggtggggatttgtttgtgcagattttctggtggcaattataaacttaacagccaaagaaatgttttaagttagaatattggactaaaaggtgagaattgtctaattatcaatgtagccaaaaacagaaaggaacatgatataattattctgtgttctcaaaagaaatcatataaacagaacaacaattaaggaaaattgaatttttttaaaaatttcacatagctttaaaggtgttgtttttctcatatgttgcaatacctattacttacaggtaagagagtctgaataataacacctttgttgtgatatgtttttcttgaaaactgttcagaaacagatgggaagaaagctctgctttgaaatgttaaaattcaacatccaatgatttgaaatgagt

SEQ ID NO: 33426 - DNA, 378 bp, Mus musculus
  source 1..378: mol_type = other DNA
gaaaatggttcttgcagtatatgaaactttgcataaaccccctttcttccccaataagtaagggaaggtgggaggaagtgctaccaccccttggctttcattatctgtcagactgaagaagtatgcatctatgtatgtatatatgaaacatgcatgactatctgcatttactcttctaactggtaagaaaattaaccatctacctgtttagcaatacaagatctgggcctgtttttcatactccaataactttaattagatttataaaagcaactttattttaggcataaccataaacgtaagtaaatatgtacatgcattaattatatatgaagagatgctctttgtaggatttataaagcataatgactggtattt

SEQ ID NO: 33427 - DNA, 236 bp, Mus musculus
  source 1..236: mol_type = other DNA
gttggctttcagatttaccagacatctgacactttaagaaacatctgaataaaggatgcttttgtctgtagtttttaaacattgctcttgattactgggagtgattactaaggtttagtccactaactgcatgttgaatattgttgcttcacaaggggaaacggcccccttttttgtgtgtgtgtgtgtgtgtgagagagagagagagaaaggtctgtttgctataggacatcagt

SEQ ID NO: 33428 - DNA, 597 bp, Mus musculus
  source 1..597: mol_type = other DNA
tactagttaattaattaattatttcaggaagggatcagtaagtttcatggaccagcagaggatcaagatctgttactagtacctctgcaaactagtggagtactttatttatttatttatttatttacaccatgaaacaaacgtttttatagttaaaaatcaacgaagttatcagaattccttgaaattcactggaaatcccgtgaattctaggacagcagctaatgaactaggagctggtgtttcattttattttaaaagagggagccctgcttgctttctgtacaccacactgcagagttggaagtaagggaaaactgcaagttttattttctcgcagaactccaaaactgtgagccaggcgatgcgctgcttctgctgctgcaggccgggcagaccttgcgggcctcgcgggctgggcgcggagccccgggagctggagcggcggtgagcggcgcgggcccgggcgagcgagcgggcgggcgggcgggggccggggctgcgcgtgggagctctgcgcgtccgcgcgccttcctggcggggctggcgcgggggaggggccgcgcagcggcggaaaccggcgcgcggcgataagag

SEQ ID NO: 33429 - DNA, 587 bp, Mus musculus
  source 1..587: mol_type = other DNA
ttaagattataaagccaaactgtaaagttaatgaaccctctttctttataaagctgtgtttaatattcagcttgattcagaatcattttcactgtagtctctattatttaaatgtatgtaaattcaagttggactgatctgcgttaactaagcagttagaccaggttcttatgtacattctcacaataatgttagcatttttctaagtagtgcaaaaaatagtatttggataaagctacacgcgttgggcaaagcaaggcgctgtgcagggccagggcgtgcccacctgcaaaccgctggttgtctggagcctgcaaacaccttgcgagttccggggaggctccggagatgtctgtctcagactgctcagctcaaagctttagacacaacgctgccagcgtcccagccatacgctggccagaagccaccgctgcccaggcgtgcaggggcgaggccacctcccgccctgggcgcccagccctgagccggcggcccggagcttgcacggcggagacacgccccttgcctccccgcggagcacagactcgcccgggctcctaggctccgcccaccccgctgggagcctg

SEQ ID NO: 33430 - DNA, 422 bp, Mus musculus
  source 1..422: mol_type = other DNA
cagatgcacaggcccgggcagagtggagaaggaacagctgggcctccgcctctccactctgtgagactcacatcccttcctacttgcaagcctgctcctccgactgagcatgccctgactcggtgcgggagccacggggctcgatccacaagccatattttggctctaaccaaaggggtgggctgcagccctaactccttgtccggacagggactcaggtcgagttcttcggggcctggaagaggtcgcagccagctgctgcctgctgtccccataggaggccggcagccgcacagctggcgccccctcccgatgcggcggaaaagctggagcggagttcgggcggggcaccgcgggcgacgtactgggcatgctcggctgggcggggagggctgggctgcgcgcggcgagtaggaagccct

SEQ ID NO: 33431 - DNA, 561 bp, Mus musculus
  source 1..561: mol_type = other DNA
gaggctccggagatgtctgtctcagactgctcagctcaaagctttagacacaacgctgccagcgtcccagccatacgctggccagaagccaccgctgcccaggcgtgcaggggcgaggccacctcccgccctgggcgcccagccctgagccggcggcccggagcttgcacggcggagacacgccccttgcctccccgcggagcacagactcgcccgggctcctaggctccgcccaccccgctgggagcctgctgcactcgagacccagccgagcgcgggccacgcgcgcgcgggttggcctgcgccttcgggccgctgggaacagccgaactacttggacttgacccgccgcgccccaggcgctctgagcagcgcctatcagtcgccctgcgcgggagcgcacttgcagcgcgccgccagctggaccgggaagttgcccgcacgtcctcggtcgcagctccgggcgaatttcatggcccgcgacaaaagcgcggccagagccggcgtgggcgagcccctgcgcgctccgacccgtggggaactcccgcgcgcggtccctgg

SEQ ID NO: 33432 - DNA, 448 bp, Mus musculus
  source 1..448: mol_type = other DNA
ccttgtggtatggtaggacatcttcgggtcttcaggtagaactatttctaattttgatttatgggaataagatttatttattttatgtatatgagtttactatagctgttttcagagcaaccatgtggttgctaggaattgaactcatgacttctaggaggagcagtcagtgctcttaagccgtctctctagtattagagagtctttaaagatttctaagaaataagaacttctttggtctttgaggacagagtacacaatggtcgatgcatggctttgcaaataagttctaggtttaacaaagtaattaaaattcactcaaatttccgtttctggccagaacacgaaccgcggctcacaccgctggcgccgtccgtgacgtcaccggaaatgtctgcgtcccgccctctcgcgctgggcgccggaagcaaagcagaggggaatgtgc

SEQ ID NO: 33433 - DNA, 577 bp, Mus musculus
  source 1..577: mol_type = other DNA
ccctggcctgcccgcggtgcagcaccgacggcgacgagtccacctcgatctccttgtcgatggtcgggtcgtacttctcgatgaaggagcacggtgagcgcggacttgcccacgccgcccgagcccagttggctccgtcggcgccctcgtcgcgcctgccgcggccccgtcggggctgcgcgccggggaaggctgggctgggcggacgggtggacttctcccgcccggtagcgggctcgagcagagccccgcgccaggccgaccggcagcgggggcgcgtccctagggcgcgggtcccgggccccgcagcagccctgtcggaggaccggagctcttcgccccggcagcctgggagggccgggaggaggcggctgctaattgggcgtccggctgagacacgcgtggcatgagtccccgcggaacgtgcgtccagctccgccgcagcctccgctgggcgagggcttcctactcgccgcgcgcagcccagccctccccgcccagccgagcatgcccagtacgtcgcccgcggtgccccgcccgaactccgctccagcttttccgccgcatcgggaggggg

SEQ ID NO: 33434 - DNA, 570 bp, Mus musculus
  source 1..570: mol_type = other DNA
tgtgcatgagtcacatataactaagcattcagatttacaaatttcggttaatgtgatggcttgactagataaagctagattgaaggggtaggcccagcctcttaatctctaataaggatttggaatttacttcttgttcgatattttattctacatacagattttcaatttatattgtacacaactacacactaataaatattttgtattttgtttacttttactgtgtgactttcaaacatacagggcacaaagtaggacatgtagagtcatagtccacctggcctctcagtctcctctgagtgcatacaagcaaatctgtctgtagtccacacattatgcgaccgcgccctccagctggcccgtagggcggccgcccgcgctcctgcattcttgcgggtctggacaggcagctcaggtgtgcgcgtcccgtttacaatcactgagcgcactccgggaaggcaggggcgggaactcctgggcgcctcggtgcgagcttccccggcgtgctggggcggggcgtagcgcgggggcggggccggcgccgcgggcctctgctgtcccaggctg

SEQ ID NO: 33435 - DNA, 372 bp, Mus musculus
  source 1..372: mol_type = other DNA
atggccatagatcactgctgctgtcagtggaaatctaccatagaaggaaactttcttttccatcactagtaaaactcctaagtgactgttactgcggcatagtattcttttctctaaattaaaatattttcttcaggggagaggctcatgagactctcaaggtaaacagacttcataggactggaaatgacagtctggccaggtaggctgcctcgtcagctatttgttcacatagcactttgatccagggaaagcttctccttcacatcaagccaaagcaagtatttgaactagttttatatgacaaaaaaagacacggtgttgcttctaataagccaagctgagagtagaagctacaaatcattttgtttc

SEQ ID NO: 33436 - DNA, 429 bp, Mus musculus
  source 1..429: mol_type = other DNA
gtgagaggtcacacatctctgttagtgaacttacgcacatcaattgagttactttgatgtctttccatgatactcatttgtttgtttgtttgtgtttctttaaccattaaaaaaaagcataaaggcattttaatgctcaaagatcgtttcaagttcaaagcatggcacttatggagcatgtgtggtgttcaaaacttgtgattccaaacaggagaaggattagtattccaactctatatgtacttgacattgaatgactaagcgctaaagtctgcacaaagacaaacttctatctttgacaaattcaatgccttaagtttaagagagagacagtgtattgttgtcttgaaagccacaaagaattccaagcagcccttttgggacgaactgggagagggagccccctccgcccctttacacggtgtgaca

SEQ ID NO: 33437 - DNA, 576 bp, Mus musculus
  source 1..576: mol_type = other DNA
gagacagtgtattgttgtcttgaaagccacaaagaattccaagcagcccttttgggacgaactgggagagggagccccctccgcccctttacacggtgtgacacttcaggtcacccctgctctcgcggctggtcctgtgcggcgaggcggggggtgagcgcgaggcgcgcagggcgcccaaggaatgcgggcttcccgggcgctcacccgcccggagcccgagtggggcctggaacctcccgggactctggcttcgtccccctccgcgcgctcggcgccggggcgcaccctggggaccgcacagagcggtgggcgctcgcccgggctgggggctactttgcctgcggccgccctggccggtgcgctcatccaatcccactggtgagtcaccggagagcgaacaaccgggcaccgggagcggggcaccagtgtccccggggcgccgggagtcggtgggacgggcgacgcgctagcagaggccgaggtcccgcgcgcagcgggctcctggtgcctggtcgccgcgggaggaggaggcgtgtcctgggcgggagccgcagtgatgtcaggtcacctcca

SEQ ID NO: 33438 - DNA, 292 bp, Mus musculus
  source 1..292: mol_type = other DNA
tacactattgtattaggtaattcaaatattggtttgtgtattttgaaagaaaactaagttttgggttttttctgtactgaaaatcaggccaggcagcagctgcctttactggctgaggctgacccatctcactgagattttttaactgaaagctggtgttcagttttataaaaataatttggaggagacctgacaattgtctttgatgtgtttatacttgtgaataaatttaaaaaaaaaatgaccttgtggattttctctccttaagacccgggaattgaatgatgcaatg

SEQ ID NO: 33439 - DNA, 282 bp, Mus musculus
  source 1..282: mol_type = other DNA
ggaagaaaaaaagacttttgtttatgttgtcagcttttgaacacttgctgggtgcaaacgttccgctgccgcctgtgtgctctttaacagcacattagcttttccagcccgctagcgggtgaactgacaattaactggcttgttaattaatcctcaatttgattttactcaaaatggatagttgaaaataacattttgaagcggttcaaactcttgtaagaacattgcacagttgctccagtccactcgcgcgcgctccagttccggatttgccctgagctg

SEQ ID NO: 33440 - DNA, 676 bp, Mus musculus
  source 1..676: mol_type = other DNA
aggtcaatcttccttaggaacacacatgtaaacatcattattaagcatgatgtgaaacagtctgacaattcacattaacagattaatagaaatattctagtatcaccttattagatgcagggacaatgtaaggtttaatatcaagttgtgcaaaacattaaagaaatcagattagacctttcttaacattttaaaggctctttataaataacttgcaatagaaattgaagcactttgctagcatgatttctatgaaatactatattacatagtggagtattgtgtcttagttttttgcacataacattatttcatgaacatttttctataaacttacaaattctttgatgcaaatgtaattgataatgtgcacatttctatgtcataaaacttgttgtagtagatattagcagtgcataatatttgcaaagcattactttaatatgcataaaataatatgggatacatcatttcataatgacaacagtgttattaattactagttctgtcagtactctttacttttgaaaaaaataaaggagttttcaaacttaaaaatacaagtttgagtgcacaaggtccagggtgcagtcatgcttgtttattccttttgaatataaatatgaatcattgaaacaaaagttatatttatttatctatttgtgagcctcatgag

SEQ ID NO: 33441 - DNA, 536 bp, Mus musculus
  source 1..536: mol_type = other DNA
caagacgtctaatgcttctagtactaactgtagagtttggttttaaaaacattcctttcagcaaccaggtgtgagaaagcatggaacaagtgatgcttcccagcacctgtgtgcagagtcacccccctctggaggtcaagctgaggaccaccacaagtgggttgttagattttcttacaggctcaaaagcctcagagtaaaacataattttatcaggtaagatattttagaatagatctctctttgggccaaagttaaatttattacacaatgcacatttcagcttaacaaataagtctctttcctttattattcttggcattaaaaatatttagaaagctttagaaacataaaccctgtttctaaagaaacaaaggttgatgccatatgtgtttctgactagcctggtctgcggagctagttacaggatagccagggctactgtgcatatttacacagatgtctttggctggcttggtaccaccaaggggcggggaccccggagccgtgcagcgcagcgacccctaccgcccacc

SEQ ID NO: 33442 - DNA, 342 bp, Mus musculus
  source 1..342: mol_type = other DNA
gcaaatccacaagggaatttatggtttgtttttgtttttaatgaagaaagcatgtactattacacttgaaatggcatttgaaaaactggccaattatgaatccaataaaattcttggaaaacttatttctttgttatcactgaaatactaaatctagtatctcaacatttcaagctctaagaagactgaaagtcggattattacccaactacaagcctggaagttatgtactgaattaaataagtacaaactcgcttgtgcaatgttatcaccaaggcctagggcgcatgcgcaaacggaaccgggttcgttccgtaacttgctcgcggtcgccgccaccgg

SEQ ID NO: 33443 - DNA, 325 bp, Mus musculus
  source 1..325: mol_type = other DNA
cagagagacacttgctcaactatatttataacagcatttgtaattacatctcagctgttaaaaataaagatatcatgaaatttgaaggcaacatgcatggtatgtattcacttataagtagacatccaccataatgtgaagtgtgactctcactcagaatgggaaacaaagtactctcccaccttctttgtatgtcttttgtaaaaattagaattctacgtaaatatttgttaattttctctcatatattgtgcagtctataaggacaatggctctgcatgaatggatcattaccatgggaaggagtaggctcatgggaaccgta

SEQ ID NO: 33444 - DNA, 501 bp, Mus musculus
  source 1..501: mol_type = other DNA
agagatgaattatcaactaattgatagagcagttgctctgaatggaacatccagccaaacaagaaatgcatcttatatgggctgtatcctccagcggggaggacccattgctccctgcagcatctctggtattttaaataaatttgcagtacgttagcagaccccactccatccagactgcactgtggcttttcaggaaacttctaacttatctgcataagaaataacatgcagctgatcagtagtgtgctgttctcagagcaccccacctcctgcgctgcagcaaaatttggtggcatctagggaacagccctcccagtcctgttccagtaaggagtggtaggcgctccttaaagggaaagtgctggctcatgagtggggaggggtcttgagaagcctccacctccgcattctcctaagcacgagaccacgggtccgcggggtcctgctgctcctctccagttgagcctccttgctttgagccagcgcccagaaaccagc

SEQ ID NO: 33445 - DNA, 399 bp, Mus musculus
  source 1..399: mol_type = other DNA
tctctgtatagccctggctgttctggcaccagagtgagaaagagcctctgaacatttttaaaaatctgagccgggcgtggtggcgcacgcctttaatcccagcaaggcaggcggatttctgagttcgaggccagcctggtctacaataggacagccagggctattcaaataaatataatttcttcaacaatctacagcttattgttaaaaaacagaggtgatggcacacacctttaattttaattgagccactatttgtgacacggtgaatccattacttaaatgtatcttgcagtttataaaaacttgaagtttgaggtggtatgtagccactacttaattagggcttgcatggtcccgcctctaagaggcggggccggtggaggcagggcctgcgcg

SEQ ID NO: 33446 - DNA, 305 bp, Mus musculus
  source 1..305: mol_type = other DNA
caccggagctgcgacctgcctggctagttctcaagagaaaagggcaagtccaccttgatggaatgcgaagcagtgtcaccatctgatcttgacccatgacagggcctgttacatactatcagtgctattagtctgttctctgctagaaggaaacttagctccttctgaagagaggcatatatacatttttcagtctgtgacaatttgaggaaggttagacagggacaaatcaaatctgtctgtcagaatttgcacaatatcttacaaactctagttttggtctttacaaaataaatttaaataga

SEQ ID NO: 33447 - DNA, 483 bp, Mus musculus
  source 1..483: mol_type = other DNA
ggttgagttataaagtatcaatgaagctttccttcacaccccagtcatattgtatgtggaggtactacagaaaccagatgcctgcatttcttataggttcaatattatctaaaaagaagacaatatgactaaagatctaaattttatcttagttcttcatattattagcaagctcaaagtatgggcacatgtgtatacacatgcagtcctcctattttaaatcaccaacactatttatttcagggtggtaaaatcccagtatctctgagatttcttcaagaagcactgagccagccattgctctggtataaggactagcttgttgttttcttacgagtttggtgataacagcgtaaacaaccagttcaagcacgaacaggctggttcatagaagccagctcagcctgtggatttgttctgcatcaagcgacacacagaggctgctctttcattgtcctgctgctgagtgacacgggcatagct

SEQ ID NO: 33448 - DNA, 612 bp, Mus musculus
  source 1..612: mol_type = other DNA
gttggtgcagttcaccattccagaactgagagcgcggacactctgcaacttcgagttcggccgagggcgagtgagcagcgtccgggggccccgcgcccccaggctcgcgatacacagcctcccgaagcgcagcatcccgtgatagacagccatggctcgcttccgccgcgggtctgggccaggagtaaaactccacaagagtttttttattttccaattctaaagactgtaatgagagagtcttttagaggctaagaggctttgttgattaaaatgatgtaatagtaataataataataataataataataataataataataataaattaaaccataaagtaaaagtagacaactcctcaagttgtgttctgacaacgtatcaatcaaccaatgagccaattgttcaatcaatgtaataaatttaaaaagaaatataaaatgtggaatgaaataccaataacgttagttagttcgttagctagctggttagttagttaaaacatccaagcctgtctctggagactgaggcaggcgagttagagagcagcgtaccctgaaggatagcgtaccctgcggagtcccgcctccgcgttgcgctgacgggtcgcgg

SEQ ID NO: 33449 - DNA, 408 bp, Mus musculus
  source 1..408: mol_type = other DNA
ggacagtgatgagcaattaatggtcttttttcttaactccttgatgtaagaacctatgatttaatcaagcatgcattagtggctgaattactttagaaaaggcacacattagatgctttgttcttggttgaaggtcaaaacccaaaatggtaagacttcgtgctttaaaaaacgaatataaagatctaggagggatttataagtctatgtatacaaaagtgctgaataatcaaaactagtctaagtacaaaagagatttatttattttaaataaataaatatttgagttcagtataaagcgattttatttatacttctgcacacgcacatgcacgcacgcacgcacctccggtcgcccgcagcgggcaacccatcgtgacgccccggtcgtctggcaccacgagctgg

SEQ ID NO: 33450 - DNA, 527 bp, Mus musculus
  source 1..527: mol_type = other DNA
aaatcttttaattttttttcttaaattcggattatacaaatttaatgtttatttccaactaaaaaaacaacaatgaattagtcactacagcggaggctgtccgggaacaggcggcggggcgggctcagccttcccgcccgtacggcgcggggccggcgaccccgtctggaggcagcggcggaggcggccactcgcttccccctcgggatctggagcatcgcgtgcccgggtgtccgcggaacacggtgaccctgcatctgtccgcaggcaggtggagtccgccccacgcggcgcgcgcctcctctcctcgcaggctcacggggggtgggaggtagcctccccggcctcgcgaaccgtcagagcctcggggaccctcggccgctcgcgagcggacactccctccccggagcgccgagccgccgcgcgcccctccgtccggagcacgcgcacgggaggcggggccccagcttcccggcactcactgatcgcctcctccctccccgaagacgagccggcccgggggagga

SEQ ID NO: 33451 - DNA, 528 bp, Mus musculus
  source 1..528: mol_type = other DNA
tacactacttagtctatgtgtagatggtagtcacatgtctataacataaggcttttaaaatgcttaattagaagtttccgccacgtattgttgagcctgctcaagatgttcaagaccgtgaaaagctggctgaattcataattatttcctttgctaaaccaggactccagacttgagtgcataaattaaatttcacgcacacaaacaaattaaaggccccctttaatgatctttgatttccatgatagtacagtggttttttcagtgtgactagaaagctgcctaatagaatcccgcttgctgcccagaaggccggagcctggaaggggcaggaccaccccagctcctgccacccgaatcccgtggggcagccgtggccacccgggcagagtctgcgccgggtcgggtggtggctgcgtgactggctgcactccccaccccgacgctgcacgacacgcgcttcccgtcgcctgcacgcggcgtaaccagatgcacgcccctgggtctcagagcagcgagccagagctg

SEQ ID NO: 33452 - DNA, 648 bp, Mus musculus
  source 1..648: mol_type = other DNA
ggacccgggcgcctccttcccgaggaccggctggcgagtcccggagcttgcagggccgagccgcagcggacactccaacttctgggctgcagcccggaacgcgcgccggccggaacgctcccgcagcgccgagccctcccgcaggggctgccccggctgcaaccccccgagaggagtcgcgggcggccccgcaagccctgcggcgccagtcaccccgccaccgacggacgcgagcgcattcagctctcccgggcagtggatccgccgctgtcccgacggggactcggggcggcgaggctggcgcccgccatcccgctgggggtccctccgccgctcgcagccgcccttcgaacgcagcccaggcgcggcgtggagggccgcctctgcgccagcggtccgagccgaggacgagggccggtgtctaggggtcgtgggcggccgacgcggcgagcggcgcgcgggccattccgcggacctgagcgctgaaagccgcaactgctctcgaggctccagctcgctcgtcctcccccgggccggctcgtcttcggggagggaggaggcgatcagtgagtgccgggaagctggggccccgcctcccgtgcgcgtgctccggacggaggggcgcgcggcggctcggcgctccgggga

SEQ ID NO: 33453 - DNA, 253 bp, Mus musculus
  source 1..253: mol_type = other DNA
gattttaaaagtttcaattgcacagtacagcaagagatactatgttcaacaggtgaagttaaactagaaacagtttaacaaagtctaacaacccttattttgttttgtttttaggatacaacgggctttttaaataaaatcgaagctgacatttttagaccagctcttacgttgttaacagagcacgtgaactggggatccattttctagttagcgccggggtcaggcgggcccgcaccaggcgccgccgcca

SEQ ID NO: 33454 - DNA, 327 bp, Mus musculus
  source 1..327: mol_type = other DNA
aaattcctaatatctagtgattgtatatattcaatgatatacagtacataatactagttactcaatagtaagtaactgttgttagtttctgcataatctcaatagaactattctttaacagcaattattgttctttttaggaattggacctcagatgctcctggaacaagcatcatctcatcctgcttgcttgttgcatcagtatttgttttatgaataaagtatgaataaagggaacgtctcagtaatacttcatgaactaaacagatgaggcacatggccacgcgggtaagctccgcttccgcgtcggcgggggctgtgacgtca

SEQ ID NO: 33455 - DNA, 446 bp, Mus musculus
  source 1..446: mol_type = other DNA
gggccagcctggtctaagggttatcctggagccattttgattgaccatggtcccggaacacagatttaggtatgtaagagatagttactttctctccactctgacaaacatctccctatttttggaactagggattttccagattactgtaagggctaggcatgcctttctaggctacgcgcgctcggagctttccggaaaccccaggcgctcaaactgggaagctgcccggttcagagtcactttgttacactccggtgtcgccgaccgccggactgtcaccaacgcgcagaccgtgcaggggtatcggggccgactcaccaggccagagtccgggctccgcccggtgtcaccgaccgaagcgcggaggaactcgttggcgcgcgcgacgtcagggcggaagcgcacgctgcgtgcggcggcctggaagccggcggtcacgggaa

SEQ ID NO: 33456 - DNA, 291 bp, Mus musculus
  source 1..291: mol_type = other DNA
tggaaatccaagaggcagccttctgagaggcctggcctgagggtagtagccctgccatcatgatcaggatgtgactggtaacttattcaaatgttttaattttttatcactattattatgacttatcaacactttaggagtcaagactagttagtcaagattgacttctagagtcataaaaattcttaatgtttctatagcttggtcttgagaaagtatccaaaggaaaagtgaaaaaaaaaagttttccataacttcaggggttgtggagtttaacatagcgtttattaa

SEQ ID NO: 33457 - DNA, 306 bp, Mus musculus
  source 1..306: mol_type = other DNA
aatctgaatatggcttttgtaataattgccagtgacaaagacatacaatatatttggttgtgtaccttacccaatgcgctcacccaatttggctaaaagcaagcctatttcatacctgttaggccaccaattaatttatgcattagtcccctatccattagatctgagagacagttccaattcctagggtttcttccagacagtctttcagtgtctcactagcaatactgatagagtagttagattctttaaagtgggttattcattaacggaacctaaagagagtccacaggagggactcaggcg

SEQ ID NO: 33458 - DNA, 306 bp, Mus musculus
  source 1..306: mol_type = other DNA
ttccttcccggaggaagatactgtatacggccgtgccccttcaaggttcatactctgagactcgggttacatagccctggcaagcctgggtggcttatccatctccaaatattttattaaacatccgagcggctggatgcatgaaaagtgaacctgttgatctcagtgggtttaagcctttagggtcgatccttggtttccaccggggagtggcccagcgtgggcggccagtcatccaggccgccaacatggcgtggttgcctgtgccaatccgacccgagtctggcagggagcacagggactcat

SEQ ID NO: 33459 - DNA, 337 bp, Mus musculus
  source 1..337: mol_type = other DNA
cccgcctgagctgcgtcgctatcagatctgaactctcgctcaaagatcttaagagggctgccccattgatgtgttattattgggggggctgcgaggttgaccggcggcggcagcggccgcgatggaatcacgtaccgggaggtgctagagagcgggccgctgcgcggggccaaagagcccggttgcgtcgagccgggccgcgacgaccgcagcagcccggcagtccgggcggccggcggaggcggcggcgcgggaggaggcggagctggaggagggcgctctcccgtccgggagctggacatgggagccgcggagcggagcagggagcccggcagcc

SEQ ID NO: 33460 - DNA, 241 bp, Mus musculus
  source 1..241: mol_type = other DNA
ctgcatgaagccggatgcaccgctgtgcagctgcagcggcttggacccacccagagcgaggctgtagggtcgggtactctctgaggatacccaccgcaaaatccacgcttaattaaattaattagggattcttgtcaatcctggattaatggccaagacgaggctggtggactccagcctggatcccgcctgagctgcgtcgctatcagatctgaactctcgctcaaagatcttaagaggg

SEQ ID NO: 33461 - DNA, 608 bp, Mus musculus
  source 1..608: mol_type = other DNA
ttttactttgtcaaagttttgaaaggaacattgactttaaaaccagtttttgaattatttaaaacaaacatgtagtgttgtggttttgttttaaaagagtccctcaaaactggctagttaaggtccagttactttccaggaataaacctatactggaagtgagttccatctcaactgaatccaagttaatattttatatatctcctcatttttgtttccttatactaaatcatgaaagaaaagtcatacaaggaaaatattgtatattacagaaaatgccacgtttctttaatttcggtaatagaagagaggaaccttctcctatcgggcagatttcttcctcctatctaacagtttctttaataggagaaactaattgcttccaatccgtgaatgccttcaccttcatggcaggaaaaaaaaaaaaaacccaccgattttaatgtatttttttgcaaataaatcattacagtttaatcacactcccatgatttattattgttgggcgattaaacataacttcttagcgaatactaaggcagtaacatcccatagtaccctttattgcttttggagaataagaaaatccaattacagcctgcatcgac

SEQ ID NO: 33462 - DNA, 413 bp, Mus musculus
  source 1..413: mol_type = other DNA
tacaggagccagcaagtgactgccaacgtttttgaggcctttaagaagccgatgcatagctagtattactgatgaacaataaagaaggttttgaaaaattttatttgtaatccaacatatatctttttaagatttacttattatgtatacagctttctgcctgcatgtatacctttgctgtagtaatgaatacatttttgtgtactccttccatttaaattgttataaacgttttcccattgtcatgcaggtaaaacaactatgtttaaaatctgcagctttttgtctggcccagaattctttgctgaccaggctaggattttatttttttcctttaaagacaaagggaccagagttcctcctgaccaggagagggcgcgcgccacgtcgagctcagacagaggtgcctctcc

SEQ ID NO: 33463 - DNA, 408 bp, Mus musculus
  source 1..408: mol_type = other DNA
gaactgagttggttggtattaacacgtgtcccgcagagtggctgcaacatagacagtcaccatctaccttttaagagaaatagagatgaggcagaggtgagtttggtccccagcacccatactgtgtggcacacaacgggtaatctgatgtgcctgcacacacgtgtgcacatacacataacattaagctttatatttctaagatcactaaggtcctaaaggaacctggctgagcaagagtctcctcatccggcagctgaagccctacacctgcccagacccgcgggagccggagggaatgcccgagcttttctcccggaggtgcccgcctaccccagggcggggccgaggctcccggcagagccactgcccgaactgaggagcgagcaagcgcgcacgcccagccca

SEQ ID NO: 33464 - DNA, 362 bp, Mus musculus
  source 1..362: mol_type = other DNA
gcaggcagtaggctgcaggctgggatggtagttaacaaatgggtatttcatttattatttaattaagactccagtcatcgggcttggtggctagcacctttactcactgagccacctcacaggtccttcagtgacgcgttgattccacacctcacgccactggaatctgttaattaatttacttctaagacctgagggttgtgaaattgcagcccccactgtcccatgtcccctctcaccgcgtcatggggacatgggacatgacccgctctcccggaggcgccttctggtccttctgcttggacagggaggcgagggcgacccgggggcggaggggagtggccgccgtggcctatttccgt

SEQ ID NO: 33465 - DNA, 490 bp, Mus musculus
  source 1..490: mol_type = other DNA
ccctccacctccccaagggaactcgctggagagtgtggggaaggcctatataatacttttcaaaccctaacaattgaataaaatcttaccgatactatttcttgaagatcagttaaaataaaccatcttccttactacaaatagaaggttcctttatactgtaatggaaataattgaaatagaattttagctagaacaaattttgtgcccaaatgtgataaagatttgatctaatccttgaaatggagcaattttcattgagttttagaattacagaaaactgtatttgttttgtttttgaaatctcacatcttgtttccttcaagaagtgaatacaaacacttgtctattgttctcaaaaccttggttcctgaggctcctgagagaccaagttgtctctcaggagcctcgcggatggggcctccagacaaagcctcaccttagtgacgtcataaggtcatgaccacgtcaagccccgccctagtcgcgg

SEQ ID NO: 33466 - DNA, 563 bp, Mus musculus
  source 1..563: mol_type = other DNA
gcacaatgtaatatgacaacattcctcatggtaatatcatcctctgctcattacatttgaatatagattgccagagcacactgaccctgctctctgtctgatttcagaacctccttggtagcctaacaaaatcgtggttattgtccttaagaacttaatttgctcaagatcttttcttaccatccttaattatggatatattcatggtgcatagctgcatctgtgatgtcttctgagaattaagaggttatttttcaggatttttatctgaactaaacacctaagtaaacctatgtatttatatgtgtaaagtgcactataaaaagaagcaataaatccagttttctacataaaaaggaattagatttttccagtttacctctgcactgggattaatgaaacacacaacaaatagaacaatccatttgaagtttgtaaaggcatcttggctgagcctttttgatatttttccaacaagaatttctgtgctcagctattacctgtggctgagcaaattcgctgggaaatccaagtttccctgagttggagtgatgcttagagcg

SEQ ID NO: 33467 - DNA, 314 bp, Mus musculus
  source 1..314: mol_type = other DNA
ctctttggagggcccaagctaggagtctagaaggtgctattgtttaagcaagttactccaagatcagtataaacgtgtaattataaacgtataaatctctcattcagaggtgagagaatttgtctaagtgtcaggtacatcatatgctgttccgtcaggtcaacttaacaactcttcatgaagagttggtctactggttttaaatcagatgttaatgagaaccgccaccacgtgagcaaccgttcacgtgagcacggagagcaagtcacgtgaacacacgtgatcacgtgagtgctgccgctgccgctgccgcc

SEQ ID NO: 33468 - DNA, 251 bp, Mus musculus
  source 1..251: mol_type = other DNA
agcatttctatgctagaacatggatccaaggctcgtggttccaggtccagaacctatgccacgaaaggtcctgcctctggtgcagaagtaatcccaagcctcagcactctccagcgcctgggcctgctccagttcctggcattcaggaaaacttccaggttgccagaaagttttatcaaggttcaacctcagagttggtgaaaagtgccctgcccctttaaggccaagacactgggctgcagagagcccct

SEQ ID NO: 33469 - DNA, 664 bp, Mus musculus
  source 1..664: mol_type = other DNA
gtcatcctcagtgccttccacccactgcctgaacttggaagaaatgacagggcctgaccactggtcacttgagctccttgtgaggatgacaggaggtccttctcagggtcactggacttccgcgtggactgggaggcatcgggtccgtgcgggcctccaggaggctttggccaagaggccttgaggtgcgttcagcacacaaccccctccccagggcgcggtcacagcgaggtctgtaaacctagcgccgagcccgcttctagctccagcctccggcggggaaaaccgggcgagcggactgcgccgcaccccgcagcctctgggcatgctccgtggcgggacccggtctgccgccgccgccgccgccgccgccgggagggcgcgtcttcccttccccagggcggcggcgcctgcagtgacagtcgctgcgcgcccgggccccgcacacctttgacggaaccaagcgctgagaggtgctgctgaggcgtgggccgacagcgcccccgtgcccatccttcccgagaggggctggccgaggaggcacgcagctgagctcgcccggcgcggggctcccagcggccgccgggagggggcggggcggagcggggccccccgctcagattctgcctccctcttgggtcccgcccccagggaatcagaattc

SEQ ID NO: 33470 - DNA, 334 bp, Mus musculus
  source 1..334: mol_type = other DNA
gaatcctaaaaggaaactggatcccttgggaaggctttctctgggttggaagcagccttagtcttgggcctttcagactctgaaacttttacatctcaaagggtcaccttaaatgatagttttcattcggggcacccgactcacagtgagcaactccagttcacactgggccctgaactggggtggggtcagctggctgaagcttactatcccccccccccccgccctttccctttttgggagcaggaaaggtgctgcggacaagaatctgggccagagtcatgacagagtgcgccttacagcaggcagctgcccagtgcccggcactgcagcc

SEQ ID NO: 33471 - DNA, 362 bp, Mus musculus
  source 1..362: mol_type = other DNA
ctctctctgcacacccagtgaggctgtcttggggtagaaaggagcaaattacagcttgtcattgcaagcttcaggtgttagcctgttacctggagccatgggttggccctaaagatgttgtccacaatctctcggatcccactggcagccaggcaatgccttcttgcagatctggaggcttcaggagcctttgctgcctcttaggctcctgcagagagatggccttgctctctctgggagaactgagttttaagcgatatatagccaccacatctattttgttcctttatactttcaaagtaggacagattcgcaaaataacggcaggacagacctgtcccgggacaagagtggctactcgc

SEQ ID NO: 33472 - DNA, 518 bp, Mus musculus
  source 1..518: mol_type = other DNA
gtcaattgttttgaggaatataaacaaggaatttttattgttttccccatgcagactctgaagacagtctgtcccagagattacctgttattcaagtcatggattgggtaatttacatatgcaaggccctacctttaaaaaaaagtttagttttcatgtaatacataagtaataccaaccttaacattttaataagtttctccaaaaattatagaaacatgattccatcattttttttactaaaaacacttaagaaaaggtaaatgaggtatctttttttttaaattacaaaaaaatacatattttaatgaaagtccttcctttagtcagaaagttgacaagatactttaaaaataaagcatgaatacaaacctcgcatgtatgtagttccgaaaagatctttaaggtgccgcagattaggaatgcccaactgcaatattgatatataattggctgattgtgcgggtgatgcgcccgccccctcccccaggccggtcccagctcggctcagcagcctg

SEQ ID NO: 33473 - DNA, 578 bp, Mus musculus
  source 1..578: mol_type = other DNA
tcctttaaagtcagattttgcaaacaagaataaccttgacagcctacataggctatttatgctgcaggagggagcccctgcaccccacaattctgctgtcctctttgagtacaggcagggtcacctcaactagggcagcaatggggctgcactggccattaatggccatcattcatttttaatcagaaagcaatttaaataatattcccggggaaatgcgcgccccgcccgtctggcgaggaagagcgcgcctccggggctgagagctcagccttaacccttccagcgccgcggggtacccaggtgccggaagaagagcgcggcgggcaacggccgagatgcccagagagacccagcgcaggccggctctgttcattccgccgcacgcttctcccgggaccctggcgcccaggcgctacggctcgaggtcacaggctcccgaggcggcgacagcggtgagcagcagccgcctcccgcagcctcggcgcgccccgggctcctcctcccgccccagcgtggccaagtgagcaccgctcgggccgcaggtagccggggcgcgggaggcggcgcgcgcggga

SEQ ID NO: 33474 - DNA, 411 bp, Mus musculus
  source 1..411: mol_type = other DNA
ggtcaatttctctccagctatatcaagttgacagaattagctagcacgttctagttctagcagatctggacttgcacaggtatatgtacacatatatgtatatggtacatatacatgcaagcagaacattcactcatacttgttaagtaaatctacaacaatggaaaattataatatatattgttctagcgactaatgcaataacttatgtagtaagatgcatggtccctgtttacgaaatatcttcaatcaaacctactttgtaaacaatttcctttatatggaaaaaatactaatcccagtaaaatcaagttaaataaatcatttaaaaatgtatatatattttaaaaagccacacaatgaaaacctacatttagaaactacacttggctatccagtgtgccaccagca

SEQ ID NO: 33475 - DNA, 518 bp, Mus musculus
  source 1..518: mol_type = other DNA
ctgctgaactggactctggcagcgtctgcccgggatagtagggggtctaaccctcccgggtccggggcggagtcccgaggagaggctctgagtggggctgcagtccccttaggacaggacggatcggcctgggggaggggacgctctggccgagccaggctcgctgcctcccccaggaagaggcgccggagccgccgcccggccgccgagggggaggggtgacaggcacgggagctcgccgagccgcctccgccgctccagctccaggccttggggttgcgggcgcccgcggggcgagaaggacttcacctgtcggcgggtccactccgagccgggctgaaatggtggcacggccgaccccccgcctcgctcctcccggtgtctcggctccggttcgggccgttcgggcgcatgcgcgggctctaccccagggaccgtggcgccgagggccacctttctttctagaagcggggtcaagagcccgctcgggtgactggcacctagcaagtatcgcggga

SEQ ID NO: 33476 - DNA, 373 bp, Mus musculus
  source 1..373: mol_type = other DNA
ttcctttcactgtgtaacaaagacaaaactaattcccccataacggtaactagttatcctttctcccactaggagccctgctggccaaatggttgtcacttacacaaaatagttcaaaaatcattgttattcataaatggactacaaggttaactcaataatcccggtttcctcgctttaccccaagccctttcttcaaaggctctggagatgaagaaatttacctcaagttccaggaaactgctcttcccgcgatacttgctaggtgccagtcacccgagcgggctcttgaccccgcttctagaaagaaaggtggccctcggcgccacggtccctggggtagagcccgcgcatgcgcccgaacggcccgaac

SEQ ID NO: 33477 - DNA, 677 bp, Mus musculus
  source 1..677: mol_type = other DNA
aagtatttcccctaaatattttccttaaattgtttcttcttgaagctttttaacagtcaccaagggcttggtttaaacttttagagatttttgagaaataaaccaaacaacttggagaagtatctagtcctttgtaaagcaatttattttttatctcactttaaaatggtgaaaaggattaaaattcgttatatacatctgaatctgttaaagaatacaagaaaaatatttaatctgttgaattagtatcagtataaagtaaatgaaatctggattaaacctgtgatttaataccaacagttttcgggttctgtttttcctaaaaacaggaaggagatgattacgaagtccttcctaacagcaacttctatgtatccagaaccgcctacagagatagcacttctgtctaccacataagtgggaagaagaagacgtttaaagatgttggaaatctccttagaagccatggcattgactttttttaatcttgcaggtacgtttaaaaattcttccaaggtaaagtactgtagcagcacatcatggtttacatactacagtcaagatgcgaatcattatttgctgctctagaaatttaaggaaattcattcaagattatatggtaccatcacagttgtattagtaaatattggcgtagtgaaataaatattaaacaccaa

SEQ ID NO: 33478 - DNA, 518 bp, Mus musculus; identical to SEQ ID NO: 33475
  source 1..518: mol_type = other DNA

SEQ ID NO: 33479 - DNA, 514 bp, Mus musculus
  source 1..514: mol_type = other DNA
ccccaacacatgagcgctgccggtcagcgtggagctgccttagtgcagaaagtcttgctgtgagtcttaggctgacttcacaccggccgggagcggagagcggtctgagctctggggcgtttctccgagaaagtgaaaagccactactgtgttttctgaccccgcaggaccggagcctcacgggggcgggcgagcgcgccgagccctccagccggtgccgccagctccagaaccatcccgtgcgggcgtggtcctaagtagctccctcagccagccgcctccagaagccgccgggtcacccgcgtccccgccctcgcgaggtcctggcgccagcccttcccccccaaggcgcgacccctgccgcccgtgcgctttccgcgccgcgcgctagtgcgcaggcgcctggccctcggccgttggtgttcaaaggccgcccgcgctctctcattggcggaggcggcgcggttgaaagtcgctgcggcgccgccggccccgcccccgccgggcacctgaa

SEQ ID NO: 33480 - DNA, 236 bp, Mus musculus
  source 1..236: mol_type = other DNA
ttattattattattattattattattattattaatttatcttgagatgaagcccagtagagcacaatgttgcatttgctatgtcatggctcatagtcgtcattctctataaattaatactttgtgatcaagcagtttaatttcccaagagtcctagccacgatgccgggtctgattggctaagcactccggagcccggccggccaatcggcggaccgggttggcggcgatgggcgt

SEQ ID NO: 33481 - DNA, 485 bp, Mus musculus
  source 1..485: mol_type = other DNA
tgcctgaccgtcagtccggtggcaaaagagaagttccttttaaagattacttgcttccctgccctcatcttcggcaaggactgaaggtggctcgctgagggacactccacatagctcttgcggtcggagatcccggcgggtctctgtggcagctgcctcgggtggccaaagttcgatttttgagacaggagaaatgtgtcccatctcgctagcgagggggggagggctcaggtacagctcccggctccccagcgagcagccgtgcccgacgttcagtgacctcacgtcactatcacattgtccctgggagccggcctccaaggcagaatcgacaatcggctagagctgggcggctggatttgccgctcaccccccgcgctgcccacgtgcgtccgccccggcgagctccttcgggcccccagccgggtgacagtgttacgcatctggaagcgccactcccggggcggggcggggcggggcgagcg

SEQ ID NO: 33482 - DNA, 386 bp, Mus musculus
  source 1..386: mol_type = other DNA
tggaacttgatctgtagaccaggctagccttgaactcacaaaggcatgcatctttaaaatgtctacttttaaaaatgttttcagggaatatatttatttcctattttctgtcttttagaatatttgtcaaaatctcagtatctgtgtatactcatctttgatcagtctgttttattgaaaagtgggtaaaaaaaaattacctaagattcataaatgatgctctgtttctgagctacaaaaagttcacttaaagttggctaaaacaaaagattgtgttggttctacagagagactgcagaaagctgcggcagccagctggttactcccacagagtcttcaggattggtttgcctataatcaagttgataagctacaatataaacgaa

SEQ ID NO: 33483 - DNA, 539 bp, Mus musculus
  source 1..539: mol_type = other DNA
tatctagtgatataatctcatctgaaattctgtaagtggatttatcgaaaatggtaccatatctgggtttgggtatcactgatataagctacaagctgtttgaaaaagtgcaagatttaagctctactaagccattttggataatatatttcccccctaaagttgaattttttttattaagcactgtggtgcttcaggaaaacttgataacagattctattcaaccttgagtttagagtaaattctttatctctaataaaatgctttctagactttcccctgaggggaggggctcttctaatggcacttcagaaatgccctttctctgtggtaaagagccacatggtaccatcccagggacaatggaaaagggtttcatttttaataaaagttgcataagcattgatttgcttttaaaaaaaaagcaagattcttgccttattctggattagaggaaaggggagagaccaacttggtctattcttcttgagctagttgttagctatgtctcctttgcatcctgaggggaacaaaagaca

SEQ ID NO: 33484 - DNA, 402 bp, Mus musculus
  source 1..402: mol_type = other DNA
actagtttaagaaacgcaacctagagctgttttcagatgacactttgtttccaggggccttttgacagaaagcccttctcccagagaggcaccatgactctctgagcctctggtccacatacgaatgtgccaaggcttcctcctttccaagtcagccctggggcggaaatctgcgggctacacatttaggcatctccccgagaagggagaaggggcctagcaaaaataaaatttcttgctttctgtcaaaagacctgcggtggccgtgatgctggcgcccgcccgcggcagaggccggcagctgcggcgataacagcgataacggcgctgggctgcggacgcagggaccccgcgcgcgcgcgcgtgcgtgaaggaggcgcgcgcccgcccgctcggcgtgcg

SEQ ID NO: 33485 - DNA, 352 bp, Mus musculus
  source 1..352: mol_type = other DNA
cctccctgctacctggaggaaggtgccggtgagctgaccagctgcttgggctcaaccccggggctcactttgcagccgggagccgagtttcagactgcagccttgctccgcgtagacccgggccttgtatgctgacaggcatcctctgagaattggttaaagctagagtcgaaactccccgctgaagcgagggggagggcaacacccatcccccctcctatactgcagcaatcggaggtgaggtgacagcgccacctcgatctcctagaaggcgccctctcttgagaggctattttaaagcagcccgcattctcttctgcatgtcaattattaatcacccacctaactctgg

SEQ ID NO: 33486 - DNA, 431 bp, Mus musculus
  source 1..431: mol_type = other DNA
aaaaaacaagtaactaaagtttatactgtagttacatttccatgttcattataaatgtcttataaaacacagataacatctgctactctctcccaggaccagaagagctaaaccacctgtggatccacttctgagaaaaatatgtttcagatgatttctttaagaataatacttttctttaatgaaaaacattttatattttctgcttactattaaaagtacagtgtttgcaatataatagagagttttcagcaactgtttagtaaacagcgattcgttgtccatggtgatatttacagtggccatgtttctttagaaagatccatgtattttatgtatttgtggcccgcatgaatatatatgcacgtcctttgtaagaacaactgcttttaactgctgagccctctccccaggagctgagaagtgcattt

SEQ ID NO: 33487 - DNA, 520 bp, Mus musculus
  source 1..520: mol_type = other DNA
tattctaccataccattgagtcaaaatcactgagtctaaactattcaagttcactaaaatctaaattaagacttaagataaagctatacattttaaatatgtggttttcttttatcttacaagtatctcagattaaactttaaaatgggccgctacagagaatattgccaatagactaaaatcatttttcaatatggaatggaacaagtgaacttattcatggttttcaaaatgaatgagtacatatgtgttcaattggggaaatttccatataattacttttaacgtttttttttttttactgtgaatgtagtctataaataatcttacaatggattaaaaatgatcactagaagtcattagaagcaatctgtagtaattgctataaaatgtttacttaaacacatttgccttttattttatcagaaataataataacttttgaagtcaagtaaaataaaaaactaaattcttctgtgattaataatggaatcagctgcccagccacttcctgctgagc

SEQ ID NO: 33488 - DNA, 241 bp, Mus musculus
  source 1..241: mol_type = other DNA
gagaatcacttgcttcctaagcagggatttgcctgcagcgatgggctgatctgggggctccggagcgccgctccctcggtgcgcgatttggcagaacttttaaagcagcagtctttaaaagatgcggtcgccgccactgtcgccgccgccgggagcgtctccttggcctgggaagtgaaggcgctaatggtgggctgtcaggggattcacaacccgccaacgggatcacatcgccttgatc

SEQ ID NO: 33489 - DNA, 674 bp, Mus musculus
  source 1..674: mol_type = other DNA
atttagcctattttgggataaagacatatattcttcaataaattttgcccataattttgtaggcaatgtacatcattttgctctacaaaatcaattctctaaatttttcagtatggactgagaaacatatacattggttttgtaaattaaatgagtgtcatacattaaaataaatatacgctatttgtatagtcttggagataattctctacacgattaactcttatagaagtaacctgagagtcttaagatacaagctccagcctctggtttataattgtaaaattttcccagttaagtgtttattctttcaaatattttacaaaatttcaaaaatttacgtagttaaaacattcctactttctcaaataaactcaaatttcatgaaacgaaatcatttttaaaaattattgaaggatgtacagattttttcaagtaagaaacccaattttcaacgtggattatgtgttgtttcaatattttctgccatctagaagtgaaaggctatagaaaaaacacagttattaattaacttggcatgtcagagagatatatttatataaactattttcagggcaaaggcttcagccattgaatgttgaacagaagaatattaaacattgataggcttgtgaaagtgcaataaaactttatgagtagtcaatatatacctg

SEQ ID NO: 33490 - DNA, 285 bp, Mus musculus
  source 1..285: mol_type = other DNA
ttacaatgataatacatacataatttcacttgtcttgggcaattcgatgttttgagagtcacagagatgtctcccacggaactccccctatctctcatgtttgggagttcgtgggaatgccaccctttctccaagacagttggctaatgaggactgcagtggaggcagtcagtggtcccctggatcatggagttgtcaccaattgacaaaccacttggaatggctcctggttttccaaacagccatctctcatttgcaaaagttagaaatcaatgacttcctgac

SEQ ID NO: 33491 - DNA, 397 bp, Mus musculus
  source 1..397: mol_type = other DNA
atgcagtaatcagatttctactagacattacagtggaaaaacttctaaatatttgatttacataacagtgcttaaaacttgcttattacccctggtcacaggaactaggggaaaccgcttctatcttgttaccatactcatctggttactatgttacatttaggtctgtgactgttttaaagtaacagattttactttgagatggatcgccaagaagtggaaaattaaattgaactcttgtggaatttatgcatgtatgaaataattgtatttttattttattgtaaaacatgaaagcaataaattttatagaaattcacagggatctgaatcgaagtgtgtaaataaagcagtatgctgcctatttaacaaagaatttgctgacatttcttgttat

SEQ ID NO: 33492 - DNA, 470 bp, Mus musculus
  source 1..470: mol_type = other DNA
ttaaagccttcagctgacaggtttaagtagtgaaagctgacatttacaaaaccttacaagtttctttttattgttttgcaaaaatatatatgtaaggtaaaatacgtttgaaaatgaaaatatatgttcacaaacactgtcactgccgggctggaaatgttctttttgtgtataataaatcatgggttttcctcttatatatgacggacttttgagaagttgtcaagacctgtaaaatctctaggacttatagtttatatagggattattttgtttcctaacaatgttatggttgtactattttcacaaaattgcaggtaataccatttcgttagaatacttactatacacaatgtttagtaccgtaaaactttttaaagaaaaaaacctgcaatggtggaggaaccgcttgggaagcctggccagagccagatcaagttgctgctgccagctctcgcgagctttgtctg

SEQ ID NO: 33493 - DNA, 550 bp, Mus musculus
  source 1..550: mol_type = other DNA
attttgagattttgaagatcaaattttagcacctggaaatttaattagtcatgctaaattcgtgttccttgggttaacagattacatataaattattagtcatgagcattagtatatttacatgtttgaaatgttactttctactaaaaattctataaatttattaaagccttcagctgacaggtttaagtagtgaaagctgacatttacaaaaccttacaagtttctttttattgttttgcaaaaatatatatgtaaggtaaaatacgtttgaaaatgaaaatatatgttcacaaacactgtcactgccgggctggaaatgttctttttgtgtataataaatcatgggttttcctcttatatatgacggacttttgagaagttgtcaagacctgtaaaatctctaggacttatagtttatatagggattattttgtttcctaacaatgttatggttgtactattttcacaaaattgcaggtaataccatttcgttagaatacttactatacacaatgtttagtaccgtaaaactttttaaagaaaaaaa

SEQ ID NO: 33494 - DNA, 339 bp, Mus musculus
  source 1..339: mol_type = other DNA
ccaggaacaaagctgcttctgatcttgccaacgcactgcaggtattggctttataaattaaaattctcactcatttagtaatttctgctatgtgttcataagacatttgtaacatttagagtactttgaattgttacaatgaatatttttggaaaaggaaaatattaaaatattgatctgataatggctaactaattgaacaattagtttaacaaaaaatattaaactaattgttcaattagttagccattatcagtttcactggggaagagagaatgcattccccctgggtttccaggaaaccccctagcattatttcatcataataataagcagaaa

SEQ ID NO: 33495 - DNA, 311 bp, Mus musculus
  source 1..311: mol_type = other DNA
aatccccgctcgggatgctggagaggatgctgggcaggctgagactgctccggatgctgctcttgggaaactacagactaggctgagctgaagcttcttctgagattcaagctccgcctaattggccgaagctcgggctgcggctcctcccactgccatctgcgcagcctaggcgcaggtccagtgaaccggagcccaccggtctagcccatccgagggcacctcccatcggtgggcgtggcgccttctgggaaatgcttactattgcaggcccatcgggccttgcgcgactcctgctgggcaggattccg

SEQ ID NO: 33496 - DNA, 332 bp, Mus musculus
  source 1..332: mol_type = other DNA
gccccgccggccagagcctagcctcagcacctccgcctcggtccccgcctgaccccaggccgctctggctgcccacggagccgtgcggacccgtcactccggcgacgccggtccggaatcctgcccagcaggagtcgcgcaaggcccgatgggcctgcaatagtaagcatttcccagaaggcgccacgcccaccgatgggaggtgccctcggatgggctagaccggtgggctccggttcactggacctgcgcctaggctgcgcagatggcagtgggaggagccgcagcccgagcttcggccaattaggcggagcttgaatctcagaagaagc

SEQ ID NO: 33497 - DNA, 742 bp, Mus musculus
  source 1..742: mol_type = other DNA
taataaggttcaagtctgagataaatattttagaggatgtattcctttaaggaactcattttaaggtgcatatgaataattttatttccttctcatgaggttaacagaaatactattaaatttggtgatcaatagtcacgtttgcttcaatgaaactacactaaattttccatgtctgccagtgagatgattgaattgaactactacaatgagataaaacccattgaattatatgttaaaattgcatgtaagttacctcagtgtaacttccatgttacctgggattaatagtgttttcttttacacatataatttggtaaatcaataatctaactctggttctcttgtaatatatacatagatacacacacacacacacacacacacacacatatatatatatatatatatacattcaacatctactctttttccaattattagaatgggactcaggaaatgttgcatcctaagcactttgaagcatttatgatgggttgaattttaatctgacttcaagtccgattagaatccagcccatatttccagtcatttatacttttaaaggaaatgaaacaatagatgaaataataataataataattcttaacaatttgtcttactgtttttctatcattaacttgatcacatggcagcatgctatggttgtggaataattaatcattcagcgtttaagataaatatagtggccttcaccaataagctgcttcatataagaggg

SEQ ID NO: 33498 - DNA, 715 bp, Mus musculus
  source 1..715: mol_type = other DNA
gtactaacaaactgatggatatatattagcttggaagtgagatattcacatgcttagcactgtgatttatattgttagctgagttcataaatgtctcactcatcagacattcaagatctttaggactaatactgagtttcattgttttttatatgtatgtctaaggccctatacataattcatatttaatagtaatgatgtgttctattgtatcattttatgaacaagttcaactagaaaattctcttttcttaaatttctgatgtaactaacattggactcagcccactgatttgtctactctgtgttcagaataatcattgttgttcatttttggatttctaaatgaagagagaaaatattttcactaacttcagcctaaaatagtatatgctttagttcagattttattcatgttgaatacccccaaataaatgcatgtgtattcatgtctatgtgtgtgcgtttccttttttcttacctatgaaaatacttactgaaaattagatatagtataaggcttcatcgtgactagaatttactctttaaaatagaaaatttgttctattttaccaaaatggtcaaattaagaaggccatagtaagactaatttaacctgaataacacctgtgtttctaacctgcagggccaagctttgagaccttgctcagatctgcagagaattgactctggcttaataagctcatttttaaaa

SEQ ID NO: 33499 - DNA, 498 bp, Mus musculus
  source 1..498: mol_type = other DNA
gcacatgcaagtgtttgcacaatctgacagtagcaactagtgctgcagttactgtgggcagtttcttacaaatatactattgttacatgattcttattatgcagatttggaaaaagtatttttttacaaaagttctcatcaacctttatatgagtttttacaacaatactatgtaactgccaacaattagcaatgacacaaatatcattaatgtgttagcagattaacaacatataatttaaataaagatgcttaatgactcttgcatatgtcacaggtgaataatataacatcttgaaactttacctgtcgtggtgtttatataaatcaagaaaagacactccacttgattttgagtaaaacaattgtttattaaggttgatagggccacattaataagagttctcaaggggcccaggcaactttatagtatttttatatacttaattttgattgatagattacatcatataataatttcatgtaaccaggctgagc

SEQ ID NO: 33500 - DNA, 533 bp, Mus musculus
  source 1..533: mol_type = other DNA
caactgatacttttcagaaataatttatttctcttagaattcaggtcaagaggagaaacaaatttatcatttatgcataaattgaagaaagaaatgcactgtggatgaaaatgtaatttaaaaatgtaactgatttttttttctgctaccattaagagaaatacacacagcaagatgaatgcatactcatttcagcctgtaagatttgtttttaaaattattccatttgcagccagaggaaacatgagatcatttctttccttctggcacatagcctagtgcctctaatgggacaagacgttcataagctgaactcattatggcacccacggttgcacgtgcattccaagtgctgggacatacatgcacatccatccaggctccacgtgggcgcacccaggcgccaggcggccgcgcggcccacggagctcagagcctgcccagagctgagagggtaggcgcggcccggggcgggacggacaatggagcccagcattagctccccgaaacggggagcccgagtgggacttcct

SEQ ID NO: 33501 - DNA, 196 bp, Mus musculus
  source 1..196: mol_type = other DNA
atatactggcatatatgtacagctgcagtgaatctgcctgcttccctggccagagtgcagagagatgttcctagggaatgcttcctggaaaaagagattattggcacagttttattattaaagttccagtaatactattttttttttattatgtacaaaactgtacttagttcgtgaattactgatcataattgat

SEQ ID NO: 33502 - DNA, 332 bp, Mus musculus
  source 1..332: mol_type = other DNA
cctttttgtagcatcctgggacaaggaagataactgctaaaagctgtgacactgcttccagcctgttccatctttcatagaacaagtgatgtatcggacaactttcaaacaaagcattattaatatgagcttctagctttacaagctttcaaaggaagcctggtctccctagcgggctgtgaggtcgcagagtcccgggatccgcggtcccagcgaaggaggaggcgcagacaccgccgcagcctttatagtttctgctgggctcccaaatgctgattttaatcttgagtctggtatcagaaggcacaccggggttgacgggcagcctggct

SEQ ID NO: 33503 - DNA, 672 bp, Mus musculus
  source 1..672: mol_type = other DNA
aacaaattagatctttttagccctgttagaagggaagaaatatatttagaaacttgccaaggcattgcatgtgctagttctgaaaaaggtcttttttttattgtggtgcacacatcagtgaaagcttcattattacaaaggaagcagtgtgcttcgtagctaaagattgttcagtaataatccatttgaagatacctgagaataaaatcaattgattagtaaaaagagatgacttgaattatattactagaagatttaactgtttaactattacaggaccactgataataatttcggtgtcttatcttaggtctttgaattactgacaaataatttgcatcaagtgaaatcatcttgaagttcagacttagtgatttatttatttatttatttatttatttatttatttatttattttggtatacttattttttaaatacagtcttccatgttgttttagattacagtctcaaatatcttgttcagataaactgttaagaactcttcagcatggatgatgccatgtttgatccctgcagacttcaggattttgctttgattatgaacttaaaaaggattttaaaattaaaataagttatatgtgatataaacataaccatgtaataagtatgtgtgtatacacacaattttatatatgtgtgacttaagtga

SEQ ID NO: 33504 - DNA, 343 bp, Mus musculus
  source 1..343: mol_type = other DNA
gagacagactacagtgtcttgctttctgcgggaagcagcaatgccgtttgtttcctaagagggatttttttttatttagaaaaggaagctttctctacccaggaaatggcagtaagcacaataatgtaattatattggtgtattgcattcagactcatgattcttgagaacatcattaaattaaatgtccatcagtgtcatagagatcactggtcaccactgtcagcatcattagcagctagggaggaggtcctgagcttggctgaatgctagagactagcttttcaccaccctagcctgaaggctgggtgaggttccctcagccttgtcagagcctgtagtg

SEQ ID NO: 33505 - DNA, 382 bp, Mus musculus
  source 1..382: mol_type = other DNA
atctcccatcatgattggaaagaataattgcctccactgtaagagatgacatgttttccacagctgtaatgcagcctcctcccacctctagaagtttggtttgtttaaaaaaaaaaacaacccaggtggtttattataatattattgacacgaccatatgtgcatctgaaatttaacaaagcttgctaagcctgcattttataaattttaagacagtcttatttactatggcacaataatacgggacattgattcctttctccccaccttggttaaaaaaaaattcatattttagttcaaagctgtagtcagcaatcaatggattccatcccaatacaggcaagagcttgtccatcgctaccttaatgagtgaaatggttaa

SEQ ID NO: 33506 - DNA, 321 bp, Mus musculus
  source 1..321: mol_type = other DNA
tgctgcagaggaattttgtcagcagtaagaacttgaggctagcctggtctacaaagtgagttccaggacagccagggctacaaaatcatgggcagatcattggactttccaacctttgacagtattacaggaaatgtgagcacagcctccgtgtgagctttttttttttttttttttttgcaataaatactacataagcagaaagaaactgattcattcaggtttacagaatttctcaaatgcatcagatttgtgtgtgtgtatgtgtgtacgcacacacatacacgctaaagtggctgtattaataaagtgtggtcatac

SEQ ID NO: 33507 - DNA, 377 bp, Mus musculus
  source 1..377: mol_type = other DNA
tgggagaataaaggtctatatgcctttccctttaaacagatgttggcaaaaagctgcagatgtatgcagaaattatattttatagcactgtgtgtgtaaaaagtatgatccaatatatataatccaaaaatataatcagacatgttttttgtttgtttgttttgagaacagagcattttcacagagagatgctttgtgattatccagtacctttaaacatgtagtccagttgtctacagtgggaaacaatcatttctgtttgaaagcacacatcctcgcacagatgtctgtgtagtctagttgtctcaggcacacactgcacactccagttctgtctgcccctggaaaccggaactcagagctctggttctggaaca

SEQ ID NO: 33508 - DNA, 370 bp, Mus musculus
  source 1..370: mol_type = other DNA
atctgaataaccacattcaactttaagttgtgtattttacaccaagcccattagaaaaaaaaaaaaaagacagactattataggatatctagttttaacagaagtcaaataaatcctcttttagattggccaaatgacaataacatggcaatagtaactggacatctgttatttattagaagccacatgtttatgtcaggcattctgataagtaatttatgtctttaatttccaaaacgccttccctaggtaggtaggcattaagaaaaagaaggcaccaattaatttatgtatgtgcgcttcatgtctgctcgagacgagtaaactgagtacagcttccggcggtgcgcaggaagtaactcttccgcgc

SEQ ID NO: 33509 - DNA, 378 bp, Mus musculus
  source 1..378: mol_type = other DNA
tatgtgcccaatgtgaacacgaactaggaaagcatttgtgtgtatatgtgggcttaacgcacgcacatatgggcttagtacatgcattttgtgtgacttatggtttgtaaattcaaaacagttgcttgctgggacctcaaatgcagcaggggccagaaccacgttttctgctagggagtcctggaccccaagggcttttctttccaaagaacaaaaacctccatagttgtgctctggagctcagtaggtcaagtgtgtgagagcccggcgagtgataactccgggcgtacccctagtgatgtggtaaagctggccaatggagacgttaggcctctactctccgcgctcctcctcccgcgggagcgagctgtcagccgg

SEQ ID NO: 33510 - DNA, 270 bp, Mus musculus
  source 1..270: mol_type = other DNA
tcaccagctggccctgggctggtggccaacgagaggatcctggcagcggggctgcccgatctgcagctccacttgctccagcgggtccacggttggaccgggactcctgctcgggcggcggcggcggcgaagaagccgctactggaccggatcaagcccaaagcccatagagcaaatcagcctcgctatgcttctagggcgcatgcgcacacgcgagagcttgtcggcctctcttcgtgtcctctgtggcgccggcgcaaagcagaagag

SEQ ID NO: 33511 - DNA, 267 bp, Mus musculus
  source 1..267: mol_type = other DNA
tttcattgacctttgccctagtttagcctaagacaatagacaaggctggcagtaccccgggtgtggcccttggttagtcgcaccaacctggacttctaggctacgaggggcgccatcacctgccaagaagccccgactgctcagcttctgtcagcctcttctgctttgcgccggcgccacagaggacacgaagagaggccgacaagctctcgcgtgtgcgcatgcgccctagaagcatagcgaggctgatttgctctatgggctttg

SEQ ID NO: 33512 - DNA, 347 bp, Mus musculus
  source 1..347: mol_type = other DNA
tgatgaccataattctataaatacactactaagtcaaaaataagaattgtatactggctgccaacacacctgctgaacaggaatcttattcctgaaaaccaggttcagacccaaagtgtcagaatccctaagatttggactcaggaagacttagtaaaatcaggagtataaaaggatttttttttccaaacagatttaaaacctcctttatagctgtgccacaaaagcattcatagagggggtaaaatgttaccatgcttgggatttcatatatgtatgtgaaggctttgtcagagcatagaaacaaaatgtttagtgtaaacagagcctatgtgctctcagaaact

SEQ ID NO: 33513 - DNA, 333 bp, Mus musculus
  source 1..333: mol_type = other DNA
caggaaagcttcctggaagctattttcaaagaaattacctcccatggatttgtatacacattaattgtttacatttgtctaagctcatgattccagctacatgggataagctgtctcaactttaaaacaaactgcacaattaaaggtgtggtgtttagcagaaggtgcagagggcctgaggactccttagtcacctgactgagctccagccctccgctgggagggtgtcctgagcctccgcctgggagggactccggtctcccttcagattccggactgagtctaaggtgcccctgggtctgagagccgccctgcaaccttcagctcctcgag

SEQ ID NO: 33514 - DNA, 334 bp, Mus musculus
  source 1..334: mol_type = other DNA
ctttaatttttaatgtattcgggtgtaatgaggtaacctacttccttgatgaaacttaaggccataatggtttgtaactaagagtgatacattgtgcaatgtggcttgaacgtctttcaaaggtttgtttccctgagattatgcttgcattataggaagctaaagttcacgattttgagacaatcaaatcatattcgttgtgctcaagcagttcggcttcctaggcatagcaaccggaaatcaaggcaccaggctgcccggctctgagccgcgctttctcggcaccgcgcagaagctgccagggctgtgcggggtgcgggggaggggtgggtgc

SEQ ID NO: 33515 - DNA, 293 bp, Mus musculus
  source 1..293: mol_type = other DNA
tgtgcaatgtggcttgaacgtctttcaaaggtttgtttccctgagattatgcttgcattataggaagctaaagttcacgattttgagacaatcaaatcatattcgttgtgctcaagcagttcggcttcctaggcatagcaaccggaaatcaaggcaccaggctgcccggctctgagccgcgctttctcggcaccgcgcagaagctgccagggctgtgcggggtgcgggggaggggtgggtgcgcgagctcgccgcctgcctcgagtcgcgcacgcgcgcccgggactgcctgc

SEQ ID NO: 33516 - DNA, 542 bp, Mus musculus
  source 1..542: mol_type = other DNA
aattcaaaattaaattttattttttatttttttagtcatctttaaaaagaacggcagcttttaaggcttaaagttttgtttttcttcttaaacaactttttccctctatttaaaaatgtgaagaaaaaggcaaaaaaaaacccaccaaaaaacctagatattcttttctttcatttttgctctctttagtggaaagaaaaggaataaaaatgtgtgtgtgtgtgtgtgagagagagagagagagaatcaaggggtagttaaataacaattttagatatggaatatattgtgaaaacaatgtggaacattagttaagagaatatgtttaaatatgaactcactacttgatatttttgtaatatatatcttacaaaagttagggtgtctataaaaatcttaaaaagtatttatttcttttcttatttctgaatcacaaaaactcagatgtagtggctttaactgtgagcttactttaaagtaaaataactttacaccaaacttggtagaatttgtggaaggaaaactcgcctctttcctctgaa

SEQ ID NO: 33517 - DNA, 460 bp, Mus musculus
  source 1..460: mol_type = other DNA
attctatactataccatctccctcagggggctttttataaacacaacagtgttagatgtggactcatgaccactatgggtcaagagtcacatattaaatagcctgcatatcagatatttacattatagtttaaaacagcaaaattacagttattaagttaaagagtattaggaatcttgaggcccacagatctatggcctatattacacagaaatgtctactttcttgaatatttttaatccagcaggaatgatcaattatatcagatgatttttatgcacctattgatatgatcacatggattttatctatatttagtgaggtataacactaatttaaagttggagataagccccacgggggtgctccccccattttaaaacaaattcattttctttgctcattaaagatctgttcagatttttacttcttcatgagaaagtcagaatgttggctgtgt

SEQ ID NO: 33518 - DNA, 279 bp, Mus musculus
  source 1..279: mol_type = other DNA
cataataatatttttaaaagaagttgtttcttaactatgggatctgtaaactccaggtgattgaatctcttaatggcatgaatttcaatttcaccgtctataaaattgagaaggagcagcattccttgcactatgtatgctatactgagtagaaagatcagacttcagaaattggaattatcattccgacatttgtcccacatcatgaagagccctactcggtggcgacctccgccgcccgcggtccccgcagttgtccgcggcgcgccacggcgcacg

SEQ ID NO: 33519 - DNA, 314 bp, Mus musculus
  source 1..314: mol_type = other DNA
gaacaaaggaaaagattaacattttatcgtttggactggtcccttggtgatacatctgtctgactgcacaccaaggcatttgcttgtttctgataaggaaagcatattggaatcctatcagagacacatgtattgcgaagcacttcgtgcaggacagcctatgtgtaaattgccacactatgtccccagacaccagctgcaaaggacagggacagagccattctggaagcatcttgagttcactggccacgagtcctgacaacagaagagaaggagtggctgtcctctcctacttttcgcccaggggaaaggaa

SEQ ID NO: 33520 - DNA, 350 bp, Mus musculus
  source 1..350: mol_type = other DNA
gattcacagctcttttgtaaatagaaattttatacatcctaaaactggaatattaaataccctgtttacaatacaaggggtgctatttaagagggaaatatacatgtttttcctactttgttatctatttacaatgcaatttcactagccaggtaagattgaggatggagtgatatatatatacatatatacatatatatgtatatatatatatatattgcttcaaggcttcacatctggatttcaactctataaaggacacatcttaaaacaaagtccaaaaatacatatgttctcttcatcctttctaacacaaaataaatgtctagtttaaaatattgcttcttact

SEQ ID NO: 33521 - DNA, 581 bp, Mus musculus
  source 1..581: mol_type = other DNA
aaggctcattgtaccaatgagatcacgtgaacactcatctgaatgtgactctgttcataaaaacagcaaagtctgagtctagacacttttttttttaaaggatttatttattattatatgtaagtacactgtagctatctgcagacacaccaataatcaatgcagtcatctctccagcctgcatgtagactttcttgatgcaggaaaaaaaaaaataaatgctgataaatgctctttcatcaacacctggtcagtgtagctgcacaaggaatgagtacatagctgtctagttaaccagattaccttatttctaagctgtatataggagataaacatctgttacttagagaccctctgaccaaggaagatttattctcttaacagacggatggttatcaccatggtactaagcacaaggcctaggactgatacccagaattaatgactaacaagtcaaaccatgttgttcagactcaaggtcattaaaagatatattttactaaccaacacctttcaattcattttaggccaaaaaaaaaaaatccttaaattaccattgtagaaaaaaatctctttcttct

SEQ ID NO: 33522 - DNA, 519 bp, Mus musculus
  source 1..519: mol_type = other DNA
aagactcattctaagacaataatttgcattttgttgagaagcagctggctgtcttctcccaagggtaaccagcgatttgtgatatttggtctcagatcttaaatcactcagtctccttaaaggagagctctccttttacactctgtataccggcaccatggtaaaaggaaacaagatttttaaaaattacgtcagttaattacaggacgtgctcagcatataatgaagtgtttaggattacttagctaaatttcattacaaacttcggaagcgggtgcagctttctacaagtggagaaatggccacaagatattgtgcagttctgtgcagcaacattttgtcaagtatttatacgcatccatagagagaagtgtgtaaattcgcataatttacacacactcagtgtattcaattaaacacaatagtttgtatcttcatctctttcttattaagtaagagggaaatccctgggaccccagcagctttctgcttctgggcgtgcacaggacacaggcagtg

SEQ ID NO: 33523 - DNA, 405 bp, Mus musculus
  source 1..405: mol_type = other DNA
ctggctctggcagagcctctcaggggactaggctcctgtcagcaagcacttcttggcatcagcacctatcccttagctaggggccatgcctgtccattggatatggggacctcttgggtccctgacatctgggacttcctagtggctacatttcaatacttgtttctcagaagtcaggagactacactactgggagaagttaaacttttgcctataatgccattctctttaaggattcttatgctaatagaaaactttattggaattaagtagttaagtgtaaatgtctatggactgtcttctatgttggatataaaagctcaacttggcaagttagagggtttggcacgccctgctagcaaacagctcagttctgaaccagtacgaaatgagatccgggctaag

SEQ ID NO: 33524 - DNA, 436 bp, Mus musculus
  source 1..436: mol_type = other DNA
acaattatgtttgcacatgaagtatctatcctccaagaagatacatgaagtatctatcctccgagaaggtacttgagagcatattccccagctgggaaataccagtttggaaacttctggggcccacctgtgtgtctctgtaaaaaacatgaattctgctggttaatgtcaggtattttgtctcaatggcaaaaagtcacctcttgtatattacaaaacatcttagtttgtgcacttgattattaacttaattgactaaaagtaaaaatgttaattttgtaggattagctatgtttgccagctgttgctaggtaaagcaacaaaatgtttatgtgcataactaaacactgggcgcgcgcgcgcgcacacacacacacacccatgctggaaggagcacagctggttctgttctatctgccttaactgagcccattct

SEQ ID NO: 33525 - DNA, 595 bp, Mus musculus
  source 1..595: mol_type = other DNA
ttgtcagggttattttttaaaagaaacattgtggagatacagaaacaagtttagtcacttgttaatgaattgatttcgacatacctttttcaagttaaaaatagatgaagtctgtgtaactttaaaagtttaagtgttttgtgtattaataaattattaaatggcaaagatagtgatactgtcagcagtacttctttttaaccagattatctactaaatatagaaagggtaaacttttcacctgtgtgtgcttatgggatactttagcacacacacctacaagaaacgctcctatgtaatattaagatgcgattctaaacatttcccaatatttcgctatatattgtattcggtattcactgcaatcctttaaggagacagtcttattagtttcttatcaaatcatagagatcttattttgcatattccaagaatcaaacgtgcagtttaactccgacgattgcaaacgtcactactacgtcgttctgttgagtccgctgacactgcactgctgcctatgcggttgtcccagcgacgccggcggaaaggcgggcggttggaagtcacttcctcccggggacgctgttgcctagca

SEQ ID NO: 33526 - DNA, 332 bp, Mus musculus
  source 1..332: mol_type = other DNA
ctactgccccctttaaaatctgaaggaaatcctgaggaacatttcccgaggcatggtctccctgccagtgttccgctgggacacctgggcttgtgatctgaaggcgcagggttccagggacaccgccccaggcactggactcgtgttaaccacagttcctgtgcctgcgctcgcgctagcccagagtgggattctgggtgtctgtcgctgttcacatagccagggaccacagcttctctgcagattaggtgaactcctaagtggagtgtacgctgcatagcgtgcaactaaggttggaggacactaatcgggctctgagctgtgcagtgcgg

SEQ ID NO: 33527 - DNA, 403 bp, Mus musculus
  source 1..403: mol_type = other DNA
ctgaactaagagaagttcatgaattgctcgaggttttgttttcactggacaaaacgtttctcatatgagtggggcctcctcagtgagactagatatgtcaagataactttttgtcttagacttcttggacttggaggattaaaaagacaccagggtgtgcatttttgtgtgtacacatatgtgtgtatgaacaatgatttaaaaataaaagaacagttataaaaaaaaaaatattcttgtgaccacaaaattacctttgaaatgagtaggattcaggaaactacagtggttcttactagagaaaatgtttttagttttaatgtgcgagcagactcagttctctagctgagcctgagaagtgggagggactcagagccgcgggtttctcacacaccgccttcta

SEQ ID NO: 33528 - DNA, 455 bp, Mus musculus
  source 1..455: mol_type = other DNA
ctgtaaaattcagacatgaaaatgaatgtgaagaacctttctttcctggaaacaaaacaaacgaacaatgtttaacaaaccttcctcttgtagtttttgaggttaaaaaaatctttaaaaacaaagccaaacttgtttggaaaatactgtgcagagcagagtttagtatcacaagcctgtaaaacatgctataacttagttttaaaaacccataaaagggctaaaactctgttaacgttatttacgatcccagtctcatcatatctgttttaaggggaatcagaagccagacaaagaactttctcaacctaatcgcctgtcgcaagtgccctccggcccgcctcctcgcccccaccggcggccgctgattggtcgaggtggggccactccacgtgaggcgaagagcccgtggccccgaggcgcgaggacagcacgagcgccactggccacgccct

SEQ ID NO: 33529 - DNA, 341 bp, Mus musculus
  source 1..341: mol_type = other DNA
tggagcttaagctttgaatttactcatttacataatgaattagcacactgcagagccccagcagcctccttaggcagctctgggttctgctgcaagcgtgcaccgccttgcagaaccataactctttccttaagtctccctggacggcagggagctctttaccaaaaggaaggcgcgcgctcaacaggcactggagccttggagcgtccagaccctccgcgctggggcactggacgaacagtttaaaaccggagccggcactttggcgaatcagtcccatgccaagaaaggtgctccattcctggcaggtgcaggatctttcggccaatccgtgttctccg

SEQ ID NO: 33530 - DNA, 295 bp, Mus musculus
  source 1..295: mol_type = other DNA
tctttgttttaatgtcaaaggagacagtactttgtgactgcacacatctgtcacagtgccacagctgcttgtcattagcaaagagaggtgacagtgccctttccccccttcagagaggcttctaaggttcctccggaaccttctctttggtggcagatgggagggaacctgtcttccagtcatcagaagagttggaggaaaagttcccttctcccacccctgggcaaagacaggtctttcagtaatgcctgtggctgcaacagttgggctgagcccaaagggaggagcttaaatg

SEQ ID NO: 33531 - DNA, 302 bp, Mus musculus
  source 1..302: mol_type = other DNA
tgtgtgaatttggaattgtgaacaatgaatattctgttcaaaatccgtacagtacattttccatgtagcacttcctcccaggccgtggtgacaaccactcctcgggaggtaattcacccatttgtttactaacacagcataacataagcttattgtaggctttcaggtcattctgaaattcagatgaactctgaatcccacacacagtccaatgtctctgctccacagaacagagtatttgcaatgggataccttggtttcagagcacaggacacactgtgagcttggccaagggtgaacct

SEQ ID NO: 33532 - DNA, 367 bp, Mus musculus
  source 1..367: mol_type = other DNA
ttcacatacgttaaaatgatatcgtctcacataaatataacacaaaataaaccatataaagtaataacaaagtgaagtgttaactgtgtattccattattataatgataatcttgatttggggatctataatttattgatatcataatagtgtttaaattttatttaaaaatttaaccactgaataaaggaaaactgagaaccctgggggttcttttcttttctaggatgtttgtctatcacagcagagaaaagtggctactttataatcctgattaatgatccaacagttgtgtttgaattaaaccttttccttacacattttgtggagacctccgagacactcactcagacccactatatatagg

SEQ ID NO: 33533 - DNA, 329 bp, Mus musculus
  source 1..329: mol_type = other DNA
actagaaatgtccattttcaggttaaaaacacgaccttcatgtttttaatgaattaaaatataaatcgagctattcgcagtattctgaggacggtatccgtagatttatttttaacctgggtaaaataaaataaaaccaacttaagttctcaaccttttttttttttttttcgaggccagcctggtctacagagtgagttccaaggtaccgcccctaaacgttaaggctggcgcgctcccggctgaaatctccgccctcaggcaggagactccgcccagctccgccgaggctgccacccctgcgcggcgggttgcagtgcggttagcgt

SEQ ID NO: 33534 - DNA, 365 bp, Mus musculus
  source 1..365: mol_type = other DNA
ggaagcttcaacatgatatttgtgaggtttcatcatttgtaattttcttctaagtagattttccccaattataattaaaacattcatgcttctaatcttttaagctgtaatttaatttaaatgtgaatgaattcatcaagttttgttcaatataactacaattccaagaggaagaagatctgcattgtgtcctaagttagtcatcgtgaggtgacatgaccacatgccgagatgcttccctgttcctttgccctgccaggccaacagtatggtgtttatctgacaatgtttatctggtagacaatgaatgaccattgatcgattgaaaatgtgatgtcatagaaagtaacctttcattttcatcc

SEQ ID NO: 33535 - DNA, 296 bp, Mus musculus
  source 1..296: mol_type = other DNA
taacattaggttccctgttctacagagcagaggcttgtgaccacagatctcttcagaggtcaaattttctcctccaaagaggagaaatggtgctcaagcgcaggccacgcggggcgtgaaacgcgttccagccctgatccgactgcaaggccccctcgctctccctgggacagggtggcccgcgcttgtctgcttgcaaggcaatcaccagagcgcgcgcgcaggggctgctgcctcggggtgggggcgcagcccgaatttcctgccagcgaaccggcctcctcggattactccgg

SEQ ID NO: 33536 - DNA, 221 bp, Mus musculus
  source 1..221: mol_type = other DNA
caggccgggcattggttttaatcccagcacttgggcgaggccagtctgaactgaaagcagcaatcagttctctaaggtgtgggccagcgcagaagaaaattttcagtttccctggaggtaggccccaccacataggtttgaatccgaaccttggggcacgcctctcttttacccggccatttcccagaaggtccggagaccctgcctccgtccggggccgg

SEQ ID NO: 33537 - DNA, 292 bp, Mus musculus
  source 1..292: mol_type = other DNA
ggaaagagaaacatatctgtgccatccttatccccaagcacaatgctgccattcaggtctgcatggaggctggtagactctgttatcagatgctgagcccaagttgcaacctctgaggatggagcctatccttatttaaatgatatgagggtgtaaactgataaaaactccctgtgactggcacagggctgtaatttttggagctgggacgacccctgtgggcggcgcttgccgcaccgggggcggtgctggcgaccgggaagttcggggccctgacctggggacatcccct

SEQ ID NO: 33538 - DNA, 462 bp, Mus musculus
  source 1..462: mol_type = other DNA
aatttccaagtatgacttacactacttattaatattgttaactggcaggaagtgccgtctccacagagggcgctgagcgcattaccgccacgcggcgctgaggtcagcctctcgagagctttttattctaaattacagacctcgcagccacctcgctgcataacaggcagtagctgtgcggctgcacgcccaggacccctccccccggggggttagtgcccccaccgtggcccgggtgtcacgtgggccgcgagccccagcccccagagtcaagcttctgggggccctcgggcacgtgctgcgcgctgttgcggagcacacgcgctcgggagcaagcggcgcgccggcgctgagcagcagtccaacagctgcgggggcgggcccaacagcggggggcgggcccggaggcggggcggggccagggcgcgggggcgggcccggggcgcggcctggcggccgcgg

SEQ ID NO: 33539 - DNA, 458 bp, Mus musculus
  source 1..458: mol_type = other DNA
aaaagcgttaataaagtggatgtgatgaaaactctgtgtcacataattgacaggaacatctctgcagcatggcaagcaggtttggatacatactctgctaatcacgtttatcctatcttataaaataaaggttttagtgaaactttgagagacagattcactagtagttgcaagaaataattgtttcatttgtaatgcagaacacctggttggtgctcgcctttaatcccagcatttagggagcagcagcaagcaaatcactgagttgaaaataaaataaaatagaaaaagaatttcttttctaaatgtactcgtttccatatttttttttttaagctaaaagaacacacttaaaagcgaagactcaaaagttgccttttaaaaagaaaactaaaagctagggaagggaacagaagccttccctgctcacccagactggtccatctggtctcagtccg

SEQ ID NO: 33540 - DNA, 479 bp, Mus musculus
  source 1..479: mol_type = other DNA
gggctcctttaaggcctcaattcagtgcttcactgtggggaaagaatgagtatcatcaattatgcaatttcatatatttgaataaagaattgttagtggtcactcttaaataatgaaggtggtaaacttaagtactgaatagtattgcctgcctcctgatcctgaaatattggttacaatataaaggctctaaatattttaattaactgaaaccagaaacagaacagaatctggtttcccctaatcagagtttttttcctcccaaatgattagaacaataaagatcagagaatttgcattgtggaactgtgttacacagactacaagacacagatttgagtttaattaactgttagcaaagctgcttcctagtcggggatttagggatggagcctggcggcagccttgcaccggagcatgcgaacagctgactgctgactcagccagccacccgcgaatctctttgcagctcgctgctg

SEQ ID NO: 33541 - DNA, 201 bp, Mus musculus
  source 1..201: mol_type = other DNA
ggctatgacctcggtcccagtttacctaggacgacaagcacggtgacctaactttctttgttctagagcctgcagaagaaaatcaatttgcacggtcagcagtgtgtgctttcaataccgaacgcccggcggtggaggcaggctgcgtcgagctcgctcagcccggtacagctgaagtcacttcccctgcagggacagagc

SEQ ID NO: 33542 - DNA, 238 bp, Mus musculus
  source 1..238: mol_type = other DNA
caggagactgtgagattagagactcagcacgccagccctgagctactgctcccatcgtaggagcttcagcctctgctgcatccagagtccctctggagacttttagacttccaagaagctgataaggggctgaggtagggagattttgttcagccccatcccccacctcagaggccttccctgtagcactcatggtacttggacactgagacccaggacaccagtgtatcggccacca

SEQ ID NO: 33543 - DNA, 363 bp, Mus musculus
  source 1..363: mol_type = other DNA
ttccccaccccggcagctgaggtgccagcagccggcaagtcactttgaaaaaaaaaaaaaaatttatgcttcttctttaataaagctcaaaagtttgttaccatcattgactccacaggggatcagacctctacaccgctctggacctcctgagaagcgctaagctccaaagagaagctgtggaggcggtgacctgctcagtagcgaccgtggcgcctgcccagccccgagctggtcttcagctttcgagtctcgggagcccggagctggcgaggagagcaggaaagggcgtgctgtcctttgcggccggctggaggagcagccgggtaggcagcattgttacctgcagcggccccgcccctc

SEQ ID NO: 33544 - DNA, 381 bp, Mus musculus
  source 1..381: mol_type = other DNA
aaaagccctttatacaagatttttgatgtgctagcaatctaagacaataccgttaaaatatgtgtagtgcattatgtaaatgtatgtagtgttcactgtcagagagcaagcacagaattgccggtcttggccgggcttccgtgctctccgcggtggtgagctacggccacctccaccctccagacacggagtacgcgtgtgggaaaagacccggttaccccggcaacggtccgtgcggattcccggatgtagttcacagggccgcggcccggggcggagtcgggaggacccagccccctgggagacgcgcgcgcaccatagagacgtggcggggcccgggcttggcttctagagagaggctgtccggggcctaagaccccg

SEQ ID NO: 33545 - DNA, 499 bp, Mus musculus
  source 1..499: mol_type = other DNA
actctactctcttattttagtctagataattttctacattatattccttaacaacgtgtttattatgaagcatgttctcaacactgacctgtttatattcatagactatactaaactgatgtaaaaattattggattttatttagcaatatagtcatcacctgaattgagtatttcaatgaagtatttctagcaaattgagctcatgactgcagtctgtagttattcagagggtacagtctgtgacctcaaaaatagccaccaagaatctatccaggatcatttttagttctttagttttggcatgcacaaacaattttcaaagcagattaaatttgtccaatgtactttagaagtatgtattgcaaagcacaagcatccgtctggaagctttggttacttcaagaagtagaagttttttttcattctgtacccttgaagaaactagaacttaagctgggatatctttccatgaacatttagtacaagacatgcatgga

SEQ ID NO: 33546 - DNA, 227 bp, Mus musculus
  source 1..227: mol_type = other DNA
tttattaaagattaaggggtggagagaacccaggattgtcctcttccacatgcatattgtggcatatgtacagtagcgagagtcagagtcttaagttcttcagtattggtattgtagaaatccattcctagaaacattgctgaatgttgatactttcatagctaggtgtgaggcagcacatgcataattatacattggtgcatgcgcgtgcatgtgggtgtatgtag

SEQ ID NO: 33547 - DNA, 508 bp, Mus musculus
  source 1..508: mol_type = other DNA
cctagcagctcagctgaagtctgaggttcagcctcatcgtctaggctccgcagcaaataggatagatgcaggtcccccacagaggtttccttgcaaagacatttctccccgggaagcggggtgtagctttgtctgtagatccaaatagagcctctccggagcgagagcaatgaactagcagtttcctgttgattgggcctgggctgtccatttgtttacatttaaaattaggttgacttaatgtaaaagttcccttcaccagacagcgctgatttgagaaagtgctgtcagcactgagctcaggccagcgctacccagggctctgcggacagttccagagacccatcagagaggtgtgcaaacttgtcaaatcggaacgtctgtggtccagaccaacggagtctgtttctcagggacagagagttggaggcctggactccagagctagggaggtgctgactgaatcagcgctgggcgaagcagctacccttgccagtctgacaggctc

SEQ ID NO: 33548 - DNA, 335 bp, Mus musculus
  source 1..335: mol_type = other DNA
aacaaggtactatatggccctctagtgttcaatgaagaaactttaatgattacatgtttcactgcaataaatctattaattgtagacgtctttaaaactgaacattctttgagttactatccatatgctgaaaatataataaaggaaatgctccaacatttaaatgttacggtagagacttcatattctcctgtagtcttttcaaaaattatcttaaagaaggcattgtctattaatagagaagatgcacatcattaaaattaagcaggaaaaatacttgtaaaatattaacaaataacttttatttttaaaaaatccataaaactcttgaaaaa

SEQ ID NO: 33549 - DNA, 628 bp, Mus musculus
  source 1..628: mol_type = other DNA
gtcttatcaccacttccaagggcagttgtgtagcaagttgcaagatgaatacctaaatttgtacataatcattctatgagaaaggttgcctttaggcaaagttagtttctttattattacataaaattcttttttaatgctaagcaatgtgcattgccacaatcatttttgaggagtggttcatctttaagggtaacccttcttgttcccgagaatcactggcagttatcttgaaaactatattttaaaataatgtgtggtaaagcttaagaaataattttactaaatcataatataagagacaatcaggtgaaatttatcttttattacataatttctgtaaaagaaccttttgctccaaagaatatagtcagcctctgccaagtctatccagtagaaatacatttcatttccaaaatgtttctttctggaaggacttatttttaaatctcgtcaaaaatgtgggttttacaaaacacaaaaatggtgtgggggcggtctctgctgcccacgtccgccccttacgggctccctggagcagatcaccatttgatgtgcagtctgcattgctgaaccctggactgcaccattctgtgttcaagggaagatgtaatctgatccctctgct

SEQ ID NO: 33550 - DNA, 348 bp, Mus musculus
  source 1..348: mol_type = other DNA
tatggtcacacatcctcctctgagggtattagtatatcacaggtgatgtgttttataaagccaaggatataggggggtacctcagtgggcccatgctaaggcatccccatgattttctaaagaatgatagcccagactcaaatagtatgtaaatgaaatgagtgttttattttggtctcccatgacaaatgccagacattccatttctggagactgttgctgaggaagtctggaaactgctgctgacccattgtccttgcctcagggcaggtgacagggcagcttctgaggcctggactttgaaatgcccagttcttagaaacagacaagccaggactacctgactgt

SEQ ID NO: 33551 - DNA, 464 bp, Mus musculus
  source 1..464: mol_type = other DNA
acttttttaaaaattgccttgttgctgtattttaaaagaagctttaaatcatgtacaacaacataagcaattctttatataatcggggaaagatttcgtcagtcgacaaattattgctagcctgtagtgacgatacgagccagagtctagtgtcgcaggacgactgattcgcacgttgtccaaatatgcctactttaagacagaagttcttcgttctgcacttccacgagacaggcaaaagtacgaagaccctttcctcggcttctgagccgtgtggagggaaggctgagccactgaactctgtctcctagcccagttggatgtgggcccagttagggaaacccaagcgcagcatgggcgccgccatagcgtcgccgaagtcccggtcaggtgacccaccctccctctgccgcgaggctccctgggaagcgtagttctggcaatgcgccacaacccgtgtacgg

SEQ ID NO: 33552 - DNA, 470 bp, Mus musculus
  source 1..470: mol_type = other DNA
atgtcaaagatagctgttaagactattgtagactaagttttcaaataaagccttcctgagggtgggacctagcatctctacatggtaggcaaatgctgtaccaagtcaaacaacaaaagaaatccattgaggtgatgtctttttttctatcaaagctttctaacacaagaaattgtttcagatgttggctaagaaaaatagtaagtaaaaagcacataaaagtttaaaaatttttttcggacatgaaaacaatttttaaaacgtttttctgtatggttctttaaaatattagcatatcaatgctgccttattattgaactaggtatatatagcaggcatgcaaataagtatcagttgaaataatgcacaaatttgtgtggtttcaactcacgggcttaagctgagtataaccgtacacgggttgtggcgcattgccagaactacgcttcccagggagcctcgcggcagag

SEQ ID NO: 33553 - DNA, 368 bp, Mus musculus
  source 1..368: mol_type = other DNA
cggcaaaggtcgccccaggtcgagggtgcttccttgctggaaccaaatggcctcctgttcattcccagtaaaaggagatcacgttcatcttttgcctcagatctactgggactgtcctgtcatgttaaagttcaaatattccgcgtggggcgatgcgtacggctccgcactcaaaccttctgaaatctaagacgtccgcgcgtcaaccagccgggcgtgcctgcctgtcaggcgtgacgcgggtgcgcgctgtagtcgcgcaattcgagtctcccgagcacctggggaggccctgggggcggggcccctgagtcgctcggcaggttgggccccgcccctgccacctccctgcctcggagggtgcgggc

SEQ ID NO: 33554 - DNA, 294 bp, Mus musculus
  source 1..294: mol_type = other DNA
ataagatgataaaaatcatagcgggacagaaaaaaaatctgtcccgtccacatgccaagcctcttaggaatttaagttgaataaaatcggtgtgaactttagtttccagaaaacctgatttgtaaaaacaaacggatttaactcagagagtgggttaatttcctctggctcccccaagacagtagggggcgctgcacagtcccgcagccgctcggcttaaatcccttgcagtgagcgccacctagcgggagcagctggtcctgccccttccgcggctacttcagcggccttccg

SEQ ID NO: 33555 - DNA, 537 bp, Mus musculus
  source 1..537: mol_type = other DNA
ctaatttatgacatgtatcacagagttaccaaaaaacctattccctaatgaggtactttttaaggtggtagcatactactgtaattccaccacttagtgtgtgtgtgtgtgtgtgagagagagagagagacagagacacagagatctcttagagtctagactcaactctaggtggtgtgccccaagtgaagttaaagggcaggaagaggccaagcctccttgtctctcttgtgcggctggagggcggcctcagcagcccgaaacccctccccgaggaggcgaggccggtcgggagcccgcccgatcccaggctggacctctgtggggcggggagagctgccgaggagctgcaggccgccggtgcgtgcccagaaggcggggagctcggcccagcccgcgccccagctccgcgctgcaggtggagccctccttccccgccgagcgcgctggcgagggccatccgctgcccgcagctcgcccgccgtccctgggctgcgcggcggcgcctcgcccatggctgagggccggcggcgggag

SEQ ID NO: 33556 - DNA, 391 bp, Mus musculus
  source 1..391: mol_type = other DNA
aacacgacggacgtcctccccgtggggtgaacgtctgcgaggccggctggtcagggacctgtgacagtgactgcgggtctccaggtcggtcccacgagagcccgcccacagttcgcgcgcgacacgcgagcgacgatcacacgcggcgcgcgacacccggccgggtggcggagaggcggccgcccgggacgcacccgccagccgcgcagcgcagcaccgccgcgcagcggagcccaacggccggggacccgcgcgatccgccactcgcgcgagaacttaacgcgagactagctggcggctcgtttcccgccgtgctgcgacagcgccctcgtgtgtcgggaggtcgcgcagcgggccgcgggctggctaggctgtgcatgggagcctgcag

SEQ ID NO: 33557 - DNA, 437 bp, Mus musculus
  source 1..437: mol_type = other DNA
agatggctcagcggcacctgcagagacctctcaggcagcgctgcgggccagtgtgcgcaggatggcagcctctcctgagaataggtctctgacctccacacagagacctgtgagagcatacaaaaaaaaaatgtgattacaaatgtgtaagagttacatatgtatatatgtgtgtgtgtgtatatatatattctctcctctgctaggtagaggtattgaattacactaatgttttgaaatagatcacatgaatattccagtactgttggaatcaccatttgaacatggatttgctatctctgattcaaagcccatttctgcaggctcccatgcacagcctagccagcccgcggcccgctgcgcgacctcccgacacacgagggcgctgtcgcagcacggcgggaaacgagccgccagctagtctcgcgttaagttct

SEQ ID NO: 33558 - DNA, 762 bp, Mus musculus
  source 1..762: mol_type = other DNA
ttttagtactttaaagtcttatcccagagaatactaatagaacaactacctcctctatgttcattttattttatactaatgcaccaggatcaatgacattagactatgacaatttgtactggcttcaaatcctcatttatatatatttaaaagcatctataatgaggcacactgggaaattgagaggaaccccgagcagctgtctgaggaatgaatcctctagagctttgctggggcggcagctgccaggcaaggaatcctcccagtcgctgtccctcccctccgagcagcggcagctgccagggcatcccagtggaaatctttcccagttagcgccgcgggcggcagctgagctcagtcaggggtggagactgctccccagaggctccagcgccgccacctcaacgaaagtccctcaggtgtccttctcccaacacgaggacaccttgacaacgtggggcgggtaccctcggcgctcagagacctgctgttgcacagcacccgcctcccgttcgtcgccaaagcacagtctgggcgaagagtgcgagggaaaagcgcgccgctcgcggctctacctgagcagcgcgctctcgaggcgcgctcccgcccgcgtggcacctccagcgagcgcgcgtgctctgctccgccactcacccgcgattccgggcccgcccgcacgtcccctactaagccgcctccgctagggcgcccgcccgctcgctcgctcgcccgccccaccaccccgcgcgctcgcgctcgcgc

SEQ ID NO: 33559 - DNA, 377 bp, Mus musculus
  source 1..377: mol_type = other DNA
aggctataggcaccttgcctgttgtttatcaagttctggggccgcccgcctcctgcctttaaaataatttgcaagtcgtgcatcatttattgaatccttgagagctacaccctctgtttaacccacagtgggcattatccattgagaaggattttctccataatgatagatatcgaaaagaaacatttctcaataagtaaaggtatttagtaagtttgatgtctcatgaaagccaggacttcaatggtattttaaaacatacaatgactatgttacaaaaacaaatcctaatggaaaccacttttaaatctgtatagctcctgttaagtttttgcttttcaaatggtaacaccacactcagcactacaggcgcctct

SEQ ID NO: 33560 - DNA, 797 bp, Mus musculus
  source 1..797: mol_type = other DNA
ctgccagggcatcccagtggaaatctttcccagttagcgccgcgggcggcagctgagctcagtcaggggtggagactgctccccagaggctccagcgccgccacctcaacgaaagtccctcaggtgtccttctcccaacacgaggacaccttgacaacgtggggcgggtaccctcggcgctcagagacctgctgttgcacagcacccgcctcccgttcgtcgccaaagcacagtctgggcgaagagtgcgagggaaaagcgcgccgctcgcggctctacctgagcagcgcgctctcgaggcgcgctcccgcccgcgtggcacctccagcgagcgcgcgtgctctgctccgccactcacccgcgattccgggcccgcccgcacgtcccctactaagccgcctccgctagggcgcccgcccgctcgctcgctcgcccgccccaccaccccgcgcgctcgcgctcgcgcacgcgcacgccgcgcccggcggccctcggcgctgtcatggcggcgaggagcagcgcgcgccgtagcccggcgttctgtggcagtagcatcctcggccaccgcggcggcacgagccgcggcgtcgcccccgcctgcagtagctgcgtttgcaagggctgacctagggaagcacggagttctaggcagccgccgggctcccggggagcaaggccccgtccccgcaggcgcgtcgggcctgccttcccgccccttcctctcctcagccgagctcaggtgcccgggcgaggtgctccactcctccccctgggccgagcgctgaggagaatcaccg

SEQ ID NO: 33561 - DNA, 205 bp, Mus musculus
  source 1..205: mol_type = other DNA
ttatagaggggactacaaaatttaagtcctttcttaagctccccgttagagtctgcaccttctgcagaatgttcagagacttgaagctcactgaaagcactactactttgcaggaattgatccagccatacccagagaagaatcccttctatgaagactctcctccctttatcaagtgcagtgtggactaaaatagattttgcta

SEQ ID NO: 33562 - DNA, 423 bp, Mus musculus
  source 1..423: mol_type = other DNA
agtcacctgaccacaagcaaaggttggggccaaatgcctttgagcttcatcaccaaagtgaaataacggacgtttcaaaaatttcttgaaacatgtctattgtggccagatatccacttaagaagaggttttctgagcgcgggtaaattcacagagtacttgattcaatgaaaccaataacttgtagtcatgtattcattcaaagttactgcagtagattttttttttctgcctaaaggattttttatttaaacaataaatcagacgtttataaaaaactaatattgcatccaaacctagtgctatgttttggcgcggttgcgctagcccccgcgcttgtggagcgcgcagcgcggtcacgcccgggagcgcgcagctccggtagcccggcgggcgggcggggcctccttggaccgtagagcc

SEQ ID NO: 33563 - DNA, 570 bp, Mus musculus
  source 1..570: mol_type = other DNA
gttggggccaaatgcctttgagcttcatcaccaaagtgaaataacggacgtttcaaaaatttcttgaaacatgtctattgtggccagatatccacttaagaagaggttttctgagcgcgggtaaattcacagagtacttgattcaatgaaaccaataacttgtagtcatgtattcattcaaagttactgcagtagattttttttttctgcctaaaggattttttatttaaacaataaatcagacgtttataaaaaactaatattgcatccaaacctagtgctatgttttggcgcggttgcgctagcccccgcgcttgtggagcgcgcagcgcggtcacgcccgggagcgcgcagctccggtagcccggcgggcgggcggggcctccttggaccgtagagccgctcctcgcgcggcgccgccctcgtccctgaagggacagagggtgtcctccggggtccaggccctgacaggcggccgagagcgcggatgcccgtgggcgtgcgtgcgtgggaggcggctgcactcttcccgcaggggcccagcgcctctagaggatccccggccaggga

SEQ ID NO: 33564 - DNA, 361 bp, Mus musculus
  source 1..361: mol_type = other DNA
tgtgtgttcttttgtgattgagttacatcactcaggatgatatccgtctaagaattccataaattcattgttttgtactccattgtgtaaatgtaccacatttacaagttggaacatcttctggatatatgcccaggagtaccccatttttaaatagggttattgcatttttaataccatcggagttgtaactgaaatacaactttgtcttgctttagatattgagacggcacacagtctcaaactcattctttagtataacggaaagacagtttttttttttttttgttttgttttgttttgttttacaaaaaacctccaactctcaagtaccagggggtttggctttgtcaaaggcagg

SEQ ID NO: 33565 - DNA, 309 bp, Mus musculus
  source 1..309: mol_type = other DNA
tttctcacagtaactgaaattttgagcaactgtttttgtctgaagcgcttcgagggggcaactagaagaatcacatctattattatcattatcattattttaatgtgatatttatagatatctgcatttttaataccatcggagttgtaaccgaaatacaattttgtcttgctttcgatattgagacgatagtctcaacctcattctttagtataacggaaagacatttttgcgtagcggttctgagtaaagctgcactccaaccctcaactaccagggggtttggctttgtcaaagagtggttttgct

SEQ ID NO: 33566 - DNA, 343 bp, Mus musculus
  source 1..343: mol_type = other DNA
tgggttctggactggagaacccacccgcggggaggcacaagagaaagccaccgagttctttggttttccctccggatagataaatgtctggggtgaacaaagtccagcgctgaggcgggcctcaatgtggctggctgaagccctcagaaatttgtaggcaagaaacactctcgagttaattgagaattcttaatttaggcatctagggttagattctttgggattaaaacgaagaagagatcttaaagcttttacctcgcaccaagcactggtgggccaggacccagcggtccttgctccagagcctgcgctcggttccagcgagcggagcgaggtgcgcgcg

SEQ ID NO: 33567 - DNA, 280 bp, Mus musculus
  source 1..280: mol_type = other DNA
tcatggtggaatattatttgttccccatggcttactactgggcatctctcatagaagcagacaactgttgtttgtttcagttgacacaaaccaaccagcacagctagttagaggaaatgcaccttctgggaataacttgttaaacctgtcaccatttcttacaagttgtcatttttctctggactgaccgctggagaggagtcagtccagctctgggtgctgctagtagggactgtctcttgactactaagaagagattcttatctggaaggcgtcctct

SEQ ID NO: 33568 - DNA, 385 bp, Mus musculus
  source 1..385: mol_type = other DNA
ttttaataaactttccatccaaaggaaaccctgaattatgtgtcggcttcccattatcttcttttactatttttttaaataagtaaacaaagagataaaggacaccatcggggaaagcttactttgctagaaagagccaaggttatatccatgcttgaagctttagcggctcaatttgttttttaacataatttagactggaatgaaggatgtctgtccctcaccaagttgcaataggcttctgaccagcactcgggaagctggttgaaggtaggaaagatcgtgacttacatttgccctcaatggaggctaaatcttcccttaggaagactgtttcttcattaacatagagagttaggctttcagtatgatgaaatcatgataa

SEQ ID NO: 33569 - DNA, 425 bp, Mus musculus
  source 1..425: mol_type = other DNA
gatgcaaataatgtagaacaattactatgattgcatttgtatcagtttacctttgtcaaaaatcatcttaatattagatgataaaagattcaagaaatgggaaaaataaaatagtttattcccctgtaatagcaggaattgcctacccttgactggatgactttttaaaaagtggctcatgtcatttattggaacattgaaattttaaacatggggaaatatctacagatagttaaatagatatccttaccaaaatctggcaggactcaagctcagtgagactctttagatacatgaatattcatattttaataataaagtattaatcaaagttataaaatgtcatgaaattgagtcatgccataggaaggagtgtcttccattctggggccttcctggaggaagaactgaaggttaacttccga

SEQ ID NO: 33570 - DNA, 386 bp, Mus musculus
  source 1..386: mol_type = other DNA
agacctcaagaactatcaattattagtcttgcattgtgacacatatggtagtatatacctataatatccaaagctagaagccaacctttgatacaaatcatggtaagacttccgaagacttcaggaagctgatttcacaaacaaaatttgtctgggacaaaattgcgtgcacgctgtaacaaacttcgcacgtgcctctgaagctcctgtgctcctgtcagcgcggaagagccttccttctgcagagggttccagccccgcggcctccgagccacggaggggcaccggtaccttctgggcggaagccgtgccgctcacgacaccgccccctcccaccctggcccagagtggaagtgacgaaagccgccgcggagtcacttccttct

SEQ ID NO: 33571 - DNA, 448 bp, Mus musculus
  source 1..448: mol_type = other DNA
cactgtctgaactgaacacagtattgcatgctctgaaatgtgtgcacgtatctacaggagacactcagtgatattgatgtgacataaataccagaggcattgataaatatgaaattaaatatctctttgggaaaaaagttgtctgtaagaaaaaaaacctatcatttttcattacagggaattttgttgacacaatgtcagaatagaaactcaactttaaaaaattagatttaaatttaaaagcaatccattcacacagtaatacaaaatgaaatgcctatttccccctttttctctctaggagaaaatgagctgagatggcatttaccattaatggtgttaccgtaacaatccatgatcacgtatgtcagatgtggtgttgaaagcatgtgattattaaaccccaaagttttcgaaactaattaacaattaaatgcggctacttcta

SEQ ID NO: 33572 - DNA, 222 bp, Mus musculus
  source 1..222: mol_type = other DNA
actgcctccccctagtggagaggctgatcgccgtttggagctctcctcagagatagagtctcagcagagagcagcatccgtgctgctgtggtactgaaggagctgaggagagctggctcagcatagcccggcctagccacgcccactggctctggctctggcagagtcaggggcctccgactctttgcccgttgctccggccacagccccacccaatcaggc

SEQ ID NO: 33573 - DNA, 390 bp, Mus musculus
  source 1..390: mol_type = other DNA
atgacccttggttgtcctctaccccggagggagtaacacctgtacctgcaagaatggtggtacacgggttccgaggcccctcctgccagaggcgtgaggctcgctagaccccagcccccccatgggtttggcccccgactcccatctccagggtggttccagtgggaaggggcaggtcagccctggtcaatggccccctgatcacccggacgggacctgctcctgcctggcgggctggacaggccctgactgctccgagggtgcgtagggggcagtgtgcccactgctcctggccctgggcagagagcgtccctccctcagttatctgtacatggggggataactctatgatagcaaactaactgcactgccaggaaaggcataaaggaa

SEQ ID NO: 33574 - DNA, 509 bp, Mus musculus
  source 1..509: mol_type = other DNA
ctgggttcaacctcaggtcatcaggcttggtggcaagcgcgttacaccccccagagagggaccttttattgggatgaacatttgtctacacagtagcaaaggtttcgtatatgtgaaatactttatgccaccgaactgtatacttaacatttgttgaaaggatgtaaagttttggaacattattcatcaagccaagtgggcttatttttattatatgtcaatcactcttaaataaaggtgtcgctgcagcataagccacaagcaagatctgctttctttatgtagcagaatcctgcttccaggcagggtgcccctcccctgaaggccgccagggggcgccgccgggcaggaaagatggaccgcgacgccgggagccggggctgtcaggttgggcggctctccccgtccacttcgcagacaggcgtgcggagggctgaccccacccggccgggctccagcctccccgcgcggacttcctgcctgggcgcgggcggaggcccacccccttc

SEQ ID NO: 33575 - DNA, 276 bp, Mus musculus
  source 1..276: mol_type = other DNA
aaatctgcatggaatgaattcagaaagtagatggcataacattttttttcacaaaattttaggaaagtgacatgtttcttgtatggagtggctgtacacaggacatgttagcccagtttctgactggaagatgtccttctcacacaattcaagaaatacgtaggatcggatgttcctttttgaatataccaacagaaaacaaactgtgtggcttacagtgtttacactttatgttggggggggggaactgtgaccctcccccccaaaaaagcctta

SEQ ID NO: 33576 - DNA, 354 bp, Mus musculus
  source 1..354: mol_type = other DNA
ttagtgggtctctatatatgtacttatcactaagagatctattaatttctccgcacagaaatcgatgccaggacggcgatcgatgccaagcttggtctgcctggccatggctcggctctggggccccagaagaggcacagcttagaaaggctcagaactgctcttctccgccctcgaagccccaggccgagcgcaaacgccgggcgcgagggcttctagcgccaccctgtggtcttttagagtctgaaaatgcagctgttttactgtgagaaataaggtacccgccccaggtctcctgcagccgcgagggaaggcggggcggggcggggccgtgggtgccgccctctccacacc

SEQ ID NO: 33577 - DNA, 255 bp, Mus musculus
  source 1..255: mol_type = other DNA
gataagtacatatatagagacccactaagcattgatctgagttcgaggccagcctggtctacttccaggacagccagactcgtctcctagggatttgagccaaaaccaagggatttccccgttcaggtttcaccagtggaggggagcccagccgctccctccagatctgcagcgagcgggttgggggggttccagagctcagttcttggcttggaaagggcgggagctgggcgaggtccctgcctttctgcccca

SEQ ID NO: 33578 - DNA, 269 bp, Mus musculus
  source 1..269: mol_type = other DNA
tggctatgcttttgcatttctaaatactgttaaatacttagcaactacttgcttggaagcctgtgactaaggttgcttagtgttgccctaatcagcagctggagcaatggctctgtgagcaaagtccctgctattcaagcatttaggctgagataggaacctcagtgtgcacatggggttaactgacctgccagtctagctgatgagctgagaatggttggggaagccacttgcctcaacctttagcaagtacacatatacgtatatac

SEQ ID NO: 33579 - DNA, 277 bp, Mus musculus
  source 1..277: mol_type = other DNA
agcaactacttgcttggaagcctgtgactaaggttgcttagtgttgccctaatcagcagctggagcaatggctctgtgagcaaagtccctgctattcaagcatttaggctgagataggaacctcagtgtgcacatggggttaactgacctgccagtctagctgatgagctgagaatggttggggaagccacttgcctcaacctttagcaagtacacatatacgtatatacaacttctgagtatgaatctctgagaagccttataacactttgttcct

SEQ ID NO: 33580 - DNA, 149 bp, Mus musculus
  source 1..149: mol_type = other DNA
ttactgaggtaaatttctgtgagacagagacaggattttctgtgtcacgctgggattcaaggtgcatgacacctttacaggtaactttcccttttagctgctctgaggaacttcaagaatcactgcatcagaggaagctttcgctcagt

SEQ ID NO: 33581 - DNA, 310 bp, Mus musculus
  source 1..310: mol_type = other DNA
gattgtagcaagtttacatagaacctgtttttaaaaaataaaaggcttttaggtaagaattactgcttttaagataaatgtttactgagcatgcagtaaaaccagatttgatggtcccactaatgaagtttataacattacaaactgttgataaaagagatctggtctctgctaaattttgggcctgccagcagtacatttcacacgagtgattgctaatataatatcactcttttctctgaaaaggcggggcatttttttttaatatgccgcaaaggtgatctcatctggaataccctttgcttctctg

SEQ ID NO: 33582 - DNA, 538 bp, Mus musculus
  source 1..538: mol_type = other DNA
gccagccagggctacatactaagactgtctcccccggcagtggtggcacacttctgtaatcccagcacttgggaggtctgagtttgaggtcagtcagagtgagttccaggacagccaggactagatgtaattacaacaaaatcttgtttggtttgagatctgagatcaagtttcaaattaatactatatatctccaaactagatttagtggtatccaaactagttcaggccacagtaggccccgcctggccagggcattcagaggagcccggggaggggcacgtgcagcctgtccagcgggcgccagctccttttgggctggcacccaccacccgcccgcacacaaagcccgctcggcgcgctcggcactcggctcttcaagcctgtgcctctgagccccgcctggcggcctccaggttgggtgtgaggccggggcaggctgtaggcgtcgattggctgcgcgcatcgaaccgccgcgggcgggagcgcgaggggaggagaggaagcggcctcgctcgcgccgaggagggagcaattg

SEQ ID NO: 33583 - DNA, 495 bp, Mus musculus
  source 1..495: mol_type = other DNA
tctgtacctcatctctgcaggtaaatctaattacatttcacccaggaattctcagcgtgcgtgtcgcgctccctcggctccacgtgggggcgatgtaaggacacagtggagggccagccacctcggcctcgcaagcgtccgaagccggatgcaggcgcaggcgcgcgccgacgtatgccggggcgggcgacaacgggaaggcggccggcgcgcacgcgcccgcagcgcccccacctcaggcagcgaggccagcgactcggagtgcgtgagcagcgggaacggcggtggcggcggcggcggcgtgggtgggggcgggggcgggatgcgctccccggcccctcgggccccgtggaggtacaactcggcggaacagagtgcgccggaaccgtggtcccacttccgggagggagggtgggacctgcagctgaccccctcgccgtaagctggacgtctccgagtcccctgcggctgcgcaaatggcttggcccagtggaa

SEQ ID NO: 33584 - DNA, 277 bp, Mus musculus
  source 1..277: mol_type = other DNA
aaaggtaatccaggctgccctagaactttgttggttgtggggtttcaaatgaaacaaacaaaaccaacacccgccctcagcccggtggcctcacgatgatgtaggctgaggtccacagccagttgccttctctcctcatgcgagaggccatgggctgaaacgccccgcatcctgtggcgtttccactgggccaagccatttgcgcagccgcaggggactcggagacgtccagcttacggcgagggggtcagctgcaggtcccaccctccctcccgga

SEQ ID NO: 33585 - DNA, 388 bp, Mus musculus
  source 1..388: mol_type = other DNA
tcccccaaccccggaggcaacgcggcaagccgcggggtgggggtggggggtggtggggggcgcttggcgtctttctccccctccttgtggcccagggggcccagggaagcgtatcgagccgggggctcctgcttaacccttcattgtccgtccagggcttggagaggaatgaatgctcacttcaggcgtccccaggcactacttgaacccagagctgagtcaaggggtggaggacagaccacctgtgttcgccctgcaggccgagagagcatccgtgagagccgtgccctgttcttgccagaggcacaaaccccgaccctggacccacccacatttctagaaacaggaggggaaggcggggcgggggcggggccgcctcatgcaccag

SEQ ID NO: 33586 - DNA, 278 bp, Mus musculus
  source 1..278: mol_type = other DNA
ctttttaaacaggtcctccacctggggagcaagcattcaaatatttgagcctgaaatattggttcaaaggagaaaaactttcccttgctagtctagcgggaagctatggcaggagcgtccctgagacctgccccggagcactggcagatccgtatttactgttatacacaaaacacggcccagttctcaccggacgggatccccgccagggcgaggctacaagggttaaggcctagggaccgccccttttccgcccggccggcgggagtatgaatacc

SEQ ID NO: 33587 - DNA, 444 bp, Mus musculus
  source 1..444: mol_type = other DNA
aggacaaggatcggcctacagctggtgccaaggctttgcctggggggtgggggacagctggcagtcctcgaggcccacccccaggctcctggctgcacactgggcagcccagccgaggctagcaggctctcctgcacacccgtagttctgcgagtcgacctccacctggtcaaccactcaaagtcagctcctccgccggggagggagaggagcaccgggggacaacttcctcaagagggatggctgtggttttctctggcctgagaaaaggacttccccttttcacccagcccggggctgcccgctgtcgcccggaacccgcacagagaaggcagcgggtcccgtgaccgcgcagagccccccacgggggcggcaagggccggggacggcgggctcccggcgagctggcgcccctgtctgggtcccgcgcgcccggccctgctc

SEQ ID NO: 33588 - DNA, 181 bp, Mus musculus
  source 1..181: mol_type = other DNA
gaaatggtgccacatccagaattttaaaatttgaattcagctgccaggatgtggttagatgactctattttagagagtaagagcacttgctctttcaaaggacccacagctctcagggtctgtaactagtcccttcccagggacagccaaggggtaaagggcccctgttacccaacaatag

SEQ ID NO: 33589 - DNA, 297 bp, Mus musculus
  source 1..297: mol_type = other DNA
aggacaaggatcggcctacagctggtgccaaggctttgcctggggggtgggggacagctggcagtcctcgaggcccacccccaggctcctggctgcacactgggcagcccagccgaggctagcaggctctcctgcacacccgtagttctgcgagtcgacctccacctggtcaaccactcaaagtcagctcctccgccggggagggagaggagcaccgggggacaacttcctcaagagggatggctgtggttttctctggcctgagaaaaggacttccccttttcacccagcccgggg

SEQ ID NO: 33590 - DNA, 361 bp, Mus musculus
  source 1..361: mol_type = other DNA
gacataagatccaaggcagcctaggctgacacctctggttcccgagggcacctgtgtgaccgcaataaactaactaaatattttccagcaaacagaaccttggacttgaagtacaattaccggagtaatctaaagttccttaaaaattctattttctacattacataagtaaaacatgattgatcctcggatccacagatatgtgcagcaaggcacgtgcatgcctcttccctccaacccttgcatttttaaatgttaaaaacaaacaagtcggctgagttcgaggccagcctggtctacaaagtgagtccaggactaatttttaaaaaactgtagatgcagaggctctggggcggggcgg

SEQ ID NO: 33591 - DNA, 312 bp, Mus musculus
  source 1..312: mol_type = other DNA
tacccaacatggatacagccgtggctgtcctggaactcactttgtagaccaggctggcctcgaactcagtaatttcttttctttttaattaattgttaaggatgtaattttatgcatctgcagttcctctggaatccatatggtaattgcgttctagataacaagcaaatggctattcccatatttttgggcggccggccggccgcagaagcctacaaagtctacatgctcctccaaggagcctgagtgtccttgcctcaagggaggcactaaggaaggaaactagcacccagcctggaactcagtttccgt

SEQ ID NO: 33592 - DNA, 284 bp, Mus musculus
  source 1..284: mol_type = other DNA
tgagccagctgggggaccacagggctgcctgggacagctatttgcacctttcgagctctcgtcttggggcagctgcagccagactgggacaacatgaccaggccttgaaactggccctgtgtacctggaggaagaggcagtctgcctacagttttatgctcagtggcatagtggcatggtggcatggtggcagggcacaaagaaagggaatcagacctctcgctctttctttctgcaaattggcagcttagctgaggtcacaagccccattgggttaaggccaa

SEQ ID NO: 33593 - DNA, 516 bp, Mus musculus
  source 1..516: mol_type = other DNA
tgctcttttcagaaatagtggaaaattttgaaccaaaacagtctgactccgagattataaattttacagaacagaccctagcttgtgaaggctttgaagtccacgccagactctgtcatttcctcaagctccaggtagagccagttgtgaagcacttaaaaattcaccacgcccagaggccgtcggggattttaaaagatttttttttttgagagagttatatttcttcaagacaaggtcccgcccctttaaattgccccctccgtagttaagtgcgctggggcccgcaggcgcgcgatctggcttcggagctttgtcacacagtaagtgtaggagctggtggagctggggtgctgaggtacccgcagcctcgctctgtcccgcaggcggagggatctgggctccacgcgccgtggtcgcgcgccccaaaggggtggggcgcaggccgcgggcagggggcggggttgcgtcccaggcctccctgccaggccccgcccccagccctgcggggccctc

SEQ ID NO: 33594 - DNA, 337 bp, Mus musculus
  source 1..337: mol_type = other DNA
taaaagaatgtgccactccaggagaagttttttttttttttcttttaaagatttatttatttatttatttatttattatatgtaagtacattgtattgtgagccaccatgtggttggtggctcagaagagcagtcagtgctcttaactgctgagccatctctctttttttttaaaatgacttatttagttactatcagctgaagccttcactaggaagggttgctgtaacagcactagtctagaacatgtatatccctgcatttgtcatcttttgttaaaaagggttccctgcggcacgaacgggaagcgtcccatcccggcgtgaccgcagtgagg

SEQ ID NO: 33595 - DNA, 397 bp, Mus musculus
  source 1..397: mol_type = other DNA
caattgtgtggcctgatctgaggcaggcccaaagccatcggccagggtcagatctagggctgtggatctgtggtggtgggctctccccaaaccttgagaccttggccaggacacctggcctgagactcccgcagacatctggctgtgtggctgacattgtctaaagatagcttttaacttggccaggaaaactgcctaggacaaaacatattctgaggagttgtcctggagctgtgagaagactgacctctgagccccctccccagaaatcctgctgaggggctcctgtgggctcctgtgggctcagctgcacatggcagtctgcagcaggtcatggaacagaaggtgtgcagtgcacccttggggtgcgacacccacagagcagctgttgcactgt

SEQ ID NO: 33596 - DNA, 564 bp, Mus musculus
  source 1..564: mol_type = other DNA
aatttgtttgtttatttatttattatatgtaactacaccattcatttatttatttatttatttatttatttattatatgtaactacacgacaccctggactggcatcagatctcattacagatggttgtgagccaagcaatcagtgctttaaataattcaatcacgttaacagttttgacaatgacaatggagcccaggcaatgccagatcttacgcagtgctgtcaatctcagtaaaattgcggggttttacgcatgcgcacctcctcagagccccagcgtagtttcacccttgctgaaccttctgagtgcaggcagcggttggccggtgcttccatcactcacccgaagggccaatggacccctgagtagcaggcggcgccgggcgtggcttgaaggcccacgcgcggcggacgagaggctccggagcgtgctctgccgctaagccccggagacgcagtcaagggtctcagcgacacctgcggaacacaccgcgggtcacgtgggggcggtgcgtaacgggcgcgtgatccggcgtcctgcgggtcttcccctccccagggg

SEQ ID NO: 33597 - DNA, 210 bp, Mus musculus
  source 1..210: mol_type = other DNA
cagcaacaaaggtctccaggacttggccaaattctgagtctcgcagaatgcagaaaagagggccccctttgcttcttcccttcagtgagggtttgagttgaaaaccttgaacaaaagagacctagagatagagtctccagtccgcatccgattacagatctaatgtaccgtagacattggatcccattctctgggggaggggcaccccaa

SEQ ID NO: 33598 - DNA, 187 bp, Mus musculus
  source 1..187: mol_type = other DNA
ttaaaactctgacacttcagtcctcagacttggggcttagggatgcctgggcactccccatttgaggaaagtagtggcctccagatctgtgggaccaggcctgctgtcactttgagctcagacagagagaacagtggatctaaatttgtgattaattggggaaggagggactgagcaccccaccctc

SEQ ID NO: 33599 - DNA, 284 bp, Mus musculus
  source 1..284: mol_type = other DNA
cattggatcccattctctgggggaggggcaccccaacccccgccagagcagcggccaaggctgaggagagagctgggactcgagaccctgctccaccctgctggctctccgtccgtggcgctgacccgcgtggggcacgaggtggggaaagcgcctcagagtccagcgcgcgcgtccgccctggacgtccagggctcggagcaccgggagagtcgctggggagtctctagatcaccctccaccccgccgccagccacaggcttccctctgggcctcggggttcc

SEQ ID NO: 33600 - DNA, 522 bp, Mus musculus
  source 1..522: mol_type = other DNA
acagggcccacatggaccagctgggagctgtgtcaccagaggctgatctctggtctttcatgtgcctggctggacccttggcacaggaaaccagacagctaggctcaggtccctgctgagcagagggttagcaagctatcctactgtccctgcacctgtggactgcaggtttcagaaccaaggtccctaccggctagagtccttcagggaccatggctgttggagctgtaatctcagctcaactttaagagcataaaagcattaatccgattccttcctattaaccgagggaaaccaggtaggacctttaaaggatactagcttcttggggtttaaaggggcgagtacctttccccctctctccaccctctggcagctggggcacagttggggaagctcacacatcaccggtgcctcagcggggccatggagggcggggctaatccctgccaacctcgagctgaggggtggggctccccaaggagcagcacggcctccggggggcggggcctcacctttgcg

SEQ ID NO: 33601 - DNA, 243 bp, Mus musculus
  source 1..243: mol_type = other DNA
aacttaccttttaagggcagcctgctagtttcataggacctagtaaaaaaaaaacctcaaagaattgcatggaagttttacaagagcgaattccaggatagccagggctacacagagaaaccctgtctcgagttaaaaaaaaaaatatatttgaatgcttagtgctttttatatttacgtttgagacaaagccttgctatatatacactgtttttattagcataacaacagcaaaagaatttc

SEQ ID NO: 33602 - DNA, 314 bp, Mus musculus
  source 1..314: mol_type = other DNA
agaaacaagcctccattcctgtttggttctgttaccatacctaaggtttatgtgagcaatgcacagaatgcatgtgtaaatgaatatatatccaactcatattatatctaagtacactgtagctgtctttagctgcaccagaagaggacgtcaggtctcataggatgagccacagtgtaacatacaaattactctgttaaattgtgtggaaattttaatgcacagctagtctaggatgcctaggccaacctgttgattaatagaagcggcccctttaagaactttgttggcccgccctcaaaagggatcagcag

SEQ ID NO: 33603 - DNA, 246 bp, Mus musculus
  source 1..246: mol_type = other DNA
aatgtcatttccgaacgccggtaaaggcagcttatactgatgctaaagtgcaacactggccagctggggagagaggggcggaagacatcccttccctgaactcactgggacggtggcccatcatggcggcacgacgcagagccgactctccagagctgggcattttattgattgacaaaaatgggagacgcaagcgcttgcgcactggcgtggccgctcccggccgcgtgcggccagaatgtctgc

SEQ ID NO: 33604 - DNA, 316 bp, Mus musculus
  source 1..316: mol_type = other DNA
taattaaaaaaacaaaaactctagtttcttttgtcactaactttttctaagagtacatctaaagaacaagaattttccttccttttctttaaaaaagaaaaccagctcccagcatgctccggggaggcggggagccgagtcgttgcctccccgccccgaggctgaaatccctctagtgggtactcatgcgctgtagcgagccagctaactgcccgtgctttggcgcttgcgcagacattctggccgcacgcggccgggagcggccacgccagtgcgcaagcgcttgcgtctcccatttttgtcaatcaataaaatg

SEQ ID NO: 33605 - DNA, 311 bp, Mus musculus
  source 1..311: mol_type = other DNA
taaaggcgtgcgccatcacgcctgaaggatgctccttaacccggggcccagagggagcgagcgctgaacggctgcagctccgtctctgtagaggagagactggacctcctacatctagcatgtcatttcacttagtactgaggactcttggtgactggaggagcgggcccgagaatcagccttcgggtcccagaacaacttctgtcccacggactaagggtggagaaaggctgagccgctcagcctgccttcctaaatcatggcggtagccctgggagccccaggactcatgttcctgggggtgctgccca

SEQ ID NO: 33606 - DNA, 255 bp, Mus musculus
  source 1..255: mol_type = other DNA
ctgactacctgagtctgatcagagaaccacacttttaaaagaaagtgtatgttgtatgcatgcacccacaaaatataaataaataactctctcgggaagaattcctaggttttggcagctccacaacccccctcctggaaacttaatttttttaaattcattttattttggccgcaagcgcctttagccgctgggaactcgctgcaggttgcctcggctgccgacgagctaggcggatgagcctgcggcagctag

SEQ ID NO: 33607 - DNA, 386 bp, Mus musculus
  source 1..386: mol_type = other DNA
attttgtgggtgcatgcatacaacatacactttcttttaaaagtgtggttctctgatcagactcaggtagtcaggagccatcttgtcagccctttataatggcaatgtataaagaggctctcactactgaaattctactactgactgaacagctagaaaccttactttgttctttgtgtgtgtgtgtgtgtgagagagagagagagagagagagagagagtctctacataactctggctgctggaccagcctggcttcagactcagaaatctgcctggctgggattaaaggcttgtagagctggaagctcttacagatactttcaaaaaggatgacgtcctcctgtagagtccttccagtaggcagattctgtagggcagggcccc

SEQ ID NO: 33608 - DNA, 385 bp, Mus musculus
  source 1..385: mol_type = other DNA
gcagctgcagtcccagcttgggcccctagcctgatcggtccagacacaccctgaagggctggctgtgctgctaatggggctgggccaccccgtgctgccccatgacaggcagacaaggctaagattgttctcctgatctgagtggcaggaaccagattctgccagtcagcctgtgcagcagagctctccagaccctactgctgagggcagagggacctctccccggttcagctcagcctttcccggggcagctggctcttcacttgggatgaagggtttgttaagctgggcaagatcctcagaacccatctcagccaggtcagtggccccgcccacttcattcgctccgcccctccgccggtgccaaggaatgtgctgggagagg

SEQ ID NO: 33609 - DNA, 292 bp, Mus musculus
  source 1..292: mol_type = other DNA
ccttagcaatctctgccaccgcagccacggctgcggccatatcccttacaaactgctgcggctgtgaataatttatccgcagctgacagctgtccccctcttgaaagaaagccttggacagggatcaaaccaatgttgtttgtctcccgaggactgcagccaaggctgcgcaggtgcaacatgatgcaagatcagaccatatgacaagtgatgattctggccaatggactgctgttccgtggtgcatgcatggaagaacatagtgtcgtcgtttctttctgctggtcagaat

SEQ ID NO: 33610 - DNA, 314 bp, Mus musculus
  source 1..314: mol_type = other DNA
ataatgttagttatgagaataatgttaattgtagtagtgatatttgttattatagtatgtgctagaatgtatccttagcaatctctgccaccgcagccacggctgcggccatatcccttacaaactgctgcggctgtgaataatttatccgcagctgacagctgtccccctcttgaaagaaagccttggacagggatcaaaccaatgttgtttgtctcccgaggactgcagccaaggctgcgcaggtgcaacatgatgcaagatcagaccatatgacaagtgatgattctggccaatggactgctgttccgtgg

SEQ ID NO: 33611 - DNA, 267 bp, Mus musculus
  source 1..267: mol_type = other DNA
ccacctagagcaagtgactgtaacacatttgaattcattcatgaaaggccttcactttaatattattagcaagcattcagcctgccatggcccagggatggtacagagctgccctgaactgggcaaatgagtcccgctctcaggggcagacactgaaaatcacaggctatgagagagatcttaccatgtctaggctatgcatagcagagcctggcagtctccgattgtggcctctcgtccactcccagagccttgcccaggcagctg

SEQ ID NO: 33612 - DNA, 177 bp, Mus musculus
  source 1..177: mol_type = other DNA
catcatcagcctgctgtcttatagaagcccccagggatggtagctcccacccgctctcaggggcagacactgaaatcacaggctatgagccatgtcagagcctggcatgtggcggcagccccaaggcaggtgcaccatgatgcaagatcggaccatatgacactggccaatggactg

SEQ ID NO: 33613 - DNA, 288 bp, Mus musculus
  source 1..288: mol_type = other DNA
gagacagggtctcatatatcccaggctgggtttgaatagggtgaagcccacagatcattttccccttgtgtttgaaaggaccttggatataaaggtcccaaggtcagggtctgggattgccatttttccaaaacgactcgaggagattagctgcgaatattcactgttcactgtatgagatctttgaaatgtaattaaaagtttttattgagcccctaaactccgccccatccggctccgtgacgggcattccgcggcctccaatcggaggtcctgttgggaggagct

SEQ ID NO: 33614 - DNA, 255 bp, Mus musculus
  source 1..255: mol_type = other DNA
gagcaagtgactgtaacacatttgaattcattcatgaaaggccttcactttaatattattagcatcatcagcctgctgtcttatagaagcccccagggatggtagctcccaatggaggtaagagctgccctgaactgggcaaatgaggacattcccgctctcaggggcagacactgaaaatcacaggctatgagaggtgctccagctgaggctgaggctggcagtctcctatcactcccagagccttgcggatgc

SEQ ID NO: 33615 - DNA, 399 bp, Mus musculus
  source 1..399: mol_type = other DNA
acccacataaaatgtggtggctcacccctggaattccagtactcaggagactcaggccgactgagagttcaaggctggcctgggctatacaccaaggccaggttcccagcatccctgtcaggcatgccaggggatggtatacctctggcctaataagtgaaatagttaaaaatattttttaaaaatctccataggaggaggcaaaaaaaaaaaataggcgcatgcgtttgttgctggcacaaaaacactttacagaaatttgtggctctgagatgaagtaatttgtgtaacctcactacaattgccagggccttgatcctcttgcttcgtgctggcatcgatgcaggggcatgctggttccgccccgccccgccccgccccgccccgccccgcgctggg

SEQ ID NO: 33616 - DNA, 306 bp, Mus musculus
  source 1..306: mol_type = other DNA
atctgtccaacaaacccacactggctctggcaggatgggtgcctggagggccgcgcgcccgttccagccaggctgagcctgcttgccttgcctggactgccaaggactcctgcccaggagcccctgtgtcacagcacaggccagcctggggaaatctaccttttgcatacaggaactagttccctagaagacctttgcccagggccagagatgatcagagctctggagcacggggcgcgtgggccacagcagcaccctatgcagagggctctgagggcccttccagagaggaacttctgccccctg

SEQ ID NO: 33617 - DNA, 380 bp, Mus musculus
  source 1..380: mol_type = other DNA
caacaaaatcttttttgcctggaactcactctgtagaccaggctggcctcgaactccaaacaccttttaaaaatatatatatgtgtaaaaccagacccacagctggtgtcaccgctgtttatccaaattgagttactatatctgaaaattagctaccttgggctccaaaagaaaaagcaaactaaagattagatttcccctcctctctacttaaaattcgaattctaaaatttaggtttgaatataaagattccactagatctttaagcaaaaggtgacttcactgtatttcttggtagcaagacttttcccaaaagagagggagcagagtcctctgcctctgccattggtggaattaccgctgccgggaatgacagcat

SEQ ID NO: 33618 - DNA, 367 bp, Mus musculus
  source 1..367: mol_type = other DNA
ccatcctggatcctggaggtagaccagcttgggtcactgtgctctttaacctgaagtcagctgacccgggagagtgggcagcagcccaaccggagcccttggttactcattaaccctgcgttaggaaccagccaccatgccagctgggtgcttcagctccaagcacgcgttcaaatggggaatttctccaatttcccactggaaaaaccaaaaaactaatacaaatgtaggatttttatttattttttatttttttatgacctggagcacactctgtagatcaggctggcctcgaactcagagatctgcctgcctctccggaggtgtgtctcctgcaaggccttcaagcctcacccatctgtccaac

SEQ ID NO: 33619 - DNA, 273 bp, Mus musculus
  source 1..273: mol_type = other DNA
gaaaaaccaaaaaactaatacaaatgtaggatttttatttattttttatttttttatgacctggagcacactctgtagatcaggctggcctcgaactcagagatctgcctgcctctccggaggtgtgtctcctgcaaggccttcaagcctcacccatctgtccaacaaacccacactggctctggcaggatgggtgcctggagggccgcgcgcccgttccagccaggctgagcctgcttgccttgcctggactgccaaggactcctgcccagg

SEQ ID NO: 33620 - DNA, 367 bp, Mus musculus
  source 1..367: mol_type = other DNA
tttcttaggaccatggtgcccagtgggcgcacctctagaaagccaacctttagagttggtctttctcagttcctccctgtcttaaagaaaggccctgctgggacagaaggagttctgatgtcaggagcaggcagcttttaaatgtttcccaaacaagaaagaatccaggtcattgtgacaccactttcttacttagtaaggtggtttagcccctcccccaggggtcaggctatctaagcatcttggtggagacccctgcatacatatatttatgtttgtatacatacttattggtccaggggttggagtatcccccaccccttgccacatctggggtcctgcctccacaaatgagaatccaggactc

SEQ ID NO: 33621 - DNA, 299 bp, Mus musculus
  source 1..299: mol_type = other DNA
tgtttcccaaacaagaaagaatccaggtcattgtgacaccactttcttacttagtaaggtggtttagcccctcccccaggggtcaggctatctaagcatcttggtggagacccctgcatacatatatttatgtttgtatacatacttattggtccaggggttggagtatcccccaccccttgccacatctggggtcctgcctccacaaatgagaatccaggactcgagcgcctggcattccagggggaagtgcggaacagaggggcgggccattgtctggcgctgactctgccctgagg

SEQ ID NO: 33622 - DNA, 413 bp, Mus musculus
  source 1..413: mol_type = other DNA
agccacaaaaatggtgtcctggccatgtgctgaatgcacgcacagcacagctctggtatctgttttaaattatccattaaaataagtacagtcctggaaaaaaataaggggctgaaacgagggatttcagcagcccctttttcggcttatttcttagatctaaaacccaatgtttggttttaaagccaaaaatataagggaagtgcataggtttgggttttgtgatctttgcccccaaatttgagggcataaagtaatccctaggtgactcactattactgggtgagtcactgatgggcagcagcttcagccctccccccaaagtgagggttggcatgctggctcctcctcaccatacgctcctttaagagcagtggatccaccccctgtagaggagggcctattagagcctc

SEQ ID NO: 33623 - DNA, 302 bp, Mus musculus
  source 1..302: mol_type = other DNA
gcaagagcagcggtgcccttagctgctgagctcactcaagaggtcaccctttctaatttaaggagtgctcctgcagcatttgttttaatttaaaaaaaaaaaaatcgtgtgtgagcacagcagactcctctgcagtggataggtgtgtcccacatacaaccagaaggcctcaaggtcttcaagggacccatctgggcaggtggcgtcccagctccacctgctgcccctccctggcctggggctggtgctggtacagctcccaaaactctgcattgtggggagacctgtgccccaggtgccca

SEQ ID NO: 33624 - DNA, 506 bp, Mus musculus
  source 1..506: mol_type = other DNA
gctacctccgagaagagagggaaccacatcctctaccgggggtagagacctgctcctcccactgtagcggccgcggctctcccagaggcccgagcccgtggactccgcgatcgcgcgcgggaggagggagggcactgcagccacgaggccgctccgccccggccctccgggacccgcgggcagaggagaaacgcctttccacaccccgtgaccagtgggcagagcccgaggggcgcaatccccttcttgcccgggttgaggaattcctccccgcgcccgagggcgggaaactacaactcccggcatgccccgggcgcccccggcgcgcccccctctttaaaacaaaagggccactgagcgacgctccgggactggggctcggtgcgggatctgggtccgaggcggaggggtgggggctagggcccgcagccccccaccccaccccgtcaccccgcgagaggagtcttttcccccacccccacccgggggctggggcgaggggagtc

SEQ ID NO: 33625 - DNA, 460 bp, Mus musculus
  source 1..460: mol_type = other DNA
acggtgacccgaatctggggcctcgtctcagccccactcggctccgccatgccgccgcccggccgcccgccagcccgtccggctcctcctcccggcccgcccggcccggcccgactccggggcactccggacagccgcagccacagcgccccgggcggcctgggggagcactgcagctggggcggcccaggcccgagcagggtgcgcagctggcccgggccggacagcgcggagggcgggagattcagggccgcctgcggctcccgattcgagcagtcgtggcctccggggaaccgccccgagggagccattaccagcgtggaagatgttaaaagtatttccaccacgctgaactatggttcccagaattccttgagcgatcacagaggccctcgcgcggggcgggaattgggggcccggtgactacaactcccaggcgcctcgtagctgggctcctggg

SEQ ID NO: 33626 - DNA, 409 bp, Mus musculus
  source 1..409: mol_type = other DNA
caaagccttgggacgcagcatgcctgcgtgcttccggtggcccaggagcccagctacgaggcgcctgggagttgtagtcaccgggcccccaattcccgccccgcgcgagggcctctgtgatcgctcaaggaattctgggaaccatagttcagcgtggtggaaatacttttaacatcttccacgctggtaatggctccctcggggcggttccccggaggccacgactgctcgaatcgggagccgcaggcggccctgaatctcccgccctccgcgctgtccggcccgggccagctgcgcaccctgctcgggcctgggccgccccagctgcagtgctcccccaggccgcccggggcgctgtggctgcggctgtccggagtgccccggagtcgggccgggccgggcgggccgg

SEQ ID NO: 33627 - DNA, 406 bp, Mus musculus
  source 1..406: mol_type = other DNA
tgaataaactattctatactatactgtcctggatgcctcagcatgagcccgcggtggcatctttttataaacacaacaggcatggtgacacatgcctttaatcctagtttcacttagacaatagaagccaagggatctcttgtgagttctaggccagagccaggcgcagtgtgctacagaagggatgtggaagaactctcctgcacatgtgctataagcatgtttacatgttcatgtgtttatgcacatgtgtgtgtgcacatgtagagccctattaaatgctctataaagtgctaattacataaggcagtgactagcttggaaatctaagaattcaaggaaaggctatatcagctacttcagccttggactctaggtaactcaactcctttggggtcgtcagatc

SEQ ID NO: 33628 - DNA, 287 bp, Mus musculus
  source 1..287: mol_type = other DNA
gagcctcggccctctctaccagaacaggaaggaaccatgattggtcccagctgcgtcacatgcacctgcagcctgggaacctgatccaggtggagggggctgggaaggcggccttaggtgcaactcacctcagtcctatgtcacagacctcagcaaatggtgagtttgggggatcctgaaagcccacaacaggcctggaggagtgataagcatgcaaaatgggcagccctcacactcagtgtctgtgtgggcaaaacacgggccctttaagaaccgggctctgattt

SEQ ID NO: 33629 - DNA, 320 bp, Mus musculus
  source 1..320: mol_type = other DNA
cttttgggactagattaggtagtaccctaaatttttacaaaactttgccccagggtgctcaggtttttactggagaatttccccagtggcgcagagaaaactggtcccaggaaaggccttctcaccttcactgccaaagtaattggcagtccaaaagcggtctgtgtactcaagcctgtttgatgagtgagcccttatgccccttagggtggatcctcgaacctgtcccaaggacccccggcgtcccgtccggtgcgcgggtaccccgccctgcctccgctccgcctctccccttcctgagctcgggtgggggaggagac

SEQ ID NO: 33630 - DNA, 481 bp, Mus musculus
  source 1..481: mol_type = other DNA
ctcaccttcactgccaaagtaattggcagtccaaaagcggtctgtgtactcaagcctgtttgatgagtgagcccttatgccccttagggtggatcctcgaacctgtcccaaggacccccggcgtcccgtccggtgcgcgggtaccccgccctgcctccgctccgcctctccccttcctgagctcgggtgggggaggagacgggcgaggggactcagacttcctgtccccgaggccgacgcgtgcggccggacccctcccccgccgttgctggacacccggggccgccgcgtcctcccgcggctcacgctggattgccctcactcgcgcgcggcggagcaaggagcaggcaaccaaggtgggctggctctgcgaccgggcgccctgccgacctctgggcctccgccccgcgtcccgcgtccccccgcccgctctggggcgcccgagtccgcgcgcagcggccggacggggtgggtggggctg

SEQ ID NO: 33631 - DNA, 485 bp, Mus musculus
  source 1..485: mol_type = other DNA
atttctataagctagcattctgggtttgtttgctttctttggaagaatacttgcataaacgttaaggatctcccaaaactccttagaattcaaagcttttcagtatattgaagaggatttcataacttttgatttttaatctccattatgacagttcttagatcagagagcaactttccttgtgtgctccagggatctaacttacatcgtaaaatttttctccaactttacttgttttataacaagttgtccaagtgcttacgagtttgccaaaaccaatgtttttgctcatggcccccccccccatgcagcgggctgactggagcgaagttgtgcaaatgactttggaaagaatcatttccttttttcataagccagggttctcctcgagaatctcttgtgcaactcgcttcgacaggcaggcactcctgtcactgagacgcggacccgccttacctcacggccggaaaaggccgtgcgtcagc

SEQ ID NO: 33632 - DNA, 160 bp, Mus musculus
  source 1..160: mol_type = other DNA
tttgagatagggcctcatatcactatatagtgtgcatgagtgtgtgcgcatgcacatacacgacatgggctaccacagctgacattgtcctcacacactctgctagtgagggtgggctttgactgagtgagcagcacacccgttgtcatggagaggagct

SEQ ID NO: 33633 - DNA, 282 bp, Mus musculus
  source 1..282: mol_type = other DNA
aaaatgaagcgactcattattattatcattattattattattattattttgcatattttctggtgttttatactccagagtactgggtttaaaagctaatagccatcaatactgaaacagtatagaattttagaaggttcagcttctagctatataaactcaggcaactagaattacagcttcagaagacgtgggcggggtcttctctcgaagagcttccggaatctttcgggcagaggcggagtcttctgccgagggccgttcgggaagaggcggagccta

SEQ ID NO: 33634 - DNA, 406 bp, Mus musculus
  source 1..406: mol_type = other DNA
ataatctctcctgagctctgcttttaagacagggtttcatgtaacccaatgtcgacaagcttgtatttgtcttaataattttaaaatttaaaattctaactagagggcatctgaggacagctacagtgtacttatatataataaataaataaatctttaaaaaaaaaattctaactagaataactggataccgcgatcatctggttttggtttcaagagcttttgatgtaacagcgtttttggaaaatgaagcgctgctttgtagcaagtaccatacctaccctaattccacttctggagtgtctgaagacagctacagtgtacttacatataataaattaataaatctttaaaagtatctgttcgattaatataacatccattttctgtgggggcggggctcagg

SEQ ID NO: 33635 - DNA, 290 bp, Mus musculus
  source 1..290: mol_type = other DNA
agaaaacttactcagagtttgatctataaagctgggaggcccctcgccctaagagcccttactgtgagaggatcgctccaagcgcttcaaactcagggtttctctgtggagctctgcatcccgagtgccgggatccttgaaggcacccagcctcggagcagacgcccctcatcctgggcaccctccgcccgggagccccacgtctaacgccgcggaaactcagctcctgcaccagcggaagtaacgcaacggcaccggctgacgtgcgcgcccccgatgcgcgggacctc

SEQ ID NO: 33636 - DNA, 289 bp, Mus musculus
  source 1..289: mol_type = other DNA
accaaaagcgctcttttggtcactgaagcgactcattattattatcattattattattattattttgcatattttctggtgttttatactccagagtactgggtttaaaagctaatagccatcaatactgaaacagtatagaattttagaaggttcagcttctagctatataaactcaggcaactagaattacagcttcagaagacgtgggcggggtcttctctcgaagagcttccggaatctttcgggcagaggcggagtcttctgccaagggcctttcagaagaggc

SEQ ID NO: 33637 - DNA, 432 bp, Mus musculus
  source 1..432: mol_type = other DNA
aaaatgaatttttgtggaataacttattgtcctgtagagttagaatctacaaactggatattcattggtacacaggatttattgtggtgaccaaattacgcagttaagagcacccctgacagctcctgagttcagtacccagcgtcatgggatctgatgccctcttctggggtgtctgaacacagtgacagtgagctaatatatttgcaaaataaagactattatgcagatatgaataactactatacctcgagttcaaatctggctttgacctcagctatatgaagctgaattttaattagttgtcaacttacgcaaacttaaagctcgtcctgtagactagcctggcctcgaaatcaggcctacgtctaacatgatggcgccgatcatctggcgcatgctccttgacgcggaggtcccgcgcatcggggg

SEQ ID NO: 33638 - DNA, 329 bp, Mus musculus
  source 1..329: mol_type = other DNA
cttcggagccaaggatgaataatctctctccgcatcctaggagggcttacaggttccagccatcacatgcggcttggaaacgctctattcataaaagactgttcccacagccgggtatggtggcacacgtgtctgagtttgaggccagcctggtctacaaagtgagttccaggacagccacactccggaagtggaggcttgagaagccagcctgcttgggccagcccactggtttacccctcgcgtgaattattagctacaggagaccttggccagacccgccacagtctggcggcagcttcctacattccaacaacgggaaagcacgt

SEQ ID NO: 33639 - DNA, 558 bp, Mus musculus
  source 1..558: mol_type = other DNA
gctggtcagggacaccccgtcaccccgcctagagggacttcccggtactcaccccgctctcccggaggtccaggtccgggggggtgaccgcactactcaccgtgcgaggccgagagcgccgaagagagggtggcagcctggcgcctcggcttccctggctccacactgtaacccttcccgcttgtcaggaggcggccagcgggtaagcggaggcgggtccggcaaccgagaccgggatcgtctcccccctcaaaatggcggcgggagcggcagcggcggcggcagcggcggcggcggcggcggctctggggagggagggagcgagcgagccagcgaagggcgccgcgtgccccccctcccgcctcccactccggccgcgcagcgcgcacgcccgcccgcacgcttccgagtgggtccggactggtcgcgagctgcgccctccaaccaccgcctccggccgccccgcgccgccagcaccgacgcgctcgctctggggcctccggctcgcgcgctcccgacgctaccaacggcagccacggctgccgccgccttcgcccc

SEQ ID NO: 33640 - DNA, 659 bp, Mus musculus
  source 1..659: mol_type = other DNA
gggtggcagcctggcgcctcggcttccctggctccacactgtaacccttcccgcttgtcaggaggcggccagcgggtaagcggaggcgggtccggcaaccgagaccgggatcgtctcccccctcaaaatggcggcgggagcggcagcggcggcggcagcggcggcggcggcggcggctctggggagggagggagcgagcgagccagcgaagggcgccgcgtgccccccctcccgcctcccactccggccgcgcagcgcgcacgcccgcccgcacgcttccgagtgggtccggactggtcgcgagctgcgccctccaaccaccgcctccggccgccccgcgccgccagcaccgacgcgctcgctctggggcctccggctcgcgcgctcccgacgctaccaacggcagccacggctgccgccgccttcgccccatcccccccgcgggacgttccattgcgcgcccctgctggggccggggagaagcgggcacgcccgcgcagacgaggctggccacggtcctaggcgcggacctcctgggacgggccaccgcgacgccgaggcttgctgcccgcttccggccgcggggcgggtggcgcggtgcccctccgctgggctgtggttgcagccgcggcgactgcgcgttgggtagcttcctgcca

SEQ ID NO: 33641 - DNA, 512 bp, Mus musculus
  source 1..512: mol_type = other DNA
attacagttacgaagtagcaacaaaactaattttatggtgtactaaagcattaggaaggcctctaacatcaggctgccagttgcaaaccgagttcgcacaatctttgagaaccctctgggactttaacaaggttaaactacattaacatattaactcccaggtccgcagccccgggtctgaaggatgcccttgccagcggctggatcccaggcacccgtcctgcagtctcgggtcgtgtggcaggaagctacccaacgcgcagtcgccgcggctgcaaccacagcccagcggaggggcaccgcgccacccgccccgcggccggaagcgggcagcaagcctcggcgtcgcggtggcccgtcccaggaggtccgcgcctaggaccgtggccagcctcgtctgcgcgggcgtgcccgcttctccccggccccagcaggggcgcgcaatggaacgtcccgcgggggggatggggcgaaggcggcggcagccgtggctgccgttggtagcgtcggga

SEQ ID NO: 33642 - DNA, 542 bp, Mus musculus
  source 1..542: mol_type = other DNA
tcccaggtccgcagccccgggtctgaaggatgcccttgccagcggctggatcccaggcacccgtcctgcagtctcgggtcgtgtggcaggaagctacccaacgcgcagtcgccgcggctgcaaccacagcccagcggaggggcaccgcgccacccgccccgcggccggaagcgggcagcaagcctcggcgtcgcggtggcccgtcccaggaggtccgcgcctaggaccgtggccagcctcgtctgcgcgggcgtgcccgcttctccccggccccagcaggggcgcgcaatggaacgtcccgcgggggggatggggcgaaggcggcggcagccgtggctgccgttggtagcgtcgggagcgcgcgagccggaggccccagagcgagcgcgtcggtgctggcggcgcggggcggccggaggcggtggttggagggcgcagctcgcgaccagtccggacccactcggaagcgtgcgggcgggcgtgcgcgctgcgcggccggagtgggaggcgggagggggggcacgcggcgcccttcgctggct

SEQ ID NO: 33643 - DNA, 477 bp, Mus musculus
  source 1..477: mol_type = other DNA
gttctcggccgacgggcgccccctgttggagggtgggggcgcgggcgcacccgggtccctgctctttaaattcccggctccggctgctgggggcagcgagtcccccggaggagcagctcctgcctgtgcgcctatccccagtgggagcttattctcggggggccttgccttgcctggccagccccgaactggcactgctgcgcaccccgccgcggcgcccctaccccgccggcgtaagacggacccgggccagccccgcgggccgcgcctcggctcgctgtccttgctaggtgcaggctcctagcgggctcattagtcccggggagcctggccttgctgggggtgaggagcgtgactgctcccctcgctgcacagcgggctccacctggtctgcccagctttggaattcctccgctagaatggacctattgtcccctcccaggagaccgccgcaagtagggtgaagctagagcctgc

SEQ ID NO: 33644 - DNA, 235 bp, Mus musculus
  source 1..235: mol_type = other DNA
cctcttcacgctgcaatgcttggtatcttggatccccaggtctgctttcttcaagtatgaggaagacagttacacaagagtctcatagagcagtgctctgctggaatccaggttggcaaaagcattccttgagacccaaagcgtctgcttcctgagctatgccacgcccatgcgtgaaggggtgcggctgcgcagccacagtgggttttgccggtgcccctcccctccgctctgt

SEQ ID NO: 33645 - DNA, 266 bp, Mus musculus
  source 1..266: mol_type = other DNA
caatgtgtaaagtttatcttgtctagattctttgggacaatgaaacttatttctaatacttcaaggacaagcgaaagttctaacatctgctttgagtttttacaaaacggttattcttagatagccaatttcccaggctttcggtatgggtgtaccgacaccgccgaccgcctagtgggctgatggtccgcgcgccaccctttcatgcctcctgagcctggagactggacaactcccagagtgctgagcacgctcagcttttaggt

SEQ ID NO: 33646 - DNA, 361 bp, Mus musculus
  source 1..361: mol_type = other DNA
ttactaatatggttcgtcaacatcaatctaaacaagtttatcaattagtgcctagaactgtttatagtttcatctttggattcacagaacaaactgagataccctctaacgtctatcaaagggttcccctctgccaggtggtggtggccagatttctgcgttcgaggccagcctggtctacacagagaaaccctgtctgaagagaagagaaaaaaaagttcctccctcttttccacgaatatacctaagattcttgtcaataaaatacaaagagaaaaggattgtctggcgatgaactagtctctattaaccgacagccctccagaagggactctgcagataagaccagcaagtctgtggt

SEQ ID NO: 33647 - DNA, 296 bp, Mus musculus
  source 1..296: mol_type = other DNA
gaagagaagagaaaaaaaagttcctccctcttttccacgaatatacctaagattcttgtcaataaaatacaaagagaaaaggattgtctggcgatgaactagtctctattaaccgacagccctccagaagggactctgcagataagaccagcaagtctgtggttcttgcagccccagtcccacactttggaagctctggccctggatctttaagtcccaaaaagacttagcgcctttgatccagcatggacgccacggggcactcccgtggttcctggactctggcccccagtgta

SEQ ID NO: 33648 - DNA, 502 bp, Mus musculus
  source 1..502: mol_type = other DNA
gtccagcagactttgaaaattattaaaaacttctgagaccaacacatttgtaatcccagtgcttgaaattcagaggaagatcagaagttcaaaaatgtaaacttcttgaaataatttagttggaggcgggtttctgagttcgaggccagcctggtctacaccgggacagccagggttacacagagaaaccctgttgatcgtatggagatgaaccattgacttagctaagatttctgtgctgttttgcatcctcagcatgcactcagtgaatggttttgctaaaggttgtcttaatgaattaggaaacacatactacagaaatctctggggacatggtcagaacagattcccattctgtccctgaccctcaggaggtccccaggctgcatatgccctagtgagtttcccgccctctcgggaaagtgtgggcagcagttgtgccagcggcccgccccgccccgccccgcccagtctcacgcagccctcgccagggggcgcagct

SEQ ID NO: 33649 - DNA, 332 bp, Mus musculus
  source 1..332: mol_type = other DNA
tcctgagctggtttgattttgaaacagtctcacactggattatgagcaatcttcttttgtactatttagtaaactgaagcctcagctccagagtcaggattcggtaaatttatacttaatacagattagttaaaacacaattgtgcagaacaaagagtcaagttttgtttgaagaaccagacttcacaaaacctcactggagtcgtttgccgagcgcctcgagacggcgcacccaccgcttctctaactctggaaggcgcaggggaagcggctcactggcccgaagggcccggtgtcggggggcggagcccatcagaggctgggaagtgacg

SEQ ID NO: 33650 - DNA, 395 bp, Mus musculus
  source 1..395: mol_type = other DNA
caccaagttggccccctgctccttgtgtagcaggggtgacactggtgcttttttatacaaaagaacagaggcagcccaacctcatctgcccctcatgtggaggtggatggggggcaccaggtggtgtctaccccatgttttataagggattttgtacagtctttgtgaaatccccccaatccctggaatttgaggttcgagggataaaggcctctttgtcctgccaacttagagtcacttatatgcagtaaaaattaaagtagatgcagaacttgtgtgtaaataaatggatagtgacagtaaagataccttctgagctgcttaacatgaagctacctcaactgaggcgcaggcgcagtccactgctgctgcgggaatcttcgcgactcttccgg

SEQ ID NO: 33651 - DNA, 402 bp, Mus musculus
  source 1..402: mol_type = other DNA
ggaagggtcccctttcctctcaaggagtcttgcaagtcccctgtgtaacaggactggctgtcctggaaattgaccaggctggccttgcaagggatccgcctgccttttaaggcagcctttttatttttttaaaagatttttaagagcagtgactgctcttccagaggtctggagtgtctgaagacagcttacatataataaataaataaatattttctttaaaatatttatttatttattttttatatatatgacgagtaagctgtcttcagacaccagaagaaggagcagtcagtgctcttgtttttatttttaaattttatttttaaattatgtatatctgtgtgtcggtatgtgcatgtgaatacagtggccctcacacgtgaccggcttagtcatcat

SEQ ID NO: 33652 - DNA, 410 bp, Mus musculus
  source 1..410: mol_type = other DNA
agccggttcactacccctggcaggcaaggcgactgggaggaaaccagaggcactgggaaagagtcccagagctacagcgctaatgctactgttctctgcaagcagtggttggaaaagtcagaatcccctgcctaaatggatgtcagtggaccatcctttgctacagttgtggcacagcaaaaaaaaaaaaaatttttttattacggtgtgtttttcccctcactcttgggaaaatagaaaggctttctaagacatactggataccgcgggatggccctgtccggggtgaacccgaggggagctggggaccgaccaggagttcccgttacgaaggcaactgcccgcgccccactcaggccccagccgggcctcagctcgggcgccgccaccgcccctgttttgtttccatg

SEQ ID NO: 33653 - DNA, 353 bp, Mus musculus
  source 1..353: mol_type = other DNA
tgagtggtgccatcctcctgggatgggaggggcctgcctccagaaggcccagcaagaatttgctgtgcggttcgaactgctgctgccaatgcagctgccggagctgctgaaaatgccttcagggccccttgacccctgctgcacccgctgggatgccctgggcctgtcacctgtgggaaccaagatagtccctatccctgaagtctctgggattcagggagccatcaccacttgtcttcttccgttatttaaattaaagaaaaaaaagtgtaactggaactcacccatttcctgtatctttactggggcgaggctagggatggaggagggcctctccctatctcctcccttcc

SEQ ID NO: 33654 - DNA, 250 bp, Mus musculus
  source 1..250: mol_type = other DNA
caattaactccttaagttaatctgctggtgcgagtacgccgcgcgacgctcgcggtgaccactagagggtccggatagaagggccggtcaacctgccactcaaggtggagggccgcgacctgctcaacttgtgagagacctagggatggacttcccatgtctctgggactaaaaccagagccagggggccccaggtttcctccacatacacacctggggtagtcaagggggactggtataaagcagcagg

SEQ ID NO: 33655 - DNA, 488 bp, Mus musculus
  source 1..488: mol_type = other DNA
tgggggcacttgccaaactgcacatggccccgacaaccccgggccctctcaggtctcagccctgagcggacgccgcgggggggtcccccgagccgagggcctcgcgctgcctgtcgccatggaaacaaaacaggggcggtggcggcgcccgagctgaggcccggctggggcctgagtggggcgcgggcagttgccttcgtaacgggaactcctggtcggtccccagctcccctcgggttcaccccggacagggccatcccgcggtatccagtatgtcttagaaagcctttctattttcccaagagtgaggggaaaaacacaccgtaataaaaaaattttttttttttttgctgtgccacaactgtagcaaaggatggtccactgacatccatttaggcaggggattctgacttttccaaccactgcttgcagagaacagtagcattagcgctgtagctctgggactctttcccagtgcctctggtttc

SEQ ID NO: 33656 - DNA, 281 bp, Mus musculus
  source 1..281: mol_type = other DNA
aatcgatgcaagcttctaataggaggaatggttcctacctccacgtgggaagaactatttcccaccccctacctcgacggacgcagttcgtgcattaagccccgggttcgcagcagcagccaggatcgggcacccgggggcgggcggctgagggtgaggatatgcagaccttcacttccatcatgggcagcgagaagctgcccggacccagcgggtaggcttggggtagctgccaggcgtgcaccgcagttcccaatttgcagcctcccgttgccatggta

SEQ ID NO: 33657 - DNA, 186 bp, Mus musculus
  source 1..186: mol_type = other DNA
tcccgcctgtccggaggaaatgctaggcagcccgggcatcccgccggtgcggtgccaaagccggcgcggttgtctgtacgcaggcgtcggggccaaaatcgatgcaagcttctaataggaggaatggttcctacctccacgtgggaagaactatttcccaccccctacctcgacggacgcagttcg

SEQ ID NO: 33658 - DNA, 229 bp, Mus musculus
  source 1..229: mol_type = other DNA
ggtccgggcagcttctccatgatggaagtgaaggtctgcatatcctcaccctcagccgcccgcccccgggtgcccgatcctggctgctgctgcgaacccggggcttaatgcacgaactgcgtccgtcgaggtagggggtgggaaatagttcttcccacgtggaggtaggaaccattcctcctattagaagcttgcatcgattttggccccgacgcctgcgtacagacaa

SEQ ID NO: 33659 - DNA, 251 bp, Mus musculus
  source 1..251: mol_type = other DNA
ctgcaggcacctaaatgtatccagtataaagaaaacccccttgttttatttaaactgttatttaaaggcaaccaacccctttttattaaaaaaaaattttttttttattttatgcacattggtatatgggcctgtgatttgcagttcaatttgacatgaccagcctggagttcaagtttattccgggtactctgtaaaatcctgtttcaaaatataaaaggcttctgaactcagattttcgaagagcagtg

SEQ ID NO: 33660 - DNA, 345 bp, Mus musculus
  source 1..345: mol_type = other DNA
cctaacgtgtgtcagccctgagttcagtcctcaggagcacaaaaataagtagccaggcatggtggctcctgcctgaagcaatgttgccaaaattccaatgccagcctgggctacagtgtgagactttgtctcactcctgagggttctgcacaactcaagagtagtgctgtctgggtgagtcagggagctggatgccagctgcgctgccccaccagcagagccgcctgggaggctgggagggaaagaaaacctcccataaccgaggtttgtggtccagcacacaaaaaaaccacccggccagcacgcggcgctggtttggctgggtctccggcgcggttccacggg

SEQ ID NO: 33661 - DNA, 311 bp, Mus musculus
  source 1..311: mol_type = other DNA
aaacattagcatatgtatgtcaggcgtttcacaatttacacacgccatatgtacatgtgtcaggtcgatcgcttaaacaggtcattagcgtacgttggcgctattgaaaatattagaacaaacagccgcgtctgtgtggggaggggaaaggtgtggttatatcccccccactggttccccccgtaagtgagcacacacagctatgggaggatctgtgcagaccccggagcgctctccgtcgctgagatgccctggggcagcgcgcgtcgggcggggcgagggcggggctggtgttggcggcgccagcccaa

SEQ ID NO: 33662 - DNA, 413 bp, Mus musculus
  source 1..413: mol_type = other DNA
ctctgtccttagagaaagcatctatggaagcgattaccatagaaggcttaggctttttgacacggtctcgctgcgtagccctgcctggcctgagaccaatgtaggcgaactcacagagatctgcagactgtgcccagcccccagaaggtgacactcgagggccttcaggcagccagctgttagctcttggtaccacctgaagccatttaactccttgcacacatggaaaggggtggaggaagtagaggtgtggacctacaccagatgtatgtccaggtcttggcttccaaatccttctgtgaactccaagcttgggtatgggtcgcccacgcgcggcgcgctctgggctcaagtggggcggagccccgcgtgagcgcgccaggggcggggcttcgggggcgcgcccagaaggg

SEQ ID NO: 33663 - DNA, 338 bp, Mus musculus
  source 1..338: mol_type = other DNA
ttagactaagagcaggtcctgtcttcacagaagacaaactctgtctgtctgtacattatatatagagatatagagtctgtacatgccatacagggggaggggcagcctgaggctccacccctcacccacccctccccatgttctgccccagaggagaggacagggggcacctcccatgcttcgtttgttctctctggggcatatttgcctcttgggggacaaagggggccagggagtcctgagcactgcaagccacaggccacctgggacctgtggaagaaggatgtaggccccacagcaagctccctgccccttcccacctctctctgtcataggaa

SEQ ID NO: 33664 - DNA, 370 bp, Mus musculus
  source 1..370: mol_type = other DNA
gtccaggacaatagcgctcctgccctccctggggggctgtggcctcccacggggcagggtttcattggtaaagcccagcagctcagcactggtcttgacacacacacagagtatgtgcttatcaaatgttagtgaaccagggtacggcccgagaggctctcagaaccagctcctgccccgccggaggtttgggctccctagaaaaggggggcgggacccggaatacggggcccaggccccctcagctcccgggtggtccgctcgcccccacacacacgttcgggcggggggggacccccgggcacgcctcgcccctcccccgccggccccatcgcgcggctgggcagggctcagacaggccttgcaaaaa

SEQ ID NO: 33665 - DNA, 479 bp, Mus musculus
  source 1..479: mol_type = other DNA
tgtccagggaggccagaagatcatccagttccctggaactcaagtgacaggcagttgtggaagagcagtcagggttcttaaccattaagccgctccacaggtgtacagaattgttgtgggtaagagctgcccagtgcccccactacctggtggaggccttcatgcgtcagcgctgtgtggtgtgccaggcaatggagacgccggattccacgtgtgccccacaccagactgcaaggccctgtactgccggtcgtgctgggacgacatgcaacggctctgcccggtgtgcacgccccgcgaagagctctcccacagcgacagcaacgacgacgctgtgtatggctgcccgccttcttgcttaataaagtgtgatgcacgctcccggctggtgcttcgcaggcaccatcccggtagctgccggaaagaggctgcgctgagcggcaggggcggagcctcagacggggcggggcggagcctca

SEQ ID NO: 33666 - DNA, 331 bp, Mus musculus
  source 1..331: mol_type = other DNA
gtgtgtgtgtgtgtgtgtgtgcgcgcgcgcgcgcgcgcacggcacctatgtaggaacttgctagaatgctcaatgaggctttctaccttgaaccaatgaagactggtgctaaccccgtggctgtaatcccagcactggagattgccagtctgaggccagcctggcttataatagaagttttgtgttaagaccctgttttaaacaaaataaagtacaacatagggggtgaggtggggctaggaaacaggagcaccccctcctaccccgtgagagaccctgtctgcattaagtccttagtgcccagggctgtggtctaggagcctccacaccc

SEQ ID NO: 33667 - DNA, 408 bp, Mus musculus
  source 1..408: mol_type = other DNA
ggactagaaagtggctttccaggtccagccaggtgggccttactgataaggggctgcttggcccgctccagcatttcagccgtctggttcagggccagctctgccccacaagccacagcttcacttgcccgggtgaagttctgcagggtgttcgcccttgtaaggaagctaccagtagcagcaaccggctctgctctgcggagacagctcagttacagaccagggcccccgtgctcccaggctcactggagaaggcctggtgacggtggtcaccagtccttcccctaggctctactacggaccacggcccgtgccgtgctggacccctcctccatggcagcgttgactatggctgctgggacccaaggccagtgtgtcaggaaaggcctggagagtcttcaggttcta

SEQ ID NO: 33668 - DNA, 482 bp, Mus musculus
  source 1..482: mol_type = other DNA
acaggcattagactggggcccaaacactggtccccaccgcaatatgcttcctcttaaggaggtggcttaaggacagggtcttcgcctgcctggccccaccccaggcccacagttggcatagggcactgcgagcggcaggactgccagcatcctggtgggtagctgccagccaggccgggagccggtgaggagcagcaggccagcggcactgagccctgtttggaggatattggggtaccttccactccaagaattagaaatcccaggagtttcatctcagaactttcctgagttgccccctgaggcccaggcgggtcccacccaaccagccagggtagcgtagcttgcgcaaggggtggggcgaggagcttcccagcatatgccccctggtggcatgagtgctgccccctggcctggttggcagggctggcgccctgggagggcgggtgccgccttgcccagcccctgagggccccagcctg

SEQ ID NO: 33669 - DNA, 376 bp, Mus musculus
  source 1..376: mol_type = other DNA
cccgctgcccgccgcgccctcctggggcaggcactaggccaaggaggagcggaagaggacagcacctgtctcccagccaccggggctgtcgcacctggtagagagagggccccattagagcaggcctgtctccttgaaccccttcctgaccccaggctggggatggtgtcagcaggcaacagcgtgcctacagcaaccatgtaacaggcacgcgggagctggggtcccgggggccagggacaggagacactggcagagatttctcctttcatcagctgctccggggggagccccctgtccttgttaaccacgagggagggggtcaattcaagaacgccctccacctggcccggaagccaggacagcttgccggtct

SEQ ID NO: 33670 - DNA, 221 bp, Mus musculus
  source 1..221: mol_type = other DNA
agggacacagagtgcccacagactcgactcccccgctccctcggagggggatgggccaagaggctgaagctcaatgtctagaggttctctctcttcctggggctctgacctggttaaagccctcttgaaagagaggaagtccctgagggggctgctggatgaaccctaggcgcgtcccacatgggatagcatatgctccctgctgctccgcggccaagggg

SEQ ID NO: 33671 - DNA, 331 bp, Mus musculus
  source 1..331: mol_type = other DNA
gtcccttggctcgggatacactaaactcgagcctactgcagtttggcctccccccaactctgagcggagggtgagagggggtgagctgcactgaacttacccctaccccccccacccagctccgcgcccccctggcacggtgggctggacccaggccagtggcacggggggagagccgcgtcgtctctccagcggtagtgcggctcagcaggacgacccctctgcccctccgagggtgggtgataagactaccagcggtcttgccgccggcgccggcgcacctgccctgagcagagtgggggtcgctggtgcgcaccgctggccgggttgg

SEQ ID NO: 33672 - DNA, 325 bp, Mus musculus
  source 1..325: mol_type = other DNA
ataaagactttctctggctctctactgagcctgggatgggcccatccccaggatgtgattgtcatttcccaggactggacctacagaaacatctgggagtttctgcggcagctgtttgtcccatactgcatcctatatgacagagatgctgggaaagagagcccacccatcaccaggaggtcaagggaggctgacagatctgaactggcatgctccagatgggtctcagtgtcaacgcagagcactgcctgcatggacgggaagttgagctttcctagcagccaaggctgaaaggctgagtcagctggggacagtgaataaaatc

SEQ ID NO: 33673 - DNA, 295 bp, Mus musculus
  source 1..295: mol_type = other DNA
cagcagggagcatatgctatcccatgtgggacgcgcctagggttcatccagcagccccctcagggacttcctctctttcaagagggctttaaccaggtcagagccccaggaagagagagaacctctagacattgagcttcagcctcttggcccatccccctccgagggagcgggggagtcgagtctgtgggcactctgtgtccctccccacgcgtgacggcgccccgcggggagggaacagtgcccggggcaaggagcctttgcgctctagccagtgcccgttgctgccttggaa

SEQ ID NO: 33674 - DNA, 211 bp, Mus musculus
  source 1..211: mol_type = other DNA
atttaagacctgggttttgcggcactgacccaacggcacattcccaaagtcacatcggtctttcaaaagcacggttttccctcttttggaagccaggcaatggatagactgtgggggtgcgattcccaggaaagtaagaccacaccgcaccgcgggccgatctggttccggctgcgccagcaggctcaaggggcgcagtgagtcggccgca

SEQ ID NO: 33675 - DNA, 262 bp, Mus musculus
  source 1..262: mol_type = other DNA
ttttacattttaaagtcagagaagcttaagtagtttttccctttatattagaaacaaacccacgcctttaatcccagcatttgggaggcagaggcaggcgttcgaggccagcctggtctacaggacagccagggctatacagagaaaaccttctcaaatttaagaggagtgtagtaacacatgatactgttttttaatatttgaatgaaacagaatcagaccttcattttcttctagtactactacatggtgttgccaataa

SEQ ID NO: 33676 - DNA, 158 bp, Mus musculus
  source 1..158: mol_type = other DNA
cttttttataaactaaattagggaaatcgccacaacaaagttgctttagtgatgtgaattcccagaggtaaaactgatcagattgtccgagggcgctcagccccgcgccgcaggcctctgcggccgactcactgcgccccttgagcctgctggcgcag

SEQ ID NO: 33677 - DNA, 205 bp, Mus musculus
  source 1..205: mol_type = other DNA
tctttattaacacagatttgttcaggtggtttactggtagaaacaggctactgtggtccacagctgttgtggtggaggagctaccacctcactcactgtatggtggtgtggggaggtgtctcagcccctctgagcctgtgagtcagcactgttctctctccttagttccccgcctctggggaggagccagtaagctctgggtcca

SEQ ID NO: 33678 - DNA, 483 bp, Mus musculus
  source 1..483: mol_type = other DNA
tctggaactgcactctcttttttaaaaaacatgtatacattttagggctgtatgctgacttttgagcacagaattatgataatcaattacatttatacatcattttttttaaacaactaagacaactgagcagaaatttggctgagcacgggcagctgcagccagcacagaaaccttgcaagctcactctgtgtgtaggctttctggacaaggaatggtcgccaaatttttggtttggatgtcttataccaaagggaaatagtggtgacggaccccatctgggctaggtccagtgggctccaagccagcgccagcccgcaggcaccagtttgcctggctcgcggcgggaaggggcgtgtccggaccgcccccaggcccacccgcagctcgcacggcccctgtcgagtggtgcgttccactctgctaccgggctagctgggcggggaggagtggcgtggcgaggcccagccttcctgggtgcgg

SEQ ID NO: 33679 - DNA, 258 bp, Mus musculus
  source 1..258: mol_type = other DNA
ataaaaatttgaaatttcttaaatgcttgctgggtcacatccagccagcccaggctggacttcaacatcccattaattttttaaaaatttattattgaggtgcaaacatgtgcacacgtggaggttttacccctcactatatatagatttggctgatatcaaactcaagagactcccaaatttactttgctggagaccaaattgcccagtagaccttctctcccctgcctgccccccccccccgcggggaagtcgact

SEQ ID NO: 33680 - DNA, 610 bp, Mus musculus
  source 1..610: mol_type = other DNA
aagacaactgagcagaaatttggctgagcacgggcagctgcagccagcacagaaaccttgcaagctcactctgtgtgtaggctttctggacaaggaatggtcgccaaatttttggtttggatgtcttataccaaagggaaatagtggtgacggaccccatctgggctaggtccagtgggctccaagccagcgccagcccgcaggcaccagtttgcctggctcgcggcgggaaggggcgtgtccggaccgcccccaggcccacccgcagctcgcacggcccctgtcgagtggtgcgttccactctgctaccgggctagctgggcggggaggagtggcgtggcgaggcccagccttcctgggtgcgggtgagtctggagcaggcgcgcagttggtgcaacggctctgtgccccctcgggctgctcgggggggctgcgctgcccctgactcccctccgggcgatggtgcggcccgaggacgcctccatcccccgccgacgctgactcgggtccccaatccatggccgcctcggcgccgcccccaccggacaagctggagggaggcagcggccccgcaccgccccccgcgccgcccagcaccgggaggaagcag

SEQ ID NO: 33681 - DNA, 555 bp, Mus musculus
  source 1..555: mol_type = other DNA
tgcatgcagttcccacagaggctaagggagggctttaggtcctctggaactgcagttccagctggttatgagcggctggcattcggaatacgcaaagaaatgattttcctaagagtttcttatacactggaggcagtcataggctgcaggctttattttgataagcttagaaaaatgtaggacagcaatttatatctacagataacagtaagtaggtgtcagaacactcttagttttctccttaacctaagttactaatgtcaccaatgttctttttcgagattctgaaaagcttgctggaggcttcagcagttacaaaaccttttcaacagtgaaacacaccctatcatgtcattgtctggttacttctttggaaagagctatttttagtgcggggcaaacacatatttgctttagagcatgagttataacgtacaaattaaaaggcagatttgaaaatgccttcaacattactattagtctttccagcgtcactctcggctcaccttgtcagccgagaaggcggggccatgacgtcacatctgggcactaggc

SEQ ID NO: 33682 - DNA, 167 bp, Mus musculus
  source 1..167: mol_type = other DNA
ctggaagaggctggatccaggttactaaaacatcctgctttgggtattgaacagccactgtgtgttgacgtcacttgtacagatagagcaaaactacagttcccagccctcgttgcgctgccacccggcgaggagcgaaggatggcaggccccttcttggaggctga

SEQ ID NO: 33683 - DNA, 203 bp, Mus musculus
  source 1..203: mol_type = other DNA
ccccacccagaaatgattttttaaagcggggagcttaatgttgcggtaaccaggtatataaattcctacggtagaaatgagcaacagaggcactacgctcctcttctcttggagaaatggctactgcttgagtcactggctcaagagagtctagatctgatgtcctatcttaaggggcagctcttaacttaccctggggctag

SEQ ID NO: 33684 - DNA, 423 bp, Mus musculus
  source 1..423: mol_type = other DNA
gaaattttgtttaaatagttagagaagggatacataaattaacatgcataatgaattattctctagcagtgaaatttgcaatatgcaacttactcaagttgcatcataagagatgacacttaacaagtttctgaaattaataaaaacgtgttgcttactaataacatgtgaagacttacaaagtgatgaacatgcagtatgtttgcagatcacacgtgtgcaactgtaaccgggttacagatggttttgggcaaacacctgatcaaagccagtgctcttatttaattaaagcagctttttagaagtctactggctacagaacactgacaaaagaagggtgtatctatacatattctctctggtctttcattaagagggatgcatcacatgggcctccctcccacgccggcgcgccagtgatgt

SEQ ID NO: 33685 - DNA, 202 bp, Mus musculus
  source 1..202: mol_type = other DNA
gcaggggagaacagccctgcccactggagtgcccccgggagcactgaggtaaagaattttatctacaggcattggccaatggtcactctatccaagctctcagagagggcgtggactacggcggcccagcccttgggcaggatgctgctgctcggctaccgggagcaaacccctccctcctcttggcccaacagttgggcgg

SEQ ID NO: 33686 - DNA, 429 bp, Mus musculus
  source 1..429: mol_type = other DNA
cctgctaggaagcagggataacataggctcatatgtaagccacaggggccggagtcttaccctaggagtttccagatagagtttctcaaagggcggctcccagaagcacccttgattggaatacaacactggccaagattcccagggccacctgcccagaggcaactggaaatctgggagttccccaggagtgtgactctcagaaatcaggggttccacataggacccccacacagcaggggtacaccatggagcacacttccgggagctgagcatcagtctccggacactgcccatccctggagttgtgaatccagatagttgtatccaggaattcccctctgacttagaaggaccttctgagcctgccctgaacctggctaagaacattggcctcaccaaggcccgagatgtgacctcagtgctgat

SEQ ID NO: 33687 - DNA, 354 bp, Mus musculus
  source 1..354: mol_type = other DNA
taaagacgtcgtaagccttttgtctgctaagtctgcttcagacagaaatctttttggttgaaagtgaccactgatccactaagaaaaaaaaagaggtcctttatgggctagggctttcaagatcaaagatgtcattgagttttgacacctctctctgcgtctagaagatcttggccttgtctgagtcttccagaactccggagaaatttgcttttcaaaactagacagcaccctgctgcctactaaagaagtaggtcttagctttccagaaaactagaatcacaacttcggagcatttgagcagtggggtcgctttcgcctcaagggtcccctcacagggaccacgcctccggg

SEQ ID NO: 33688 - DNA, 660 bp, Mus musculus
  source 1..660: mol_type = other DNA
tccagcacaggcctggatgtcccgatgtcccttgtcaacagtagagcaccaagaggggggctctggcctccgggtccgatcaccagacaagggacccccagcgtggcgcaagcagtgcagtggatgcggacggggtcccccggcaccgatccccgggaggggagatggggtccgggcgcagccccggccccggcccctccggctccggccagcaggaactcgcagctcagctcgtccaggcaggcgctggcaatgcggaagcgctcgtggccgcggtggaagatggactcgagcagcttcagctcccgcctcaggcagggccctggccccgggccccctcccgggccgcccccggcccccggcgccgccccctggacccccagttgctgccccggccccggctgctgctgcccctgcggctgcggctgctgcatcctccgctccgctccgctccggggccggcgggccgggagcctccggcctccgctccgggctccgccgccgccgcggtccgcacccttcgccaagatggcgccgccgccacctccgggacaggccccctccgctcgccggcccaccccccccacggccgccggaagccgcgcgcccctccccctccgcggcggccccgcctccggcctcacgtgacctctgagctcc

SEQ ID NO: 33689 - DNA, 652 bp, Mus musculus
  source 1..652: mol_type = other DNA
gccggcttagggcttttggcctttatccagagagagaaaagatacattttctgtctcaaaagtccgcaggtctaccagtgaagacctgtaaaggagaagatttcatttcatgttcatatgtaatcgtttttcatatttaatctttttaacaacaataacaaaaacctttgaaattgcaggagggcgcgggtcggggacctccaagctcttctcccaacagtgcctggggttggtgggacccctctctggtcctgcagccagagcgatacctgcgcggccctcagagccgcccggtcgaacttcgagccttcgcccgccgcgtccagcttggggttccacgcgcccccgacgaacgtgcggaaccggagagcgagggaagccgcgcgggcgctcccgatccttgttctcgagcgcgactcctggccacgatccccgcacacgtcccgtctgcagagatgggggcagtgttggactcggtgcgcacgcgggggccccggcgccggcgagggaggggcgcgtccgtcctccgtcctgtgcgtccaccgcggggcgggcgccggggcactgcggccgccatcgtcccagttagggtgggcagggctgccgggggcttccgtgggctcggcctcgcccacctcgggaggaaaggcag

SEQ ID NO: 33690 - DNA, 511 bp, Mus musculus
  source 1..511: mol_type = other DNA
cctggcacctgccagtttgcagtgatagtgccacctagtgggaacgacgaggtctaaaaactgaggctccccaggagtctccgaccgtagcgaaaggcgccttcccgccgcagacgcggaggccggtgacccggcccgacgacccggccatgcgccgcacgcgggggccgcgggacgcaagcaggaagccagagtcccgcgcggggagcccctgggaacacaggcaccggccacgtgacaagagacgccggccatgtgacagggaagcgctggcaaaggccccccggtgcacggtcacgcacgacgcacgtacacgcacggaagcgcttcgagcagcgaggcgagggcctaagacgcgcggatcacgtgccgggggccggagctcagaggtcacgtgaggccggaggcggggccgccgcggagggggaggggcgcgcggcttccggcggccgtggggggggtgggccggcgagcggagggggcctgtcccggaggtggcggcggcgccatc

SEQ ID NO: 33691 - DNA, 423 bp, Mus musculus
  source 1..423: mol_type = other DNA
tccggaagtcagttgggaagctgccctgtagcttcaagctagcaaacgccggttcctttccaggaatctttacacatgtgtctctgggccagatcaaagagctgctcctccactggaagatgagaggaaatctttttctcaggttatgggaagcagacatcggtgtcttttcggattccctgtttgattcccgtaagcacccaggacactgacctgccttctactttaacagccagagccactggctggcgctcatgagggatatttctccgggccgcggctgcaggaagtaaccccctccggtggcccggagcgctggccgattgcgccatcctactgggctttcgtcgagccggggcagcaccgggccggctgctgtgtgtcacgtgcatgtgggaagtcgcgcccacaccgatctgagcc

SEQ ID NO: 33692 - DNA, 295 bp, Mus musculus
  source 1..295: mol_type = other DNA
aacacacctaacaagagtgaatcttttttttttttaatggttgtagaccaggctggcctccaattcagaaaaggcgcaagtgaatctttttaacaaacaaaacccagtttaagtttgggcctaggcaagggctctgcctcggagctatcttccaacgacctcagatagttcttcgaggtgtgtgtgtccgcgagtcaatgcatagctgtgccttttcaggaagtgaaaggccgctacggggcctactcccggtttctggcagagaaagcagcattcgctcgggtcccgggccccc

SEQ ID NO: 33693 - DNA, 246 bp, Mus musculus
  source 1..246: mol_type = other DNA
aaggtttttggacttcaattacgtgaaagagaagtttcatttttctttgagtcagagtctcactctgtagccgacttgcctgaaactcagtgaggagcaggctggccttatacctcccgagtggagattcctagcatctttatagaaaacaaaacacaaggtggggggtgttttctgatcaggcctctgaacaggccactggcggctacctgggaccctccgaaacccccctcgggggcaggagtt

SEQ ID NO: 33694 - DNA, 411 bp, Mus musculus
  source 1..411: mol_type = other DNA
tcatagaaaacctaaaccttgactacattttgaaagccagctacttaaaaaaatagccagagaaattttactgaaaaaaataaacaataagtatttattgagaatctactacttgtccaatccttcacaatctaatgtgagaaacaattcagacattctgaagttggactgggatgggtaaggcttaccacttaggagtcttcccagttagaaacactggggaaagaatcactgggatgatctataattaaagacagtggtacacatccaaatattttaatctctaatgggaggtggagaggcaaaaacaaatttaacaaaatcgcctttaactgttttttcttaaattttaagaattttcaaaacaaaggtgaagggtctcaagaaatttggaattccattcccattatg

SEQ ID NO: 33695 - DNA, 342 bp, Mus musculus
  source 1..342: mol_type = other DNA
tggggagggaggaggccttctccacaagacaggctgggcccaggcccccggccacgctcccaaatcgaggccccggctctggcgcggcccagtaggcccggcggccaattcgaggtggggaggttggacgcccgggttcccataaaggggccgcggacaatacccggccccgccgcgttgccgctgccgccgccgccgccgccaacgccgctgcgctccccgggccgcgccgcccctgtccagcacgtgacgcgaaagggccgcgcacgtcagcgtgcgcgcgcctccccgcccgcgcgcccgccccgcccccgcactcccaggtacctttgcggacataag

SEQ ID NO: 33696 - DNA, 327 bp, Mus musculus
  source 1..327: mol_type = other DNA
tttttaaaatgttcattcaaaatctaagagggagggttcttacttagagccaggcagctttgacttaaagcggctcaggagccttcttttcaggagtccggctcagagggtaggacagtcccgccgcgctcgcgcgttagcccaggctctgccgaagccagggaacctaggttccctgatttccatatggttttcgattaaaaaaaaaaaaaaaaaaacttatgtccgcaaaggtacctgggagtgcgggggcggggcgggcgcgcgggcggggaggcgcgcgcacgctgacgtgcgcggccctttcgcgtcacgtgctggacaggg

SEQ ID NO: 33697 - DNA, 375 bp, Mus musculus
  source 1..375: mol_type = other DNA
gggctgcacacgtgcagccgtgcagcactcgggatgtctggttcagcagacccaggctttattggccaaagcattcttaacagtgtctaaaaggtcattcccaatttcgtagcacttcttctggatttgaattcaaatgtcattcttaacattttgcactcaactgaatagaaatatttgggtttagagccattctggcacttggcataacctatgccacgatggtgagatatcctctgatgtcagcgtattagtctcagtttacaaagtacttaataaaactaactactgtaaaaccatggatcatttctttagagtgtgtgtctggatctaaactactgatagtctgaaattccagaatcaggattcccttca

SEQ ID NO: 33698 - DNA, 303 bp, Mus musculus
  source 1..303: mol_type = other DNA
aattaattagaatccactcctctggcatagatgggtatatggcaaatcaattgccacctgtcaatagcaagattccaagtggatgtcagaccttctattttaaggtcgctatgagaaaacgtgatcctgtgcctattagagaatcccaaaatagcttgtcaacgatcatgagtgacctcccatcgtcactgttgaccacgcttagataccaggaatccaagacgagtttggtccatatccaatatagtccaactacttttgagggacccacgggagaacctccccctgtgttcccccagggga

SEQ ID NO: 33699 - DNA, 269 bp, Mus musculus
  source 1..269: mol_type = other DNA
aactgctatggagacaggagagagttccagatgggagagaactgtctcaacagttttggggactaagtaccgaatggtacttatggatacgtgccactaggctaggaatgtgcttggctagtgctttacaaactgagcaataaaggacctcactgggactccttgcaaggtgaaaccggttttggaatctgtcctagattttagtaaatgggtcccgcctgcttggcagggggaggacgcgcggtggcggcggcgtcacatcccggcgt

SEQ ID NO: 33700 - DNA, 394 bp, Mus musculus
  source 1..394: mol_type = other DNA
aggaattcactggacaccatgtgtgtggtacggcccctgtactcttgccttgacaaagggcagctgtttatgctactaatgctgactggaaattacttttatttttttataagacagggtttctcccctggctgttctgaaatgcaactctgtagaccaggctggcctcaaactcagagatggcttatctcgaaattacttcaatgtttaaaattaaataacttgtttcttgtatttaatagtgggggttgaacccatagtttctctgtcctattttattaaaaaataaaaatagagtcaaacaataatttactgctcgaaatttctataaagtagctttttggtgcacttaagtggcaccccccacccccgctgacgtcgtggctgctgattg

SEQ ID NO: 33701 - DNA, 315 bp, Mus musculus
  source 1..315: mol_type = other DNA
ctgtcctacaacctagatcaggctggccagacctcgtctggcctttaattagcactttaaaagcaatgcacgtgtcaagtggtgttatttgattttattcctcaaaggtaaagaattgtaagaggaagccgtgcctagaatgatctgaagttctgagattccagaagcaggtatctcattttttaaaaaaaaaaacctatttacgtctagaattattaatcagttcacctgtgatgttcccatcaaaaaagtatccatttttaatggcagtcaacgggcattccgttgcattcgaacccatatcagatataagga

SEQ ID NO: 33702 - DNA, 336 bp, Mus musculus
  source 1..336: mol_type = other DNA
atctgggttcagttcccagcagatgacagcacctctagacctccacagtactaatcttcatacttttcaaagggaatggaaatcctaggacatttatcataaactcaaaagcctttgaatagcctctttgaaattctttccaattcggtcaaaagggccctccgaggctggggaggcagcgcccggactgctggagctggacaggcctctccactggcgaagaggggtggagccgagagcagggccgcctctcttcttttcccggggcctgggcggagagggaggaaaacttcctggctgggactccggcggtttctgcctgccaaccctcggatc

SEQ ID NO: 33703 - DNA, 288 bp, Mus musculus
  source 1..288: mol_type = other DNA
tctttctggacagaaattcaattctgtcatcatctaattaaccaataatactttcaatttaaaatctctaaagaggtgacaggcctttaatcccagcttgggtcttgaagccagcttggtctacaaaacaaaaatattaaaaatctgtgctcttagccttgagatcatttccttatttgtaggatttcaaaggaatagctctgtgaagcagtttcacactcacactgccgcgcggcgcccagctgaagagtcgcgtgacgcagtgagatgcagttgccaccgagtccg

SEQ ID NO: 33704 - DNA, 310 bp, Mus musculus
  source 1..310: mol_type = other DNA
atagttttatttcgtttgcacatggacagtgtcttaatattaaactccacggacagcgtagtgggcggggcctgattgggcaggaccaggatacagtttggcagagcaaagttctccggggctatttttcccaaagataaggcctgaagtgtgttctcctccgaggggctgcctcatgagagcagcttcagaggcgagggcaagctcgggtgccctgagttgctggaacccccagaagatatcttctcgacgggatccttcctggagtcccgcgtcaaaggtcccggtgaccagggctgactagaagcct

SEQ ID NO: 33705 - DNA, 282 bp, Mus musculus
  source 1..282: mol_type = other DNA
gaggccaccctgagaaatgagaccacataaaactaatagtttaaggaaacaataagatttcaaaccaaaagtaaatgtttggctgaatgtgtaacccggttcctggatccataacttggggccctctggctggaacccggagccctgagcctcgagattcttcaatgcccaattaggattcaccagatagttttatttcgtttgcacatggacagtgtcttaatattaaactccacggacagcgtagtgggcggggcctgattgggcaggaccaggatacag

SEQ ID NO: 33706 - DNA, 356 bp, Mus musculus
  source 1..356: mol_type = other DNA
cccattggacttgcaaactttatatgccccaggtaaatgaggaaaatacctaataaaaagttaaaaaaattattttaaaaaattaggtattttcttcatttacatttttaatcataagttaatttgtagaaaggatggcttttatttcatgcattataaaactcttttctgtagagactggctaggcaagccaggcaaggaaatttgtcccaaaaagggaatgattaccctttggcccagttaggcactaaaagagcctgagctgttaagtgtctgggctggccccagcggcctgctagtccatggcagctcagggggcccaccgccgagctctggcagcctcgtgcgggtacgcg

SEQ ID NO: 33707 - DNA, 335 bp, Mus musculus
  source 1..335: mol_type = other DNA
gggtggagggagacagactccctcccccaggattatttttggggagggagggctcctgttttgggatatgttacccaaataaaagatgtttctatacacttctatggtatctagagagagagatctgtgtgtgtgtgtgtgtgtgagagagagagagagagagagatggtctgtgtgtgtgtgtagagagagagaatatgaatctcagttgcatacagttgatttaacccggggtggcgtgcgtgcctgcctcccggggtcacacgactgctgggaagtgatgtccgcttcctgccctccctgcgtgtgtgcgtccggagtctggagtaggctgg

SEQ ID NO: 33708 - DNA, 332 bp, Mus musculus
  source 1..332: mol_type = other DNA
gctggccccagcggcctgctagtccatggcagctcagggggcccaccgccgagctctggcagcctcgtgcgggtacgcggggaattcccgacgcgagggtgaggcctcgctggtcgcagggtcaaaggcagcttctgaggcctcccaggctaggagcgacgctggcggcctccgacctggtctccgagacttccagacgccgcccagtgcgggctttccgggacttccttagggaaccccagctccaggtgcaggtcctacctggagtctgcacctcattttcgctccaggaagagctgggctgaggggaagtgcattccgctgaccagcct

SEQ ID NO: 33709 - DNA, 251 bp, Mus musculus
  source 1..251: mol_type = other DNA
aaaagtgactacaacctgtgtgtcagcacagactgttgtgatgagggcctgtcacctgggcaggagagcttgtccaggctggcctatgtagactaggtagacatcctcctcctctgcttttaaagaggtgtgccagctgggatttttctgaaacttgacagaaaaatgagagggcctaacaaattaggtatgtgtagagacacgacatctcactcagcagtgagccactatatgtgacttacttgtattgc

SEQ ID NO: 33710 - DNA, 470 bp, Mus musculus
  source 1..470: mol_type = other DNA
ccacccgccagcgggccggctggggagtcccagggcaggcaggtaggggccggaccgggcggggcggcgggcgggttagggcggctccagggactgtccccaccgcttcctccctcccagagaagtgaaagtggaggggagggcggagctagctagctgtgctcgaacctggagctcccgcgggcgctcaagccagagcacccgtcacgcggctgctggcgctgctgccgtcacgtcctcggcagtccccgcgcctagccccgacttcccgtcattcggcatgtgggcgttgggacccaaagtggctccagtgccgttgttttcccccaagggagaaccagcacagaactactattggcctgcagtggatgtcctggagttaaatcaggaggctgacgctgactcctggcttcacctctcagatgtagagaagctcaagctaaatttagcttgagttggggtgcatcctg

SEQ ID NO: 33711 - DNA, 376 bp, Mus musculus
  source 1..376: mol_type = other DNA
gagagtaagaattcattgttcttgttcccccaaaaagttattattcttaattagttctcatttctagggcgctcagaaagaatattcatggtgttcttcactgtgaacagaaaagtatacaccataaattcagtacatttagctaattgtttgttttttctttgtgctgttacggtacaaccaggaaacaaggccttgggcgttcccggtctccatctttagacgagaaagaatgagagccgtaaagctgcagcctgaagcacttaatgggctgtcgaagacccggatgtgtctgggactggcagccacccattcctcaagggtggggtgaagtcttgtatcccgctttcaattgtcaaggcgcttggcagctgcc

SEQ ID NO: 33712 - DNA, 529 bp, Mus musculus
  source 1..529: mol_type = other DNA
gttcctttagggaaaagaaataaagagattcctgggaagcataattgctacatgaaaaatacattttgtttctggcttggtagaaaacattgtctttcatttaattgaaggttttttgtgcttctctatatatatatatatatgtgtgcgcgtgtgcaactatagaggcttagaagtatgggccacagatttactaatatctgaagaacaattgagacatgttatttgggtaattacatttatccttttaaaatatgtaaattagctatgtatgaatatataggcttcaaactttaacctttttaaaacagaagcttctagagtttctacaccagtttggctacacagaatgagtttcatacaggctgagcatcagtatggtctacaaagtaagttcctagacagcctgggcggtggcttagaagttaaagggtacatgctcacatacctgcacacacacatttataaacatattctagggccattgtgtatagtatattattttcctttccttattattagaaccata

SEQ ID NO: 33713 - DNA, 252 bp, Mus musculus
  source 1..252: mol_type = other DNA
caagtgcactcaagcgtgcgtctgactgcttactggtccctgtccagggacattgaaactctaagattaaaaccaggatgggaaacatttgctgcctggtcccaattattgtatccttgcctaaaatgaagggctaggcacttagccagccaatatacagctgtgcacctctttggacccgacaggctgctggccaccagcggtcaaattggggcctgggttgtggggagggccgggccgcccccgactctc

SEQ ID NO: 33714 - DNA, 402 bp, Mus musculus
  source 1..402: mol_type = other DNA
acaatttacctgcccactggccttgaaaatggataggggccagcttccctattaggatggcaggcatatatccaccttagagctgtggacagcaatgattgtgtgtgtagtcccagagtctcaaaagattagtaaactcactagagaatcaatgcactttttttgttttcaaattgttactaataattgcacacccctaacgtcgcgcatgcgtgttggcgcgcgcaggcgcagcccggcccgcctccagatgcagaggaaggatgcgattgggcacacttgttgcccgtcagacagtccgccgtcgtcggcttactccttgacctggcgccaccgcggaagccgctattggcggacgcccgggaccgcgactgctcacttccggcgccggcgacgactctg

SEQ ID NO: 33715 - DNA, 360 bp, Mus musculus
  source 1..360: mol_type = other DNA
cttgggttcaagagtgcttcactcctatggaacttggaattcttccaaggacattgttaacaatttacctgcccactggccttgaaaatggataggggccagcttccctattaggatggcaggcatatatccaccttagagctgtggacagcaatgattgtgtgtgtagtcccagagtctcaaaagattagtaaactcactagagaatcaatgcactttttttgttttcaaattgttactaataattgcacacccctaacgtcgcgcatgcgtgttggcgcgcgcaggcgcagcccggcccgcctccagatgcagaggaaggatgcgattgggcacacttgttgcccgtcagacagtccg

SEQ ID NO: 33716 - DNA, 341 bp, Mus musculus
  source 1..341: mol_type = other DNA
ttatggttatttgtcctcaaaacatatataataatattatatatttcatcgttatgtcattatttggggaactaaagagttaggtaacccctctactttcctcttccctaggagccaggtagaaaaggggggtataggagggggcgagggggggcagcttcctcacacccttcctcacccccgcggcctaggcgccccgcccgcgggtgctgccaagggagggatcccccggctctcttgtcgccgaatctgggaggggaggattcgctgcctggctcgggaccttgtggtcccgtccaccccgcccccgcccgcctccggaacggccggagacttgggcc

SEQ ID NO: 33717 - DNA, 453 bp, Mus musculus
  source 1..453: mol_type = other DNA
gctaacacgataaagtattccctattttagaaaggaatatatgccaggctttctgagttcgaggccagcctggtctacaaagtgagttccaggacagccagggctacacagagaaactctgtctcaaaaaaaaaaaaaaaaaaaaaaagatatattgtatgaatttttttcaataaaaagaatcatataatagtaatgctatcaagtggaattaagttatttctcatatttccataaggtaaaagttatggagaagaaaaaagaattgtatttcttgttatggaaaggaaaatttaattagattgtcaaaattttaaaaacaaagcctccgatagcagaggatggtttcgatccatcgacctctgggttatgggcccagcacgcttccgctactctgctactggtagcattctcttcttttccatagaagagctgcgttaaccaataaacgcg

SEQ ID NO: 33718 - DNA, 241 bp, Mus musculus
  source 1..241: mol_type = other DNA
tcaaggctagccttggtttctgggatacacctttaatcccagcactggagttcaagggctgaatattacatggctttctcatggagaaggctatggagctcagcggttaggagtactaactgctcctgagttagctgtatgagatctgatgctacaatgtacttacatatgataaatcttttttaaaaaggaaaaagaggctctggtcccggcccgctcggtgcacagcggcggtctggag

SEQ ID NO: 33719 - DNA, 266 bp, Mus musculus
  source 1..266: mol_type = other DNA
caaagtgtttggcctggacaccagggccttcgggggtccaggaagggaaggggctgagtttccgcctccgctgaggggaccgcccctggacacagggtctcatccctcccaattatgagggctacttgggagcagcactgaaaaatcctgcactcggagagccccagactaagggtcccatagtggaactcctattgaaattcttcactgaccgagacacccctgtcggccccttccctcctgggagacagagggcgcctctgtcc

SEQ ID NO: 33720 - DNA, 402 bp, Mus musculus
  source 1..402: mol_type = other DNA
agcctggtctgtatagagaattctagaacagccagaactacattatagagactctgtctcgcaggcagatttctgagttcaaggccagcctggtcaaactactagaagaactttttcccaagcttcattcagtgtttattgatgcctcatcattgctagacattatgtaagaactagggccacatcttctagaggcagtccctataaaagccagtctggtctaggtctcaaggtcctaataaagactttttacagttgtctttagcttgggaatgggaaataaaagggttgccaatctaagctgctatttgcaaggtacttagcgattacggccactggccacgcccccgcccctagttgcgcgcgcactgacgcaagcccgtcggcgccattttagccggt

SEQ ID NO: 33721 - DNA, 335 bp, Mus musculus
  source 1..335: mol_type = other DNA
gtacttagcgattacggccactggccacgcccccgcccctagttgcgcgcgcactgacgcaagcccgtcggcgccattttagccggtcacgctgcactggtgggcccggcggcctggacaccaagcgggagttggcggcgccggctctgggggcccaggggaggatcggtcagctagttaacccgagcggcccgccgtcagctcaggttaggccggcctccgggccgcccgccgcagccgtggtggcaaccccgggaggagcggggcgcggggtccggggcccggtgggctaagccggaaccgcggccagcgagctgggccgctagccgtgcggg

SEQ ID NO: 33722 - DNA, 261 bp, Mus musculus
  source 1..261: mol_type = other DNA
gacagtgcacaccgccacagacactgctaggagccttccctggctcttgagaaggcagactgcccacacctagagactggcgtccctggcaggagacacaggattctgtgtaggtggggtccttctgaagttcccttccaggctggctaagccagagagacctatcctaagcagggtaggatactcacgaatgtggccactggaccggtgtgaggagacctgtggacagaggcgccctctgtctcccaggagggaaggggc

SEQ ID NO: 33723 - DNA, 309 bp, Mus musculus
  source 1..309: mol_type = other DNA
acacaaagactgctgatgactgtggctttaggccctaggtcctgggcaggtagggagaggtggttacctgccaggtaactcctttgagcttgcacatgtgcaccctgggctgctgcagggtgcttcccagtacctttcatctctaggctgtcaggactgagaggcttgactctaggtttcagcaggcccgacagagatccatgggcctcgctcctgctcccagcccaggaggctgcaaagctggggtggctgagggataaggccctggccctgccccgtctcccctcccttcccccaggtataagagca

SEQ ID NO: 33724 - DNA, 216 bp, Mus musculus
  source 1..216: mol_type = other DNA
tgctgagagagcatgcaccttgatatgttaataggctgttgcatttgctctagccatgtgaaacctggctctcagtgacctaggtgagagaaacaggtgatgagccttctctttctttgttgggggactgccagcttctaccactccctctagggtgagggtagaggggtgtcctttaacccacagccagctcagccaggcaaggccgggagggag

SEQ ID NO: 33725 - DNA, 419 bp, Mus musculus
  source 1..419: mol_type = other DNA
gagaggtggttacctgccaggtaactcctttgagcttgcacatgtgcaccctgggctgctgcagggtgcttcccagtacctttcatctctaggctgtcaggactgagaggcttgactctaggtttcagcaggcccgacagagatccatgggcctcgctcctgctcccagcccaggaggctgcaaagctggggtggctgagggataaggccctggccctgccccgtctcccctcccttcccccaggtataagagcagagctcaggtgagctggctcctccatcctgtctcccagctgccagcaggtaagaaagctcagcgccttcaacctggatgggctgtccttctccagggagcaacccatgcctctcttgcccaagtcttacaggggtggcgctgagggggattccctctgagtgaa

SEQ ID NO: 33726 - DNA, 236 bp, Mus musculus
  source 1..236: mol_type = other DNA
gaacttgtctatgtgtctttcaaacattaaaccacactgttacgtgtcaggcacccttccagccacgaccagagtggttggatggatttgttctgattgttccttaagaaaaagatgcataacaggggccttggcgggtacttgtataatcaggatttaacaaaccttattctgctattgacagcctggcccagtctgggaccagctgggtgaggtgcatgggcggcgacacacag

SEQ ID NO: 33727 - DNA, 313 bp, Mus musculus
  source 1..313: mol_type = other DNA
cagggcgggcaccctgagggctctggccatacccactctctttggggacacaacagtggaaccttgtgagctctggagctaatcttcatgacagctggtggctgcctcagagaacagccttctctcaacactcagtgctctggaggctgggcagagaagcctgcacagatactctctggaggtacaccctaagagagcccaagatgtgtccccctcttcacaataaagagctcagtagatagctggaagatgcaagcaggaagctgttaccagttcccagctttggggaaggggaccctgagggcagcctcag

SEQ ID NO: 33728 - DNA, 162 bp, Mus musculus
  source 1..162: mol_type = other DNA
taccatggaaggcatggacccaaggggctccttggagagtatggttgtgggagcgcttggtggtgtccaccccatccaatgattgtgcctgctggggagggagcaggaagcctggttcccagcccccatcctctgcatgggcagggcctggcagggtataaa

SEQ ID NO: 33729 - DNA, 302 bp, Mus musculus
  source 1..302: mol_type = other DNA
ccaggctagggagtgtgctccctagagcatccctactttcggaaaagagacaagtcccagatgtattactagtgtaatagttgagtgtttgcagaacacaggcaactcctggattcttagttctccaagctaggatagtgactttagccatgtccttggcagaatcccaagaggggtcctttctgcttttggattcataggaaaaatgtttctgttattgaaaatacgtgtcattaacttcacatatctagctctgtttgtaaagtcaaaatttccagcgaaggttccctccaaccttgtct

SEQ ID NO: 33730 - DNA, 292 bp, Mus musculus
  source 1..292: mol_type = other DNA
gaaaatgttcaaaacttttcacttgatgcacattcatgcataagctgctctaagcttttgggatcaacgtctttagctatatatcaagatttagaccagtggttctcaacctgtgggttgagaccaagattcataacagtagcaaaattatagctatgaagtagagggcaacagcatcagtgtggttcccagtccccctcacactcctggacagtccaggcaacaggggtggggtcggggcgtgccagcactccctgggcggacctcacggatgctggccactataaggccg

SEQ ID NO: 33731 - DNA, 178 bp, Mus musculus
  source 1..178: mol_type = other DNA
attcgagtggatcccaggctcctggggaaggacatccttagcttcaactcttgggaataacttggagaagttgttcagttcagttcagttcagttcagaggtagactggacatgaaggcattgatggatccacatggactccatgcccatagcccgaggctgtgggcagctggccaag

SEQ ID NO: 33732 - DNA, 242 bp, Mus musculus
  source 1..242: mol_type = other DNA
tatgcatgtgtaaagggtgacttaattaacccctgccccaaaagaaaatagaaggaaattttttatcaaaatatattatatgaaagtcattgttctgtttagttgttataggctaataacaatcattttttttaatcagctaccttctaggatataagttcctaggggacataaatcttaagtccccttcgctgaggagcttctcccagggctgggaatttcacaaaacatcagagctgtgt

SEQ ID NO: 33733 - DNA, 435 bp, Mus musculus
  source 1..435: mol_type = other DNA
gaaaagaagaacaatcctcaatcaggctttaatttttacttcaactaggaaaataatagtactgtttgatacttatgaaagtactattagccaatatattcaatttcttaggacattttctcgagataatatgacagttgaggtatattaacatggaaaatccattttgcattctgaaataagttagatatttatagttgaatcatgtgtatgaatctgaaattctactaatcaacttaaaatttagctgataatactttgtctagtttttttattaaaaggtttcctggatgtccagcattatgttgtacattcaacaaactattcttgattaaccaagattggtatacaaatcatttgtgtgttggcagggtcaccacgttatcaatgtgactcagtgtttccctgggagagtcatatgtacagtctggtcct

SEQ ID NO: 33734 - DNA, 300 bp, Mus musculus
  source 1..300: mol_type = other DNA
tgtgaaataaaagtactcagtaactgcctgagatctctaagtccattccactctatggtggcatctcagaggtcagcctttgtaagtaaagtcagtacttaaagtagactaaagtcatgctagttacagtgctgtcttttcccaaactgggagctggggattctaaaatttcgagaatttccaagataatagcttctatgtcttagacaatgtcttagaacagaagttttgaaaactagaatttgaaatcttcatgaatgggtcaatccttcccctgcaatcacagggaggaggtgcctg

SEQ ID NO: 33735 - DNA, 414 bp, Mus musculus
  source 1..414: mol_type = other DNA
aataagtaaatttctttctagtttacagtgactcttgaaacatagaaaaaaatggatatattgctttgaaacttttccttcggaggcaaagagatagtctcaccttgtttccttggtcacatggaaatttctacctttcaaaggaagaacaaagtagagaaaataaggacagtctcttctcttttccccttcactatattacctgactaaagagcaggacttttatacaggaaaaaactttattctgcgaattttatgcttcatgtaggaatatccagtggaaatgtatgaaataagccatagatcttatctcttaccacatcctgaaacagtatgaggagacacacacagtgactcaaaccattcgtgatttcaaacgaagcttgttacggtgacaccggcctgtcagtcctc

SEQ ID NO: 33736 - DNA, 334 bp, Mus musculus
  source 1..334: mol_type = other DNA
cctctttgaacatgagatatgcatgcagtgcacagaatttaaaataaagtaaagccagaaaaaaacctctgagaggtttttccataaattagactgatcagtagtaatcaggaatgttagattcactgcttataatgataaaaataatctttggacttatgagatgataaaagagatttcaaaacctcctattaataaacccacaaactactcaggattcttcctgattctttcagcatctaatttaagagatcagaaaagtgagtaatcatagctagattctcatgtccaggacttgagttagaagtcctgaatgatgctgtaatgatgtcat

SEQ ID NO: 33737 - DNA, 332 bp, Mus musculus
  source 1..332: mol_type = other DNA
aggtattatttctctgtgtttatggaaaaaacttctcttctttctaagaaacttataaatatatgaggaaaattgaatttaagctctgagtcataagctgcccctggagcagagccacctgtgcctgaggcccaacctgcctgaggctgaatgagttctcttcaaggaatcttctggagttaacactgaactgcaataactatctacttctaaggaacttgcttggcaagggaagggcttccccttttctttacaaagcatgtttgctgacattaaatttgaaccttgaacaagctcagaatagaacccagctctgtgatctgctggccaga

SEQ ID NO: 33738 - DNA, 356 bp, Mus musculus
  source 1..356: mol_type = other DNA
aggtattatttctctgtgtttatggaaaaaacttctcttctttctaagaaacttataaatatatgaggaaaattgaatttaagctctgagtcataagctgcccctggagcagagccacctgtgcctgaggcccaacctgcctgaggctgaatgagttctcttcaaggaatcttctggagttaacactgaactgcaataactatctacttctaaggaacttgcttggcaagggaagggcttccccttttctttacaaagcatgtttgctgacattaaatttgaaccttgaacaagctcagaatagaacccagctctgtgatctgctggccagattacagtcccatggggtgaggcag

SEQ ID NO: 33739 - DNA, 343 bp, Mus musculus
  source 1..343: mol_type = other DNA
atgtgatgtgaaccctagggagtaccactgggaacacccaatctgctaaataaatttctaattaattctcaggatatttgttcacttttccccatttccattgaatgataattgaagggaatgccactctgccatcattctagagagaatatagggtcacaggcagccgtgacatgggtattatttccccatgtttatggaaaaaaatctatactttctaacaaacttgtaaatgtgtgaggaaaatacccctccacttctgaaaaaggaaagtgtaaatgtcaaataatggaaaaccttgaatttaagatttcttgagtcacaagactcaacctagtaatgg

SEQ ID NO: 33740 - DNA, 386 bp, Mus musculus
  source 1..386: mol_type = other DNA
atttgcaatctaattccttttgccaagatagccaattttacaatcttgatcctatccatgagcatggtcagggacttgaagttttaatcatacagatctgtcatgccaagatattttatattatttgtaactattgagaaggatgttgttgtgtagagaaaggccattgacttttttgagttaattttatatccagctacttcaccgaagctgtagggtcacttatatatactatcatatcatctgcaaaaaaagaatgtcaaggttatgaggatattctgttcacataaatagtattttccaatggtgcatgagattttcaaaacaggtttgccgaagctgagttttcaaaactgtcatgtaatatctttcagattctgagactc

SEQ ID NO: 33741 - DNA, 492 bp, Mus musculus
  source 1..492: mol_type = other DNA
ataattaaagatggccttttctaatagtagctagcaaataaattgaaaattacaaaacaataaagttttaattaattttgtcagttttaatatgacaataatttaagtaaagccttttggttaaactgtaagactaatgggtgttaaccacctaagaaagaacatgttaagtatgttaagtgcaattttagttctggtactgtcatgataatctgtcttgaggttatcatcattggtgagttccaatatatacctcaaatatgttctttgacatgcagcattgaagaatgtaatgataagaccacagaccattagtctctgctatgaagggcatataatattttccaaaattcagaaaaatcagcaggctaaaacaacagttaaaacttttaatactttctttcctttagtctataggccaattatccttagatttgctataatcagtgagatctcaccgaaacttaaaacattgagtgctcactgagtcac

SEQ ID NO: 33742 - DNA, 483 bp, Mus musculus
  source 1..483: mol_type = other DNA
tatctgatattgattcaaaattttgtagcatcaaaaacgtccttttctaatagtagctaacaaatgaaataaaaattacaaaacaataatattttaattcatttttgtcagttttaatatgaaagtaattaagtaaagaaccacataagaaggaatatgcccaggacaggtgcaatttttataggtaagttctaatacataccccaaataatgtttaggcaatattcacaaaaatcaatattgtcagaaactacacatgactaactcaaggtagaggtttgtcaaataataagttgaaacaacagtgaaaatcattaatattctttctctcagcccataggcaaattatacctattaataagcttacatttgttagtgagatctcactgaaacttaaaacagtgagtgctcactgagtcacaggtctcatgatgtccaggaacaggatatttccccccagtcaagccagtcatgcatggattt

SEQ ID NO: 33743 - DNA, 519 bp, Mus musculus
  source 1..519: mol_type = other DNA
tagctacatagtagattaaatgtaagattgatgctctttctctctctcagtgtgaatatatgaatacatggtgtgtgtgtgtgtgcatgcatgcatgccaacctgtgcacatgcgaggttaactgctttatttaaaaaaaaaaaagaatgtactgtctgtctgatgtaataaactttatatagaacatgctcagagcaggtccaattttagctcctctcctgttatgataagcagtcttgtgattatctttagaggctagtcaaaatatactccccaaatatgattttccctaaagggtgtatattattttctatgcttcacagaaaagaatcaaacctaggaaaagacttatcataaatgatattctaatagatgaatcaaattataattgataaaaaaaatattgtccttaaggaagaaacactgaaactgaatattgagtcacagtgctcaacaatgataatatgtcacgccagtcatgcatggattgcttgacagacagttagttatataaagag

SEQ ID NO: 33744 - DNA, 581 bp, Mus musculus
  source 1..581: mol_type = other DNA
gtgagccatgcatgcaccactggggtcacttagcctcaggctaaaccaatggtacttttcctagagggacatggacattgaagctccgacagccacagaaacttgatgtgcttgactgaagtagattgaagccagttaaaacatactcttatcttcttcatgcaattcacctgtttataattataaggtaaaattgttttcccattctttttaaaaatgttttttaaattataattccaaaattaaattttggaagccctcttggtcactttatcaagacaagaaggctctaacaatagaactttaaacatttaatgtcctatatccagttagtgttctagaatactacatagagctttattcagaaatagtcattaaatttgaggaccaggccttagtcttatgagaggctataaaatgacaaacagctaaagtaggtgcttttttttttttagatccagcaaagattaaagagataatggtctctgagtcactgcactttacccagtgactatgtgtccaggaacaggaaaacttggttatgaaattgttggatgatgctacaatgaattgtctttaca

SEQ ID NO: 33745 - DNA, 370 bp, Mus musculus
  source 1..370: mol_type = other DNA
tggcagataaaatgtaagactctgtctctgataattcaatgtactgtttcctttagaagttctcagagaaactttagtggttgtgtactatatttggtctcaacaattcttcacataagtgattatatttaggaaggtgagaatttagtttctcttcagtcataataatctactctgtagggcatatactattttctattgttcacaggaaagcactgtctcttggaacagaattatcaaagatgatgctgaaatttttaattcctttttttcagcacttaggaaaatttagtctaaaaattgtgtaccacataaaaaaatatattgaatcaagaaattactgagcagagttctgattaagccagtcatg

SEQ ID NO: 33746 - DNA, 275 bp, Mus musculus
  source 1..275: mol_type = other DNA
tttaataataaaccttaaaatatcaggaagtaatatttaaaaatgcaagactgaggttctctctctctctctactgtcatgatgtgagtgcaattatataccccaaatatgtcatttaatatgacagtactgacctcctctctgaaggacctatataggacatatgacctgtctctgggaacagagttatcacaggtaaataatgtctttaatcaataaagagagcttagacaaccagtgtgatcacactggatgacagccagtcttataaagag

SEQ ID NO: 33747 - DNA, 393 bp, Mus musculus
  source 1..393: mol_type = other DNA
ctctctctctctctctctgtgtgtgtgtgtgtgtgttctgactgagtcttccatgtactgtcatgataagcattcttgtggttgtcccaatcctgaagatggtcagatattttttatggttcacaaagaagaatcaacatgatctatctcttcaacaaggttgtgaaagatgatgctgaaataacatccatggtcccctttaattctattctttcagcccatacgtaaatacctaggacacaatttgtaatacagaaaaaaaatatgtttgtaatcaaaaaaatctatcagatcttactgaaactgtaaacctgctgagtcacagcactgaatcagtgatgtccaggaacaggatatttcaaattctgtagaattctggatacactataatac

SEQ ID NO: 33748 - DNA, 503 bp, Mus musculus
  source 1..503: mol_type = other DNA
agccacgaaccagtggtgtcacctagccttggttcatagacaatggcaatctcatgtcattactttcagaagcatcggtagccacagaaacctgatattgataggaaacacagctgggtctagttaaaacatcgttttactctaagaacaaactgatattattttatattcttttttaatttttttaaattaaaatttgattaccttgaattgtccttcttattcacttcatcaagaaacgaaggtcctaacaacagtacattaaacacttaatgtcctatttcctgaaaggacaaagcttccaaatattttgattatatagagctttattcataaatagttatcaaattacacatttaagtggcaggccacatattagtcttataaaagtaaataagtctgtgaaactgagaaagaaggaatgtcctctgagtcactgtacttgactcagtgactatgtccaagaacaagatatttcctatttgggggctactgggtggggg

SEQ ID NO: 33749 - DNA, 399 bp, Mus musculus
  source 1..399: mol_type = other DNA
tggtgagcagaagaccatcttcacactcgcttataagagaaagttttccttctttctctgaaggagaaatcccgtgttagctgcttcatccttttgcccaagtctttgccacttttgatagaaaagtggctggactaagtcactttggacctaagcccaaaggtcttctgtatcctttcttggagaaatggctctcaaaagtaaaaagaagaatgtaattttatgatttttgtctgttctgtttatttccactaaattgtcccaagtagaagaaagtaatgacattaagtcatagcgagctctcttgatgacacccttaaaacagggtttctgatacctgatttctcagaattaattctcagatggcataattatcagcatgtgaaaaaaaagtcacat

SEQ ID NO: 33750 - DNA, 371 bp, Mus musculus
  source 1..371: mol_type = other DNA
tcaaaaattcaacttacagaggcctctattgtatttggactatcagtcaaccagcttacttctagaaactgctgtcactatctttaaagagacactactatgttagataaggaaattgagcttaacttcaaaatttgccactggttggactaatctgaactctgggagtatcatagctatgagtgtcctcaggacagtgaaattatactaaatatttttacattttccagatctgaaatgaaaatgtttttttaagtctcagtaaacattgctttttccaagaagaatggcttgcatcttatcttgcttttaaagatacagtgtatcagtctagacaatatagtttatgctttaaactgttttaaggtacc

SEQ ID NO: 33751 - DNA, 481 bp, Mus musculus
  source 1..481: mol_type = other DNA
tcacacttgatcataactaagaatgacatcatttcatctctgagacaaatattatatgatcatgcttatatgtgctccaaaccacatgattttatatataatggcaccatgacatcataagtgagcaatgatgcatagcacatttcaaaatgactgagagaatttttaatgcatttgcctcaaagaggcaataagaaatctgaagtgatataaaataataaactttggtttgatttttaaccagtgttttcatgaagcaaaacatccctttttacctcatgaatgtgaatatgatgtggtaatcaaaaattttcaactaaaaaatttctaaatgtcagtctggaattttactctatatccactccaaatactgaaactggatatcaggccagctgacatactgtcaaatagtaagcatgaatacaatgttaacagattttcatatctacttccttaaggaagggctcactttctgtataaa

SEQ ID NO: 33752 - DNA, 181 bp, Mus musculus
  source 1..181: mol_type = other DNA
ttttcagatctagaaataactactgttaagacaggccaggcctctttctggctcagcttttgatgtgcataaagttataaatcatccaaacagttatcagagtctataatccattatttctgtatgacagcaggtgtcaggtgacatcattgtcaaactgtcagtgtcattatcttcttat

SEQ ID NO: 33753 - DNA, 308 bp, Mus musculus
  source 1..308: mol_type = other DNA
aatggacaatttggttctgagcttgtatagtgtacatttccaaaaataattatagaaagtattggttatcatcatgaaatgcaatgcattaagcatggtatccttagaaacttcgataaatgtaagactaatgcttccatcaacaacatatgcccttataaaatcaagttatgttaattctgtacagatgggctaatagcaaacatatgtcccttcagatgtgacaatctcctgtgctcaggtcagatgatctcagttaggaggggactcccacatgttccaacactggagtggtgaaaccagtctac

SEQ ID NO: 33754 - DNA, 342 bp, Mus musculus
  source 1..342: mol_type = other DNA
tctaacaaaagaaacatggaataatatcaattttcataaaagaacaagaaaaactttactttgtaaaaatatgcagattcttatttgtatttaagagacagccatctatgaatggtttcaaagaaaaggagctgagttttatattcctacttttctttctgtgagatagaagctttgttctaaagtcttcatcaaacattaatgagtacttttagtggctctgtcattcagaaacagagttcagaagacagaggactctgatgtcacagatggaagactatctttcctcttcattctatattaagcgtatagcctagagctttcagctggaggatgtataaa

SEQ ID NO: 33755 - DNA, 552 bp, Mus musculus
  source 1..552: mol_type = other DNA
tttggctcatatggaagaatacatgtacattatttcgcagaattgataacaaaatcaatttttctctagaaaacattagaattttaaaattatcttacattaggttaactttataaaatatggggtttccatgtgaaattttatgcatgcatatgacatattttgactacagttatttttttttaaagaaccaaactttcctcctttattcagcaggctaaatatatattgtttgttaagagttttcaatgatctatagttcttagaaggataatttattctcgactttcactacacacataagtaattgttttttatatttaaaagttacacctaaaaaggaaaactgtacaggtcaaacaggttatgtctatctgtgttatagagccacacagatagtattcaagtagccatgtttgaataccatagtttttctctctagagtgagcttgttaaaatctctaaagcacatgcccttcaggtatgtgaagctaagggggaatccatagtccatgcctgagaccactgtctcacaggttgggcagagcccgg

SEQ ID NO: 33756 - DNA, 562 bp, Mus musculus
  source 1..562: mol_type = other DNA
gaattaatagatatttctcagaaatggaaatacaaatggcttccaaacacttgaaaaaatcatatttgataatacaagtaattatggaaaagggacctattatatctagctatatacttgtggacatttactcatactgtcatgtttacattgggtttttttttcctctaaaagaagcaagttattttaagagaaatggaaataacttaagataattctatcaggtgaattaaagtagttgcagaaagaaaagtatgtatattctctcatattttcattgctcaatttgttatagagaaataaagttgtatatgtgacatgaaatttaaagtgaagctttctatcaaaaatcacagttttgtactttaaacatgaaatttggagtagatgaaggttaacaggaatccagtttacatcatcatccatgctggatgtagcatccatgagctccacagaggaaggctggtgaggaacacctatctgttcatcactaatcagaagatcatgtgagtgtaggcctctcatgcccaaccactgtctcacaggtttgggcagagcagag

SEQ ID NO: 33757 - DNA, 623 bp, Mus musculus
  source 1..623: mol_type = other DNA
cctggttgtcaacatggagaaacagatgtttcaaaacttcacatgaatatgaagagcaaagttatgactctgcttcttctaagagtctcatactgcttcaatcttaggatttccccagttaagttctcatcaggataaatttaaaaacagattcactgactttggcattttcatattttttgttgacattaactatacaaaatagtgatattcactgtgaacttttcagatgagaatgacataggtcaatcatatctatcactgttaaaccattttgaaaaaagtgtacaaccctttatgaataattctcattgatattgcagtattatagacacaataaacagattttaaaatctgatctcagcttatctgggctcagctgggtctcttgtgaccaggagtctatactgacataagtactcctatgacagaaatccttgaaacatgagattaaggatgacaggaatccctagctttatgcttaagtcatagtccaagatgaatgaaggatccatgatttggtcattgctagtcacaagaacatgtgagtgtcaaggcagggccagtcatacccagccactgtctcacaggctagggcagagcctaggatcagaataaaaggg

SEQ ID NO: 33758 - DNA, 509 bp, Mus musculus
  source 1..509: mol_type = other DNA
gtacatatgccagatggtgctttaggcaacttaactggtcttagatcttccaaaatcacccaggatctatatcaatccacttggattataggcatgttctatgcatctgatgtttctgtttttcaattatttttcttaaagaagagttttcatatctctttattcagaaagtcaaaagagacatctatgaagaatctgccataattaattctgttattattttctaatactttattaaaattaatagcattaagctaattttcattaatactttaatagtacagttaaaaagggaaatattagggccaaaaaaaggctcagatttaactatttgatgcaaccacatggtttggcatactacacatagctatatagctggctggcttgaatactgcagtaactgaaaaatgagtagttcctaagtttgatactctttaagtatgtgaaattaaggatgatgagaatatttggtcatcaccgagacagccatccatgcccagtcactgtct

SEQ ID NO: 33759 - DNA, 396 bp, Mus musculus
  source 1..396: mol_type = other DNA
ggacattttcatagacattatgagtatctccatacaatttacctttagagttacttcactgataagagcctctcttaattgctgtgtttaaaaagcagattactcaccccatatttagcagtttacatacatgtctgttgtataccatataaaatgatgctctttttcatgagacatttttatctgtgacttgaaatttcattaattttcacatattccaaatatattctacttaatattccattgtgatagtttaagtgcaaaatggaaagttcatacacatagggacagttatagaagtgtaagaaacttcaaggttttattagctcaatgtgagctacagcatcttctaagatggttatcacgagccactgtatcacaggctgagacagagcc

SEQ ID NO: 33760 - DNA, 548 bp, Mus musculus
  source 1..548: mol_type = other DNA
ctgaggcaaatattttatattttaattgtaattaaatgtcctgaatccttcaagaacaaattgatgtgttcaaagagcatattacccacgacatatttagcaatttgcacatatatctcttagaagtcatataagagaatgttctttttctgtgagacatttttatccatgtcttgactggatatcactgattttcacatatcactatacacattctcctgaatgttccatgggaatagttaagtgggaaatgatactagctcaataatctttcagaatgacacaccaacatgtcttggtgctgagccagagccatcatgcagggttttactgctgtagatgtctaaagtagaagaaatttcaagatatcagcggttcctaatgcagatacgctgcaggaattaaggatctatcaatccacttccttatctcatgcctaagtcatgctcaggaatatcttgtcatgatcagtcacaaaaccatgtgactgtcagtaggaagggcctcccatccccagccactgtctcacaggctgggacagagcccag

SEQ ID NO: 33761 - DNA, 501 bp, Mus musculus
  source 1..501: mol_type = other DNA
tataatttaattattatgattgcaacactgtagttaagaaagacaatattacattctgtgaatctagatttacattagattctaggaatcaatcttagaccctcttcaagagagcagtgtgcattctccattgttaagatataagagaatgttcttttgttctgagacatttttatccatgtcttgaaattatattgattttcacatatccccataagcaatatcattaatattctgtggtaatagtttaattgggaaatgatactggctaaatagactttcagaatgacatctccacatgtctttgctatagatgtctaaaatgtgtccacatatttacaacttaaaagtacttgaattgaagcagacattcaagatactaaaggtgtcatctatgcctaatgaggaatattttgtcatgatttgtcacaaaatcatgtgggaatcacttggatggcatcctgtctccagtcactgtctcactggctgggatagagccca

SEQ ID NO: 33762 - DNA, 276 bp, Mus musculus
  source 1..276: mol_type = other DNA
gtgaatacttcgattcttcttagatggatgccaataagagcttgctgacaggagcctgatatagctgtctcctgagaggatctgccagtgcctgacaaatatccttatatgccccagtataggggaacatttgaaatgtaaataaaatatctaataaaaaagaaattagatacttatgtaatgaattcacttcctcattgcatgcctgtcatgccttaagatagggcatggaatcccatctccagccactgtctcacaggctgggatagagctcag

SEQ ID NO: 33763 - DNA, 434 bp, Mus musculus
  source 1..434: mol_type = other DNA
tgcaattttcactgctgaaacatttctccagttcatattatactattttttttaagatttatttatttattacatgtaagtacagtgtagctgtcttcagacacaccagaccatattatactatttagtggtagcagttatcatacatgtagcaggtttcacacattttgtaaacactgatatttcatttactctcaaaatattctgataaatattgtcattaatattttattataatagttgaagtggcccaacatattatggtgctgagccagatcctttgtgcaacgttttacattgtgcaaggtagatgtatacaagaaacttgaatattttgttagctcgtgactgattcctactgtgtgggattaagaattcaggaatccatttcctcccctcatgtttaagtcatgctcaaagatcatctttaatga

SEQ ID NO: 33764 - DNA, 585 bp, Mus musculus
  source 1..585: mol_type = other DNA
attttataattcaattgtatactgtatgtgcatgcacatgtgtgcgcatgtgtatgtgtgtgcttaaacatatacccaccattgtagttatgaaagacaatgttacatgccatgaatctagagttataaggaatcaatctcagattctcttcaagagcagaaccactgaacatttagtactttgatataagagggcatttttatccatgtcttgaaaattcatgattttaacatatccccataaatattttccttaatattatgtgatcatagtttaactggaaaatgatagtggctaaatagactttcagaatggcacctcagcatgtcttgtagatgtctgaactgtgcccacatattcacaacttgattcaaggtttttccatgttagcatgggccaccgtggcattaagtgattcccaatgggagtacttgaggatccaagcatctatttcctgatttcatgcctaagtcatatactaagttagatgcagcttgcctgcttacagacatgatctgtcacaaatatgagtaggcatgccatcccatctccagtgactgtctcacaggctgggatagaaagga

SEQ ID NO: 33765 - DNA, 499 bp, Mus musculus
  source 1..499: mol_type = other DNA
aattatgtcattaatgcatattatatttgaattattttattttctgtgagatattttaaaacatgttgtttattgaatatctccatcttcatttaatttttttttcaaagataatattgtattttctgattgtaattgatgagcaatttttcaaatgatttttctccttaatattccatggtaatggattaaatggaaaatgaatagcctttgagaactacatctcaaaatgtcttgatgctgagtcagatgcatcattcagaattttactgctgtagatgtctaaagtgtacccacataggtacatttggcaaagtacatgtatggaagcagacatacaagaaacatctaggttttcttagttcaacttgggctacaagttgcatatatcatagtaaattccagcagaaaaggtatgaattccccagttcatgcttcagtcatgctctaagatagatgcagcatagccattatctcacaggctgtgacagacactggg

SEQ ID NO: 33766 - DNA, 478 bp, Mus musculus
  source 1..478: mol_type = other DNA
ttcagatttttttgaaactaaaaatacttcttatggtataatttctcattgttcatatttttctatatactcacaaagccaaactcactgagttaagcttgtagtttaataagaatccttttgctttaaatgcatctgaatctttaaaacattccaatttacatccattcatctattcatttcttgaatgtcaaaataaatcatatattatcttggttacttacactttcccatagtaattaattttgtaatcctacaaaggagatatttctattattatgttaagatcagaaatctgaggtttaagattttgagtaattttcccacatttccaaggactacttttaaaatgagtattctgtgcatacaacactagatgaaaaattagttttatctgtcttggaaaaggacttcaggaatacctacctcatccacatctaggaatacatgactggagtccagtgtcatgacctgtcac

SEQ ID NO: 33767 - DNA, 429 bp, Mus musculus
  source 1..429: mol_type = other DNA
gtgatagctcactaacgcaacagtgctaatacttaagaagttttaaagtaaaattaatatttgcttccatgggctcaataaggctttagctcctacaccataatagagttatctattcagatagttaatctctagagttagtatttggtactaatagaaaagatactctgtattactaaccaaaggctgctgagctactaacttagtatctgtctcagtaatgctctaagagtgtaaggcaatcatgtcatattttggcattaatatcttgcaaaattatggacctaagtaatagagatgttacatatttactgaattagtaaatgagtgagtggtgaacagatatttgtagtctctaactaaccatattcctcttgaactattcccagagagagagtcatcttcattccagcctgtgaaagtgactgc

SEQ ID NO: 33768 - DNA, 355 bp, Mus musculus
  source 1..355: mol_type = other DNA
taactattgtcagtctgataaaaggtaatggagatctacaacattagataaaatctatttactttaaaaaattattagttttaacaaagtgcagtaaaatgtaaagaacaggactgctgtatagcatcagactgggtcatagcagatgcacattgatccagttgcatttaccaacattgagaaaatgttggctattttgaacatcattcttggtaagaaagatttgtaagaaagaattgtagttgccaagataattttaaaaagattcatccattttattaacttctagtttagctataaaggaaaggctgattgctttacgtcaaggaatgcttcctttctttatataaacaca

SEQ ID NO: 33769 - DNA, 437 bp, Mus musculus
  source 1..437: mol_type = other DNA
catagactacagcagtattcaatagtgatcaagagatattattcttgaattttttccacatttactgtattgaggaaataaaatgtggcttgtattcaaagacaattcaatcatgaaagactggtagcaatacttactcattttatttttggcccctcaaaatattcaactaggctatagattttaatcctaggttctggaatctatttctggaaatgagactcaggtggggtctgagatcatacagaatctattcagttcccacattacctagggattcgtgatgacctccccatgtgtgaagtagtgagatgtttcatgaagaagaaacatatttaggaaaatttatctcatatttaggaaaattcagtgtcaagtagagacatgccctgcctctgagtgaacaggtgcttcatttaaatggcatcaaattgctt

SEQ ID NO: 33770 - DNA, 383 bp, Mus musculus
  source 1..383: mol_type = other DNA
tgtattatttattgttgcactttttgcgagatctataataaataatctgccaaaatgtgtatttgtggatgaatgcatatagaacatgtgacatatacaacaaaaagatctattttcgcatgataacagtcatgattggattttaaaataaattgcacttaaagttcttcttaatgataaaagttgtgagtcatctctaagtaccatctgaaagtcctgtcccataatttttgatctgctttaaaagcttgagccttatgcttgagctcttcataatacatccatgataaaacattgcgatcccatcaatgtattcaattacatctccatgttaataatcttaagaggtcaaaatgattttgcagtcatgagtgcttcctggt

SEQ ID NO: 33771 - DNA, 498 bp, Mus musculus
  source 1..498: mol_type = other DNA
aataatgagacatctttactatgatgatttttattcacaatataattaattataagatataagtaactgtgtatatctttttatgggctaattctaagccataaatatttctttctgtaagaaaacacacatatatgatgtgatattttaacaatcaaaatatttaaattgtatgtgaattactaaagttggtaactatagcccaaaatacattttactcaagtataatatcacatcatgtaagatttcagcttacatgaatttacaaatatcaagcagaggcatcttcatatgtgtaatgcaattattattctatttaaatttgataacctgtgttcagaaattcattgttagaagccatgaggttactcaaggaaaaacaatattttatgatttagaattcattaacaatcatgccaaagaaaataagatagaattattttccaaggcatggatataccagaaaaaaatcccactgggcatgtgtctaggtaacgg

SEQ ID NO: 33772 - DNA, 347 bp, Mus musculus
  source 1..347: mol_type = other DNA
ctagtcggccattggaaatgtaaatgtaataaatacccaactgaaagttaagaaaataagttgtaaatggacatatatctaagatttttcccaagtagcagaaaagagtaggatgtgcttattcttagctcaagaactgcttaagtttttgctcctctgcttctggtcaccagctgaaaacatgatgtcctccacagtgcagcctatctcagctgttgaaatttaagtcactcttgaagctataaaataagtatggtaaatacctcatatccttactaggcaggcatgagtgcaaagtcacaggatgatcctggctctgtcaagcatgcttggcctgtgcatcacac

SEQ ID NO: 33773 - DNA, 601 bp, Mus musculus
  source 1..601: mol_type = other DNA
ggcattgaattctctggagatggattgaatcctctggagattgattgcaaagagttgataatataaatgtgtatagtaggaatagtactgctaagtaatgagccaactctacagcactattggtcaaattatttggtagcttttttttttcattaaaactgtaggtaacaaatactcaaggatagtttgcaagatgatttaagtagatcagtctcacatattaaaagttataatgatttgttctcatcaccagaaatcctatgatgagatgtctgagttccatgagatcttcatggggattgaagttcaataatatagtcactggcttcatccagacatgacaggatactgtggattggcaatgcactaaagcttgatgacattacacatacgtagattacaacatgtgatatatgactctgtatttacaactatatgtattcatattttcaccaacccatgctatggcttcacacaagaccatggacaagatcttgtatttaagaacatgaagtcagagacatcaaaatttatggaaagatgatgaatggatgatcctggctctgtcatcccctctgtgaaagcatcagcatgcttgggc

SEQ ID NO: 33774 - DNA, 490 bp, Mus musculus
  source 1..490: mol_type = other DNA
gaacctcatctgaagtgacctgggagtcttggcattgtccatgctgggaaaagactttgcaatgcagttgtctttcacactccttcatccatggtttataaactttataagtgaccaggataatttcattaattgtggtgcagtctactccaaaataattttatcattttatacaggtaaatatggataaaatcctttaccacattacactgaggtattgtactattaataatataggaccttcatagctaatgcattccacttaaagggctgagtgatcagaggactccaaatcacatctgacatttttctctgatttaaaaaaaaaaaaacttacacaaagaaaatgtattctatgcattgctataaagcagtgacagagattgcttaattcttccttgtcagaaatcttggacatgaggaagatcattgggtgctgccacctcctctgttgtgaaagcagcagcatgcttgagctgtgcatcacaca

SEQ ID NO: 33775 - DNA, 425 bp, Mus musculus
  source 1..425: mol_type = other DNA
tctaaagaacaactggtcattttggtaactatagtttttaataactttcttttcattaaaactgtaggtaacaaatggtacatttaaatagaccagtctcatatattgtaaattctattgagttgtttgagatgtatgagttccaagagatactcttgggaattcttatctcagagtatagtttacatataaggtgaagcaaagttcattgacatagcacatagcatacaacatttgccgtgtaatatatgactatttacaactgtgtgtactaatattttcacctatttcctaagagatcataataggtggagaagaacagcctcacctctttcccttactaggccggcctgagtgagaaatcagagagttcctggttctctactagcatcagcatgcttgggctgtgcatcacacacctgcca

SEQ ID NO: 33776 - DNA, 209 bp, Mus musculus
  source 1..209: mol_type = other DNA
tccaatgattgaatcagaggcagtatccttaaggagatgatatcagaaacaggagctccataggctaaacaggaagaaaccaccgttgtgattctctctagaagcatctggataaaagccagagggttcatcacatagcctgcagcctgcgaacagtgcaggtgttctcctcccctctctgtgaagtgacttggcagctgagcatttga

SEQ ID NO: 33777 - DNA, 356 bp, Mus musculus
  source 1..356: mol_type = other DNA
tgacttcccaggggatttaatctacccagggagcattctttgtagggaaaatacgttttgtcttccatcataggtaaaagcttctgtctctaccttagatcatctatagaaaagatatagctgaagttccacttctggcaacttcatttggccagccagaccatatgtagaaatagggccttcaatgatttctgcctacttggaggaatttatcaatgtcaaatgttcatggattttttttggcatgtcaaattcagacaagaagagtccatattataaaagggccatttaatttcctctactttctattctgaagaagaaacagatgttatctttacctgtgcattaatacctca

SEQ ID NO: 33778 - DNA, 348 bp, Mus musculus
  source 1..348: mol_type = other DNA
gtatctcatgacatgacaactgaaaagatgaggatataggcagaattttacatgtcactcagaaatgtgaataaaagctgaatcctgtgaattaacgtgatcaaattgggaggagtcatcacacggtttttaggtctgggctactttcagaggctgagcagttaaggaaaacagccatttcctgatcatgtttgtggcaactgtgcagaaattgacatggccccttcatttatggattatgcaaaaaaggcataacttgtacatttttttcataagttgaagtagatagatccagttcaaatacagcttttcagatgaaaaacacacacctttaatctgagttttgag

SEQ ID NO: 33779 - DNA, 329 bp, Mus musculus
  source 1..329: mol_type = other DNA
ttgacaaatatattcctctttttcaaatccacagggccataagcctttttcttatcagctgtgaaagagaatagaacatgtaaaaaatactctgaaaagaataatcttcaaatatgttcttgaatgcctgaatgaagaaacaaagacttctcttactttgcaggtgatgtatcatattccctgggatctcaggcctgtgcaaattactgctgagcccagctcattagaaaggggtctcctgctaagccttggatgaatcaagcctgcttgtagggtggagacatcctgtctaaaatacatatgagagccattaaatcctctataaaagg

SEQ ID NO: 33780 - DNA, 555 bp, Mus musculus
  source 1..555: mol_type = other DNA
tttgcaacacatcaaaacatgatgtatgttatatacatattctttcccaagaaacatatattttcccaaaaattcatcttaaatacttctgaaaacattacttttatttgaagcccttcaaaaaatagcttacacatgatcagagattatttcttcattcctgtttcagaatacatgacattcttaaaatgtatatatgctataaagcccatattcaatttttttcataatggttatataataaggataaactaaaataatgattacagcgcattgcaataagatagttatatgttcaaatcttggttcttgtatcatatagccatggctttgaatttaaatctatgtctttatctgtaatgtgggacaaacatacgtatgcaaatgttattagacaacatgttatagtaagttctcaataaatggtaactattatttcaaaaggaactgggttcatttgcaatgaaaaaaaaccctttatttggaaggtggggccactaccaccctttctgcaatcatcttagagatggttaagtttgattagaaatgaatcag

SEQ ID NO: 33781 - DNA, 293 bp, Mus musculus
  source 1..293: mol_type = other DNA
tagatctgtcttaaagtggatgaaaggaacattcagaacttgatggcatacacttttaattcagtggacctctaggagtttaaagccatcatgcaatggcattcttgatggtgacactatgtaatattgtactgaaagctaactgtatagtttaataaaagttgaatgtaatgacatcagaatccaaatgtcaaaagtaatggaatttgatgttcagaaggatgtacctttattaaactagttaactagttttatttaagagatttggatttagtagtggctgtagagcctct

SEQ ID NO: 33782 - DNA, 482 bp, Mus musculus
  source 1..482: mol_type = other DNA
gttttgttagcttcttacatactttggaaaggagacaaagattaattaatgtacctaataataaagacattcttctccctgtccccagtacagagggaaggcagcaatgtggatgttcatgtctgatctccttaaatgataaaaatgccaatcatattttaaaaatagcattgttttgtgaaagcaaagttttgtatatctaacaatagattatatttttctcacttggcctttgggcaaggagaacagaacatgaaaactgctgaatcaaccagtatcttcaaccttgtcccatgattaatcagggcttcattttaaacagagggaggaatcagatgacttcagaggttgatttgtcaaccagaaatataattatgtcctcgtttcacagtacatggaaaagagatctttcctcttctttttaatgaatctgataaggcttaactgaagcaaattacacccagagggtgtctccttctaac

SEQ ID NO: 33783 - DNA, 302 bp, Mus musculus
  source 1..302: mol_type = other DNA
tccaacactaactttttagtaagacttaaagattcaaataatctctgagtttgaagctagtctggtctacagagtgtgctccaaaaattgattgtacagatatacgaatacctacttttacaaggaaagtatgagctaaaccaaatcttttataagaatcatatcctgaccaaatatttagggtctataccttgacaagtattaattaagtaagactgaattgagctggattgaactgggctgagctgggttgagcccagaatgattcaggccctacataattaaaaaccctataaatagga

SEQ ID NO: 33784 - DNA, 290 bp, Mus musculus
  source 1..290: mol_type = other DNA
gtacttgccaaaagtgctgcaaagctggaagtttgtcatacaattcccaactttattggtttagctgcaagagttttcttaactgtcattttaaaacttgaaagcagggtgaaaattatctctagacaataatcaccaatattctgttggcaataaaaaatttaaaaaatcacaactgtttattaaatttcttctcccctaaagccaaaaatctttgagattccagcaggccgaggcctgcggaggggcgggggccggggcgggcacagcctgagtcaggctgaggggcg

SEQ ID NO: 33785 - DNA, 351 bp, Mus musculus
  source 1..351: mol_type = other DNA
cttcccctgggaacaggggaaaccccagtgctagggactgggctgtgttcgtctctaaatatcttccagaagtttcttccaaagagctttttagagccaagctgatcctcaccactcagtggtggcaaggctaggctgaagcccaggggccttgcttctgcactcaaccaggtcctaaggaaattattcctaaccctgcaggttcgcagagaagagcattcttccgcaatagggctgtccctggggacgggcaaagttaggatgggtggggagggcagatgcctgccctccaggctcctcccgctccggggcgcctccgccctctgtacccgcctcgcgtacaaagacgcg

SEQ ID NO: 33786 - DNA, 354 bp, Mus musculus
  source 1..354: mol_type = other DNA
tgtgtcctctagactatagttctaagaaatgatcattttacatgctgcaaagtgaatcctgccaattaaagtgattaaattaataagcatttatgatatttctaaaccatacccttaactgaaaaatgatttccggtgaggatttcccattttgtgagcactcagactgctgacaattccttaatcatgtttatggatgccttcatttatggaggagtgaccccagtaatcaaagtacactggtgaacatacaaaactagagggcacagcttttaattttttttttgcttaagatgaagtagttagatccagctcaaatacaaatctgaccatctgataggggcctatataagc

SEQ ID NO: 33787 - DNA, 450 bp, Mus musculus
  source 1..450: mol_type = other DNA
agtatctgagataattgaatcactgcagttgtttctgtgtcctctttaccttcattatacataagggcagtaataacaaatctttgatatctcttcaatatatgctgcagcccttggaaagcagcaaaatctctcccttttcaggactaattcctgtcaattaaagtgattgaattgagaagcatttaggatattcctaaaccagacccttaactacccaaattgggtggagtcatcacaaggtttgtggttctgaaggcaccttaatagttttgacttctgacatgttaaggaatccctgatcatttttatagatctctgtgcagagattgacatgatcactttatttattggcaagcaaagtgcatacctttaatttttttttcttaagtagaagtaaataaatccagttcaaataacacctttaacctgagttttgaggcaggaagt

SEQ ID NO: 33788 - DNA, 466 bp, Mus musculus
  source 1..466: mol_type = other DNA
atcatatgttgtcttagctggtttgaaccacccaccgtttttcatttcctttgtaattatcattttaaaactagtcaatcacaacaattggggtcaggggagcgtggggcagtcaccacctgtcccccactgagattcttctgttcccagcacagaaagaaaatcagtgacggatagtctttaaactaacaggctcccattagacagtttgggctaactctatcgagccagaccaagagcaatttctttgatagagacggttcttactagagtaaaagttgatatacattttcagtacacagacacatatgcgcgcgtgcggaagtagagactgacagagttttaaatgtatgtgcacgtgttctacaggctgtctcgctgcgccagtgcagtttcggtccgcccggattcggagaggcgccagcactgtgggcggcgcgcggctccgccctccacccgcccgcct

SEQ ID NO: 33789 - DNA, 260 bp, Mus musculus
  source 1..260: mol_type = other DNA
gcaggaggaggggttgggagcctcctgctcccagcctggcccctagccagcggttgttgggtaagcgggaggaggggggaggattccctcctctcaacttgtatatctgatcccatcctgcctgtcctaaaaaagttacagagaccaggttcaaatctcaactcaatcacgaattggaattggttcatgattatgaataatcactatcatgtgggattccaaagcatacagtaggtaattaataagtactagctcccttt

SEQ ID NO: 33790 - DNA, 414 bp, Mus musculus
  source 1..414: mol_type = other DNA
gagtccctggtaagttcccaggcagccatctaagggcctaaggcctgatggggtagttactacataagccatatcctgaactaacagtattaggacaaatactggtcgccattggtaaatatttcatagagttccctgacagaagctcctgtctgtgggtttggcaatccgctgcttattatccacagaatgaaagcattcgccagacaggccctgactagcccctgtagtgaggggctaataatgatctctcactaactgtgggcttatccctcaggaaaacttgttcaatctaatagtagctacagcttgtctggaatgactagccaagctccctacaaggaagatggggtcttccaagatgtcattgtgtcaccctgaattttcttgcctaggttgcaagattctgcccag

SEQ ID NO: 33791 - DNA, 323 bp, Mus musculus
  source 1..323: mol_type = other DNA
aaggcagatggagagactaggaacaggacagggacctgtttctccgtgccattctttataaaacgatttcaaaggctgttgtacaagggtgcaggcaccctaggatacatgcttgccctgcagttttgtttcaatttatctgttttataagaattttagcacacatccaccagggagatcccgggagctctctagctccccaggtgtccgtagcagaccctgccccagcattttgcaccaacagggttgctgcagactcattctggtttaaaaagaaaaaaaaaaaaaagaaaaaaatgcttcctggctcttttctctccttt

SEQ ID NO: 33792 - DNA, 278 bp, Mus musculus
  source 1..278: mol_type = other DNA
aatcaggcaagggctggaggattttgagttcaaaaccagctgactgtcacaggtcctgggggcctagctccccggcccagagcccctgatctgagtctgggcacagctgccccacgcggtgatccgcgagggcctcactctccctcagcgcagccgcctagcgggtcgcttttcagcagccgccgcagccaatccttctgcggactgccgtgagcgacgtggctggtgcccggggccaattagaggcttctggagtcctcggtcctcctctcgtgggt

SEQ ID NO: 33793 - DNA, 425 bp, Mus musculus
  source 1..425: mol_type = other DNA
ttaaaagactgttgaagacttgtcctgaatagcacataaaatggagtgtatccacagaaggacctgcttgtgcctaacagtagtttctttaactctttaaatattagcttaaatacaatagtaacaatatcatggaaagttgcagagtttttagaggatcccatccttcgactacttttagaaagtccatattttagtgttcagaaattatagcatgtcaaaattagaagttaaaccaaaccacttatattgttatcattggtttttatggataaaaatcctcctttaattattgtagccctggctggcctagagcttgaggcctctttttttaaaagtgaagccaaaaaaaaaaaaaaacgtgcaaggcggggttgcggcaactctcccactcaggcgcgccgcgggcagcccagaggcgcagc

SEQ ID NO: 33794 - DNA, 211 bp, Mus musculus
  source 1..211: mol_type = other DNA
ctgttcccacagaaggaatcaagattctctacttgtcacaggttctttacatttgataagcacctactattgcagtcttggtggtgtctgaaatttttctggaaaagtatgcagactcttgcccaactcctgattggggagtaacaagaccagctgctcttctggggtcttgcccgggttgtgcgtctctctccagggtagagaattactg

SEQ ID NO: 33795 - DNA, 421 bp, Mus musculus
  source 1..421: mol_type = other DNA
aacagtagtagtggtaataataataataataggaaattagctatgttcactcaacaaatgtttaatgagtattcatcatgtgccagcacaactcctggagactggactgtgccctcgcctcgcagggccaaccgttcctaacggttcgggtttttcaagcaaaccttccacaggtccacggccccggggcaaggcagggggcccctgctggcgcgctcctcccatagcttggccacggtgactttcggtccacgtggcgtgtgcagcgcaaggccgctggccgcggaatgactccgtaggcctcgggacacccacgagaggaggaccgaggactccagaagcctctaattggccccgggcaccagccacgtcgctcacggcagtccgcagaaggattggctgcggcggctgctgaaaagcg

SEQ ID NO: 33796 - DNA, 419 bp, Mus musculus
  source 1..419: mol_type = other DNA
attgttaccatattcttatgtgtgtatgtgttaacttattatagaatctttctagtttctgttgaaaattttaagatctagcagaactgattctgtgtctggcacagcaacttattgctaatatattgattaggctggctgattaaggatgagaaagttctgcactttgtagtacttagctagccaaccagtatataagatttttttttgcggtatagccctggctgtcctggaactcactttgtagacagaccaggctggcctcgaactcagaaatctgcctgcctgtgtgacaccgtatataacttttaaagcattttaattattgctatagttgtaaagtatatactagttgaatatgagtgacataagcaagtgacctcatgtctatgtcataatgcccaggtcacaatggacag

SEQ ID NO: 33797 - DNA, 352 bp, Mus musculus
  source 1..352: mol_type = other DNA
gcatgctttctaagaattctcttgtgctattggatcaaaactcttgctaaattaaaattattgaccactttaatatctgtacgcaaaaacagctgagctttaaatgctgttacataattgctgcttgactttggtaacactaaagttccgtatcctaatacttgaaataaggaaccgaattccaaatgaataaccgattcaagattgcaactagtgatctctgagtttgaggtcggcctgctttacagagccattctcgcagcgcggtggcccactagctccagcggtcggcggagcgggcgcgcgccggggtcgcgcggctgccggagggggcgggcgcgcgccggaggag

SEQ ID NO: 33798 - DNA, 293 bp, Mus musculus
  source 1..293: mol_type = other DNA
tgtggaatcttgtgtattctacaacatctactaaacaggcatgctttctaagaattctcttgtgctattggatcaaaactcttgctaaattaaaattattgaccactttaatatctgtacgcaaaaacagctgagctttaaatgctgttacataattgctgcttgactttggtaacactaaagttccgtatcctaatacttgaaataaggaaccgaattccaaatgaataaccgattcaagattgcaactagtgatctctgagtttgaggtcggcctgctttacagagccatt

SEQ ID NO: 33799 - DNA, 385 bp, Mus musculus
  source 1..385: mol_type = other DNA
atgatttactgatcattttctgtcgccacccaattggggacagtagcatccagcccctcagggcagcagactctgtggtgagggggagttagttcactacctaggctcacccctcagccttggctctgtgggcagctgctgtgggtaccctgaaatgtccatgggcatggccagacacataaacgagcatttgaagtcacaggaacatgtgaatgcatacatataaacactcctctgtgcatatgttttttgcatgtgtatatacacgtacatatgtgcacacctgtgcacaagtgtgcgtgtgtgcacacacacaccctgtaatttgaacagccaggccacttgacagcttcctggttagctgccctttcctggaaggcagcca

SEQ ID NO: 33800 - DNA, 356 bp, Mus musculus
  source 1..356: mol_type = other DNA
gaaaggaccagaattgagtttttctcctatatagacagagctttgtatccattcatcactggcaagtgtgctacctctagtggtactgcctattcaatcggattcctgtgaccatcacacagtgagagcctaagcttgggaagcaagcaagccccacccagagcttagctggctttgacttcgacctgggctacttgccaggaaaaagcacctgccagactggcttagactagtccgagtgaggtggtagaactctgaggaaagatgtactcagataccttgtcgtacccttagccctgggcgtggcccatcttcagccccgcccccgacgcgcctatactagggggcggttccgc

SEQ ID NO: 33801 - DNA, 236 bp, Mus musculus
  source 1..236: mol_type = other DNA
taagctaagccaatcttcttttagagtcttttcggtgtagtgggaccaaaagccctgagattgaaaatgattttccacttttctgcggaaagcgacagaacgttgggatgctctggcgctaagctacgcgggtccgcagagccccgacgcccccaaaatggcctcttaggtcccccggtgccgcccctcccgtccaccgggctggggaccccggttctgggttcccgcggtgtctg

SEQ ID NO: 33802 - DNA, 400 bp, Mus musculus
  source 1..400: mol_type = other DNA
ttgaatggactaatcaatttacttgagccaatccaacggggccatggaatctatggtttctgagaccttaataatctgatgataaaataggttttaaaaacaattctttagagagactcgtagatctctgagtttgagaccagcctgccctgtttcaggacagctagggctcttcattttgttgcaacaacagttgttggtgccattgggcttgaattggtaataaaccttgaatagaaaaaagtctaagaaagtatattatgagatattttctttggtagtgtcatttttctcagcaaaatttggaaactgtttgtgaagctaattaagacaaacttgactccctccgcggggcgagagggtcggtggggggagtcggcgtttctctcccccgcgccag

SEQ ID NO: 33803 - DNA, 402 bp, Mus musculus
  source 1..402: mol_type = other DNA
gatgataaaataggttttaaaaacaattctttagagagactcgtagatctctgagtttgagaccagcctgccctgtttcaggacagctagggctcttcattttgttgcaacaacagttgttggtgccattgggcttgaattggtaataaaccttgaatagaaaaaagtctaagaaagtatattatgagatattttctttggtagtgtcatttttctcagcaaaatttggaaactgtttgtgaagctaattaagacaaacttgactccctccgcggggcgagagggtcggtggggggagtcggcgtttctctcccccgcgccagagggaggcttcctttcaccctcggggagaggagctttcaacggctactcccggcgccgggtgcaaggtccctttaaggc

SEQ ID NO: 33804 - DNA, 185 bp, Mus musculus
  source 1..185: mol_type = other DNA
ggggaattcctcccctggactctgagtgtagtccagaatggtcttgtactggaggcatggtgcccgagccaccccgtgggtgcttagattcgaatcttatctatcaaataagttgatcaagccttgtttttgatattgatccaaaaagcacatggtaacaggtcctggtgcgctttataaatccg

SEQ ID NO: 33805 - DNA, 288 bp, Mus musculus
  source 1..288: mol_type = other DNA
tcaacttgtgttattttattttattaaagttacaggactttataacgtcattttctagcaaaaatttaaaaatatcacctactgataaaggcaacaatcaaacatggtagctatctgtggccattccaattttgtttaaacagagttcctgaaacctaagaaatttggttctcacaaccaaagtaacttgcttttatagatcctagacgggcccgggctcactgccttcgtcttggaggcagcaacgcgagcccgccggctgggcaccgtggggctgggcaggagctg

SEQ ID NO: 33806 - DNA, 393 bp, Mus musculus
  source 1..393: mol_type = other DNA
gaagggcagccctgcacggggttaacaggatcaggcctcagcctagctttgaggagccctgttaatgggcctcagtgagataatcctgttgggactagatgtcccaggatgggaaacaaagagttcttcagcaagcaatggtttactggtgagctttccaggtccctgaaatgtccatgggcatggccagacacataaacgagcatttgaaggcacaggaacatgtgaatgcatacatataaacactcctaaaatggctcagatgttttttgcatgtgtatatacacgtacacatgtgcacaagtgtgcgtgcgtgcacacacaccctgtaatttcaacaggccacttgacagcttcctggctagctgccctttaaccctggaaggcagccag

SEQ ID NO: 33807 - DNA, 298 bp, Mus musculus
  source 1..298: mol_type = other DNA
atggggaaaccttgtgacctccagctttctcttcttctccacagcaaggccgtgcagaacaaatcatactttatccttctgtgacctatgtaggagatgacaacctgacatcgagtcagctggtatggtcgagctcagaagatcattcactggacttctgcctcagcaagaagtacagaaattctctggctgcccttggcagaggacccgggttgtgttcctcgtgcacatgcacatatgcaggcacaacactcataacaaatgagaatctttttaaaaaagttataaagaagaatct

SEQ ID NO: 33808 - DNA, 303 bp, Mus musculus
  source 1..303: mol_type = other DNA
tcagcttataagtgcaatgaagatgtccagcctggtctacacagtgagttccaggacagccagggctacacagagaaacaaaggaataagccaaacttttgtcatttcactgagcctctgttaaggctttggaagcagcaccttgtcccagagtgaggaagagggaaatgaaggtgattgtactccttttttcgtcccctgacttacgaaagagttacggtaactcagtggtttacgcaaatgaatagtttatatataatttgcatgttcatacacttttggaagtacataaaatatcggtac

SEQ ID NO: 33809 - DNA, 314 bp, Mus musculus
  source 1..314: mol_type = other DNA
aaaggaataagccaaacttttgtcatttcactgagcctctgttaaggctttggaagcagcaccttgtcccagagtgaggaagagggaaatgaaggtgattgtactccttttttcgtcccctgacttacgaaagagttacggtaactcagtggtttacgcaaatgaatagtttatatataatttgcatgttcatacacttttggaagtacataaaatatcggtacactcgacttcagtagtgtcctgacaccgatctcccggaagaaaggctcgggcccggtccaacttgaagttgcgtgaaggccccttcaggc

SEQ ID NO: 33810 - DNA, 302 bp, Mus musculus
  source 1..302: mol_type = other DNA
tgccagctcccgtcaggggcggagaaaagggagctctcttaaaccaggccacgctcccgcagagggaggggccgtgcgtggtgcgtacgcccagaggcaggcggacgccaccggatgtttagactcaccccgatgacgtaatgtttgggggtggcacctcattttgtgaccccgtttgtagatgtgaggcacagtgtccggcggcggcctccggaagccaatggggagaaccttctccacagggcccaggccctttgtccaatatggagggccaatcccatacgggactgggtggggctcac

SEQ ID NO: 33811 - DNA, 328 bp, Mus musculus
  source 1..328: mol_type = other DNA
gcttttcagaagcgcttgttcaaaaaggccgcacccgactgctctgaagacagctacagtgtacttacatataatcaataaataaatctttaaaaaactctgtatttctatgccctttggagtatagataattagcttatttatcaaatatttacatttaatgattgaagtaaacaaaacatctatttttatgtcttgtaaaggctggaagaattcttgtgatgttttgtagtgcacaagagcttaacatcttaacaagagttcttagcaacccgatcaaagataccctatattggcctactgagccaccgtagactcacggtctcgc

SEQ ID NO: 33812 - DNA, 498 bp, Mus musculus
  source 1..498: mol_type = other DNA
ccattgggggccaggactccccggcagtggggagtgtcagtccagactcgaaccaggagctcgccaggatcgaggcgctagcctgagtcctgcctgggtccggacgctgaccagcacccggtcgggatgcaggctcctctcctgcgcctcgacccccggccgcactctgactgcctctcagtctaagagcgccaggacttaggggtccaggaaccccctcccacgttaccaggctagggggccgtgcttggcggcgacccggccaggccagcagccgccccagggggcggcggcacggatgggggaggggcaggggtatttacccgcccccccggggggcggagccaggggcgggttggtgcgggctgagaccctacggcctcctcccggttccagccgccaccgccgctaccgccgccgccgccctccccgcggccgccgctagtgagccccacccagtcccgtatgggattggccctccatattggacaaagggcc

SEQ ID NO: 33813 - DNA, 422 bp, Mus musculus
  source 1..422: mol_type = other DNA
aaatgactcagtgcttatgagagagcgcttactgctcttcctagaggaccagagttcggttcccagaactcaagacaggcagctcacagctgcctggaactccagttccggatttgatattctcttccagcctctgcagggcctgaatacacacacaaacgcttaaaaattttttttggtttgttttttttccttcatcctgtcagactcaatactggagttaagtgtttgtagcagttgcataaacaaaatgtggttaacgatgctgacacactttttaagtgattccacagtagtgtatgcactcatgagtgtctgttgaggcagtgtcactacgtagtagctattgtcatcctttgggtaaattacagctctcctgcctcacactggagtgttgctgacagctgtgatgagcaccaggc

SEQ ID NO: 33814 - DNA, 353 bp, Mus musculus
  source 1..353: mol_type = other DNA
ctggtgatagttaaaaaaaaaagtcatacaatttttaaaaagatttatttatttattttatgtatatgagtacactgtagctgtcttcagaaacaccagaaggatggttgtgagccaccatgtctctgaaagagctgagtgtgtctgaagacaacaatagtgtactcatattaaataaataaataagtacatacatacatacatactttttttttttgagtctgtagaccaggctggccttgagcgagggcagcttgctttacacaggtagctccaggccagccaggactgtaaagtgtgatcctgtctgtagaatgagtggccgctgaacttccgtcattgacggtcgcccg

SEQ ID NO: 33815 - DNA, 344 bp, Mus musculus
  source 1..344: mol_type = other DNA
ctaattgagaaaatgccttacagctggatctcatggaggcatttcttcaaaaatccttacactgagtgtgtgtgtctctgtatgtgtctatgtatacaaccacgtgtgggtggtgcacctatgcagagacaggctctctttctgaacctgggctcctgttctctaggctatcaggagcggggacctcacaattgtgcagcatgccccctctcccttttaaaaaagttaaaaaggaaaagaagttcatgggaaagtcatctgattctccactggaggactctgcttgcagggaaagaggacatgtcatggctgatactggccactagaggctctccaccactccc

SEQ ID NO: 33816 - DNA, 141 bp, Mus musculus
  source 1..141: mol_type = other DNA
gtcaacatggctgacaaaagtttgttgagggtagtaggggtcaccactcagttctggtcctctcactagcttagaaagagtaccacgcttgcgtcgcgcgaaccggaagacccgcctccagcgccctgagggggcctgcat

SEQ ID NO: 33817 - DNA, 256 bp, Mus musculus
  source 1..256: mol_type = other DNA
ccaccagatataggtgctgagatcagtgagtcactgagccatggagtcgctgactccagtcttcaatctgtgctgaagaaagctatataattcactcctttaaagatttgccctggctggcctggagctcactctgtagaccaggctggccttgaactaagaacctgctggtcacgcatggctcagcagccctactcctgcctgctctggctggggcagtctgtgtgttctacacccaaagggcctcttaggagct

SEQ ID NO: 33818 - DNA, 220 bp, Mus musculus
  source 1..220: mol_type = other DNA
cattcctcaaaagaaaggccctttattggggtccctcagccagcgtctagctttcatgacctcatcgcgcaggctctgacagcccagcccagccgagctctgggtggaccgtgcgctcggcgcccctccttagaggcccgccgcttgggcggcgggcccgagaggcggaccggaggcgggcccggctgggaggcgggcggggcggctggggccgagccca

SEQ ID NO: 33819 - DNA, 260 bp, Mus musculus
  source 1..260: mol_type = other DNA
tcccatgcagcagccctgaccccccgaggggaggctgtctagagggagaagccatctcctcactgtcaagacctagggtcgtctctctacagtctcccgactctcgagagactacaagaagtctgccagatccaacagtcgggatgccgggtgaccctgaaattccggctccacatacaggatcttgagtctccgatggatcatgcaggccccctcagggcgctggaggcgggtcttccggttcgcgcgacgcaagcgtg

SEQ ID NO: 33820 - DNA, 509 bp, Mus musculus
  source 1..509: mol_type = other DNA
gcctgtcattgaattatttatatttcaatttcgggagagcggggcacgttcagccattcttctccccacgatgagagcatgcattggttcttaggagccaccagctgcagccagagctaaatttagcctctgatctggctttgatgcagctgggtcagtgacccccaggctgtctgtcctcagccttagacaggaccatggctgccgcacagctgcctttgcctgggcgcagtgcctacagcactcccagggtgctgtgggggtcgaggggaggggaaacagacttggtgccctcttccttctcagtcactatttataattttaaggcttaagtgtctagaggtgtcacctactgagtgtcccttgtgctgtccttacctggggtcacaccagcaggcagcacaccatgagtgacagacagtgacagctggctgggagtgaggcagagatggctctttgccccaccccatagggtcttctggggaagggtagagagaacttagtccctt

SEQ ID NO: 33821 - DNA, 401 bp, Mus musculus
  source 1..401: mol_type = other DNA
agggactaggaagagaatttaatcttaggatacacactagacaaacgctcatgtgaagtttatgtggatgcatatccactgacagtcttgctatggtgagtgaataccacagaaacacacacaagctaattagttaatttcaattgcctatgttataatgctttttatttaaaatactttattacattttgtgtatgtgtgctcacttacacacataccatgactttcatgcatgtgcgcacgcctttaattcgaggccagcctggtctacagagtgagttccaggacagccaggactacacagagaaaccctgttgtcactgatctccaaaatcatcgtcttgcaaatgcattttaatctaggtagatgctataagaactgttttcccataattcttggc

SEQ ID NO: 33822 - DNA, 338 bp, Mus musculus
  source 1..338: mol_type = other DNA
tgggtcaagtagcacaggctggccttagcactgagtacttagtgttcagaactttcaataaatattttaataaccatgccattaccaaagaataataacttttgtttatcatttgggtttgttctttgcaaagcatgtacaaaaaacgaaagaaagcaattgaagaattctcggtctgtacttttttttcacttactaaagtttttattactggacctcaggggcgccaacttgcaagtgggagccccagtctgtagtggcagcccggactcctgcgccacaccgccccctcgtggtcaccccatgtggccttggcttcccggagtccagctcccccc

SEQ ID NO: 33823 - DNA, 292 bp, Mus musculus
  source 1..292: mol_type = other DNA
gggtcccattacaagtgagccaacaaagagcagtcagtgctcttaaccactaatatttgactttgaagaacaatttaggagggcttgccaagcatctacaaggccctgctagggtaacttttaaatttgtcagagaaatccacctgactctgctggactcgctattaggagacctgtacttatatcagttaaaatggtgaacagaaacctggtaaatgaaagacatgcaatttcatgtcccactattcaggaagtgtccggtcaagttcctccgagcgctgcactggttggc

SEQ ID NO: 33824 - DNA, 242 bp, Mus musculus
  source 1..242: mol_type = other DNA
tacactgattgcagcatgccatcgggcaatcccacctctttggagcaaatctgagatagggaggagattgttaaaggttccaatcactctcatggagatcttaacagataaaaaatctggtaacgaatagtacttggttaccttagcaatgaatgactagggtgttccgaagacggaagcgctgggtctcccctgcaatgcagcccctcctagcaagggcggaagcactccccgccccctct

SEQ ID NO: 33825 - DNA, 395 bp, Mus musculus
  source 1..395: mol_type = other DNA
ctctcaggttagagggccggcgaggagcccctgtcgcttcgcacgcccgcgcctccccgccgcccgcgcgcagcccggctcgcccggcgctcttacctgcggctccccggcgtccccactgcgggcgggggctccgccactccgggtcccctggctgcttctcggcacggcggggagttgagggcgggccccaggggctgagagcggagcgcagcgctccgcccagcttcggggcgcacggcgtggcccgcggggacagcggcaagcaccgcgctcggggacaaccgcggcccacctgctgcaggcgctgaagtcccctttgtctacggtggaagagggggcggggagtgcttccgcccttgctaggaggggctgcattgcaggggagacccagc

SEQ ID NO: 33826 - DNA, 274 bp, Mus musculus
  source 1..274: mol_type = other DNA
tgtggagaccctccaaacatagcgggcaccaaccctgccctaaccccagggaagggctggggatctctcaggttagagggccggcgaggagcccctgtcgcttcgcacgcccgcgcctccccgccgcccgcgcgcagcccggctcgcccggcgctcttacctgcggctccccggcgtccccactgcgggcgggggctccgccactccgggtcccctggctgcttctcggcacggcggggagttgagggcgggccccaggggctgagagcggagc

SEQ ID NO: 33827 - DNA, 295 bp, Mus musculus
  source 1..295: mol_type = other DNA
atggagatcttaacagataaaaaatctggtaacgaatagtacttggttaccttagcaatgaatgactagggtgttccgaagacggaagcgctgggtctcccctgcaatgcagcccctcctagcaagggcggaagcactccccgccccctcttccaccgtagacaaaggggacttcagcgcctgcagcaggtgggccgcggttgtccccgagcgcggtgcttgccgctgtccccgcgggccacgccgtgcgccccgaagctgggcggagcgctgcgctccgctctcagcccctggg

SEQ ID NO: 33828 - DNA, 288 bp, Mus musculus
  source 1..288: mol_type = other DNA
aataaccccaacacggaaagtctgtgtcgtccttcatcctgagggccagcactgccttcaagctgggagaacccagttttaattcctgggatccccacagccagcctgtctgccgggagcccaggaggagaactgctgtcaaaacctgtgttttcactctcagtaaattcagacctgtgacctttaataaactgtgatgagagatttaagtctgtgccaggcagcccctggggctgctggccctgcgcagtaagagcacttaggggaggggcgaggcacgtgcctctg

SEQ ID NO: 33829 - DNA, 406 bp, Mus musculus
  source 1..406: mol_type = other DNA
tttctatcctccaagtgcaacaacacctatgcacattaaatttttttttaattgttttaagaactgtgttctcctcagtcttgaaaacgagttcagatcccagcactcgtgtactccaagcagagctgacaggaagatggctggtgggcttccagtcgtccttgcacatgcgtgggtgcacatacgtactcatacacacacaatcagactgttctataagtccaggacacacaaaggctgggcaagcccagcactctctggtcaggggaatccctagaatcagcagatggaggaagatatccaatgccagcttcaggccccccacacaagaggctgggctttggggcaaacctgctccttgggaggggaggtggcaaaacctgtttgaagatgaggttacctccct

SEQ ID NO: 33830 - DNA, 424 bp, Mus musculus
  source 1..424: mol_type = other DNA
gaacatgttatgatgaagggacattttccccccacccagccttaggttctgaaggctcctctaaactctattgatgaacaagtcaaacattatggtaatgttttcctatcgtgaacaaacacattgatcacgatttgtcagtttggtaagctattttaataaataatatgtacagcaatgttgtaatttaaagtcctgtgaatccagtattcaggaaactgaaagaatttgtattttaaaaaaaattgagagattaatttacatcaatctcgtactatctgcaagttcagatgccattgtgacacatacacactttgggctcagaacccagcctctgccgctggggggcggggcaacgccggactcccggagtgccggattacgcacttcctcctggggttcggaggccgaaccctttagtggc

SEQ ID NO: 33831 - DNA, 457 bp, Mus musculus
  source 1..457: mol_type = other DNA
atggtttagattccaaacacactttgtgtttagtgtgtgtgtgtgtgtgtatgcgcacgcgcctgcattaacactaaatatatgcctgatgaattattctgtatatttggcataaaaacaaagatttaaagtaggttcacctggacccagtgggctgaagcccgagacacacctcgccgggcgaggctggcggccgccgcacaggttctgccgaacgtccggcacggactgggacctcgacagtcctgcagcgaggtgtgccgttgcccctcagccaggagaggtaacccgcccgccctagacctagggtctagagccgagagtcagggggcgggactcgaacccgccactaaagggttcggcctccgaaccccaggaggaagtgcgtaatccggcactccgggagtccggcgttgccccgccccccagcggcagaggctgggttctgagcccaaag

SEQ ID NO: 33832 - DNA, 397 bp, Mus musculus
  source 1..397: mol_type = other DNA
tgtgtatgtgtcacaatggcatctgaacttgcagatagtacgagattgatgtaaattaatctctcaattttttttaaaatacaaattctttcagtttcctgaatactggattcacaggactttaaattacaacattgctgtacatattatttattaaaatagcttaccaaactgacaaatcgtgatcaatgtgtttgttcacgataggaaaacattaccataatgtttgacttgttcatcaatagagtttagaggagccttcagaacctaaggctgggtggggggaaaatgtcccttcatcataacatgttcggggaggtgagaagaggcagaagagcgtcttcctcgcccccgattttctttcttattgaacgagtacatatgcaaacatccgccc

SEQ ID NO: 33833 - DNA, 389 bp, Mus musculus
  source 1..389: mol_type = other DNA
cgtgatcaatgtgtttgttcacgataggaaaacattaccataatgtttgacttgttcatcaatagagtttagaggagccttcagaacctaaggctgggtggggggaaaatgtcccttcatcataacatgttcggggaggtgagaagaggcagaagagcgtcttcctcgcccccgattttctttcttattgaacgagtacatatgcaaacatccgccctgctttcttggctccagagcagagggctgcggcggccgtcccttccagcggcaggcggagggaagagaaagggtctgttgtttttctctcttcctttctgcggctcaccgggctgctgaccggctcagacagcctcctcggtagctgagcaggcccctcctcctcctccgga

SEQ ID NO: 33834 - DNA, 274 bp, Mus musculus
  source 1..274: mol_type = other DNA
tgggccaggaccccccgtggggtgcaggcacaaggtgtctgtggtcccaacctggccccacagggaaggcagcgcacaaagccttctgtgtcctgacagcctggtcctctcccacgtctgggaggggccagagttggagactgaggtcatctgactgactgctcaaagcacctttcaggtaagttctggaactgagccctgacagctgctagctctgagattcccccacccccaggatgggggcgggggtgtctggagaatgtgataaggagct

SEQ ID NO: 33835 - DNA, 259 bp, Mus musculus
  source 1..259: mol_type = other DNA
ggagccagccccatgctttctcagctgcctggggtccctgtggctgagagggactgtgcacctgctgctccacagcttgcaacccaagcatccaggccccaggagtgggccaggaccccccgtggggtgcaggcacaaggtgtctgtggtcccaacctggccccacagggaaggcagcgcacaaagccttctgtgtcctgacagcctggtcctctcccacgtctgggaggggccagagttggagactgaggtcatctga

SEQ ID NO: 33836 - DNA, 630 bp, Mus musculus
  source 1..630: mol_type = other DNA
acctgcaggtagccaactaacttgagggcctctgggcctgtaattagcaagttacagccccataacggtataggaatgtgagccctttggggccgggacagacactaaagagtgtactccttccctcttgggatgggcacaagggggtcagaaacagaggcggcagcggcggcggtagcagtagcagcaacagcagcaacagcaggggccgccaccgttcctcctcggcctccacactcaggccccaggacgcacgcgggcccgcaggggcttctagcaccgaccggcaggccttctctggtccgaggccccagccgggcccggatcgcccgctccagcagcgctcggcccgccctccggcaggccggccgccatgagccggtggaggccccgctccctccgagctggcccccgcgcccgtcactgccccgccaccctcgcggacccgcgcacagacttactcggcgtccggtgcagagctgctccggcccgggcgccgctactcagcgcccggccggtgcgcactgactgggccgggtccttttgcccgccgagccccggcgagcccaggccgagcccagtagcggagctgagttgggtgtgggccgcggccgggcggggcccggtgcc

SEQ ID NO: 33837 - DNA, 288 bp, Mus musculus
  source 1..288: mol_type = other DNA
tcagaaggctctaccctaagtctggatcagcctgcttcaaggctgagggtttctctgtatagccctggctgtcctggaattcactttgtagaccaggctggcctcaaactcagaaatccgcctgcctctaacccaggcagactgcttacaatgtgattggtagaacagtgacttttaaactgattgggccgagatggccagtctgtcggaaagtagttcctcttttgggagaggagtactctacgatctctctcttccaggagaggaggggtccggtggaaaggtcct

SEQ ID NO: 33838 - DNA, 466 bp, Mus musculus
  source 1..466: mol_type = other DNA
tacatggaagaagctaagcttaactctcccggttaagggtcacttgacaacttagtatttattaatttatatgagagtgcatgggatcccagatagtaaccatagtgtagcctggagtacattttacaaaagccgcgtgcacccttcccattcaacccgggggtaaatcatgggctgaggtcgccgaccacaccagggccgcggggttgggcagaggcagccagctctgaactgctctgggctcaagcaccagggggtccctgaccaatgtccgggtgggccgcaaccgcgccactcagagacccaggcgccctgcggggcacgtgccacccgccccgtcggggctcctccgctccataggcgcagcgcagggttccgggcaccgggccccgcccggccgcggcccacacccaactcagctccgctactgggctcggcctgggctcgccggggctcggcgggcaaa

SEQ ID NO: 33839 - DNA, 306 bp, Mus musculus
  source 1..306: mol_type = other DNA
acccttgcaggcagggtctgtgcacggcaggcagatttctgagttcgaggtcagcctgggctaggacagccagggctatacagagatcttgtgaaagatgaaaactacacaatctcagtgataaaatgatgagttttttgttgtttttcttatttcctatatgaacactcattaattttgctaaaaaattaattttattactaaaaaaaatcttcaaattaaaacaataatcagcgctatgaaatttggtcccttcgggctaccgtcggagaggccggaaggacgctccctattgcttccggaccg

SEQ ID NO: 33840 - DNA, 446 bp, Mus musculus
  source 1..446: mol_type = other DNA
aaagatttatttattattctaaataagtacactgtaattgtcttcaaacacaaagagcagtcagtgctctttgatttgtaaaattatagaatttatctcacacattgtctgttctgaattgctcagttcttataattagacattacgttactaccttgtcattttaaaaaaacttgtgacataggacaccattttgtagtacagactggtcttttaataaaaatatgttggcatccaactcttaagaattagttatcggacttttactagtgacaaaagttcataagaaaacattttagtaaaatgctcgttttctttgggaaacagctggttggcttcctagctcaggcgactcactggccgagtcactagcccggcctctatggcgactcagggaggctgtctggagactgaccgcgcccatagtttggggcgtgtcttctgcc

SEQ ID NO: 33841 - DNA, 206 bp, Mus musculus
  source 1..206: mol_type = other DNA
gcttttaactgctgagctggtgccattcctgggctggtgagtaagttcttacttagagacgtaaacagtcacaaaacggttttaaatgtttaaattagagccttacattttcagagaaactagggctgtgttcttaaatctcccaccaaagtctcaatttgaatattgtgctgatactgtatacacacattgtgcaaatgttggag

SEQ ID NO: 33842 - DNA, 321 bp, Mus musculus
  source 1..321: mol_type = other DNA
attttcattggtgattaataaagattcaggtttaaaaaccaatagttcattttaccccaactgtgaatatgtgcataataaccatatgtatggatgaatgtagttaagatcctttgaactaaaacaaaggaactgatgagtgagtattagacacaataagtcatacatgacttgtgttaaaggataagacagggcttcctagggaatcatgtagcaacctgagtgacacagggttggaggaaaactttgtcctgttctctgctgaggtcattctattgatggcctctaccatggagcaccgaaatgaaagttcacttcctc

SEQ ID NO: 33843 - DNA, 402 bp, Mus musculus
  source 1..402: mol_type = other DNA
gtgtgtgtataatatatatacatgtgatatatattgcatatatattatacacacacacacacatctgtaagtttaccaaccttggctatatagaataattctcaaaaataaaaatatttcacgcatactaaaaattaaaaactatttgttcttttggtttgagttctgtacctttgcagaccagactggtcttgaccacagcccgggtgctgggattaaaggcatgcaccgccgcagttcagctttgaaatcaatgtggggacaccgggggtctctggcgacctgaccccggtcaggccttggcctgctggggacggcgctggagccttgctgcgagcctggctcccggcaggccttgcgcgccacgtgccagtgacagttaaggcgcatgcgcactgcgca

SEQ ID NO: 33844 - DNA, 295 bp, Mus musculus
  source 1..295: mol_type = other DNA
tttaaatgtttaaattagagccttacattcagagaaactagggctgtgttcttaaatctcccaccaaagtctcaatttgaatattgtgctgatactgtatacacacattgtgcaaatgttggagaattaaccttattttaagaagagaaaggatataatgaattggggatcaaataatttaagttccctgaataacaacataatccttagtttattttctagctaaatgtgtatggaaatcttctgtttaacttaagagttaaccaactcctgcctacaagtcatatgttaaact

SEQ ID NO: 33845 - DNA, 278 bp, Mus musculus
  source 1..278: mol_type = other DNA
agggtttctctgtatcctgtctgtagaccaggctggcctcgaactcagaaatccgcctgcctcgcctcctgggtgctgggatctcagggggcagggatgccttggcatgggcctgaggcaccccctccctttatgtttttataaatacatcattaacagttataattgcctacataaggactaaagtgtgaatgaaaaccttggaaaactgctgaatatcagaaggcttgagcctttgcaccagagaataaaggattcttgcccaggatctggcagcc

SEQ ID NO: 33846 - DNA, 423 bp, Mus musculus
  source 1..423: mol_type = other DNA
ctattaacaacttttaaatatgtatttagagcaaaataccatgactaagatgctcagcttctagttatttaattaacagaaagtgttcagctattaattttgagagaatttaagtaagtatatctttcgcgattgcttcctttgcttcagaaaaggaagacctaaaaacttgatctgtttccgtcttgtaatgccatattccaaactgtacagtagctacaggattatgggataacatccctctagtgtacccatgctgttcagtataaacagcacaaaccgagtcagattacgtttttctagaggcaaagttaagctcagagtttactcttagccttacagcactgtgctatctcacagaaggttgaacccacttgggggtttctgattggcccaatgaagaaacaccaagtaggttgccta

SEQ ID NO: 33847 - DNA, 365 bp, Mus musculus
  source 1..365: mol_type = other DNA
tgaactcaggtctagctgtccatgaaaagtcatttgtttgaggccagcctgatctacagagtgagttccagtgcagccagggctacacagagaaacttttaagcaaatcaatggttaatattcctgggtttaactcccctgaagtgtttaagactggtatgttataaaactgcctaacgtggaaccattccccgggaagccaagcacttggccagccgggctggccaggtaccgcgctccgccaaccgtagccgcggaagccgcgagagcgctccggccggaagaggcgcggagtggccgggccagccctccggaaacgcccgcccctttcctcctcgcctgcgtcagcacggccctaaggcggc

SEQ ID NO: 33848 - DNA, 457 bp, Mus musculus
  source 1..457: mol_type = other DNA
gctggatgaagaccagtctagtatcgaacaacctatacgtttttgtttttcaaagaagttggacaggcaaggcctggctggcctggtctacacagttcaagccagacaggcataaaaactgaaagctgttttcattccacatggagatggataaacatttccctgccgcattgattcaaatccaaattgtctgactcataattctcagagaggtccctggccatcagagccacatggcattggcgccttggcttgagcagatctgagtttgctcagggttcggggctagcccaggttcttcgaggacaggctccaaccaaaaggagcctgccagagttggtggggtctcgagccccggggcgggcgcgggaaccgtgtccacagcgtggctccggcgcgtggcgggcggggcacgggtggcgtggggcggagcctgccgcgggcggcgctgtcctgg

SEQ ID NO: 33849 - DNA, 499 bp, Mus musculus
  source 1..499: mol_type = other DNA
cagccctgggctcctgacctgcagggagaggggagtaaagcccggcccacttccttatagctaagcatgggcttcagccacggctaggctctgctcctacctttccttcaggagtttgaagtttctgcaaagcaaaaggaaacaacccatagggtgacttttgcttgggttctgcagtggtggccagagagccgagtccgtgcagagactgctggagttacagcgtccctttccacgggacggtgtgggggctccccacagattgaagccaaggctgtgcctttttcccagacctgaggcaaagggatactgaggcctctgaccagcaagggcactgcctcaggcagccattctcctccctcaggagagtgtcagatccattctttataaaggacagtatgcagtccagatgacaacttgctccatgatcctctgcatcagtttggaggggatccaggagtgctcccttccatcaggctaaggaggctccaggagtctg

SEQ ID NO: 33850 - DNA, 232 bp, Mus musculus
  source 1..232: mol_type = other DNA
tctctaaattcaatttttttttttttaaactagaaaggacactttgagtacgaatgtggacgtccttgcttttagttctaaggttagcgcactaagctttaggatcccgcggcgcgtgcgccccgcggccggcaccttgataccgcggctgcgcagctgaggccccgccttccgtagtcacgtgccgtagggaccgcagcgtggcggcgacggcgggccgtagggcaaccgg

SEQ ID NO: 33851 - DNA, 338 bp, Mus musculus
  source 1..338: mol_type = other DNA
ttcgaagacttttcagagaaattttcgtttaaccgcatgcgcccccactccgcaagacgtgccgcagggccgagcactgaactggggtctagtaacgtcctagcgcaggcgcacagagagacgcagcgcctcctccgccttgccccctcggcccccgtgctcaagattgaggaggaagcggaggggcggggcttccgtgcgctggtctattgctgctattgcgttgcaaaaaaaaaaaaaagaaagaaaattttctgcctaggtagctttgggcctttcctgggtcttcggtaccaaggccgccctgggcggctaaaagccttagtcggcgccgtcgc

SEQ ID NO: 33852 - DNA, 497 bp, Mus musculus
  source 1..497: mol_type = other DNA
attcttcacacacacgcaataatgattgattgattaaattccacatctgtgacaagttgttacattcagtggtaataacagtgtcttgcaagccgggcagtgggcgtgcacgccttttatcgctaggccagcctggtaaaacaacaacaaaaccagtgtcttgctgctggtgctaattatcatataagcattacacaaaatgtaccttcagaatggaacatatatttttattcttgttttatagattaaaaaatcgagattacagaaagtttacttaaaaaaaaaaaaactacttaatgccagatccaggatttacactaaatgtttagttccagtgtgtcagctttaagaatgtttaataaattttataattaaaggaaaatgactaacttccacttcctgtggatgacccagacagcttccactttccggtcaaccggaacctttcccagagcggctgctgctgtgtgggtggctatgatccaaaggatattact

SEQ ID NO: 33853 - DNA, 493 bp, Mus musculus
  source 1..493: mol_type = other DNA
tataatgacctggccagccggtggttaagaaaattaattgctcttgcagagaacccaggttctgttcccgatgagctcctgcacgcacgcacgcacaacagatgagggtttttctgtatatggatacttctaaacccatgtaaataaccatatatggagatgtggggataaatggcaaagttggcattaaaacaacaatattttgatttaaaattctgtactttatttaatgaaatggcttaggtacaataaactcacagtatcccggtgagcagatctgtcctttttaaatagaaaatattctcaggacgcttcccagtaaaagtttaacaggatcttctccgacgaccgcgactcctccataggaaggtgaggacgctgttcctttgactgtcaggcggaaagtccagcgcctgcgctcagcaccgaaccttcgcaggtccggtgcggagctgcagtcggctgagccctgcagcgtgtcgcgggactccgt

SEQ ID NO: 33854 - DNA, 318 bp, Mus musculus
  source 1..318: mol_type = other DNA
ctactctgctctgttcccagtactgagaatcagagaattctgagctagaatcttggcgggctggcatccgagctgggcggcgggagccccggagaggacgcggtgttccagccgcagtccccaccctcctcgcccagcagggcaggaggcacccaacttggtggcaagggaacggatgcccggcgtcacacgtccgagggctcccacgtgctgcgcccgtgcgcggaggcgctcagaggggcccacgtcccgaggcgccacctccgtggctcggccccggcggccgccccgcgtgccggccacgtgcagaaccgcacg

SEQ ID NO: 33855 - DNA, 348 bp, Mus musculus
  source 1..348: mol_type = other DNA
cagatgtttagcctttaaatctttacagactggacatcgaacaacttaccataggtagtttttatttaatttgtgatgcacagacatacatgcaagtaaaacactcacacacataaaatataaataacttttttttttaatgaaaaagtacaagcaaattgttagcaacatttctttcactacgcagtgatatggcttagcaggtaaaggcgcttgccaccaagcctgatgacccgagtaggacagactcctgcaagctgtttgagttcgaggccagcctcgtggggcctctgaattcggactccgggtctctgcggaccggaagcggaagctacggagtcccgcgac

SEQ ID NO: 33856 - DNA, 267 bp, Mus musculus
  source 1..267: mol_type = other DNA
tcaacaggctgagtctggaatcattttagatgcttagcaagtatttactaggtatggtgctcttggaggccagatgagcacatcagaaccacagatgattgtgatccaccatgtggtgcatgtttccagtcctgagcggacctaatccagggctagggccagcagctatatctaggcggagagttctgtcccctgggagaagaatcactccagtgccctcccagcttcacagcagcaggggaggcggggtaagtgtggtgggaaaca

SEQ ID NO: 33857 - DNA, 322 bp, Mus musculus
  source 1..322: mol_type = other DNA
actttttgcaaaaacctccaggaagcccggtaatcttttaaatttttctgtagtttgttgttgctttgtatgtaccctcaaaaaacgatttttctcatatatgatcaaaatgctcagatcccatcataggattcctctgttctgcaggattccttgaggaaaagacaccactcaagtttattttccagactataaataaatcattacagaatacaagtggaggcttcatttaagacgtaattcctataccaggctgcccaaagagttccaactttttaagaaaggagggtggctatcacccttctctactctgagtggggca

SEQ ID NO: 33858 - DNA, 300 bp, Mus musculus
  source 1..300: mol_type = other DNA
gttgggtgggcgggaagcccctggacccctcacccacaaaaggcgccctagatctgggctccctggaggcagaagacaaatattctcctcgccccaatccagattttaaagtttgacggttccaaccagccacccagggatgtgctcctcaggcaggggaatgtgtcctgggagggagaggtgcgaaaccccccttccctgaccgagactccagggtcctgagccaaggccagggcgctgggctctgctgggccatcggagctgctcggctgcagcccagtcgagccaccttaaaagcgg

SEQ ID NO: 33859 - DNA, 218 bp, Mus musculus
  source 1..218: mol_type = other DNA
aaaagaacattttaagtagattcctggttggcctcgaattcagagatctgcctagttttatttaaaggctgagggacggggaggtgtcaccaacacgctgttcgcgcgtgcagccaccttgcatgttgtccgggacgtacatcctcccgaacctatcggaaactgcgcgcctagtcagagccaatagacactgagtttctggtcaatggagtcgtgtc

SEQ ID NO: 33860 - DNA, 535 bp, Mus musculus
  source 1..535: mol_type = other DNA
gtgtgctgtgtacacgtgtacaagggataatatcctcactcttatatgccttacaaaatggtactcgacattctaaagtgccaatataagagcattttgaaagcataaagttctgtatccacctgaaatagaagtcaattatatggtgggtctaagaagaggtatctttcttgataaattctatacaccaggtttattagcttactgtctggtagtaattgaacctaaaagacacagttgggtccggtccgagcgtcctccgggcctccccgccgctgcacgcgtgtttaccgcaggcctcgcggggcgctcacgtccgcccggcagtaggtcgagagtggagactcccggggctccgccagccggagtctgcgggtccgaggcggccgctctcccacggcgcctccgctcgggcccgcccccaccgccgcgcctcccggttatccgctcgcgcctccgccgggtgccgggtcggaaacaaaggcggggggcggggagcgcacggcggcggcgccgcggtccgcccttcattcgg

SEQ ID NO: 33861 - DNA, 553 bp, Mus musculus
  source 1..553: mol_type = other DNA
tattttggtgtaaatatttgaagcactaatagccaatgatttggaggaacaaaacaccttgatccgaagtgtgagaattttttggaaactgaagctttaagatccagttgattgctaattcttgcttcttagattaaaaatgtgtttacctttaaattattaactgtccccgcccattgcaggggccctggaaacccggcgtccctgaagtactttgggcgccgcgagctcgcagtcccagcggtcctgagtagggggcgggtggaagctccgcgcctttcattcaacaaacgtgatgaattttagaaaaccggggctgcctctgtaacctagcctgggctatcagacagacctgggaccccgctgccccagcctgcccaggagctgtatcccgcggtgcgccaagcgcggcaggctgccttccactccctaccgagaagcgtcgggaatggcaccgtcgcttagctgctgagtctgagtcccggactccacggaggaactacaattcccagtatcggagctacccggactcccggaagccgaggctttggcg

SEQ ID NO: 33862 - DNA, 530 bp, Mus musculus
  source 1..530: mol_type = other DNA
cacgcgttcaaagtcagcccgtgttacattgcaaagctttatttatggtttatttattgactggaaaactgaaaagaacacattttcacaattttagaagtgacaaatacctgtatttcaagtgacttctaagggatttggaaacttcgcataatttgcataacccgattaaattctatttaaccgcatatttcttacagtatgttgaaaaaactagtatttatgtgttgattttaaattaattttttaaattagcattctcaatgagtctcataatggcatttatacacatgacaataatatctcattctaatgtgtttattttggtgtaaatatttgaagcactaatagccaatgatttggaggaacaaaacaccttgatccgaagtgtgagaattttttggaaactgaagctttaagatccagttgattgctaattcttgcttcttagattaaaaatgtgtttacctttaaattattaactgtccccgcccattgcaggggccctggaaacccggcgtccctgaagt

SEQ ID NO: 33863 - DNA, 195 bp, Mus musculus
  source 1..195: mol_type = other DNA
tttgttgttcagtagaactgaataaggtttggcttttatttagaaaaaacaacttattacagttggatctgaaagtaatgagctccctgtcattgactgaatccagtcaacaaatatttgagaacaagtttgctttagtgcttcagaaagctgttagagtagccacagggaattacctgcctgcctctgctttca

SEQ ID NO: 33864 - DNA, 382 bp, Mus musculus
  source 1..382: mol_type = other DNA
aaaaacaataaaacagcagctcattaacacctattttgtatttctttgctttttaaattcagcagggaaggagctgaaaagagttttccagtccttagctttcaaagtccagaacatgaatcagctcgccgggcgcaaaggctggtttagatataccactgtgctgtgtctgcaaaggacacattatgccccttctcaacccgttaggttgtcagaggaaaacgaaaccaaaataactgagtttcctagtgtttcatctctcattgaaaaagtatagagagctagcccaaaatgtttttgggttaagggaatctgggtatccccagttcccccatttttcctttctactttgaaaaaaaaaattgcgtattctcctttaagg

SEQ ID NO: 33865 - DNA, 517 bp, Mus musculus
  source 1..517: mol_type = other DNA
tctagagacataagctgggcccattttttcaataaagtagttcttctggaagcagtccatattcctttacaaacatcatatatgtttgttttgctttatataaaatatttcagtgaattctattaatactaaattgttagaacagtagggcttcaataagtaaaggcattgagttatgctgtaatgttgtaaaaacacattgacaatgtgtttttacaacattaactaaaaaactgactgtggcgcgtggagtaactagaatttgctggcgccaactgcccgctcaaaagtgcctccgcccgggggctcggggacgcgagccaaaaacgcgcggggtcacgcgccgggcaagcgccaaaccggccacagccccaaagcggtcccgagggcggggctgctgcggggaggggcggggcgggacggggcggggccggccgcgccgggcgggaggaggcccgggggcggctagggtgtcaccgccaacccgctccggccggaaacgggcgcttgtttccgg

SEQ ID NO: 33866 - DNA, 269 bp, Mus musculus
  source 1..269: mol_type = other DNA
tttctatttaaggagttcattaaagcacagtatttctacacattgctggtaaaaatatgggggaaggggtccgcacaccttttttgagacatggtctccctggctggcctttaactcaagagatccaacccaacccggtttcgtgtcccagattagatttgactcaagtctaggccgagggcgagtctgcacgagcgtcgtggacctcacgggctgagcacatccgttccccccggcgccggccccgcccaacgtgagccttggcccgg

SEQ ID NO: 33867 - DNA, 304 bp, Mus musculus
  source 1..304: mol_type = other DNA
tgttccagacaatcccaaggttttatctggagtagactggttcaggttgtagtacgtacacacacaatgtatgtatgtatgtatgtatgtatgtatgtatgtatgtatgtatgtattctgtccagttgatcagggcccagttgtcactgagttatctctgagtaacgcagcaagaactgctgggactcctgggttctctgggtgcaaaggaaggggctacctcattcatcacggctgagaaagactgtcatttccagctgtcacccttctctcccgctgctcactggcgcgggggagggagggg

SEQ ID NO: 33868 - DNA, 172 bp, Mus musculus
  source 1..172: mol_type = other DNA
tctggggataggtaactatggtttctatttctggctgtgcacacagagtaggaactgcctcagccattccttgagtggtcatgtgttgtgtccggccagcagaccacaacctgggttctagcctgggacccgattcccgcacccctgagcaagcaggtttcaggctagggag

SEQ ID NO: 33869 - DNA, 302 bp, Mus musculus
  source 1..302: mol_type = other DNA
acccctgagcaagcaggtttcaggctagggaggtcatgtgctgatttcattcagttaccacatcctgaccaaatgaggtgagaaatgcttacagtaaactgtgtgtatttccaccacacaggtatcacaatgaacattatgactatttctctagaggacagattatcttgggaagaaaactgtgctatggactagaaggccaagagacttctttttttattaattacatacaaatgacttaagctatttgggttatagatcaagaagctacaaacgcctgccagacgcaaccggactgcgtt

SEQ ID NO: 33870 - DNA, 248 bp, Mus musculus
  source 1..248: mol_type = other DNA
aaacttaagaatagtttagaatgtaactgtaacttctagaattagatacagtcctagacgaacaatgtcatctagcccttggtcaaagcaactttcctttcctttacggaggtttgtttagatttttcagctctaaactgggcaaacaaaacaatcctacgatgtaagtgagggcctttaaatgtggctctcatcgattggtaaattcctttttcaaaaaattcgtcatttcctgtactgcaggatgt

SEQ ID NO: 33871 - DNA, 366 bp, Mus musculus
  source 1..366: mol_type = other DNA
aaaggcttaaaacttctgaagtgtacccttttcaagacccttggagtaactttggaataggaactagaaactaatgcaagttctcgcgggtgactcactaaaagagacgcctcatccagggaggcctctacttggcacggcgtgcttggccagttctccgggcagtagacaaagatgtcattgacaaacgagttcatgatgcccatggccttggacgagatgccggtgtccgggtgcacctgcttcagcactttggccctttatgcaaattaggtctcaaagtacttttaatttccattggcccatacgcgaaacttgcgttttcagtacaagcctaaaatttcagatttcattggacttctcagg

SEQ ID NO: 33872 - DNA, 338 bp, Mus musculus
  source 1..338: mol_type = other DNA
ctgctggcgatcgcgcagggcggcgtcctgcccaacatccaggccgtgctgctgccagctcctaaaaaggctcttttcagagccagcggccgcgaggactggacgcggccggctcgtgctgcacaaacaccggcgggcgggggcgcgcgagctcctcttgggcagagccgggacccgccctctacgggcagctgccagacgtggctccaccctgcgtggcgggcccgagccaatgggcgaggtcggggccggtgacgccacggccaatggcgcggcagcgcgggagtttcaagtcgctgtctccgccccgccgcggggaagactgcgcctataaaggc

SEQ ID NO: 33873 - DNA, 575 bp, Mus musculus
  source 1..575: mol_type = other DNA
agggggagtcaccatcgcccagggcggggtcctccccaatattcaggctgtcttacttccgaagaggctcttttcacaaactggcgcgttagctagctccttaaaaagagccttgcagcagcacggcctggatgttgggcaggacgccgccctgtgcgatcgtcactttgcccagcagcttgttgagctcctcgtcgttgcggatggccagctgcagatggcgcgggatgatgcgcgtcttcttgttgtcgcgggccgcgttgcccgccagctccaggatctcggccgcagcaccgccgccatgtataccggcgcgccggcgcccacgcgctccgcgtagttgcccttgcgcagcagccggtgcacacgccccaccgggaactgtagcccggcccgggaagaccgcgacttggccttggcgcgggccttgcctccctgtttgccacggccaagtataatgtaggcctgagaagtccaatgaaatctgaaattttaggcttgtactgaaaacgcaagtttcgcgtatgggccaatggaaattaaaagtactttgagacctaatttgcataaagggc

SEQ ID NO: 33874 - DNA, 570 bp, Mus musculus
  source 1..570: mol_type = other DNA
cacaatatgtaacaatgtaaaatataaagattgtaactatgttactatgtaacaatatacctgttacttatgcctaatcagtgattctaatgcatcgataacgaaccttattacaaatttcagagattgaaaaatgctggctgtattttaccgagcataactgatgagcctggaaggctcctaaaaggagcttctgagagcgacaaaagcagcagcgtaaggtttactttttaagttatttcgattccttatgtacaaatctgagtggcaaaaaaataattttagtaaaccccattaagaaaataacctttaaatttaacgattttaaagtaaggctcccagcgataaacgcttaaaatgggttttacactgtttcaagaatttccagtattcctcgaaggaaaacctacacttaagtaagtgattaactttgccagccagccgcccggcgacccgcggagtgtcgcaacgacagccaccgagcacgcgcgtcgtgattcgcgcgttccagggcggcgccggggcgagggagccgcgcgcgctcctattggccacggcgtcaggacgcgt

SEQ ID NO: 33875 - DNA, 337 bp, Mus musculus
  source 1..337: mol_type = other DNA
taggaaagtactgtgccattctttaacaagctgtacgtaaatccctcttaaatcttgtcttctacattctgacaatatattaacactaattttatgcaagggcacatgtaacttgagtagaaatgatttctaatgtcaacagggtaaggctgcctggctctgccgggacgactcgccattagcttcctcagcaggagaaggcccagccgcccggcgacccgcggagtgtcgcaacgacggagccaccgagcacgcgcgtcgtgattcgcgcgttccagggcggcgccggggcgagggagccgcgcgcgctcctattggccacggcgtcaggacgcgt

SEQ ID NO: 33876 - DNA, 209 bp, Mus musculus
  source 1..209: mol_type = other DNA
ataaagcagacacacacttgaaaaagtgaattttagtctactgagcgtagcagcattcccgggctgctcggctagtcagcttcctatgatctagtttctgcttgatctgaataaatggaaacgcccgacaggagctccgggcccttcagtgcagctctgaattcatccagagcccggataatttagaaaggttcccgcccgcgcgcttt

SEQ ID NO: 33877 - DNA, 237 bp, Mus musculus
  source 1..237: mol_type = other DNA
gtggtggcccattcgaggccggcctggtctacaaaaagaatcaaataaataagtgctcatttgctttgaaagttattttgactgtcatctagatgacaggtttaactatttagtagctgccactgggtaaaacttaagccgtatctggtgactcgctacatttccaaagaaacctaagtcaactgaaaagcactatctttttaaaaccctctgcggttcatatcctgctttctgggc

SEQ ID NO: 33878 - DNA, 422 bp, Mus musculus
  source 1..422: mol_type = other DNA
cagctggccaccaaggccgcccgcaagagcgccccggccacgggcggcgtgaagaagccgcaccgctaccggcccggcaccgtggcgctgcgggagatccggcgctaccagaagtcgaccgagctgctgatccgcaagctgccgttccagcgcctggtgcgcgagatcgcgcaggacttcaagacggacctgcgcttccagagctcggccgtcatggcgctgcaggaggcgagcgaggcctacctggtggggctgttcgaggacaccaacctgggacatccagttggcccgccgcatccgtggggagcgcgcttcttttcagagccacctacgttgtcgatgaaagtagctgtgtcagctttgcaaattgatggtacaggctagcatgaaatggaaggctgcgattggctagaaagaatttc

SEQ ID NO: 33879 - DNA, 321 bp, Mus musculus
  source 1..321: mol_type = other DNA
gaattgttagcctaagtgctataaatccataataattttctccactttttcctaaaatgggagtctgtgactcttcctctcatacaggctgacatcagaaatctctggattcagatgagaaaactctccaatccttgaatcgatttctaaaatgcacttttgccaaaaacaccactaaagcgtagatttgattttccattggactctgagcattcacaagacagctggatctctgtgaggtcaaggctagcctggtctgcattcaggctatcagagctacataatgcaagcaggcagaaatggcaacttccttcctctttt

SEQ ID NO: 33880 - DNA, 294 bp, Mus musculus
  source 1..294: mol_type = other DNA
ttacctttacagtcaagatgttcttaggaatgccttaacaacagccctgccctggcatgcctgggggctgtttaaacacacaaattacaatattttatttttcttcacgcacaccattatattatatggttgtgagccaccacgtgggtaggacccacatctttttaaaaaattattattattactctgtgtgcccacacaggaatcgagtcttttgcaatggagtcctggggcgtcatccctgatgcgcgcagggtctgccgggtccgcgctccgtgcagctcccgcggcgag

SEQ ID NO: 33881 - DNA, 63 bp, Mus musculus
  source 1..63: mol_type = other DNA
gatagaatccatgttatcggtttttgtcagaaagccagtaaatccattatctgcaacagacga

SEQ ID NO: 33882 - DNA, 210 bp, Mus musculus
  source 1..210: mol_type = other DNA
tgaagagagtgtagctctctcattatattatatgtgagccaccacgtgggttcaggacccacatctttttaaaaaattattattattactctgtgtgcccacacaggaatcgagtcttttgcaatggagtccaaattttcagagtggggcgtcatccctgatgcgcgcagggtctgccgggtccgcgctccgtgcagctcccgcggcgag

SEQ ID NO: 33883 - DNA, 308 bp, Mus musculus
  source 1..308: mol_type = other DNA
ccacgtgcagttttcacaaatgttgtctagactccacgttggctttgaagcctacaccaaactccagcccggctggaattaaattccccacttccacccccggctgtgggagtggactgggttgtttttttttttttagtgaaaaaaggggggattggaaatatccctactttcaactctagtatatttcagaaaccaagcctcagagatgtgcgtgcgtgcgtgtgtgtgtgtgtatgtgtgtgtgtctcacagcaagaaacagattttattatttattttttatttatttatttttgcgccggtcg

SEQ ID NO: 33884 - DNA, 491 bp, Mus musculus
  source 1..491: mol_type = other DNA
gaaatcacataacaatacggtttcgttttgtcctgtttttagaacgagacagggcaggcctggccatcctggaactcactgtgtagaccaggctggggtgccgcggcagaagatgtatgtgcgccacatacatgcagcagcctgaggcgctccggagagggcttattgggtgcccaggaccgggaacccagacttgggtgaccccacataccaatgtcccaactcagtgtcggtttcgtgatgtttgcgtcgcagggagacccctgcggtggggctggctcctgcccgactcctgtgctccgacttggagaagacgggcgtccgggtaagagacggtgcaaggtgacttgtccctggtccttcaccgctccagcactgcgccagtgagaaagtccaacaggccctcgcgcaggggctgcggcgtccgcagcggccggggaaacgcgagagatttctcgcgcggcgtgggagagaacgcgggtcgccagatg

SEQ ID NO: 33885 - DNA, 288 bp, Mus musculus
  source 1..288: mol_type = other DNA
tttcccttggcaagtactgtgggacagtgtcccagaaatgattataattgaatcttcaaacagtttgtctataaagatcagtagtgttcaaaacagagatctgatctgggcagagcagagatgggggagggtctctgaactatgcttgccaagaaattcaatggaatcctcaaagagggatgagagcagtgagtgactggcatcacacaaggcattactgggaatactgagttcattactaaccaacgttcctggaattttggacctagctatttttaaaactgtcaa

SEQ ID NO: 33886 - DNA, 406 bp, Mus musculus
  source 1..406: mol_type = other DNA
cacctcttgtttcctggagaaacaaggacggtgttccccaacttcacgggataagcaacaggatgtggacactcccttactgaagccagactttaaaatatctgacaagttctcgtctgttttattcttcaatagaagtgcaataggacacaagacttgcgaacttgagcacatttttctttcacctaaaaaaagaagggggaaaaaacccctggatgaggttcagggtcccggggtcccagcctcccggggggagggagggcacccgtcgccccgggccccgcccctcctgctggcaaggctgcgaccgtgtccacgcgccccggcggcctcgcgtgcacgagggctgcacgagcctccaggccagcactcgcgtggagcgccaagccaggcggctatataagcc

SEQ ID NO: 33887 - DNA, 318 bp, Mus musculus
  source 1..318: mol_type = other DNA
ttacacctgtgatcccagtgctcaggaacctgaggcaggtttaagcacccacataaaaagccaggtgggctggtgtctgactgcagttccactgcaggaaggctaacaggagggccccgaggcttgctagccagtctgagagttcccaactttcagtgaaagaccttgtctcaaaagtaatgttgagagagagagagagagagtgtgtgtatgtgcaatgcacgtgctcccctctagctcctggtattgtaagcaagccagtatcacatgctggcaggtgtaataacctttaattgaggagatgcctccatcagaccc

SEQ ID NO: 33888 - DNA, 308 bp, Mus musculus
  source 1..308: mol_type = other DNA
gcttgcctccaagccttgcatgtgagcccccagacccatatggcagcaggagagtactgactccagcaggctgtcctctgggctccaaaacagaaccaaaccgttcaggatctttgttttcgggctacagtcgctggaaggcgcttctcctccatggagtctaagcccctcttccctgtacaatggggtcagaaatacctgaccttggatttcggttactatgaaatgctcagtggggcctcccgtggtagcacggcagatgtctggctgtggcatggcaagtgcattgggcgaggaagcctctctta

SEQ ID NO: 33889 - DNA, 148 bp, Mus musculus
  source 1..148: mol_type = other DNA
aaggccagcctagactgggtagccagaccctgcctttagagaaaaaaaatcttttaaagattatttattagtagtgctggtgactgatcctggagtgtttctgggaactcctgcaggcacagctgttaacagatggattggccaggaa

SEQ ID NO: 33890 - DNA, 274 bp, Mus musculus
  source 1..274: mol_type = other DNA
catctgcccttaaaatactgtaaagagggtccttacattcctaatgggacccaagggaaatttgtctgattccaggctatactttccctgatatttaaactacgggaaggtggacgccgctgcagacacccctctgcacagtgtgccatatgccgtgtgtggcagtcaggtctggcataccgatctgttgaagatcaacgaagaatctggatggttcctgacccctaaggatgggggtggggagcggcttggtgccggacgcccccacccgcag

SEQ ID NO: 33891 - DNA, 324 bp, Mus musculus
  source 1..324: mol_type = other DNA
ctaggagaggctgggaacaactgttggaacccagacctcccttagtgagtagctgaagtcagaaaaccattcctgaatgtaaatagtgaaaaaaggaaaatatttggattaaaacacttaatgtctgaatctttcttgtttgtaaaataaaacctggtttgtacttggcagctattaaataaggcagtgcactcaagtatatgacatagcatattctcactaaagtcagtatactcagttttcactccaccaccaattgtgtatgaacttaaagatgagtcacatcacttctctgacaagccccgccccaggggtctggccgga

SEQ ID NO: 33892 - DNA, 155 bp, Mus musculus
  source 1..155: mol_type = other DNA
aggacagccagggctacctacaataagcaattttctgagactggttaaacaagagtgccagtgcacagactatctggaagcttcgacacagactcaagatccagtcttgcttctctcggcgctttctgagtctctagaagctaagcacctcggga

SEQ ID NO: 33893 - DNA, 238 bp, Mus musculus
  source 1..238: mol_type = other DNA
ctgtagaccaggctggtctcaaattcagaaatttgcctgcctctgcctcccagtttttttttttttttttttaaataatgtgtaaaggtgtaaaagtgttttccttgtgtaccatggagaatcagagacagcccctgttcccatgcaggctccctgtagcagttcagtctgagcccctatgggcccagtttaagccttggcggcaacctacagcgcctcctggctcccgcaggcccca

SEQ ID NO: 33894 - DNA, 312 bp, Mus musculus
  source 1..312: mol_type = other DNA
ggctgtcctggaactcactctgtagaccaggctgacctcgaactcagaaagctgcctgcctctgtgctgggattaaagcgggcaggcacacctttaacctgggccacaccttttgctgaaggaaggaaacttttgctaagcaaatactagattcttcgactttctgtcatttcaataaacccatatatgtagatatgtatcaaaggatttcttgctagttgaaagttttatgagaaagtcactgacttcttcccgagcccagctagggctatatagagaagctccatcggggtcccagagtgcttcccgagg

SEQ ID NO: 33895 - DNA, 224 bp, Mus musculus
  source 1..224: mol_type = other DNA
ttttttttttttttttttaaataatgtgtaaaggtgtaaaagtgttttccttgtgtaccatggagaatcagagacagcccctgttcccatgcaggctccctgtagcagttcagtctgagcccctatgggcccagtttaagccttggcggcaacctacagcgcctcctggctcccgcaggccccacgaagccccgttgctcgcccaggaggcgtgacttggggct

SEQ ID NO: 33896 - DNA, 256 bp, Mus musculus
  source 1..256: mol_type = other DNA
agaatcagagacagcccctgttcccatgcaggctccctgtagcagttcagtctgagcccctatgggcccagtttaagccttggcggcaacctacagcgcctcctggctcccgcaggccccacgaagccccgttgctcgcccaggaggcgtgacttggggctggaagcaggcgggccgctgcgccgtgggcccgggctgccgctgtcatggacgcctgggtccgcttcagtgctcagagccaagcccgggagcggct

SEQ ID NO: 33897 - DNA, 178 bp, Mus musculus
  source 1..178: mol_type = other DNA
tagctacagacaagtctcctggctgatccccaagagcctgggtgagttgcctgcagaatttaccctggccagttctctgtactgtctagtcttcctctctccttctctaaagagttcttccggagtggccctctgtggagggctaatgtgcctggcaggccacagaaacctggcagaa

SEQ ID NO: 33898 - DNA, 411 bp, Mus musculus
  source 1..411: mol_type = other DNA
tgtaaatactgtacaatgattctatgtaaataactggtccttgcccacagagcaagcaagccttctaggctaacaaattaaagatcagtttgctcactgacttttttattcgggctgaagctctgagctcccctgctttaggcttctgagtagcctacagtgagtgttcaggatttcactgaaaatttaaatgttggggagatgttttcaaccaaagtaattatcttgacgtaggactgcccttcggaaaatgctgctgtcactgctgtcagctgttattttgcatatcccatgttaagattaataaggcaaaaaatattgtctctaagtcctactttctgttccaaactggaggaaattattgaatatcaaaatttgtggaggcctccagggggcagcaccaaggtagag

SEQ ID NO: 33899 - DNA, 276 bp, Mus musculus
  source 1..276: mol_type = other DNA
tggagtttttacgataactagtataaggaacagtgccttaaagtagctatctttatagatatagaaatgaactacgaccagcctggtctacagagtgagttccaggacagccagggctacacagagaaaccaactgtgggatccctagttactgaggaatctcttctctcctcagcgctcagaggagttaataactctccgaggtcctggcgggcttaccctggagggggcggccccagcagcaacgcttggccgggcggagctcaggcccgggcg

SEQ ID NO: 33900 - DNA, 358 bp, Mus musculus
  source 1..358: mol_type = other DNA
cacccaggatccacattgacataaataaatgtgattggatattttaaaggtaaaaggttgtgtctgccttcaagctactcagggggtttgaacctcagaactgcacaaaccggcttttggctacacacgtttgaggctagcctggaccctgctttatctaaatagatagatagatagatagatagatagatagatagatagatagatagatagatagatagatagatagatagataagcggtcagtcagccctgggctggtggggaataacggaaattactgaccaaacctttatgaaagcctggctggcgtgggccggccggaagctgcacgcctccgcgagctgggccaccagggg

SEQ ID NO: 33901 - DNA, 502 bp, Mus musculus
  source 1..502: mol_type = other DNA
cctcagcaatatgctatttcggctcacgcaggaccctggccctgatgcccagggtttgcgaccagtgcccggagacagcgggcagcaggtaccgagaacaccggtgtcaagggaatcacgggtgtgcgggagcctaagacccggtttccagccctaggagccaaggacctacgcggcgccggagcgcgggacacacggtgtgcggcgacagcggagcccgcgtccgcccccgccgccgaggcctccgccatgtttcgcctccgccgaggatgtccgaaagggcggccggcggtccctccccaggccgctacctcccgtgctgcggtcgccaccgccgtcgccgcctcctctgggcggcccgccgctccgaggcccgcaagggtcacgtgagtccgcccggccccgagaggcccgcccgccagcggccacgcgacccgaggcccgcctcccggcaccagaggagagcccgcccgccggcacctcagacagcccctggccggct

SEQ ID NO: 33902 - DNA, 528 bp, Mus musculus
  source 1..528: mol_type = other DNA
gaatctcttctctcctcagcgctcagaggagttaataactctccgaggtcctggcgggcttaccctggagggggcggccccagcagcaacgcttggccgggcggagctcaggcccgggcggtgctgcggctgcagcgtccagctgcccgactgaactccagccgtgcagcagactgccggagctgcgcgagccctttctgcaccggggctcacccccgcaactctgcgggggaggtgaagaattcggaacagccgtctccaacagttcaacttgcggcggagatctccgggggacaggggctccaacttcgccgcccctcccccatccctcggagctccggcagttccgggcagggccccgagatccccgggctgcacactccctgcggggccaccgtgtctcccgccgccgggagacttgccccggccatccggctgcaggagaaggggcgaggccggcggcggtccggagcccggcgggcggggccgggaaggccggacggggcggagcaggcggcctttgcggcc

SEQ ID NO: 33903 - DNA, 383 bp, Mus musculus
  source 1..383: mol_type = other DNA
ttttaaaaagtgctagccactttcaaagaggtattttatcaattagtcaacttttattttgcagttacaagtgtaggataaggttttcaaagttgacatctgacaaataataaatgtatatatgtgaggtattaattataaaatacagttttttattagtaatgtcatggctgatagataatctaagaacaggataacctattcacagaagaaatacatactgaattctttcaatctagatcttatagtatacatttagtaattccagaagatactaactcatcttttgttttcttagactctttgaagatacatatttaatttgatgtagctttaatttatttgaaaaccacttgattaagggagggagctcatcccaggga

SEQ ID NO: 33904 - DNA, 457 bp, Mus musculus
  source 1..457: mol_type = other DNA
tctgtatttccagcactaaagctagaaaggccagcctgggctacatataactttctgtcacagatacaaagacctaaggctcatgacccagtggggaagtaaaaaaagagcttcttagggtatttcaattaggagatgaagttatgttccattgagaaccatattaaatttttacatcatgagttgattttgaaattgccacagtgtcgcagagaagactatttcacttagccacacacacgtctgccctgagtcagggggtcggggctaatttagaagctccaaatgttgtcctcccgaggccagcagcctcagctcaccgctctagccggccaggggctgtctgaggtgccggcgggcgggctctcctctggtgccgggaggcgggcctcgggtcgcgtggccgctggcgggcgggcctctcggggccgggcggactcacgtgacccttgcgggc

SEQ ID NO: 33905 - DNA, 319 bp, Mus musculus
  source 1..319: mol_type = other DNA
aattgaagtgtacccattagactcacagactgtaaggtgactgtctccctgtagcagcagggagcagatgggttgtgctctgaacatcgcatcctctgggtaaaggctacaaccagctctcagagacatgctcttggtggctgtgagagggagtgtgggctgaaacaccaggccaactatgatgtcttgtctagcctagtcagactgatcttaagactaaaagataaaagcctttttgggatgaattaacttaacaaagccctaggtaaagaaatctattttaaggagtttaaaaacccattctgtggtttttcaaaga

SEQ ID NO: 33906 - DNA, 279 bp, Mus musculus
  source 1..279: mol_type = other DNA
ggcttagctcacacctgggttgagacctggggctgctgcggtggctgaggctagcggcctgttcagcaacgccaggccacggggccaggagagctctccccacagtggaggtaggacccagaaacagggcctttgcctttctcaggacagcctagcccctaccttgaccctgggctagggacagagatagaactggagaggccgaggcaccccctccccaccttcccattgttaggctgctgccagctggccgggagcaggattgaaccaagactagta

SEQ ID NO: 33907 - DNA, 336 bp, Mus musculus
  source 1..336: mol_type = other DNA
aggctcaacccagattaggcaaaacaatgccttgagaggagagttacactgtactagtactgataatcactgctaggatagtttaaatgggctgttgttaaattacacattgagtcctttctaggctacatactatttatgaatactgaattaaaacacctggccagatatgcagagcctagattccaatgtgaggcctgggtccttctatattttcacactatgcacacagtctgtacagctgatgggaattccacccagcttcacaaatacagtatctgttgctttgcaaagctctggcctctgccaggcatccccgagttctctggaatccca

SEQ ID NO: 33908 - DNA, 211 bp, Mus musculus
  source 1..211: mol_type = other DNA
tagaaatagaattaactaaaaggagacatgatgttcctaagggccttccatgtataatcctaggtggagcctccctccatcttgtcatgatgtcaaagttttttaggacagatcctggttctctcatatttctgcatagaatctccttgcctgggcatggatggagcactggaagcctgtgattgggattccagagaactcggggatgcct

SEQ ID NO: 33909 - DNA, 428 bp, Mus musculus
  source 1..428: mol_type = other DNA
gggcctgctcacatgtatcaggtgacgccccagtcctagggagctgccttctgagggctcccacactcgtctgcatatgtgcagcagctctgtctgtttccggtctcaagagcagctcggcctggctggtagccatcttactatctttattactttaaaattcttaaaaacccaagtgtaggttggtatcaacaaagtatggagtttttagctctctttagtacttctgactgagcatggagcaagttgtttaacattctgagcctctttccttgtctgagaaatgggttacagctgtccctaaagcccagcccggtgaggctctgaccacagtgctgtgtgtcacagtatctatcagtcaggtagcatgaaacatttgaggactgaatttgatattaaaaaaataaacagctggcagatgcatgtgg

SEQ ID NO: 33910 - DNA, 389 bp, Mus musculus
  source 1..389: mol_type = other DNA
tttatttatattataatctgagcactcactgactgtaactagtctttacaataagactagctagggtttagtatattaagccttcataaatggtagccacagccactcagactgtgttgggaagggggagactcctacgtaattattattttgaattaaaatctgtctcaactataatggcggtctcattagagtccaatgagtgcacactcttataagccatcagaaaactgctttttaaaccaagtaaaatctgttgtttctagctatgaaaaatataaaaataatttcattatatttaatggcagtgccacttaaagcaaatggtgcctactaagaagaaacacatctgctttgagtcatgcggcctggctaggcgcatcttgatg

SEQ ID NO: 33911 - DNA, 278 bp, Mus musculus
  source 1..278: mol_type = other DNA
tgcaagatagccaacatggaaacaatggctctagttctggttggcagccaagaacaatagcatgtatttcacacctggggtatgtatctcacacctggggcatgtatctcacacctggggctgagaactatattcagcactccactgtttctaggaccaataagatcaaaccccaatggaggatgaaatgtaaccctttgaagggaaccaatcactctctaagacgccaaagatttcctgtcgtaaaggactggtctgtaaagctgtctggctgggag

SEQ ID NO: 33912 - DNA, 327 bp, Mus musculus
  source 1..327: mol_type = other DNA
atttcggaatttctctcctgtgacaaaaagatcgacagccacagacttcttcagtctgcccaagaaggtgtatgctgagcaactgagtcaccacgaccctgtgcattgcggaatgtgaaatcagaaactgggatatccacatttggaaccccaagttaagggggttaaaccttgtactgggcagacaacttcttttctggtgacaggaaaaggactctgccttgcctgagccagctgagccagctgagccagctagcaagtgcatggactgccggattcaattggattggattgcggatcgccttttaaatgagtgcaaaattctac

SEQ ID NO: 33913 - DNA, 259 bp, Mus musculus
  source 1..259: mol_type = other DNA
acagacttcaagtctattttttactggtttgctttgaaattcatttcgaagttgaagccaccgccgcggcccgggttcgattcccggtcagggaaatactgttttttctctcacaattttctaaaaaaagtacttaataatcactcgagtttgcgcatagagtccctagctcaattttcttaaacaaaatggggaaagggaatgctgatagatgtttcaggggggccgacggaactgccctccctggggacctcggccg

SEQ ID NO: 33914 - DNA, 400 bp, Mus musculus
  source 1..400: mol_type = other DNA
ctggccaggcagggcggggcggggcagggcccgaaaggaagatcggttccttctgcgctccagtactgctggaggccagggtgaggaaggaagagaacctccccgccgcaccacccgccccgtgggtcctgcaggaggatctttgggcgtcaccgcggggggacccggtgactagccgcgcgggcggcttctcttgagccaggcgcgggagggggcggaggccgcggcgggctggtaccatcgatcgccttcggggagggggacgggtgccattcccccggagggggcgggccctggcggcggcggggccagggccccattccccgccgggcgggccgggggaggggcgcgcctccgctcgcgtccgaggcggggcccgcggtacctttcgtggcacggt

SEQ ID NO: 33915 - DNA, 279 bp, Mus musculus
  source 1..279: mol_type = other DNA
cagcctgctggggttgcatggctggcctccctgaattgatttcctttatgtcatttgaactatatacagtaaacctgaaccctgaaccttcagagccaaggatctgcgtattcatgccttctgcaaatgtacatttacatactgctgtggtgcatgaatgctatagctatctgacagttttacccgattttacatttgaaaaattttaagttacatttaaaagccgtagattaaaacatatataatatcattgttttcttgggacggtacagcccctcg

SEQ ID NO: 33916 - DNA, 402 bp, Mus musculus
  source 1..402: mol_type = other DNA
gcactttatttttaagaaaaggtttactgcaccttagtgaccgtgagctccggtcctcctgccgatccctagggctagggcagcccaggctagactgatgctgagattacaggaatgtacccagggtcttttctttgaatgtatcttgtcactacacattttaagagataaagttaatcttattttggtgtttttagtcatacatgaagaaaaaggttagataatataagacgtatctaccttgtagtactagtttttaggcatgtgcatcgtaactcagcctctaggtcctagtcgcagacgcacacttagaccagagtcttccgcacctgcgtgctaaggaagcgtgggaaggcgcgcgagctgcgccctctggcggcggtgcgttgtactccgcacgcg

SEQ ID NO: 33917 - DNA, 140 bp, Mus musculus
  source 1..140: mol_type = other DNA
ggaccaaacccggtcccactgaaaacgctagtccaataggcctcctgggacaactaaaaagggcttttctaataaccgcgtgccccctcggccccgccccaagccggagctgcgcacgcacccaccacagaggcggtgct

SEQ ID NO: 33918 - DNA, 457 bp, Mus musculus
  source 1..457: mol_type = other DNA
tataatagtaaaaccactaattctgaagtacttgaattgaaaacactttcaaagaagtgtcaagttgtctaccagaacctgaaagagaattcgtgatactctctcagtcacctggtgtttactggactctcaggtgcctgcatacaggtccatttcccactttcagaaaatagtaagtaaggtccaaccttagtttggtgggaacttctgaccccagagtcagacgtcagaaggcggtggcgcagcggtacctagtggcaccgccaggccacatccagtgtacgtggcactgaccgtagttctcctctgggaggagcctcaatgtatttggtgagatcttatcagagtaaaaaagtccgctttaccgggctagcaggcgtactcgccagcccgcatgcgcggagccgcagcggtcggacccagaggaggcttggggagaccgcctatccgtcagctc

SEQ ID NO: 33919 - DNA, 356 bp, Mus musculus
  source 1..356: mol_type = other DNA
gcctcctgggacaactaaaaagggcttttctaataaccgcgtgccccctcggccccgccccaagccggagctgcgcacgcacccaccacagaggcggtgctacctcccgaacagccggcgtgcgtgtagccacgcgagcccggagcgcatcgcccgaggtgagcggcgtggggggctgtggggcagcgagggctcccggagccggttctccgagccgaggcgtccgtgaagcgggtaagggaggggaccccgggcgcggtcccctgcggcggggattcccttcccgggcgcaggggcggggccggggcgcccctgacgcagccgcgggggtgttccccgcctggtgtcattccccg

SEQ ID NO: 33920 - DNA, 373 bp, Mus musculus
  source 1..373: mol_type = other DNA
aggtttatttcagaggtttaaacattgtacataagtagatgtacagggtctgggcagccccctccttggaaggatttctcagaagagccacagttggagagttcacctcctttctgggatgttcaggaatgctttgcctccttgcaaggccagcctggtttttgtctctctcagagaatcaccttctaggaagcatacattcaggtttgcatccttcttagactccatctctgactcggaggctacgtgtgggtggatcacctttccacatcgatggtcaccggtgtgtgccgcggcggcgtgtcacctgggcgggtcccgggctgcgcggagccccgcctctgctccctcgcggttgacagctcagctggtg

SEQ ID NO: 33921 - DNA, 163 bp, Mus musculus
  source 1..163: mol_type = other DNA
actgtcctggaactcacaagcgttcttagaaaatgaccatcagacagggggaactttttaaaactcatcacagtttatttagtcattatttacttgagggtgtcagactctatcatgttagcaacatgcctttgacaacctcgcggaggcagaacctggccgc

SEQ ID NO: 33922 - DNA, 351 bp, Mus musculus
  source 1..351: mol_type = other DNA
tcattgatgaggacaccaaagaagagagagatgagaactcttccttaacggtgattatctagaggttgtgtacttcttcatttattaatatatgcatatatatacatatatatatgaataaatatatataatactaaatattgctgatctctttttaaactcctgcctgtgcagcacgtgcatggaaaggattcccctggaactggactgatggttgtaaaccagcatgcgggtgctgagtggaacagccagagttcttgaaactgtttaagaactttgtgacacacagattataaaatattatacataaaatgctctgtaaaaaaaatctgaaaatacatagctttacag

SEQ ID NO: 33923 - DNA, 111 bp, Mus musculus
  source 1..111: mol_type = other DNA
gttttcttcttcagcttcttggagagacccaccagaaaatgggcacagagtttcactctggagaccagcctggccttgaactcacagagatgtgcctctgccactcagagt

SEQ ID NO: 33924 - DNA, 484 bp, Mus musculus
  source 1..484: mol_type = other DNA
ctctcccactttggaaattgttagtgtaatagctttatcttttaaaaactatgcacacaaacgtccatacaatgttcagtgttgtttggaaacatttatatgtaaatggcattcgacgtatatgaagatggtattttcaattgtattgcacttataattatgcattactcgcagctattaataggttataaagagtattcctggaccctagccagagcatcttaaggaatgtcctcttaagagtactttgctaaccagccaagaagtgtgtgggtgggtgtcagccgcccccctttccgagctcatgggcgggctcggcggtcgagcgggcggagtacggggtgctgctcactcagatccctccgcgcgcagaggaccggcgcttctttctgcgggaaacccctgggcgcgcggcggcgacgggggcggagcctcgcggtgggggccgaggcggaaggacacgcgggccgcccagccgcgcggc

SEQ ID NO: 33925 - DNA, 409 bp, Mus musculus
  source 1..409: mol_type = other DNA
gacaagccttgacacagatgacttgtgggaaccagaggtgtcagatcctctggagctagagacagctaagcactgatcctctctggaagagcagccatttgatggtctaagaaagaatttgctgttaactttctatcaagtcctgtttggtcatcaggtgtgacccaaagtcaagtcttttctgcaaggatagaaatctaacgtcgttccagagagagcaaacggcagtttgccgactacaggatactgttgtttgctcatgctcttgctttaacaaagctcaatgtgtgtccattttaaagttatcacctgaacagctttttttttttttaactatagataaggttaattattggtaaacactattgcttcatgacttcaacagattacatcttgagacaagaaggta

SEQ ID NO: 33926 - DNA, 334 bp, Mus musculus
  source 1..334: mol_type = other DNA
attttaagactaagattgagagtgctaatattgatgctagcccctggcagccacaggtgtgctcaagtgggagcatggctgcatgcacacagccacagtgggggatccccactctggtagacatgggtctttgaggactctgtcctccctgtctccttttgagggattctgaatcaactgcttgaagagctggtattaaaaggttatatgaaagctgcttcttatagaaatggtaagaataacatctgcagcatgcaagcttgcacagctagataccagccaggaacagtgcagctatgtacatgttagacatgatgcggggcttccagagcct

SEQ ID NO: 33927 - DNA, 352 bp, Mus musculus
  source 1..352: mol_type = other DNA
cagaactacttccccagttcttccaagtacatagttctgaaagagactctcttacttacatttgatgttaagtaaggggtgttatttatataatataatcaaggctgaatttacctaacagatttaatcccttctctggaactcctgctagatttatctcatctcccactgggattggtggaaggacacacaccttgttccttaatctcctaacggtgtgtgtgcttactcagtctaattatgctcaactattataaactttaagaggaaagaagttactatgagatttaattcccgtttatttccaatataaatcagcctgctcacccggggcaggtaagggcttcactgc

SEQ ID NO: 33928 - DNA, 308 bp, Mus musculus
  source 1..308: mol_type = other DNA
gatcttttataattttgttactgtttatcaactgtaatgttgataaatcacttctgcgagaagaccatttgatccacaaggggtcgtcccaggctaggctgagtgtcagaccttatggaagaccatctattaggctcgcactgcgcgcccagggcagcaagcgtgtgagggcagcatgcgtctgcaggatcgcgactctaccaagcggcggcgggtcggccatcggctccgagccagtcctggggtgtagagcccccgtggcaggaggcatgctgggaacattccctgctcctcccaggaaatgtcct

SEQ ID NO: 33929 - DNA, 485 bp, Mus musculus
  source 1..485: mol_type = other DNA
ggaaaattcctagagttgataaacacttaaaatattctgggatcccagtaaccctaaataatataaaatatcttacagtaactctaaccaagcaagtgaaagattgtatgatagacttcactcttcggtgtggtatgtgccaccttttgaaatggcattcatatttggtcacctatgaagttctcagtcaagaacctcataatggagtcacaaaatgaaataaacttttcttaatgttttaaataaattctcaattttggagtgtttaccatcagactattgcataaaataatgatatttcctttagaagaacatgtacattctctgcagtgaactgtaatagttgacaaaggatttaaaattggcaacaaaatgtatcatatttaacacattgaaagaacactctttaaagaggaaacctctattggagaatagtcttcatttaattattaatcattgtcttcattattaactgatgaacgagg

SEQ ID NO: 33930 - DNA, 485 bp, Mus musculus
  source 1..485: mol_type = other DNA
ggaaaattcctagagttgataaacacttaaaatattctgggatcccagtaaccctaaataatataaaatatcttacagtaactctaaccaagcaagtgaaagattgtatgatagacttcactcttcggtgtggtatgtgccaccttttgaaatggcattcatatttggtcacctatgaagttctcagtcaagaacctcataatgcagtcacaaaatgaaataaacttttcttaatgttttaaataaattctcaattttggagtgtttaccatcagactattgcataaaataatgatatttcctttagaagaacatgtacattctctgcagtgaactgtaatagttgacaaaggatttaaaattggcaacaaaatgtatcatatttaacacattgaaagaacactctttaaagaggaaacctctattggagaatagtcttcatttaattattaatcattgtcttcattattaactgatgaacgagg

SEQ ID NO: 33931 - DNA, 425 bp, Mus musculus
  source 1..425: mol_type = other DNA
gccaaacatttctttaaatgtattttcaaacacttatttctctcccaacattctgagaattacaagatgtcacattgatatggagagaggctatcagcatcccattgtcaggttattgtaataatgccttcaaaacaaatagcatcttgttgattttcacaactacatcaaatatgtcaatatagtaatgatccattgcattcaaaatttaagtattcaatgtgtggtttttattaatagaaagctatcaaaggcaaaataaagaaaccttaaataaggctcttaatacatccattagaaataactaaggaggttctgtagaaacagtcctgctgaagctccagaggttcatacataggctcacatgtttaaccctgaggtccctatgggtacaaatgctacagaagcattagggaactttgagg

SEQ ID NO: 33932 - DNA, 343 bp, Mus musculus
  source 1..343: mol_type = other DNA
ctctattaaaaatagccaacattttcgaaagctggttaaatggccatcaacaaatgtatggatattgaaaattcaaactcaaaaagacaaatatggtatgtatttgtttatatgcgaatattatctattaaatcaatgataaccaagctacaatcagtaccatagaatttagttatacaggaaggttttggtcatctgacactgggttcttttgcagagaccagaaccagccttgttgagtcatttagatttctgaattgtgatttaacctttcttactattttaaagcacatttaatatattttgattatatatatgcttttatttctgttctagtagtgac

SEQ ID NO: 33933 - DNA, 358 bp, Mus musculus
  source 1..358: mol_type = other DNA
ttccttgagaaactgcacttccctctcttgggagaagcatgagcaaatgtctcagacaaaatctaaaaatttctttaaatccttttttgagtgactccgagccctgacataaaaagtgactacttagaaaatgcttgaagcgaaatatctctctggtgcttctcaagaagagcatgttggccaaccttccaataatgagcagcattctcttcctcagtgatccctgacaagtgaagtctgatcaagatgacaaatgttcttttcctgtccacaagatctataacttggggtagtattttcccacccaagaatttctaagtaagcacttatggctgaattttcacaaaataaatgagtg

SEQ ID NO: 33934 - DNA, 516 bp, Mus musculus
  source 1..516: mol_type = other DNA
ccacataaatgcctttctgtaaccccttcaaaacagaaatagcatatttttgattttgataacaatatgaattatgttccatagagtgaaagagtctacatttatgcactaagtattgaatgagggaaatttgtaagcacatagctagttccaaataaacttgaaaacaaaacataagtccaattaaatgctttcttttataagttgctttggttgtgggtttttgtatcagcaatacaaagtaaaaaatacactgcctagtaggaaggattgttggttattcccacaataggtagatatctcacaagtaatcacaaaaatgtgtgtgtgtgtgtgtgagagagagagagagagaacagacagacagacagacaaacagacagacagaaataacattatcaaattatgggcttatactactaagcagataagactacagtaggactagggagactcttcttgatcattcctgctggagctcataggctcacatatttaaacctatggtactcattg

SEQ ID NO: 33935 - DNA, 486 bp, Mus musculus
  source 1..486: mol_type = other DNA
tgagagtttcatatttgtatacatgaagtatgataatatccatccgaacaagacacctacagtggtcatggtcacacattcaaaattaaatatccatctaataacttttcgctgctctaaaatgtacctgaactgtctcccagtcagcagaaacacagctagctgtagccctgggccaggtccgctaaaaatagatctgattgtcactattaaaaatatttcaaaggtagattgatctgtagttaaatatataaaattagttatcataggtccccacagacttatggggaacctgttactacaaaaatgtcttagcttcatttcaagttaatcaaatctattttcattgtattcaggaggagtatttcccccgaaaaacctaattatggttgcctttaatgtcagtttgccacaaagagactaactcaaagtgtcctgatcacattaactgatgtgagaaggcccaccccgattgtgggtggaacc

SEQ ID NO: 33936 - DNA, 445 bp, Mus musculus
  source 1..445: mol_type = other DNA
ctgtttccaactgctgctggatgaagccaggagagtatcattaagcaggactgcacttgtactttcaataggaatcctttttttttaagatttatttattatatgtaagtacactgtagctgtcatcagatctcattacagatggttgtgagccactaataaagtctgtacatttataactatttgtataacttcattacttagctaagtatattaaagaaaaatttagcctataaattatacaaatatttttaaaaatacttttattaataaaaagattatatgtttgaaatctcaataaatgttgcattgtaggtattcataaaataaattcaaattccagtaaaaaattccaaaagattatacttaagttcaatctagtaaagttattctaattcctattgcttctttatacattgaaaataatagtgtaagaagtgcactt

SEQ ID NO: 33937 - DNA, 453 bp, Mus musculus
  source 1..453: mol_type = other DNA
cttaatgtttatcaataaccctaggggaataaaatggaattttatagatataaagtcagaaagtagacatctgtccacaaggaatgactgcacttgatgtctggccatcttcatgcatgtggtcaacctctgagctgaggactgaagttccccatgaggagagacactgtgagacaaaggtacactctctcttgtgacatcagtcacatgggccacataataaggcagatactactaactgatggaggcaaaggtatcatgcaatacttaatgaaagttgcatcattgcaagttcccaaagtttgcaagcaaggatgctgaggtgttgtttcagccagatgagctcacactgtttgtttttgcagttgaaactcacacactgaaccccctaagtctttactaaaggattactcaacaagttaaaaaaaattatctccttgattctcagaattc

SEQ ID NO: 33938 - DNA, 598 bp, Mus musculus
  source 1..598: mol_type = other DNA
gacagtcaagattaaccctcacactggtcatggctttgaggtagcttaccacattcattgttctgaaaaatgagggaaacatctatccatgtatctcatgaggcaatcaaaatatttaatgggatgtttgtggtgtattgtaaccaattaaaacgtcacatgctgttgcaatacagaaacacctgataacagctggattaataaattagtcagcttgaatgaactctacaagactgtcttgatctctctctctctctctcacacacacacacacacactgaatcatgttatcgtcagagacattaatgtttgcctcctgcattaatttggttgtctacagtatgtagagctccacagtacatggcttggaagctattataacttcccttatggaaagttaataagcaactactttattatttagaactttactcttataacacaatttcaggattttcataccttgtaaaatgcaaatattgcaaagccattcaagtttatgtcaaggttaactttaatctgaactggttatttattacttccttgataactttttaaccaaaaggttaatgtttatccttaaatatattttacttca

SEQ ID NO: 33939 - DNA, 356 bp, Mus musculus
  source 1..356: mol_type = other DNA
taatctgagagttttcagttcactgagagaagtcatcatctcacatatccatcagtgtttcatgtaggtctcaaaaagtcatttatggtcctctaagagaagcaggcttcattcttaagactacatgactttttcctgtaagaaataagtcaatggagcagttcaacttcaaaactgtgagagctgacgtttagggtgagaaattacctatttttttccacctttggtctccaaggaaatccgaaggtgctaggattccaggagccactcatttcttgagtctccctcaaggaagctggcatggccagcggcagcccagaggacaggcgcatgctcggctcgcccgcagacgtcat

SEQ ID NO: 33940 - DNA, 304 bp, Mus musculus
  source 1..304: mol_type = other DNA
gcagatctcaaagcccctgggggcatgggtgatatgatctgaactgagtatgatagctagctctattagatcctgtagagtctataagggcgaagatcagattttgactttgagctcgggatggccagcgcacagccttggcccgagcctcagtgcctaccccctgttcctcgggaagggaggaattcaggggggcaacgggcgggcggcgttccccgcgctagttcctagaggctggggcagctgggggcaccggtctgatccggcggtcgagggggacggagggagggcgcagatcacccgc

SEQ ID NO: 33941 - DNA, 513 bp, Mus musculus
  source 1..513: mol_type = other DNA
tcaagaccctcgaataactggacctgctggatgggtcatgacaggatgcactgtgccaatgaggaatgtaatgagcacagttattctgaatcgatacatacgtatcataggaatatgtggtgccgcacaccttcactcccagtgtgaaaagaaaactgtgaaaagtactacaatatattatgatctcaaaatgttttaaagttacaaaaccaaatgacattatgtatccccaatgaagtataaaatgtaagtttgtggaaaaatagcatcaattataagctacactgatcctagagtttaagactgcgttcaacttcatctaggacacctggcccaggacccacatttctggtcacgctaagcacacattttcataaagtaaaaaaagttatggtgtgtacatgtgtatgtataaaaaactcaataccagtattgataaaaattaacatattattgggtattcatagtaactcaatccaaacacaattttgaactaataggatttacctatta

SEQ ID NO: 33942 - DNA, 323 bp, Mus musculus
  source 1..323: mol_type = other DNA
gcaaggtagacggcctccacatgcctgtgtaccctgtttcatgtataccttactatgatgatcatcattttgcagactcagtctaactgtgatatcttagatgttctaaatctgtgagttacaaccctcttgtgtctctaaaatatttatattatggtttgtaacagtagcaaagttacagttacctgcttatgaagaagagaaattcttcttcctgtgtggatacacattgtttattcggactagactttgttcccagctggaaaaatcaccagatataccctggtatttctggagtttgatccgttcaggaactgggcgtg

SEQ ID NO: 33943 - DNA, 391 bp, Mus musculus
  source 1..391: mol_type = other DNA
tcgaggccagcctggtctacagaagacaagtctacctgtcagctacaattgtctacaggttcagtaaaccatggcagggatcaattcttttgtatagttatacgtacagttatatagacagctacagacattcgtttctaaaacttcggtcacttccctctcaagtgacctgaaagcggctggactctgctagagccgccacccgcagggctgctcgcagcaccgcgtcccagcaaatcccggggacctgcgtccccagagcttggcgacccaacacagcgctcgggcgggcccatccgggcggcggcccgcagctcactcaggaaccggtctccagaggccagggtgactggcgacatgccgtcacttccgcctagaaggtaagggaaac

SEQ ID NO: 33944 - DNA, 293 bp, Mus musculus
  source 1..293: mol_type = other DNA
ctattgcaattagatattatctctatacaatcattttcaactgtatataatttatggggagcttaagcctcgcactccggcccgggggcagcgcgcggcctctgggttctgcgatgcagacggccgcggcaaagggcttctccccggcctccctagcgcggccctcgccgcgtcggctcaccgtgaacaccactgtgcggggaaccgcgccccgcgccagcagacagcgctggtccgattggaagtttcttccgcccggcgtttcccttaccttctaggcggaagtgacggca

SEQ ID NO: 33945 - DNA, 163 bp, Mus musculus
  source 1..163: mol_type = other DNA
tgaagcacccatgaatgcttttcaacactgcatagatctatgctgaacctctgctctgagctctagcctcaataaacactcagcacattaagacatatggaatgggaacccttgccaaacaaattctttggatttatctgtcagttatagtcccagatgtgac

SEQ ID NO: 33946 - DNA, 377 bp, Mus musculus
  source 1..377: mol_type = other DNA
aaggtgtgtgtgtgtgtgtgtcccacacctgcgagcagtaacaagcagcaaagaccagcgctgctctctggagagctgagctgctgtgcttaaggctttggcgagcttcccggcagaaagatttttccagggcccagcgcgaggcaggcgtgggcttccactcccggctcccggaaaccagagagcactggaaaattgtgccctcgtctctcggcaaccattgacccgaggagccaatcagagggcggcgttcgtccggccccccgccgtcagcgcggggcgcaaggatcccgcggggccccggccggcgcgccccgccctggctcccccgggaggccggccgcggggcgggggcaggggcggggagagatcggagg

SEQ ID NO: 33947 - DNA, 313 bp, Mus musculus
  source 1..313: mol_type = other DNA
atgaggccatttgccaaaatggctctcagtagggtaacccagactctcaagagtcaagagaccacgtgacaagcaaccaggagctgctcctaacttcacctctgggcctggaagagatccttcaaggtggttcccagagaagccactgaaggccatcacccaccagccaagctctgcttaactcagaggtggatgcggagaaaccagctgcttaagccatttggtctggactatccgtgccttggctggcaagccgggacagccagtttacacaacgtgggtagccaactgacatggtgtcacccagcagact

SEQ ID NO: 33948 - DNA, 677 bp, Mus musculus
  source 1..677: mol_type = other DNA
ctatagagtgtatatatagtcttgccggcacgtggccggtgccacctccttctgcctcgcgtgcccaagaacgcgtggaccaagcgcctggtcctcctcgtccggccgccggggcttccgggggctccgggctctcggcagcggccaggcccgagcggcccggcgggcgggggaggggcgcggcggccgggagcgtgcgcgcgcacctcacactccgccgcccggggacgcccactcgcgagtcggggcggctagccgggcccgcgccccccacggccgagccgctcggcccaaccggtgtcggccgcgcagccgctctgctcctccggcctccacaggccagggaccagcccagggccgcggacccgcgccgcagtcagcgcgagcgtgcgagccacccgaggccgggccctgccggagccgccctgcggccgcgggaggcgcggctgctcgctcgcgcgcgaccggccgccctccctcccgcccgcctctcccaggcggtgcgaggaatgagccggcgccggccccgggctgtcggtctgagggccgcggcccggctacctcgcacgccgccaccgaggcgcaggggctcggccgccgcggctgggctcggccgagaagcgggcggcggggggcggccgctcggctgaggaggaagttccgctcctgacagagcg

SEQ ID NO: 33949 - DNA, 268 bp, Mus musculus
  source 1..268: mol_type = other DNA
cattccccttccaagggtagaagaggtacgcaggaagcaagctttattcttttcaaagcatcctataattttctgtgcaatatattaaatgggagtagggacaggtcccctcaccctctccctgaaatctctgtgagtacatagcagggatcagatgcatgagagagaaactctatcacgggtgacccagcagcatttctaccaaccctgcagctatgaattcacctttcacaggtcagggcctagaaaggcatccctgggccttggc

SEQ ID NO: 33950 - DNA, 265 bp, Mus musculus
  source 1..265: mol_type = other DNA
tgaaatatgaagtcatggctattgcagcctcagccccgtgaactcagaaatctgcctgccctcggttttttaaaagtacaaaagatccgtggacgccctgcactcatttaaaggttgcccggggtcgactatgcagtagttttggccgcctcaagttgaagcccacagtggctgcttcccgagcaggcaagcggctctggcggagtccaagccagggagcatgccggcgtcctcactggagcaaagtgagagactctcccgcaga

SEQ ID NO: 33951 - DNA, 489 bp, Mus musculus
  source 1..489: mol_type = other DNA
gtaggaaacagtctccaaatgaatgaatctgagactcttggcaaattctttaaggcgtcaaagaaatactttttaactagtcggacctacaagggacttgtcaccaaccaggagctccccttgattgtaaattcaaagcagcttccacccgggaaactcagtggagctccgcggagcagcagttctaaacttttcagttaagtttagttctggaaaagctagccagctgagagggttctggttccgagcagctgattcgctatagcctctgcaaccgagagcctgccagaatgcttcgggctacacctcggccgactggaccacgcaccagagaaccctatctgagtttggggtggagcctcagcgcaggcttttcaacgatccagaggcctctccggcggcaggagctcacacctctcctttcgccgcgcgagtggccggcgaggtgatgtcactctggacatggctccgaactgcgaggcccgcccc

SEQ ID NO: 33952 - DNA, 437 bp, Mus musculus
  source 1..437: mol_type = other DNA
aaaaaaaaaaagactgtatgtatgtatgtatgtatgtatgtatgtatgtatgtatgtatgaatggatggatggatggatgaatggatgaatgcatggataaatggatgaatggtagatggatagatggatggacagaacaagcaagaatctgcctgttaaccagatcgcagagtctgaggcagtgtcctctagctgcatggaggggaagataaacatcaactcagagggaccaaatactgttctaagtgcttaaaccaatgacattttttttgtggtggtatcacacagctgataacactcatggggccccccgagttcatggattccaggggctcctctcatgcttcctccctcaagaagggagcagaactctttaggcaggaggagccccagcaccgtgaagactgtaaatgcagccacctttgctttctgcaaa

SEQ ID NO: 33953 - DNA, 556 bp, Mus musculus
  source 1..556: mol_type = other DNA
ggaagttgttctaattagtaccacaggggaggcaggcccacccaactacagggtggtgggttagcaactctcccaagcacatcatggaccatgagggggtgggaattcactgcttgctggctgcgagacactcgtggggattccaccgcgaaggaatgccgggcgtccaagtcttccaggccaacttttaaaggtcaaggctgagtgggctcgggcgtctcctcccctttaagcgggtggccccagcgcctcctccgttacctggagcggggagggggtgggaggcgcgggcgggcggacgccacggctcttccgggttgctgcgccctgggatcggcgaggccggctccggggcccggcggctggcggagggcgggagggccgcgacgagccaggtgcgcacgtccgcgccggcgctgggctcgctcggccagcggggagagcggagcaggcgcgcggcccggcggagcagccgactctggagcagccggagctaggcggagagtcgctcccgccggccgagcatggggcgcccggcgccgaggccgctgctgct

SEQ ID NO: 33954 - DNA, 262 bp, Mus musculus
  source 1..262: mol_type = other DNA
ttttatagtcttaggacaagagagatatcttggtacttaagagctcaggctgctcttccggaagcttttcaatggctgtgacatccatggccaaatatacatatctgaattctgcacagctgagtggccagctatgtttaagcccttgtttacaaaagggtagctatggggtgctaaaacccaacaccctaagctgtttttgtaaagattaaaatgtgacacagttcaggttgctgggtgtggcttctgccagcctcaccac

SEQ ID NO: 33955 - DNA, 450 bp, Mus musculus
  source 1..450: mol_type = other DNA
gggcatataaagttatgtttctggccaggaacacagtgttggaatgggttcattccaactgttaagaaactaatgacagttcatttgtaactgagtgctgaggcattccgctaagtgctttacaagaatgacgtctttgtgataaggctagaacctaggcgattatgctagagtgaagcacaatgtgtagaaatagactcaagtcgcgaagcgttttgccgaaagacgcgtccccgggagcctgggctttgggaggggcccttggggcgcgaaccccaggttaactttccatcagctcatcccaggtggtccgcagctgcgtgcgggtgcagccagagagcgccggggcggtgggcggggcgttccgggggcgtgtccccgtgaggccaccgccttcgcccttgctcgcctcgcggggagctgcgggccaggccggagctggagggcggg

SEQ ID NO: 33956 - DNA, 491 bp, Mus musculus
  source 1..491: mol_type = other DNA
attggtaagaacaacaacaaatactttgttgtttctgatgttaagtttcagccatcacagcaactctgccaggccagtctgatgagactgcttgagccacctcttttactaaagatgggtaggtttctctgccataaaaaggagaaacgatttcattcatacagtgctgtgaatgaatttcttactgtgatgcgcgcacgcgcgcgtgtgtatatcaccatccgccgccgccgaaggatgccggcctggattctgcagagaggaatccctcggagtcgtgcagctgctgtccgcaccctactccgcaggctgctcactcaagtccccagtgttctgcaggcgggagcgctccgtagcccttgagagacccagacacccgcgtcctgggcaccggcgccctcctgccgggagcccagggcaggcagtcgctagcgcggtctgggcccggctggccgctccggtaacggtgacgtgcacgcgtgggcggagcc

SEQ ID NO: 33957 - DNA, 231 bp, Mus musculus
  source 1..231: mol_type = other DNA
gccatagccctgtgctgtggaaccttaccagtgcactaggaacatcttcagatgtggctctcctgaggcagctgccctacctggcaagtatctttccatcttggagcaagagaagtttccagatacaacacttgaatctgtagtactgagaccctgccgtaggaccagagattcccttaccatttcagagcatgtgccgtaaacagtaagacctgccgccccagcgcctgg

SEQ ID NO: 33958 - DNA, 346 bp, Mus musculus
  source 1..346: mol_type = other DNA
cacacaacatgccattatgttacaagcgcctttgaaacgtttccttgataaacatttctatctcagtgttagacttccagagcttaagaacctagttgcactctggaaggtcagcctggagcctggcctaggctcatccacttactgaaacttatttaaaaggaaatggaagctatttacctttattgaaaccagtatttgaaaagctcaccatggtgagggaagccacctaccaaggggatgtttgtctccttgcaactggaagcttcctggatcttttccgttaccggatcctcctatgagagatgtcatggaatcttctactgtttatccctgcagccacagg

SEQ ID NO: 33959 - DNA, 462 bp, Mus musculus
  source 1..462: mol_type = other DNA
gggaatttgtttaaaaactgggttgttagaaagccccccccccccatatgtgtgaggccatttcataatcactggtgagcgcatctctgtcatgctattatcacaccaacagaaagcaaaggtaaacttagcgatagtttagattagtagttctcaaccttcctaaagttcctcgtgttgtggtgaccccctaaccataaaaataattttttgttattgcataactgtaatcttgctgtttagatacttgcaatagtttaaaaatgtggggccactagtaatctgtccccacatgggcctagtgggcaagacaaaggaggaaggggacagatgcctcccggccctcttctcggaaggctctagagctctgagcgcccccgcattccaccgctttgtgcgaaggggcgaaccccgcgggacacggcgtggagctgccggcccctcccgtgagtcgccctggcc

SEQ ID NO: 33960 - DNA, 633 bp, Mus musculus
  source 1..633: mol_type = other DNA
actggcaatgtgtaaataatagcaaataatatataattgatagtgactaacagtaaatttcccttaattttgtaaaacgcatgctagaatacttaatatttacattttagcacaagctaaatatattcgtgttaggatgggcaagaataaagtactgtctttgcacatactgtgtgtcatattttacagcgaataatcaaaaagtagaattatctagtggtctctaactacttggaaccaatgatttaaactaatgtgtcaaacgtcctttaaaatatcatctattaataagctggtctcatagtagaaccatatgcttaaataatcatgattaaagcatcctctaaaagacacttctttacataaaattacagtgtcatagacagaatatgcccagcacaactatttttctaactattgatttaaaaaaatgctggctcacaaaatgccagaggaattttccatgttcatatagtgtctacttgcacttaaatattgcatcaataattggccagacgctgtagatgctatggcttcgctaaaatatttgggctgtgaaaactcccacactgtgacagatccaataggatttcccattaaatatcaatttagggggaaaaaattccatccccc

SEQ ID NO: 33961 - DNA, 413 bp, Mus musculus
  source 1..413: mol_type = other DNA
cagagtggagattgcagctctggtctgtcccaatctctctctgttgctaatgaagaaaggaacaaaacaggcagagaccccaaggatgttcctgcggtgaccggtaaactaaaattgactttaagcctcccacagctgctggaaaaggaagtgggctggatccgctacccgtgtccctggccggcaaggacatgtggacgtggtgctgccagcaccgggcttccaagaagaccacagagcagccggggaaaggctgcaaggctgtcctggaaccgaccaacacaatgtctaagcagtgtcatatctgactttttttttaaaaaaaattattattcattgcatgatttatttttagctcgaaacaactgcatcctaaaaatggactagggcttggcctcccagcccgtgcctgg

SEQ ID NO: 33962 - DNA, 283 bp, Mus musculus
  source 1..283: mol_type = other DNA
ggcatggattctatgacgactaagagaatattcacaaaaacagttgccaactgttctgcactttctaatactagaatcctggtagtttccagtaggcaggcatgtctgctctgcaaacaatgagacccctgcgtcatgtattcaggaattcaggatgaaccccgtgccccgccctccgctgcaggtgggccgggccggcagcggggcccgcagcgctcgcagctcttggctggcggccgcgccgggctagcagggctgggctggggctgcggggcggcgccgg

SEQ ID NO: 33963 - DNA, 279 bp, Mus musculus
  source 1..279: mol_type = other DNA
aatctatcagatccaagacattctggagtctgggtctgtgtttactgactccgaccagctctcctgggaggcccctgcaatgccagtgctaaggctggcagtgggagtgggagttggggtaatctgaacacctaaggtcctcttaggcagatatacctgagcaacccctggcactggccaatccaggagtttccggtgagctctcagatttgcagagatagcaacgccctgctcagcctgtctgacccggacccctgggtctagtcacagcaggtgcgg

SEQ ID NO: 33964 - DNA, 403 bp, Mus musculus
  source 1..403: mol_type = other DNA
ggcacttagagtgttgctaaattaatgcacaagctcccttcaaacctagcaggatgtgagtgagaggtctgactccctttccctgattgggaagcagtgtcagggcccagggcctccgcctggcgcgcctacacgcagcggcaggagggagggtccccagcagcggcctccgcccgcggcctgggcgcttgcaggactctgcttgcagccctggacactctgcctggcgccagggcctcaagggacatatgctcggatagctacaggagcccaagcccaccagcgtggacgaaggtggtgctacctccaagggccggagcgggtgcgtgggaccgggatctccaccccagggcgcccccagctggccgctcgccgcccctccaccggcgcccgccgctcccgg

SEQ ID NO: 33965 - DNA, 501 bp, Mus musculus
  source 1..501: mol_type = other DNA
tcaaacctagcaggatgtgagtgagaggtctgactccctttccctgattgggaagcagtgtcagggcccagggcctccgcctggcgcgcctacacgcagcggcaggagggagggtccccagcagcggcctccgcccgcggcctgggcgcttgcaggactctgcttgcagccctggacactctgcctggcgccagggcctcaagggacatatgctcggatagctacaggagcccaagcccaccagcgtggacgaaggtggtgctacctccaagggccggagcgggtgcgtgggaccgggatctccaccccagggcgcccccagctggccgctcgccgcccctccaccggcgcccgccgctcccggggctcggcgcgggcctggggaatcgggagcccgccgccggggtcgcagcatggggcgtcgcggctcggcttcaacctgctgttctgggtgagacccgaaccggcgggccggttagggggccagggtccccggggagg

SEQ ID NO: 33966 - DNA, 569 bp, Mus musculus
  source 1..569: mol_type = other DNA
taaagactaagaaaaagtgtatattagttccaaattttgagtaattatctacacttccccagccatttattcatttaatgaatatattggctaaatgttgatcaaatatttttgaggtactgtagataaacagtgatcttcatttttctctgagacaggacctgggctatatctgagacagatatagcccattcaggcctcttcctgagttctaggaataaaagcagaactcacgagtgctgacgttactggtcagtttgacatcctgacagatttagccatgtcattcaaagaaacatttcacactaagttatgttaacatactctaaaattcaagaaaaaaaaacaaataaaaattttgaactaaaatgtttttattgtcatacaatagatgaatatgtacgaatctctacatgtttaatggcctatcctttataaatatgagcaaatattaatgtctgttattaacattacagatattaataaaagatatgtttcaaatagtgaacctgtttgtctaaacaagttttatttgatgaattttcaatagatgcttttcagataagaaa

SEQ ID NO: 33967 - DNA, 307 bp, Mus musculus
  source 1..307: mol_type = other DNA
tcaagactataatgatgatatatctagttattaagttgaaacacactaattcaaccgtttataccatgatttttcttccaaacataatcatgctaaccctgatgctcaaaatttcatgatcctcatttgtagactcctcagaaatgacttctttttatggggctggactcatgtttggttctcagcatccaccacacgtggtgcacgggttgatgcatacatccactttcccagcatcctccgacaataagggaaatctcgcgagaagtgctgcgcgcgagatcccggccagctggaccaccgtgag

SEQ ID NO: 33968 - DNA, 466 bp, Mus musculus
  source 1..466: mol_type = other DNA
ttcttagttgcctaagaccatcagaaaacagggatatttatgttatggttcataacagtagcaaaattacagttataaagtagcaacagaaattatgttatggttgggggtcaccacaaccatatgacacttggtttatataagtggcatcttacaaaacaatagtaaagctatttgcttgtattcatctcttactaattagctatgagagccatattaatttttttaaggaaacacagggtaatatatacactgatcagtgtactaatttataaaccattatccatacatttatgaggcaacttctttttctgtaggaaaaaagaagatacagtactgggacctgcaggtcccaaaggcctcagtccctgatggacagctgaggcactgctctgcagagtgtctgcctgtccagcctctgataagcagggaagtgcctgctctgcccagctgggaagtcaacgga

SEQ ID NO: 33969 - DNA, 465 bp, Mus musculus
  source 1..465: mol_type = other DNA
agtatttctaagagtcctgggaaacgctcctcacaaaacgtttgcaaatatatcctggtctttgttgtaaagttttccttccgaatgaaaattatttcatctcacagttttgtaagtgtaaaatttttacaataggcatttccccaaatcacattctaaactttacatctgaactcaagatattctttaaaacacatattctactgtcctagactcttttggacaaaaatattttaggaaagaattccctcattgcactaaggaaagattttcctttgtgtatgtgcacacgcgtgtgcatctaactgattgcatacacaagtgcagttgtggaagtcaaaggacaacctcagatgtcattttcatcagtttgttacaatcccattactactccaccctagaaaggctaaggctgtggcgaagcctgagggtaaccaagagtccacctctgcgcaggcgccgacc

SEQ ID NO: 33970 - DNA, 316 bp, Mus musculus
  source 1..316: mol_type = other DNA
tcagcaacctaaggtgatccatgcacacaggccatggtttttttcaaagaacttaatattttgtagttagctaggtggttagcctacctagcaactgatctgatctagatctagattgcatacttcaatggggagtttgttttcaataaagcctaacacacagatgtctgtaagatgcttgtgccatcctcacttgagcactcaagagtgaacagtttcaagtacttgcatcatatgaagtgtaacagaactgacacttgatctgcagaagtttgtgcctactcaacagctttgaaagagcacttcccaacgctgc

SEQ ID NO: 33971 - DNA, 416 bp, Mus musculus
  source 1..416: mol_type = other DNA
ccgtgctacatgtgagaccctaacaagatagtaaaagtaaagtaattgttttctagattatttttcagccttttaaatacttattcagactgacacactacaaaaatcttctggtaactgaagcaagcaatgtagtttctggaagacaaaagctttacaaattactttgttaaaaacttttctctaaagcaatgaaatcccttctaatgtaggagacaggagaaagcctgtcccgtgagtgctgaaagctttcgggctcgcgaacaccgggtgaacgcctaaattcacccttcgcccccttgcgtgtggctaaacgcaggtcagcggctggcgtcactcagccctcgcgcgcaagcgtactaagagcacgctccccccaccttcccgtgcacgcgctcggagcctgcaactctcgc

SEQ ID NO: 33972 - DNA, 539 bp, Mus musculus
  source 1..539: mol_type = other DNA
ttatgctttaattctgaggaccatatgaaggtagaatatattacctttaaaaattgcaaaaatttatatagcaaacgatattcttaagttgatggccaaatgttaaaatgttattttcatatcatttataatcttgtcacaatccacttaacgaagtttgattacatttcagtgaaaattatcttcccgactacaattatttctttaaacatatttaacccagtttcttttactgatttaaaaacaaaatgaacaaaaaaataataataataaaaaagttgtgcctgaaatgaatcctgttttttttaataaatagccccgtggttccagtgccctgttcaatacaggtgaattggccccaaacagggtccctggcttatctttgtaaacacaaaacatttttgctttctccggttttatgttaatggcgaaagaatggaaagcacctagcgctttcattattgaagggtgcggccggctgcaagactctagtcgtcggcccacgtggctggggcggggactggggcgccttgggcgcc

SEQ ID NO: 33973 - DNA, 217 bp, Mus musculus
  source 1..217: mol_type = other DNA
cagcatgatttgtttttttcatagcattcattaaaacctgatattattttagaaattttgtgtgatattgaaggtgaccatgcagaatttaagtatgctgcagaaagccctcctggcttttcagaagcccctgacactgtcactatcgctaccttttctaaaattccaagataaagactggaggcttcacctgttgctcatctccccttttagcagg

SEQ ID NO: 33974 - DNA, 414 bp, Mus musculus
  source 1..414: mol_type = other DNA
ggtttctctgtatagccctggctgtcctggaactcactttgtagaccaggctggcctcgaaatttgaagcagggcctgccactgactgaccctggagttcactgctacacctaggccggccagccagcctagctttcatttttaaattatgagtgccaggggcctcaggctttaaataattaatctatttgtaatagctgatttcaagtccattcatgtctgtcacctttttaaaaaaaattatgctttgacaatggatataatcaacagtaatgctaccattatgactcaacttgtcatttttaaaacgtttatgtatgtgtagtgtacacgcatgcaggtgagacgctggatctcccagagctgaagttccaggggcttttgaattgcctgaggttaccacaccctgtgggg

SEQ ID NO: 33975 - DNA, 277 bp, Mus musculus
  source 1..277: mol_type = other DNA
agctctgcctaattccagcagctgttgggcgaagcctgagtctcaagttgggcgtgggtagattggtgtccccatcaatccataatgaggcattttatagttataattacagtcatggatctaaaaatttaattggaaaataggcgcacatttctagtttctataaaagaagtggaaaatatatttctccccagcacgtgatgcttaggcttagagcctagtggctataattaggcagcggcgtgtgtgacgtcattccaggcgcaggcgcaccgag

SEQ ID NO: 33976 - DNA, 215 bp, Mus musculus
  source 1..215: mol_type = other DNA
agccagtcctctaaactgtcaacttcttgaaggcagagagtttctttgttctcctgcaggagaagagattttgaaggaattgatgaaaaacgcttttctgtgaatttaaaaactcaatgaagcctgatgcttaagctggccaccctgcttgttctggcagcactgtcagctggcccacccggggacgccgagtgagatatgccttaagaagctaa

SEQ ID NO: 33977 - DNA, 350 bp, Mus musculus
  source 1..350: mol_type = other DNA
cttgttctggcagcactgtcagctggcccacccggggacgccgagtgagatatgccttaagaagctaacgccaggtggtccgcacctcctcggtaggaggcctccgcgaccaagcgcgcgacaggtgaagcttccgcggtggcgcgcccgtcgctggggatggcgtcgccgtggagacgctcgctcgggggcgaacgcaagccggcctcccacaccgaggcgcggagctgcatcgcggtctgtcccgcgagcgcgcgcggccggagttcccgcctccctccggaggacgtcggtgcgtacgtgcgcgtgcccacccctcccgccccgcgacgcgagggcgggggcgccgc

SEQ ID NO: 33978 - DNA, 382 bp, Mus musculus
  source 1..382: mol_type = other DNA
agctgcaggtgcaggggctccagctaaagtttctttcccagatcctacttatatatgcttcatacaaaaatatattatttatggtggaacccctttcctgttgccatggagagagacggccgctgcctccagtcgccatagcaacgtgcgggtgcctcggaccgcaagattgcggggctgaagcccagacccggaaatatatattcccagggagctcatagagcaccagtaattattacacctcgtttacgaaatgatccgcagtgaggactcagttggccttgatcctgcatgatgtgggacaggaacctgcccggactcaggcaagtccctgagtgtggcgccagacttgccagctgccgcgggatgccacgtgaggggc

SEQ ID NO: 33979 - DNA, 503 bp, Mus musculus
  source 1..503: mol_type = other DNA
cggagcctcagggggccgctgcggggagggtcttcttggggccttcttaccccgccccagtccggccgcggctggagttcgagccactactccgctggcgggccggagggcctcggtgccaggcggcgctcgcggtcctggcttctctgtgccgggcccggccgccccctctcgggctggacgttgagtcggagcttcgagctgcagtccccggagcagagtccaagcgcggcagactcaggtactgggagacccaggtcccctagctcggagtcccagtctgttccctggctcaagggattctcctctaattatgagagcccggagatgcggcatccttgggcttgggctcatcccaggagttgcgcctgcagctggcaccgtctcgccggggggcggggtggggagagtgtcgtggcgtacccccacccccacccggcctctgactcactcggactccgggcgggtgttcaactgagccggtgcctctcaccgactttgcc

SEQ ID NO: 33980 - DNA, 345 bp, Mus musculus
  source 1..345: mol_type = other DNA
gtaactgaaaaaccaaatttttttttacttaattttaaagaaatgagagatacttaagtctgttctctcccagtgataggaaggtcagaatatatttgttcccctaaatccatgaatgtaatatttgggaaatacctggaaagtcatgtcaaggatatttaagtcagctagctggtactccatagggagctggcgccaatgagctatagaaagttgacttcctggcttcactgaacaaggcagaaaatccattctgttatttctggagaattgctgagtttcttctggcgacagatgggaaggaggaggccccgcccccgccccgcccccagagctaacgggctg

SEQ ID NO: 33981 - DNA, 354 bp, Mus musculus
  source 1..354: mol_type = other DNA
aaaggtagcttctaccagagattctaagccattttctgatagaacagctaatagcagcttttgtattcagttttgtgtcctgaaaaataataggtatacccctatgggtatgcttgcacattcctgtaattctggtctatggtctacattgtagctctaagaagcaactgcagccatttatgatggatgcaacttcacagttcaatgaaatcctttatgatcacacaaacctgataggagcattatataaaagcttttctaaaagtgaaaaggaaaaaaaatgtctgactttcagtggttttaacggttccatcttatgagaagacaaatctggaatcatccagtctcctggtt

SEQ ID NO: 33982 - DNA, 379 bp, Mus musculus
  source 1..379: mol_type = other DNA
gggcctctctatgtagatcaagttgacaaactctccttccagaatcttgggtttaaaggcatgaatcctgggtttaaaggcacgtaccaatgtttctcattttaagaaatctcttgaggctgagttggcaactgtctactaagataacctagttttcagggtcatttttcttgaggtaagacaatttttgtttactgcatgatttcctaacagatttgaatttctccctgcgctgcccaatcgcggctggtttggggtgatgtcacactagctgagatgacatctaacgtgcggagaggactgggaaaccggtccccacacactgtcggggatggttccggcgaggcggggccggcgggatggaggcggtcgctcgggg

SEQ ID NO: 33983 - DNA, 451 bp, Mus musculus
  source 1..451: mol_type = other DNA
tctccaagcatccagtatacacagttacgaaaccccttcatgaagaaggaaggtgttatttttcctgttcgctccgagaggcaaagacaggaagttcctcatgtcacagcaagtcagtgacagtcagggttagaacaggaataaccgacatcttttacaaatttaataacaatatactggttctttttgattcagactctattttttccactcaaacaaaacaaaacaaagttgatggtttgagaaaaactgggttaaaccaagtggaacaaattaaattgctatggaacttcttagaacttttaatgtgcttatgaacactgaatagtttataatgaaatctgtttcttaaatataataaaattaaaataaacaatatagtgtactataaagcttcagaagagctgctggggtgagccccagggttcttttaaaggagcaggactgttcc

SEQ ID NO: 33984 - DNA, 426 bp, Mus musculus
  source 1..426: mol_type = other DNA
gcccttctttaactttttcagagtgatcgcagagctctgagcgcagcctatcagcctgacagttcctgccccccagggcggaacacattcttgggtcctcgggcgagccccgacccttcaggagccgcccggagacccacaggccgttggctctgggaatctagtcccagtggccgaggacaccaaacccgccccgtcgccctgagacacaaggagcagctttccgggtcgcgccgagcgccgagcgcaggtccgggggggggggggggggggcaccgacctccggacgcccttcccccacccattctccccctcggcgcaggcgcgcagctcactgtgtgagcgccgcggccggcgatcggaaatcagtctccccgccgccgcgcgtgacaatgtggggactgggcccgagctccagcgcgcggt

SEQ ID NO: 33985 - DNA, 383 bp, Mus musculus
  source 1..383: mol_type = other DNA
ctgaatcggagaactgttctacgttaagtgcccttctttaactttttcagagtgatcgcagagctctgagcgcagcctatcagcctgacagttcctgccccccagggcggaacacattcttgggtcctcgggcgagccccgacccttcaggagccgcccggagacccacaggccgttggctctgggaatctagtcccagtggccgaggacaccaaacccgccccgtcgccctgagacacaaggagcagctttccgggtcgcgccgagcgccgagcgcaggtccgggggggggggggggggggcaccgacctccggacgcccttcccccacccattctccccctcggcgcaggcgcgcagctcactgtgtgagcgccgcggccg

SEQ ID NO: 33986 - DNA, 502 bp, Mus musculus
  source 1..502: mol_type = other DNA
aagtgttctatcactgaacagtctggtagattcttaaatgcaaattaggaaagcactggtttttgaaaagataggaatcatttccttgactaaaaacctccaggtagttaactagaagccgggatcaatatttgtaaaaatcctggactaggtctcagcgtagacaaacccaccgtgtggtcacagtggcgccgaaccggcacggcgcaggctccaagggtttcgcgggaaccgcactcctgagtatgacaagtggactctggaacaaccgcgcgctggagctcgggcccagtccccacattgtcacgcgcggcggcggggagactgatttccgatcgccggccgcggcgctcacacagtgagctgcgcgcctgcgccgagggggagaatgggtgggggaagggcgtccggaggtcggtgcccccccccccccccccccggacctgcgctcggcgctcggcgcgacccggaaagctgctccttgtgtctcagggcgacgggg

SEQ ID NO: 33987 - DNA, 503 bp, Mus musculus
  source 1..503: mol_type = other DNA
tttgtatgttttaaaatagtcaaatattgcatcatttagagtagcaagaaatttcctgttgttgctagacaaggataatctcagagactcaggaaatattgctgaagaattatggttcattttaatttgtgtgaactacatttgaaattctttatgtgaaatactaacttcaaattttcaaatttttaacttgaaactaattttgtaacattacctgccttgttacctgaaacgcgatcttttctgagatagaaatgtcaacatgtcttcatgaattctttttcattcttcctccctccccttctgagagagagagagagagagagagagagagcgctcactttgtttctcaggtgtctcaaactctgagactcaagtgattggggacagtcctgaggagctgggactgcaccacctctgacctagatagaatctgtatggttagagctgtactctcagtgtttgcaaagctactggaggtctgaagaagtacagagaccccc

SEQ ID NO: 33988 - DNA, 502 bp, Mus musculus
  source 1..502: mol_type = other DNA
aaaagagaaatattttcaaatcttattttctgtgttctctgtgcagccctggctgttctacaataatgaagtttaatacttcaggacaaacttcttgttaaagaatgaatcacggtttcctgattactaagctttgagctaaacaaaggatatttaccatttgccacataccagacattgtcagatcatttcagatagtgttatcttaatttgtataatttccctttgaaatatcttgttactttaattactgccatttctgctgaaatgtacacttcacaaggagccatgccttacaagtatagtcttctacatacaaatgttcagtaaataatttgtctaatatcccaagtcagaagttgacctctggtacaggaagtatttcttaaattactcaagagaaccttcttcaattcattacagtttatttcagctatagatagtttatctgtaagagctatccattactcttacactgcaaagtctttgtcatccccttgtt

SEQ ID NO: 33989 - DNA, 511 bp, Mus musculus
  source 1..511: mol_type = other DNA
tcattcttcctccctccccttctgagagagagagagagagagagagagagagcgctcactttgtttctcaggtgtctcaaactctgagactcaagtgattggggacagtcctgaggagctgggactgcaccacctctgacctagatagaatctgtatggttagagctgtactctcagtgtttgcaaagctactggaggtctgaagaagtacagagaccccctgagggccagtacttcccccgggcttcctctaaaagaaaaatatcatatcgcagggcataggtgggcgtcacccaggcctttctgcttgtgaaaagctgaactcacaggttagtgctgtactttctgcctttcttctgggaatggaagaactgagtgctgtctgagactgacagcgtggaacagtctctgagctaagcagaccacagtttgtgtgaaaggaaggcgctagggcccttggaccacagaagctagttttggtgatgaagtcagtaaaccacagcctccagca

SEQ ID NO: 33990 - DNA, 674 bp, Mus musculus
  source 1..674: mol_type = other DNA
taaaacgaatttatgttcacaaccatttaaaggtactggtgatttgaaaatgtatttctatatgactatggattcttctaagtaaattatatttcaaatctagttttatacagtaaataatttaatggctctttattattgtaaagggttaatcagtttaatatttttacttatgaaaatacagcctagcaacagtattatttgcgctttaatactttttgttgggacaaaattgtagtacaatgtatacccagtaggtgttcaagaacttctctattttaaacgataacttttattacagaagttcactcagcctaagttacttctctgggaactagtggtgttaaaccacagtgtcttttagtcggttatttccaaatagctttctcaaggacttaaatgctgacagcgcttttcacatttgcaaatttatatgtatgggttgaaaaaaaattaaaaatttctatcgagacatttttttttgttgttaactatagctgtatgttcaacaaaaatgcttctacctttccaagaattgcacctgccttgagcctgcagcggtcgccacagcagtgctataggaaatgcttcaaaaaaattttttttttcttttctgaatagcagctttacaatgttctacagcgaaaccgtcgtttcctcacaaaggctatggg

SEQ ID NO: 33991 - DNA, 508 bp, Mus musculus
  source 1..508: mol_type = other DNA
cttgttaagtcaatttcctaaaatgacagttcattatcctaataaaacactgaaaatttttaccagggttcctgaaaaataatttgcagctgtacaacctctcgtgtgtttggcaatgaagccaaatgcttttgttattagtgttaaatttaggtcttaacagtaattttttgaggtcatttaccaaaatgagctgaaggggctgttaaggctcaacagctttttatttaaccctgaacagttaaggcaatttttaaaaataattcctatggttggtaactattacccactaaatgcttagtgcctagggcaagaaaggacttagcttttaataagtcaaatgtggtgggtatacatatttatatttacataatcactataaacagccattttctccgatttgggggaaggcctttgtcccagagctgccgagagccgaaggaggaaccactgggccacaggcagcctgtccgcgttcaacggagaactcgagcgaaggctcgtgccc

SEQ ID NO: 33992 - DNA, 505 bp, Mus musculus
  source 1..505: mol_type = other DNA
aacagtaattttttgaggtcatttaccaaaatgagctgaaggggctgttaaggctcaacagctttttatttaaccctgaacagttaaggcaatttttaaaaataattcctatggttggtaactattacccactaaatgcttagtgcctagggcaagaaaggacttagcttttaataagtcaaatgtggtgggtatacatatttatatttacataatcactataaacagccattttctccgatttgggggaaggcctttgtcccagagctgccgagagccgaaggaggaaccactgggccacaggcagcctgtccgcgttcaacggagaactcgagcgaaggctcgtgccctgcactagtctcgtcccccatcgggaccagcctcccggggaccgacgggtactgggagggtcgtcgttaagcgtcgagggttacacgcgaggcggctgtcggcttcttcctccgggcagccagagcggcgggaaggcggccgggggcgaagcggc

SEQ ID NO: 33993 - DNA, 647 bp, Mus musculus
  source 1..647: mol_type = other DNA
actgtgtttataatgactttgcacatcattttttataattatgttgagatgttatataagaacatgtgatattaccaaacttaaggaaagttaacaatattctttaagggagttttttgcaggagtatggtttacaaacaaaaactactgataatttgaggccatctgtgtctccagccagagaaatgggatctcactgaaaaggggacagcaagtacccgagctggcctcccgcgccctctgcctccccgcggccggctcacctggtgcccgctgccaggcaggctgccggccgggcccccgctgctcagtgacccccgccggaccgagaggccgggggcgaggcggcgggcccggcaggccgcatcttcccccagaggcccggccgtccgcctggccgttaccatggagaccgcggcggccagccctgccccggaggcagcccagcgtcctgcgccgggaggagcgcagcctgcagccacagacgcccgacgcgggaagggtgccttcgccagccacctcggcacccgcaagggctgggtgcccggctggaagccagcagacggccccgggccggagcaacggcgcgcgtcctccgtgagggacgggccgcagctccacaagctctcgatgcgatcggccgcttc

SEQ ID NO: 33994 - DNA, 363 bp, Mus musculus
  source 1..363: mol_type = other DNA
ggagttcagtagctagtgtaattaatgatcttcgatttcgccaatggatcatttaagaacattcattgaacgaattaacaaattcaaactccgttatttagtggctccaccgttcggagtagctgggcactggactcccaggatccaggcaaagcatccgaggccccgccccctgcccagctgggcacgccccaccttggggaccagggcagcccctggctggagggcctctcccctcgccgagggccgcccccagctgtgcggagccgagaactgggcgggtcctccggagcagagctggtgacggcaacgcgccgggcgctgcgctgcgggagggggcggggccgggccggcgagggcggg

SEQ ID NO: 33995 - DNA, 343 bp, Mus musculus
  source 1..343: mol_type = other DNA
acacctggcttgcaaagtctttgaaaagtatagacactatatgtcagtgaaccattactgatattttcatttttacctttgttgattgctcaaaaaccgttcttctgaagatgaaacaatattttcccaaatcgaggaaagaattttctttagacttgaagtcctttcacagtgacagcgcagggagttcggccgcagaggccgccctggttgggctccggagactgtgctgctatcccttctgcaggagcctacagaataggttcactactactgcagatcaaccgcagcctgcacgcctcctagggggcggggcaatcgtaggccccggggctccgattgg

SEQ ID NO: 33996 - DNA, 444 bp, Mus musculus
  source 1..444: mol_type = other DNA
aatggctcttttaacctcgtgaagcccggggttccttagttacaagatcttcttggcacctaatacggttgtgaagatcatacaagatggtacagtgcttacttagcatgcctaagagcatgctcatatcagcccggagggttccagcaacttcccagggtccccgagcccgggttccaggcccggactccgaccctgaggggtgaggcccacgatggcgtccccggcacgcccctcagagcgctgaggatgtgcggggtctccgggccgcggcgccgggtcacgtggcgggaaggggggcgccggcgcgcgcgcccgagcgagcgagcgggcacgcgcagcccgcagcgtgtggaggcgcgagatgccgggagggggcggcggccgggaaggccgactccaccccctgtgcgcatgctccggcccccgcgggttataaggcag

SEQ ID NO: 33997 - DNA, 181 bp, Mus musculus
  source 1..181: mol_type = other DNA
tgtgtacactgcagctgtacagatggtgttgctgagccatcactatccttcccgggtggcagccgggaaccccttgattgtactaactctggattacaggtgtgactgatgcgccacaagaggccgctgcgggccagctgtgcccaggttccccgcagagcacccccacggcggtgcccgg

SEQ ID NO: 33998 - DNA, 415 bp, Mus musculus
  source 1..415: mol_type = other DNA
tggcggtagccagagaacttgttgcaaccgtatctgtagcaggttctgacatgggtatgaatctctaagtgactgcactgtctactcctacttcatctgtaaaatgggtgtagcttacttgcatcgttttgtatagtgatctaacaactagaccgtgccttatagagggcccagtgtggagcaagccctcaataatcatatttatttactatgcattgttctttcgaacgtggaggtgacctttaggaagatttcgctctgaatggcccacccccaaccgagcgcgaggaggctgcctcgcccaccctcgtcataacagcatggttgaaatatccccctggagtgggcaccgcccacctggaaccctaggggcggggcctctcagggggcgggcccacggtcgagggcggggcac

SEQ ID NO: 33999 - DNA, 387 bp, Mus musculus
  source 1..387: mol_type = other DNA
cctggaattaactcagcactagtaaataaagcattggtagatttccttatacacccatttctttggctctttataaggaaggagatacaggcagatcacaaaaggtctccagggctctggatgtataacccatcccctcggtcacgggtagggtgatggccacgcgagggcagcagtggccctcgctgacctcccgaagctggtccgccccccacgggttggaagtggggcagaggccgagttatccggggtcccacccgcccccttgccgggtcctcagccggggtgacctgcggccgcccggggccgggagcggaggcgggccaagctaagggccgcccccgtcgacccccccccccttggacccgccccagagcggtgctggag

SEQ ID NO: 34000 - DNA, 215 bp, Mus musculus
  source 1..215: mol_type = other DNA
agctgggcaatcatgatttactgccaataagtagtgacttctgccttcctctgtatcagaaagccagaggagggagggagggggcgtgccgctcgcttccgggaggtgctggacgagcggccccagtccagctgcagccgacccatgtccggggctccctagctgaggctccaaggtcctccgttcggatcctggctcgctgccaggggaggccg

SEQ ID NO: 34001 - DNA, 212 bp, Mus musculus
  source 1..212: mol_type = other DNA
agctgggcaatcatgatttactgccaataagtagtgacttctgccttcctctgtatcagaaagccagaggagggagggagggggcgtgccgctcgcttccgggaggtgctggacgagcggccccagtccagctgcagccgacccatgtccggggctccctagctgaggctccaaggtcctccgttcggatcctggctcgctgccaggggagg

SEQ ID NO: 34002 - DNA, 232 bp, Mus musculus
  source 1..232: mol_type = other DNA
ccaaaacaacagtactttttagaagtctattatcttctctgtccattcctgactgcatagcatactcttggcttaggagtagttaaccaagggggaacttgaccctgttcagggcattccctaccctgagctgggcaatcatgatttactgccaataagtagtgacttctgccttcctctgtatcagaaagccagaggagggagggagggggcgtgccgctcgcttccggga

SEQ ID NO: 34003 - DNA, 448 bp, Mus musculus
  source 1..448: mol_type = other DNA
ccgactgtccgggatgggcccacccgctgtcacgttgtcacacagcctcagcgggaccctcagagcgtagacccagagttcgccaacccggccttcagccgctctttccagcccagcggcgggcccaggcccaagccaggaacaggtgcatggggacaccccacggcccgcgcggcttccgcgaagtactccgtccgccatcttgcggctccggcaggcgccgggacctgggagggggccggaaacccggagtcgggaatcctgggatactggcctctgtctaggctactgaggggctacctagtcctctaggagggcggagccgagcagctcttagtgccctggactcggcggcccaggcaactgctccatgaccaggctgtcacacccgcgcggagcttccgggcggctccttccgacggcccctcccttcccggcctgcctcgcg

SEQ ID NO: 34004 - DNA, 489 bp, Mus musculus
  source 1..489: mol_type = other DNA
tatttacgacccatttaacctttgagttgaaaaaaaagtcgtctggctatttctcactgcttaacaggaagttaaaattattcttaagcaaatcccttgaggtttactgatttatttttatccaattagtttaattttcggtggacagacaccaccctaaccccaatcatacctataaatggggggatggggtcacctcctctcttataattacagaaaagagtctagagttatcctctcagacgaaagctcctttaaggaaggaagcgtcccggggccagagggactatgccagcaccgggaaacaaccttcttcttcctgggggcaccgccaggtttctcactgctgccggctcggacccctgggccccgtggaaggaagtaaaagagagaggcggaccccttaccttctcttgtcggccatcttggctgctctggcccagcccggcgggccggcgcgaggcaggccgggaagggaggggccgtcgg

SEQ ID NO: 34005 - DNA, 389 bp, Mus musculus
  source 1..389: mol_type = other DNA
ccgactgtccgggatgggcccacccgctgtcacgttgtcacacagcctcagcgggaccctcagagcgtagacccagagttcgccaacccggccttcagccgctctttccagcccagcggcgggcccaggcccaagccaggaacaggtgcatggggacaccccacggcccgcgcggcttccgcgaagtactccgtccgccatcttgcggctccggcaggcgccgggacctgggagggggccggaaacccggagtcgggaatcctgggatactggcctctgtctaggctactgaggggctacctagtcctctaggagggcggagccgagcagctcttagtgccctggactcggcggcccaggcaactgctccatgaccaggctgtcacacc

SEQ ID NO: 34006 - DNA, 433 bp, Mus musculus
  source 1..433: mol_type = other DNA
cagacgaaagctcctttaaggaaggaagcgtcccggggccagagggactatgccagcaccgggaaacaaccttcttcttcctgggggcaccgccaggtttctcactgctgccggctcggacccctgggccccgtggaaggaagtaaaagagagaggcggaccccttaccttctcttgtcggccatcttggctgctctggcccagcccggcgggccggcgcgaggcaggccgggaagggaggggccgtcggaaggagccgcccggaagctccgcgcgggtgtgacagcctggtcatggagcagttgcctgggccgccgagtccagggcactaagagctgctcggctccgccctcctagaggactaggtagcccctcagtagcctagacagaggccagtatcccaggattcccgactccgggtttccggccccct

SEQ ID NO: 34007 - DNA, 385 bp, Mus musculus
  source 1..385: mol_type = other DNA
gaataatgtattccgcgtaatatgttacttgtgcactcaaatacttgagttcttatatgtacgtgttacaagttctttaaagcaatgttaaacagtgaagtgcaggctatgtatggtagagtgcaatctcttccctccctgtgcacggggcccaaacgctatttggctttgccctgaaaggcaagtcgtgtacagatgtggtaaagaacttgcgcccttgctttccagcaccacacccaagggggttttcaatactaattcgaaaacaaatggtcctgaaaaggagggtacttcctcccgcttgcggccccaggaggagccgggatgactagaagccccgccttcaggcggcggcctgtcactgccgccggcgggtaaggggcgg

SEQ ID NO: 34008 - DNA, 530 bp, Mus musculus
  source 1..530: mol_type = other DNA
acctccccgactctgcgggactgagggaccagtgaggggggagaaaaggcaccagggcttccaccctctccgcaacccccaccccggcctctggtgcgggaaagcagcccagctttcccagtcgcagctccgcccgagggggtgggggacggagatactgggagagaccgagctctgccgagccctggccagccgtcagggcaccggcaggcggctgcgtcccgcccgcaggtgttccgccgcccgaggccggttgcctacggtggtacccctgagggcagtgtggccaaaggagtgcatcttctgtacttaaagaactggaagtgcgaagagccccgtcgcgggtggccagagcaggtggggacgcggcgcggtggcgccccgtagaacggaggggaggaggcggccgccacacctagggcgccggggagcacccgggctggcgcgggcggagccgcgctgaaggccgcgcgtgtccccggccccgccccgccccgtccaatgagagctgcggccgcaggggctgtcgg

SEQ ID NO: 34009 - DNA, 392 bp, Mus musculus
  source 1..392: mol_type = other DNA
taattacgctgctacttcataactgtaattttgctgttcgggtcgtgacccacaggttgagaaccatagtctcttgctgaatattgtgaaaattaggaataatgtattccgcgtaatatgttacttgtgcactcaaatacttgagttcttatatgtacgtgttacaagttctttaaagcaatgttaaacagtgaagtgcaggctatgtatggtagagtgcaatctcttccctccctgtgcacggggcccaaacgctatttggctttgccctgaaaggcaagtcgtgtacagatgtggtaaagaacttgcgcccttgctttccagcaccacacccaagggggttttcaatactaattcgaaaacaaatggtcctgaaaaggagggtacttcct

SEQ ID NO: 34010 - DNA, 196 bp, Mus musculus
  source 1..196: mol_type = other DNA
cctcagctgtagaaactgtctgcagctggcagacggttaaaatgaaagcacattcttatacgatttctgtatttttaaagaaaccaaaatttgtgtgtttttttttttaaagaaacccagattctctctgataatatatatttcactaagaggtgttagcaactgacagcatcctagagtgtctctaggacacaat

SEQ ID NO: 34011 - DNA, 338 bp, Mus musculus
  source 1..338: mol_type = other DNA
agtactgggctctggaaaggatccagggcctgggcccggagagttcctaaatccccagtcttaattctggcatgtgtcagaggtcaccagggtcagcctgtaagcttgcgcggcgaccagctgcacctcggtgacgctcagtgtacacacggattctccactctcctggggagacgcaccaggctctgccgccctgggcaccctccggcggctaggctcccgggtccgcagcctggccgctctgctctctcgggcccggcctggggccgctcggcccgtggggatcggtggggagcggagggcgcagcctcgccgcctcccccggactctcctcccgc

SEQ ID NO: 34012 - DNA, 310 bp, Mus musculus
  source 1..310: mol_type = other DNA
gctctctcagcggtgtgctagttgcccaccgtctattagcctatccaggtttccacttaaatatcaggagacttccgtcacgcgacagggtacggatcgcgaagacttcggcgtggctacagccgagccaaggagccgactccaagcccaggcgacggcgaccgattcgcgagctgcgtcacaaagcgcgtcctgggcgctcgggtctggagccccgccgcgcggccaggcactcagagccgcgggaggccggcagcgggcggcgcccaccaagggcacgcggcgccctctgcaggccgcaggcggcaac

SEQ ID NO: 34013 - DNA, 344 bp, Mus musculus
  source 1..344: mol_type = other DNA
gggtaacttaagtcaggcaagtgcccctaggagttactgcatgggtaccagggttcaagaaggccagcattagggagttctaggaagggaaaggcctgtttctccactcccaaggctgagaccttgtctctcttactcagtgagacctagcggaagccgcttccttccgctagcgctagagaggcaggaccctcgttttcttctcttataatagacaatgatgggggctttgccagttccatgccacctctgcgagtctcccagtagttgctgctgtctgcaaggccggtgacagactttctcgggtcgccaggtccgcccctatcccgggcattgagcggcag

SEQ ID NO: 34014 - DNA, 217 bp, Mus musculus
  source 1..217: mol_type = other DNA
tgcaaattcttttataaacacattgattataacattaatagatttaagcaaaacattaaataggaatttaaataatttgaaaggtgaatcttccgaatgacaagtgtcaaatttaccctcttgatgaagccttgctcagagagattccattgggatatgtttaaggactttctactcagatgacaactcatcagatcttcttaagatgtcaccagtt

SEQ ID NO: 34015 - DNA, 533 bp, Mus musculus
  source 1..533: mol_type = other DNA
ctgctatctaatatttctttagttgaaagaaagatacagttcattaagaactctggagagttggttcagtagtttggcctctgcattcactgcacaaagtgcacagtctagctaactcaatgtacttaaataaataaaaacaactttttttaagaactagaattaagagatagaactgtgattaagagatattttcatcaagcaggtttttccacattttatttctagtcataaacacttctaaccaaaatgttctactcagtaattttcatggttaaatgtcttaagaatcttattttctagatttgatgtaaacaatcgggaataagataagtagagctgaataattacaaattatttcctggtgttttaccaacagacagtatttcaaatatttaatgtattctgtttagcaatggtagcacattttcaagcattttttagatctgaaaacagatctaaagtcattggtttgggctttatttaaagaattcaccaattttgaatttttaagatagcagataaaattgata

SEQ ID NO: 34016 - DNA, 282 bp, Mus musculus
  source 1..282: mol_type = other DNA
atgggcctgaaactcattgatgctgggattccaggagaaagttaacctttaaaaacatgaactagatatagtttgtcattacaatggcccaaaggctccaccgggtctggtcgtttgtccagaaatatggaagacacaccccacctcggggtttgtggctgatttccaaggtatgcctaggcattggggacctactaggcactcaactaacagctgggcggggcctgcgtgctgcgtgcgtgcgcgttccggaggcgccgccgccgccgctcccgaggccgc

SEQ ID NO: 34017 - DNA, 312 bp, Mus musculus
  source 1..312: mol_type = other DNA
gacgaagagctggctctgcacgacctttctgttgggcccaagcttctgacgctcaacctcagctactgcagatcaaagcagcagctggatactccagcagctgcatctaacatctaaatggtatttaggagtaaccctttaaaaatgtttattaatcctttgaggatcagtcctttaaaaaattatttttataacccgttctcatatattagtgggtgtggatccacccacagtagtgtgattgaccttccaggggccatgcccttaaagaaaactgtttccctctcccagaaggacacgccccctgcttgc

SEQ ID NO: 34018 - DNA, 622 bp, Mus musculus
  source 1..622: mol_type = other DNA
gcagggagcagggaggtgcctaccatctctggtgtgtacccaagaagcttcctagcatggtccactgtcccacgaaggatgaccttgaactttgcaatcataggctgtattactacatgtagtgcatgcggtactaagatcaaatgctccatgcatggtttttttttaattgtggaaatgtcacatgaactaacaaagaagttgtctgaaggtttctttttaaattaaagaatttaagaacactttaatattcaggcatttaaagaaaatgataagactttaatagtagtagaggaattaccttgaaattatgccagtttttaaaaaaattattattattaagatttgtgaattccaaatcagacatgtcttccttaggtgaaataaaactgattttcttgaaattgctcttttagacactgtaagtttaaattgccttctttctaaaattttccaagaaaaggcctagagttctctgacagtttgctgtttttggcaaacatggctttgatttctcccagagagaagtttctgtgatcataattgatcacagacaagcacctgtgtcataattgctgctgacatagcagcccgcatcaccggaggatgcctgggtgtcagc

SEQ ID NO: 34019 - DNA, 119 bp, Mus musculus
  source 1..119: mol_type = other DNA
ttttaggtagatctgagtgcccttaaactcacagcatcacaattgtctctatcacaagatctttgtgctggccttaaacagtaaccaaggcagctgaaactgtcagctgtcactaacag

SEQ ID NO: 34020 - DNA, 479 bp, Mus musculus
  source 1..479: mol_type = other DNA
gagagagagagaaatatatatatatatatatatatatatatatatataaaatgtgtatatatatatataaataaaatgtatatatatatatatagtcattgaggagtagataatatactatgaattagaggaaggtgccccctttctcaagaaaggctgctgttgctatctggcccttggaggaaagtaccagctagctctagggtgagcatccagcttaaacttgagaatttaaggcggttcagaaatttacattgtcatagctagtggtcagaacatatgcatctatcaggaatcaggagaagctgcagctgctactgcacgaaaagatgacagcttcactcatggactctagcttgcagacatccatgcttctgacagccagatactaaggatttctttgctgggatgccttccatctaaataggacctctttacatcagatggctctgcagagcaacattgctttaactggtggt

SEQ ID NO: 34021 - DNA, 360 bp, Mus musculus
  source 1..360: mol_type = other DNA
ttttgtggtacatttacacaatggagtactacgcagctattaaaaacagtgaatttatgaaattcttggacaaatgtataggatatcatccttagtgaggtaacccaatcacaaaagaagtcacttgatatgcagtcactgatagataaatcttttttaaaaataaaatatatatatattaatcttctgttccctccaaaggtatttcaatgctctgaatacacttgagttcccactgtttaattttgactcatcaggccagatggaatttataaaggcctaaggcattcatgtgtgaaaatgtatacaagtcccagcaccacacaaaccaggcatggtgtggctgttcatcatttctga

SEQ ID NO: 34022 - DNA, 451 bp, Mus musculus
  source 1..451: mol_type = other DNA
attccaggggagggggctggacggagcagaaaccttcgttgggggccgcactaggatccgagcagacagggccaggacgccaggtatggccgaggagggccacacggcgctcgacccgagactgggggtaaaggggcttccaggccccgggatctcggctcaccagaccggtaccgtgcagcctccaattgacgttccatgcatgcgggcgcattggggggcaggttccactcgcgggccgccgggggcacgagcggaggaggggtgtccttccgcatctccacgattcctctaacctagacccagactcgacgagagaccctgactcggcgccggagggaccgcacacgtggtgtacctctgcgcaacgagggaattcgctctacttctcgcgagaattgctcctcttctcgcgatagtggggaggggaaaaagcgagctgatctcttct

SEQ ID NO: 34023 - DNA, 390 bp, Mus musculus
  source 1..390: mol_type = other DNA
acgaagccatatgtgttttcggcctcctgatatggttaataaaagatggtctggaagacacccaaaacaataggttttattttgctgtatttaacgaaggtcacaacgaggggtgagcctctcagaaatcgcgtttcgccgcgccctgagatgctgggcggcccgggagctctccagatcgctcccgtgggtgagctcgggcccaaacgctgtggcggcagcagacgggacagcgggctccgtgtccctgtgaccccgacccgagcctgtcaggggcaggagcaagatggccgctcgcacatctcgcgagaagagatcagctcgctttttcccctccccactatcgcgagaagaggagcaattctcgcgagaagtagagcgaattccctc

SEQ ID NO: 34024 - DNA, 412 bp, Mus musculus
  source 1..412: mol_type = other DNA
caacagatttgaccactgggcaagatgctccatgtacagcagcatctgtcttagagaggtgaatcaaagatacctgatttatgctttaaaaaaacaaaaacttttcatgattgtagagtttctttaaaatacctgaggctcaggagaaaacatataaaatgctgttttagtgtgttttgctcttttgagcaacttgctaatgacatctgtaagtaattaaacttatattttatgcaaaccatagtcttcacatctctttagttttcataaattccttcgaagtaagaacaaaagccttagtccaaagccaaagctttgaaactttctgatacagttttcctgataatcagagctggataccaggaaaatactcacagaactacagctgttcggtcattgtgactcttgaatc

SEQ ID NO: 34025 - DNA, 415 bp, Mus musculus
  source 1..415: mol_type = other DNA
ccagacagtgtgtcttgttacctctggacattttctgcacaggacaaagtttaataacaaacattctgatgttctttctctcagtagtatgaaaaagctcagttatctatgtgatgaaaaccttttacgttgacaacttaggaagtacacactgtgtggttttgagcaaacctgtcagtagaattatgaggatactgagacttacaaaaatgttaaattattaagctcttcaacaatgcaaatgcactcttagtgttccactgacctgatggggtccttgctgtgtccccggagtccagacctagggtgatctgagccccattggtgccaccctctagagttaagagcctcaaagctgtcctgagcaacctgctgcgcaggcgcgctcagagctctccgcggttccgttcccttg

SEQ ID NO: 34026 - DNA, 427 bp, Mus musculus
  source 1..427: mol_type = other DNA
ggaaggggatacaatggtaggctccttgcctttttgagctcagtgatccttttgcctctttcaagcagatgtgactacaagcagatgcctatacaagcagaagcacttcctgtttacaagtaatgaacacgcattttcttacttagtttttaattatcagcactctaatgtgcagtggtaagaaaggctaacttccttttacttccttgcttctgcagtgttggacaataaataccagtgaaagacaatattttgattcatcctgtctcagataatgactctgtgggaagaattttcttatctgggaaaaattatggcaaagacaatacagcttaagagactcagcctagtatcctgctgctttgcagaaaaccatgtcataatgacgagcttctaaggcagggtggttgcttagcagctagtcttg

SEQ ID NO: 34027 - DNA, 285 bp, Mus musculus
  source 1..285: mol_type = other DNA
ccgtgtatgcaatggtgtcagcgtcttgcaaactgaaaatatctaataaaaaattgacaaaaattattataacctataatcatattttattctatacatgcagaatattttaaaaataaagaatattcaaaaattgcctttaaataataaaataaatactttaaatgaaaaaaatcagccagtatctttgaagtggttttatttattattttaagtaagaaatgaaataagtacaataaatcttaactgaagtggtaaaccatatgtcattgttttgccacataa

SEQ ID NO: 34028 - DNA, 518 bp, Mus musculus
  source 1..518: mol_type = other DNA
tggaagcttccacctattcattttacaaggtagtagaaaatgtatattttaatactcatctgtcaggcatgtttggtactttaaaactaatcaagagtttggagaacctatttctatcttttgcaaaatggaaatggtgttaaatttccaaatgtttatgtttatagctatacattagtgcaattgtcaggaataatgagtaaaacattttgtctaaagtagaaatctgctagaatgaattgtaatcaggattaatttcccattcataaagttttaaaccaaattacgttataattttaacttggagtcactcttagaagtatcccttaaagaggaaaagttctttaggcacagattatacatgttgcatataaaaattccataaaagaaaacagttttaaagcagctgtttattttccaataagaacattcttaaaaaggctattaagattcaaggtcatttctattggtctacatgacctttaaacccttatgataagtaagcactcaggtgttaa

SEQ ID NO: 34029 - DNA, 202 bp, Mus musculus
  source 1..202: mol_type = other DNA
ctttcaaaagggtcctcaattttaattgagggaggagccactcctctagggaactgctagcgaatgcctgccttcctgttcctccaccacaaggaagatcctccaggacgcaggtagaagaggaagtaccgacctcagctctgaggcctcttatgagagggggccactgatatcttcacttgcaaattcaggaagaggcgag

SEQ ID NO: 34030 - DNA, 630 bp, Mus musculus
  source 1..630: mol_type = other DNA
gtatatgtactaaggattctgaacttaaaacttttgaccatatttggagatagaactcaactctcatagttctctgattacttgcaactactctgcactttaccaggggtgtttatatcattaaactgattttaaaaatcaagcatcacccatttttaccttgtcacaattcttacctgcctttggcttagagccaggcaagttctttgaatcaatatccatgaaagaattttgtaagatttactcacttctttctgaagaatggtgtgttaattattcagtgtccaagactgtccattcaaagataatgatactactctttcttatgtattaaactgatattccacatgaaaaaaaaagataatgatctcagaattaaggtaactgaatgaaggcagcaaaatgtcttccatggaatcaacttgtttatttttctatgtgaataagatttgtctaggtataaaatatatacaataagcattaattctaatatccaaagatatacataatgtaaagaaatacccacttcttagaaacatagctatctgcagtatgaagctattaattaaaagattattcgcaaacacttcttttccaattttcaaaacattacaaaatcatggtctcgga

SEQ ID NO: 34031 - DNA, 673 bp, Mus musculus
  source 1..673: mol_type = other DNA
attactagtaattgtatatgtactaatgaatctgaacttaaacctttgaccatatttagatacagaactcaattctttctcatacatttctgatctgctctttaccaaacctcaggggtgtgtatatcattaaactgattttaaaaaccaagcaaatttgccctgcctttggcttagagccaggcaagttctttgaatcaatatccatgaaagaattttgtaagatttactcacttctttcttaagaatagggtgtgcctatattccatttaattattcagtgtcaaaaactatgcattcaaagataatgatactactctttcttatatattaaactgatattcctcatgaaaaaacttagataattatctcagaattaaagtgaatgaatgaagttccacagaatcaacttgtttaattttctatctgaataagatttgcttaggtatgaaataaatacaataagcattaattccagtatccaaagatatgctgagtccctgggaactgctaatatgttagtggatttacagaatgtaaagaaatacatagctatcttgaccggtgataaagttatatattaatggagcttattcagcaatgtgaagctattaattaaaagattattcacattttccattttcaaaacattatgaaaatcatggtctcagag

SEQ ID NO: 34032 - DNA, 266 bp, Mus musculus
  source 1..266: mol_type = other DNA
ttttgtgagccctgagtaaatttgcactaaataatcagagtagacccatagggcattttttggtaattgcttgaccacatgggggccatgtgcagcctgagggttcggcctacccctttctccttcaggctggccacagaaagcctggccacacgctgtctcccaaaggcagagagcagtcctgtgtactccgaggcagcttagtgtgggcactgacagaagcagcatccactcagctcttggctcctcccaagagccccagggtg

SEQ ID NO: 34033 - DNA, 320 bp, Mus musculus
  source 1..320: mol_type = other DNA
cccagagggctgctaattctttgcaggagtggcagacacatagtactgggcctgctgtttagcttgtcctggcccaaccagaggaaaggctggggtaggggaggggtgaagatgctctgtacccctacagctgctgatctaggctcaccttcacatctgggcctctcagaggtgggcctctcctgttacaagttattacatttatggctcccgacgattgctgaggcactggagtccatgtctgatcttcacaggcatccctcgctgcctgggtttgtaaacaccctggggctcttgggaggagccaagagctgagtgga

SEQ ID NO: 34034 - DNA, 511 bp, Mus musculus
  source 1..511: mol_type = other DNA
ggcctcttgacaaatgtaacattttccaatggctaatctcaaagcatctagtttcactgccaataaattaaaatttgataacgcagccccgatagattaaaaaaatgttgcattcggtatgtaaattaaaattgggaaagctggaaaacttattcctgtctcagtgctttacaaaggaaagcagctgggtggagacagagctctgtgtaaacacaaggtcaccactggtctcagttttaaggtttccttagttgattcaacaaaagcttgtagtacaagagtttcactgtcccaggacgcggagacctcagcctagttgtcatctcctcacgaagttcacggaaccaggtgaagctaccgaggttcgcgtggctcgcgcgcccgtgggaccaagggggctcgcgttgtgccctacctgccgagcgccaggccaggcacttacaggcccactgtaggagcctgggcggagccccggggcgcgctcccgagtagctcggaggcgcgcctcaac

SEQ ID NO: 34035 - DNA, 417 bp, Mus musculus
  source 1..417: mol_type = other DNA
gagttttagcaatgccatatattcaacagcaatgatacaacattggtaaaatgtaaagcttgaggttcagccaagcattcctgggaacacaggctgtcaatatgggttgaaatttctagaaaagttacaggatgctgcacggttcttggacttggcaacaccgggccaggagggtgtggacccgccagacaaggtcggttccgcgaagccagcgccccagccctcggctcaccgggggttagcctggggtgctccctcgcccctccacctccgactccggagccttcgggactggccgtcgcccctcgccgtgcccacaaccccgcgcgcgaggccacccagcccagccaggcgactgagtgttgaggcgcgcctccgagctactcgggagcgcgccccggggctccgcccaggctc

SEQ ID NO: 34036 - DNA, 339 bp, Mus musculus
  source 1..339: mol_type = other DNA
gggtggagacagagctctgtgtaaacacaaggtcaccactggtctcagttttaaggtttccttagttgattcaacaaaagcttgtagtacaagagtttcactgtcccaggacgcggagacctcagcctagttgtcatctcctcacgaagttcacggaaccaggtgaagctaccgaggttcgcgtggctcgcgcgcccgtgggaccaagggggctcgcgttgtgccctacctgccgagcgccaggccaggcacttacaggcccactgtaggagcctgggcggagccccggggcgcgctcccgagtagctcggaggcgcgcctcaacactcagtcgcctgg

SEQ ID NO: 34037 - DNA, 475 bp, Mus musculus
  source 1..475: mol_type = other DNA
catggctccagctgcatatgcctttgttcctgtggaggctcaatgccccaacataggggaatgcttaaattcaagagtatggatataattttgaaatatacccatggattaaatatattgttcctgatcaagcacattgcaagtagcctattcatatttgatgaaattggacaggttatagaagttattttatatgcctttaatgccagcactccttcataaggtacatgtcgataaattgttagtaattaagatataaaatataattgctagatgtctaaatgaaaagctactatgtacttgcttaccttttccaacttaacttgaaaagcactcttttactctgttttacaaagttaaatgtttgttccaagcagtctgcagctctggctccagctctgaggctgaaaggtttggcagcaaagacctcaaggatgtctccgcctacatttcagccgctctctcgcgggatccg

SEQ ID NO: 34038 - DNA, 566 bp, Mus musculus
  source 1..566: mol_type = other DNA
actttattgtcaaataaatgtgctatacaaaaataggaaaatgatactttctcttgacatatcaaaacctgaagttcttaaaaatctttaacgtttagcagttaggggtatgagtaaacctttcttctactaagtagccaagggtgatcttatcgtcttgcttgtactttccaagcgctagaattgcatatgtgtgtcactaagcctggtaattccatttttaaataaccatataaaccttcaagaatttgaacactgcagcatacaagattgcctatgtcaaataaaattttatctttgaaaacactttcataatattcaaatagtcattaactgcaggactctagagaattcctggaaattaagagtttcaaaaagtttatatttaatgcacagacactcaaagaattgaatacatgacagtaagatacagatagataaaggttttcaacaatttatggcaaattacattggcttgcaaaagcgcatgtacaagtgcagactaggcagtgaaagcactttctaccacgtctaagggcggggccatggcgatccattcgccttgg

SEQ ID NO: 34039 - DNA, 499 bp, Mus musculus
  source 1..499: mol_type = other DNA
aagcctggtaattccatttttaaataaccatataaaccttcaagaatttgaacactgcagcatacaagattgcctatgtcaaataaaattttatctttgaaaacactttcataatattcaaatagtcattaactgcaggactctagagaattcctggaaattaagagtttcaaaaagtttatatttaatgcacagacactcaaagaattgaatacatgacagtaagatacagatagataaaggttttcaacaatttatggcaaattacattggcttgcaaaagcgcatgtacaagtgcagactaggcagtgaaagcactttctaccacgtctaagggcggggccatggcgatccattcgccttggtaaccatctgtcgtgggtggtgctattgatgccacgccccccacgtcctctctgactggctgtgatgcgtcacgtcctgaggtaggagtcttccggcttctacagccacttcccacggaagctgggggagccgc

SEQ ID NO: 34040 - DNA, 581 bp, Mus musculus
  source 1..581: mol_type = other DNA
tacatttacacaatggacactactcagcttttaaaaacaatgaatttatgaaattcttggagtatcaccctgagtgagataacccaatcacaaaagaaatcctttgatatgcactcactgataagtgatacccaagatagtttttttttaaacaagatttgtttacttattatgtatatgtatatgtatatgtatatgtgtatgtgtatgtgtatgtgtatatgtgtgtgtatatgtataatgtatatgtatatgtatatgtatatgtatatactgtagctgtcttcaggcacaccagaagagggcattagatcccatttatagatggttgtgagccatggaagagcagtcagtgctcttaactgctgagcgatctctctttgatacacctttgtccaaaagtagatattcaatcctacacaagtgggtattttgtagttgctgcttcaattgagaagcactggaaatatcactcaaattactgtaaagttaccagcttagaataggctgggagtggaagcctctgcaagttcatgaggaacagttgactatctgagcctaagagagaacactcagtctca

SEQ ID NO: 34041 - DNA, 347 bp, Mus musculus
  source 1..347: mol_type = other DNA
atctgcaaatgtgttaattaaaccacagtaaggtgtggtgaattttctttttataaaaatgaggtctccagatgcctttaaggaccctcttttgtttttcccaagacattcagggtctggatgcctggatgttgcccttcttggcaaagtgtcaagggccaggaggcctcccttcgactcgaccacgcgcgggaagggaacgcgcgctgaccaggagcgcaggcggccgggttcctccagaagcggagcgcgcgcgcgcggtgggcgggaaacccgggggcggtggcagagaggcgggcgcgcgccccgcggggaggggtgcggaggaggcgtctggaccgtgcagc

SEQ ID NO: 34042 - DNA, 470 bp, Mus musculus
  source 1..470: mol_type = other DNA
ctaaggacttaaggttcacaataattttgaaccaaaagggaaggctattaactcttcaaagtttgcaaagcattttgaaaacattagacacagatctcattttcagtgctgccgggagaaacaacagaaattcctgatgcatccgagagataagcttctgggacctgactgatgcagttcccatagcaacccgtgtttcctgggaaacccgaaaaaggttgtcatggtggttcctacttacatgatttcataagaaaaaaacactattattaagtgtaagactatatagaggttaaatgaatcacaaaatgcttttttacattttatataaatcattgctgttatcccataatgactggatcaaaaaggaaattatcatctttggaacgttacaatctgaattaaatgtcagttgtttggtagcaatttttaaagatggttctgtacagttttcattaagaaatggatgc

SEQ ID NO: 34043 - DNA, 207 bp, Mus musculus
  source 1..207: mol_type = other DNA
ccccaagatattgcttgaggggcagtgcagctggctcagaaactcaggcctgcagctagcagttgccgcaggttgccacagcctcatctgcagcagtcttcagcgggggacagccagtgctgccatctctgtgctttctgtgtttctgaggaacaaccactgagttttgaacaaagtcataacaacacctgacttgttttttcatta

SEQ ID NO: 34044 - DNA, 380 bp, Mus musculus
  source 1..380: mol_type = other DNA
agagcacagaaacaggcctctttgttctcaggagttgtgcattctgctgcaagaatggagactacaccatttgtttcagaaagacaactgcaactgaagataacttcagaaagatacatgctatatttgtaatggaaatgtgaagttggtctcgatgctcagagggaagctgagaccctcgggatggaggcttcaattcttcggggggagggaagggagaaaagggctgtccttcctgccatcccagtccctgctcggggtcagtgcttgtcctgcactggggtcctcagaaagaataaataatttatcagcagcatctgcagagttaaaaccagtactttaaataaatctgacaaaggttttgtacgattttcattcaa

SEQ ID NO: 34045 - DNA, 385 bp, Mus musculus
  source 1..385: mol_type = other DNA
ctgtgaaggcttggagcttttgcaaggtttgcaagccaacaaattatttccccccacggtgagatcgtgggccccgccctctctgtccagagccctggggaaaggaagtcagaaaggctagaagccagtcctgcagttctgttgttctgcagttccccccaacccccaccccgtggggggcaaagacagcaggcagatggggctggctcgcgctcgggttggcaagaaggcagtacccagctgagctctgcgcggagttttgttaacccagtggccagcttggcggcggcggcgagcgacacacctcgctagctctgccccagccggcgttcgctgcggggccaggtgcggcgctgcgtggcgcggtgcggcgcggtgcggctgc

SEQ ID NO: 34046 - DNA, 443 bp, Mus musculus
  source 1..443: mol_type = other DNA
agccactccttggtctgactaggactgtgttctcagcctctcgaaccacaatgccaacagcagctgggtctcacccaggtccttggtgctgggcaagttggacggatgccttcctggaggtcaaagtcaatgactggcagctaagccttgcttctacaagaaagctgatttttatgtgagctgacaacctgcgttcaatccaaggagcccacattggaaggagagaacctacttctgaaagagccactgattttcatatgcttgccatggcatgcgtgtgcacatgcacacacacaaacatgtgcacgaatgctcgtgcactcacatgcacatgtactggctttagaaagtatctcaagttagtgactaactaagcttcctggtcagtaagtgaccttctctctgaatcttcctccatgggcagagagaggcagagagatcct

SEQ ID NO: 34047 - DNA, 307 bp, Mus musculus
  source 1..307: mol_type = other DNA
cagctgcgtgtcctgtggccacctctcaggagcctgagaagcagcagtctcctggcagtctgaggacacacctggggatcaggcctgactcctgctcttatagcccccataagacaaatgtgtgaaatttcagttgacacttctttcatgtatccggatcccccacctggcttcagctgttgtgtttgtcctgctaacagcaggaagctgttaccatcttaggccagaaggcacatagctcagaggtcccgtttagagggggattggggtaaagtacccttcaacgttgaagtctttagaatggtag

SEQ ID NO: 34048 - DNA, 264 bp, Mus musculus
  source 1..264: mol_type = other DNA
gtccaggtagacaagacaagctaggctggcagccaagtccacactctacatagactggagggttagctaatgggagctacctctctttgcaaatagctggaagctgccagggaggctgcccagagtctggggaaagccagggcagaccagagtccactgtgcagacagctctgtgctaagcgtcaggtttgaaaggcatccagaaagcttttctcctctttgtgatgccttcataagacagggcagatgatatcctaccatgat

SEQ ID NO: 34049 - DNA, 297 bp, Mus musculus
  source 1..297: mol_type = other DNA
tggtccaggcaaggcttaattctcattcacagactgagtgtatgactgactgctggcactcagccactttgctggaaatacccgaattctgaaaggcgcttgtcaacaccacagatgcagtgtctgtctccatattgggaattttaacctttaaagttcagcatgcttatgagtatgaacactcctgtacgcttatcctcctggcccaagtactcttggaagacttagaacaactgtcaaagtccccagcctctgagctcatctgaataatggtgatgcagccctggatctggctat

SEQ ID NO: 34050 - DNA, 360 bp, Mus musculus
  source 1..360: mol_type = other DNA
catccttctttaagaattttaataagaaaaattagagatgggctttgggcttaaaatacactctggattaaaacctgaattattcgggtaattttctaggactcagccttaattattcccaaaattcagtaagaaaaagtttcattaaaattactgtaagtatatatcttcatggaaagttaaagtaatttaaaatggggcctgaaaccccaacatggagcactatcgcatggagcactatcttcagctccagcactgccatttgtggtccagaaagagctcccccgtctctggaagacttttatgcttcttttataaactagtctcagcctccctgaggaactttggacaactttcaaa

SEQ ID NO: 34051 - DNA, 762 bp, Mus musculus
  source 1..762: mol_type = other DNA
cgctgcgctgaggctccctcttggcgcggcccaggaagcctgcaggtgtccttggccattcggccaccgcccgggacactccgccagcacccggtgcctggctcttcagagcagccccgccctccaggctctgcgccgcgcaggacgccccgtctgaaccccccctcgtcccggcgcggcccccgcagcgctgcatccagcccggcgcagctcccggccacggacgcaggacccaggctcgctgctgcgggcgcgcttccgctggtccgtctcgctcgactcaaccccgcccgccatcggtgctccgcgctggagaatggggggaacgggccacatgcccgccaccgccgcctcgtgaccgcacactgcccggccccgcagagctctggctaccgtaggagcatccgcccggccccggtagccgctccgaggacttacgctgctgcctccgccgctgccgccgcccggagaaaccctgccgccttcgggctcgccgcgttctaggagccaaagggtggcccgtgtgagtgtgagcgcgcgcgccgcggaccctcgcagtgctctgggactgtgcgctggggtcgggggggcgtgtccccggcccagagggacctggtttgagtcctcgacccaggtcttcaccaactcttcctgctccgcgccccgggggggttgggggggaggcaggggcagagccactccgcagaaggggccgctaccacctcctgcctgacgctgcctccttgggaagggtgtttggag

SEQ ID NO: 34052 - DNA, 278 bp, Mus musculus
  source 1..278: mol_type = other DNA
ttgagaaactgatccgaatctgaatcatttcacttgcaatacatgtgcttaaatcggtggccagccagctagttagactgaagtacagactatcccagtacttgttggatgcctaaagagagccttcggatctcaagaggcttctttccagagcctcgcacgcagccggggagcctcgcattgacgcgggcccgcgcgtgagtcaagcctgcgtcacggcgccccgccgccagggtggcctttcggaaagcgagggaacagcgcgcgccgcgctccgc

SEQ ID NO: 34053 - DNA, 323 bp, Mus musculus
  source 1..323: mol_type = other DNA
cagtcagcttatctactagggttgttaactccaagaaatgttgcagttgaatgtttcttctgaccccagagtctgcccagagcctgcctgaggaagaaggtgggccaccctaaagatacagctatgcgcctcttgctataggattaaagtgcaaggaaggcatcatcaaagcaccttgtaggatgtgtggattgaggctacagattcaaggcagacaccattagtggctgatttctctggctgacaccaagagagcaggccctcttttctcaggaaggaaagctgcttcattgacatcactgtgcatagggctgcccatgtgg

SEQ ID NO: 34054 - DNA, 404 bp, Mus musculus
  source 1..404: mol_type = other DNA
gacctaagggatctttaagctcgggtccaaaggacctctggtaaaggattattcagtttcagaaaggctaagctataccctaatccatctgagtgacattcagtttatgctgctcagaaggacaatgacccttctgctctagcagaccactgtgaaacctagagatctctctgtctgacagcatccagtctctaggatgtccaggcaacttgcttttttccagctaccagcaaaaataaactctaccacagtagaggcctctcttctcagactgatgtcagatcaggcctcaaagcgggggtggggaggatgtctgccctcaccgtttcacctccccagccctcgaaaggaagcagcttccctctcgctccgaggggttaacccgcacgggggcgcggccccct

SEQ ID NO: 34055 - DNA, 375 bp, Mus musculus
  source 1..375: mol_type = other DNA
gaatgtaaactccacgaagactagaatcctatttttgttcattattatatccttaaaagtatttgtcagtgaggacagataaagttcaagacagggtttctctgtatagtcctggctgtcccaaccaggctggcctcgaactcagaaatctgcctgcctctgactcccaagtgctgggattaaaggcgtgcgtaagtaaaaccaggagtccccaggtgttaattgtacagaaattctttgctaggaaaacgtgtcaactagacccatgagtcaggaaagtgtctccttggcagttgcggctttcgacacacgcagccacactgaatggaaatttcctggaggaaatcacgcgagagttgcctgacgggaggccgt

SEQ ID NO: 34056 - DNA, 398 bp, Mus musculus
  source 1..398: mol_type = other DNA
gttacaacatagtaagttccagtctcaaaaaagagctttccactgtagcctagaactcatttaggatttttaactatatttttataactgcagacagcctgaatgcccatagaagtcttctggctgttcacagactttagggctgcattagataaaaccgagtttttacttttgcaaaatcaaagtgaccataaaaggaattttgaaggaatttttttaaaattctaattgacatgtttttaatgtgctcaatgttgtattataatttttatattttaaatatggagggaaaagtctatgggcacagtgtgcgtggttgctctcacagacacagtaaaccacatcagaaccgttgctgtctttgtttacctgaagtaaacatgagtatttaaagtcag

SEQ ID NO: 34057 - DNA, 222 bp, Mus musculus
  source 1..222: mol_type = other DNA
ttcccaaatggatgggttcttggaaaacataaatatgccacatgcacctcttctgcactacactcactgagagtggagctggccagaggtcgaaaccagactgctctcagcttgttctgcacttctggcccaaagggcccaggctgagggggagtcacactcggctcaaggctgatggaaaggaggggcgattcctgcggcccggcccaggctgcgcgggca

SEQ ID NO: 34058 - DNA, 243 bp, Mus musculus
  source 1..243: mol_type = other DNA
catctctcacttggtcctgagggcctgcgacttgctcctacatccagctgggagtttccaggaggtaaaaagtctggcctgctccagggtttttaaacaaagcaacttgcaggaactagcaggttcttgaaatagccctcttccatgtcctattcatgggcaagacttgggcactaggcttaggagaccacgtgcggttggtggcctgaaaggcctctccaccctctagagtccattcctggc

SEQ ID NO: 34059 - DNA, 410 bp, Mus musculus
  source 1..410: mol_type = other DNA
atgtgattataaccttaaaaggtgagacattcaccttaagaaagtgcccctttgagaccagaccactcatctgggcggaattaatctcctcttgataggctcatgtaaagacaaaatgtgattgcacaaatgcatttccattgagggaaatccctttccacataagctgggtttggcagcccaggagcagggggccagccagtgctttcaggttaagcacctgaagtgtctcctggcagagtgcagaaacacccagctagttgtcacaggaccccacttctccctacagccaggggagaggatagtatagtagtatttctcctgctgccctgggttccatgagggacttgaatggagctgcagcagagaggcgttggtccatcccgggccttgagggaaagtccctaggg

SEQ ID NO: 34060 - DNA, 457 bp, Mus musculus
  source 1..457: mol_type = other DNA
ccctttcagtcatctgggcggaattaatctcctcttgataggctcatgtaaagacaaaatgtgattgcacaaatgcatttccattgagggaaatccctttccacataagctgggtttggcagcccaggagcagggggccagccagtgctttcaggttaagcacctgaagtgtctcctggcagagtgcagaaacacccagctagttgtcacaggaccccacttctccctacagccaggggagaggatagtatagtagtatttctcctgctgccctgggttccatgagggacttgaatggagctgcagcagagaggcgttggtccatcccgggccttgagggaaagtccctaggggctgcacacgaccaggcggcccgcttgggggaagggagtcggcggctcagtgggcctcgcggagagccagggtgatttcccgccagcccgcccgcttaaaaggc

SEQ ID NO: 34061 - DNA, 330 bp, Mus musculus
  source 1..330: mol_type = other DNA
agagtctctatctagatgctcgatgaagtgaaaacagatacacttgaaggccttcccttcagtccagatctagcttgaatttcacgttctatcggggtcccacaccatcttggtgtggtacaaccctctggctgtaagctggtatcagtaaagaagcatgcccggtcagcgcgcctgcgcagtgcccacttgctcgcaggccagggaaattgtcctggaggtaggctggagatcggcccaccggcccctgacccccgcccggccgcctgcacctctctgtcccagaggctgggctggcgaggtgggccgggctgacgcgaccgaactgtc

SEQ ID NO: 34062 - DNA, 420 bp, Mus musculus
  source 1..420: mol_type = other DNA
cctatagtgggatccatactcacatatataaaatgaataaataaatcttttttaaaagatgaggttactgagttgtgttttaaatgtaaggtactaaaacaaaaaaatagaagacatctcaataattttcatactacattctgaaacagtatatattgggctacgtaagtatactatggattcattgcctccaaaacaatcatatgtctgtcttgcattatactgctagtgaacattatgatctagatcctatagtatcttacatagaaaatgtttctaacatgactcacgcttcccgggtaacgagatgaagcatcaacagccctggggatttcaggagccgcagcagctgcgcctgcgcaccgcccactgaccacgcggagggcgggtggacagttcggtcgcgtcagcccggcccac

SEQ ID NO: 34063 - DNA, 292 bp, Mus musculus
  source 1..292: mol_type = other DNA
ctcttgttccgtaattggattttgtactttcttttgtgaattttttcaaagattaatgttatatcagaataaaaaacagaaaaacttaaatgaaataaatttcatcagaaaaatttgttttgcattcatgaatatatttgtattatcaaagacacagttgtcaaggtcctaggccttccgaactgtcaccactggggaatgctgctgccatctagactagaggcaatggagctcaggcagccttggctctgggggcggctctggcagctctctgaacagccaaggctagatt

SEQ ID NO: 34064 - DNA, 349 bp, Mus musculus
  source 1..349: mol_type = other DNA
aaagtgcctattaatttatatagtcactaccttgatgaccctgggctttgagatttcaaaaacattcagatagatgcgagctctcagctacaccatgatggccatgcaagctgccttgatcatggtgtttgtcacagcaataatacagagactgctttttctgttggtacctccaggttgtatggacaatgaagtctggagtttgtcagactggcagaacccttgtttccagcatgagtacaagagatctgagcccagattcccagagtctaggaggaaaggagatgggcagaacaggtcctagctggcctgtctccagggatactgccaacttcctgagaatccagcg

SEQ ID NO: 34065 - DNA, 353 bp, Mus musculus
  source 1..353: mol_type = other DNA
catatgtccccgtgcaaagtgtgtacacaggatcccgtgtgtacagcatcctgttgtccctttgcacagtgcaacccatgggaacaggtaccctgcactggcttatatggtcactagcttgatgagcaaatgatgaagtttccaaatttcctaaaggaagacactgcaatgctaaattaaacttatctgggactctctcctagagatttccacagtataggggtgaaaacctttcatgtgaacctgctcacaaggcctgaaggtgcataggatcctacttgggctgtgggtgaagccaaagggcttcgggttcaaagtcgcattgagggcgggaccgtttacaaggccccacc

SEQ ID NO: 34066 - DNA, 244 bp, Mus musculus
  source 1..244: mol_type = other DNA
gtgctcttaactagtaatccatggtgcacgtggactgcactttttctaataacaccaggtacagttgatactcttacctgcagtgtcgaagagcttagcagaggcatgccctctgctgtctatgataagctatagaccacagagacattaatctctcagtttgtcctggctcagccaccaggagccacgcacaactgttctccataatgtctgaaatttgagacactgtaggccaatggtccaa

SEQ ID NO: 34067 - DNA, 345 bp, Mus musculus
  source 1..345: mol_type = other DNA
ggagcctgggccaggtcctgcagctgactgttgtccacagctgctgtggttggtacttgaatttagattcataaacacgattagttttttaataactgataacagttctcacctaaaggaaaatacggagccctgtttatccaaaaatccggtacctgtcagactgacagagttctttccctttaagctgagagtagattcccacagtctgggtgtgaagcgggagaacacccacccaatgttctttcgctgtctggccagactccaggcaaagtgctagctagtctaggggagattctgtttctaaccccgcctctcccggagagggtgtggccctgtataaag

SEQ ID NO: 34068 - DNA, 480 bp, Mus musculus
  source 1..480: mol_type = other DNA
agacttataatggagcttaaaattcttatttggtgatcttgtagaagtcttaatgtaataacaaaatgagtgtgtgatgtctgtctttggacacatacgacaaccaatgttgtgtgaagaaacagtgtgccttgctatgaacagcagctattgagaactcagacatctctgtgtaccctcggacatttcagaagtcttaggtctgtgtaagtacacactaagacccatgtatgaaacttcaaattttccatttttatctgtgatagaaataatctctttgaattcagatgaggaacttctgaacagaaagacaacatgttctcctggggaccactgtcatcagcagagccccgcagaagtgcttaatcagcacttccgggttggggcctctcctagtggcctgacccggaactgcaggcgggatcgctttctggaggggcaggatcacgccgggcaccagccccgcccagggacccgagg

SEQ ID NO: 34069 - DNA, 577 bp, Mus musculus
  source 1..577: mol_type = other DNA
ttcaagatgtattattaactcttctgcagtgaaagtcccagtctcttagaatgtgagaattatttttgtcacaatgcattgccacagtacattcttaacattagtaagaattgtaagtatggtcacctagcacattttagttaaagatagacttataatggagcttaaaattcttatttggtgatcttgtagaagtcttaatgtaataacaaaatgagtgtgtgatgtctgtctttggacacatacgacaaccaatgttgtgtgaagaaacagtgtgccttgctatgaacagcagctattgagaactcagacatctctgtgtaccctcggacatttcagaagtcttaggtctgtgtaagtacacactaagacccatgtatgaaacttcaaattttccatttttatctgtgatagaaataatctctttgaattcagatgaggaacttctgaacagaaagacaacatgttctcctggggaccactgtcatcagcagagccccgcagaagtgcttaatcagcacttccgggttggggcctctcctagtggcctgacccggaactgcaggcgggatcgctt

SEQ ID NO: 34070 - DNA, 258 bp, Mus musculus
  source 1..258: mol_type = other DNA
aggggccagtggcgcgacttcgccccggtgggggccctctccccttgccttcctggtccacgcgggacttgggcagcaaggctggggtctttcccatcgacctcagacattcctaggagacagcttctgctcctcccggagctgggctgtccctagagcaggccagtggaccagcctagcccttggcaccccactccccgaggttcgcggggcgctgcttcctgcatcagtcactcccgctgggggcggggcgcccca

SEQ ID NO: 34071 - DNA, 257 bp, Mus musculus
  source 1..257: mol_type = other DNA
taaaggggaggactttccttttcagggttcctgtaggtacaggctgcccctgggaggcaggaatcctgagagggtctacactgattgggaagtaacttaacttataattatcaccatagtctgaatttgaacctaggcattctggctagtctaacgtcaacatagcatcctgcctaccaattgcctcatcccatcttacctggtccggaggctgccccaggaggccaagaggcgtggccgaacggggcgtggccgcg

SEQ ID NO: 34072 - DNA, 433 bp, Mus musculus
  source 1..433: mol_type = other DNA
aaattccagggaaatgtttcaatggctgtaaaaaaatgccccttcttaaaacgggtccaaactttcacagaggaactcttgttaagataaatattataaatgaattacacctagtttcatattctaatacttcaacataggagtgccaggcatatgtacagctcatgctttgctgaagtgcccaacacgcggctctggacagagacctgggctccaaatcacagatgaaaaggaaaaaaggtttttttgtttgtttgttttctggtcccaacagcaattcccagaggactgtgagctctcatttgagaatcacgtgctggaagtcccgctttttctacacttggaatccaagtccaggaggagcgaaggctcgccatcactccacggggaggtaccagggaacacatccggttcttccgggagctaggggagc

SEQ ID NO: 34073 - DNA, 332 bp, Mus musculus
  source 1..332: mol_type = other DNA
cacagagagctgacagatgaggtgggttccgtgtctgtgctcactcccatggaagagctaacccagcctctaagtaggcagagtctagtgtctgtgaggtggccctgtccgcagaagcacacacagtcagtctctctgcacacactctgtacctactagcagatcagatttgatccctgagttagcctagtctgagcagtaatagctcctggagcagctcagctcccagagctcagcacctgcattcttctggctatgtcagaagccagatcaaaaaaaacaaacaaacaaaatgttagtctttgccctttatctgcctggcaaagctttta

SEQ ID NO: 34074 - DNA, 292 bp, Mus musculus
  source 1..292: mol_type = other DNA
tgactctgattagcaacaagtgccaggtcaagacagggccaatgtgttgctttcatctaatcttggaagttcgacctgactactacagaagtaccttggttctggtatcatacgtcaaatggaaatgacttgcccaaggtaactcagctagccctgcctccttgctgtcagctggctcctggaagctttgagatacagccagaatcctgaaagaactgggctttctggacactattagcaggaggccactaggacccagaagctctcagagcatcctgctctgctggctgcc

SEQ ID NO: 34075 - DNA, 328 bp, Mus musculus
  source 1..328: mol_type = other DNA
agactggaaagaaaaacttgctaatttctctcaagaatgaattcttggatgacatggtcttggtcattcgtggaaggacacgcctcccaagcccagtcgtgactagcaagcttgcaggctgtcacagctgcgccagatttctttaatttggaaaattaaaagacgcgtgccgcttcttgtcccagagtcagttcactggttccaggggccacgctcgctagctctgggcccagcccgggatggcagaggaaatgacccccgactgcagccggcagcccgcgcgtccgccgggagccggagacaaacacacgcacgtgcgccccgcccc

SEQ ID NO: 34076 - DNA, 417 bp, Mus musculus
  source 1..417: mol_type = other DNA
cagcactgaaagcatacctgaagtcatcagattagatcatatgttaatacagggagaaatcttgtctcttgaacaagccagaaatttccagtacttctagcactggtttcttcgaatcaatcagttgctgggagccgccctttggggccgaggcgcttcccccccactctacagagggcgctgtgggcacctccgccacacggccccgcagcttccccggggaggagcctctcctgtagccgccgccgcctccgcgatagcaaacccggaagaagccagctggattgtgccggccggcctggcactgctatgcattccatggaggtaggtctggttcccgctccagcgagggagccgagactgacccgctggctgcggtcccggcccggaaggctggaccctcagctgaggaggggc

SEQ ID NO: 34077 - DNA, 314 bp, Mus musculus
  source 1..314: mol_type = other DNA
ttggcgatcactgctctagaagtgctgcggaggctgtgggatccccctgctctggttctactgtggccagcactgaaagcatacctgaagtcatcagattagatcatatgttaatacagggagaaatcttgtctcttgaacaagccagaaatttccagtacttctagcactggtttcttcgaatcaatcagttgctgggagccgccctttggggccgaggcgcttcccccccactctacagagggcgctgtgggcacctccgccacacggccccgcagcttccccggggaggagcctctcctgtagccgccgcc

SEQ ID NO: 34078 - DNA, 244 bp, Mus musculus
  source 1..244: mol_type = other DNA
caaggcttcaatagcagcttttccagcggtgaaaaagccttggggctaccctagttctggggctatagaggaacagcacaggagctgtggccctccccttcgtggccgccagcccaggaaggggcgccagccagctggcggatgaagggatccctcctccgcaactacacttcccagaaagctgtgttgagacccccgagggtggggggagggggccgcgcggcggcggcgccagggcgggcgc

SEQ ID NO: 34079 - DNA, 470 bp, Mus musculus
  source 1..470: mol_type = other DNA
tcatggccaggtttgggaagacatttatccaatggctggattgtataaataacagcagaacatttaatcaaaaagcattggttttgaaatgctaaggctggtttcctcctgggtaaatgaagtcatctttaactacctagatttccactccttgtaaacctaatgtgtaataaaaggagatcgaattcttactttttaaagtttgataactttaaaactcattaacatccaaacgctgtttgttgttaaaaagtaagacgcgccgttgttacagcagcagaagcactaagaatgccttatacggtatttgtagaagaaaaccccccgtgagtcctggaagcttctggcaaaaaccccggagccttctggcagcccgacggctagcaggctccacaggtccctttaaggcgccctacgcgcggggttcgcgatcgcacgccacgtgactcggctgccaagtccgccagatt

SEQ ID NO: 34080 - DNA, 391 bp, Mus musculus
  source 1..391: mol_type = other DNA
gacttgaaagtttttaggttgtctgctcttttaataaacacaaccacacagctttttggtcaaatggaatcagtgtattaaaattcccacaaaaccagattgtaggcaatatatttattccaacaagagtcagacttaggttgaaaagagcttccgcggggagtcaggagcggtgactcagcgggacaagtgcaacgggtccgctgcagtgtagcttgatctcgccgggcgcctcgggaaccagattccccgggtcccgccagacttaggttctccgggcgccccatgatgcagaacccaggccgcggcgcgggccccaggcccgcccacgaacctgtcgtactcggaccgagggaccctgcagccgtctgcgcgtgcgcacgcgacgatg

SEQ ID NO: 34081 - DNA, 485 bp, Mus musculus
  source 1..485: mol_type = other DNA
ttattttatgtaagtacatcgtagctgtcttcagacacaccagaagtcagatctcattcaggatggttgtgagccaccatgtggttctgaagaactaactttctttgataaatgattcatttacaatgtttcttaaaaaaaaaaaaagctcaagttgctcttctacccttaggaagagaaatccttaaaagcagtgactaatctgaagctccgatactgaactccaggtctgggtctgaaaaaacgttcttgctgattagaacctatcaacttttaaaactttttttttcaacaagcccggctggcagaactgccgggcacgccggtgtcccccggctgcatttacgcgagctggcgagaccggcgtgctcactcctcgacgacgaggttcaccggttgcctcgagtcccagcgcccgtagcaaccaagggtgacggaaagcggaagtgctctctagttccgcctccccatcgtcgcgtgcgcac

SEQ ID NO: 34082 - DNA, 282 bp, Mus musculus
  source 1..282: mol_type = other DNA
ttctgctaagcactttccagagaaaacccaagcaagcacaaggccccgggttcaagccccaatgcgtgtgcatgggagtgtacacacacgggtgtcctagtacacatagacactgtcacttagtctggcaacaggggactgactgttcccctgcccttggggctgggacagcagaccagctcttcaatgaccttacgccctgttgaatgagctggaggtcagaagcagagatgccagcagctcaccctacttctcccttcagtgggagtagtgggtggggaa

SEQ ID NO: 34083 - DNA, 278 bp, Mus musculus
  source 1..278: mol_type = other DNA
tgctttaggtaactaaaatcagaatgtgactgtactaaaatgataatatataaaaagtactttctccttcagcagacggattccgcgccgccaacctgcaggctgagcggggaggggagaggggtacctcgagcgacggtggagaatgacctcagatcttggcatccgaatccaggacccccgaagccggaggcttggggaggagaggcccggctgcgcgtatccaagcagcgcggggccgagctcgggggtgtggcgcagcgccggcgggggtgggc

SEQ ID NO: 34084 - DNA, 229 bp, Mus musculus
  source 1..229: mol_type = other DNA
gtggtctggtcatagccagtcgcaagcctagaccattaaagtagcatcctggcgaagaaataaattcttcacacgaacaagatctttagcaataggtaatccttttgttattattacttttaaactcttaaatagtctatttggtggtctctgcaagagaaacccacagtctcagatgctggaatcaagtgccctttggtccaagggacacgaagctccgcctttcccg

SEQ ID NO: 34085 - DNA, 339 bp, Mus musculus
  source 1..339: mol_type = other DNA
caggaagaggcaggcatctctgtctgaagccagcctggtctacatagtgagctccagttgatgtagcctggcaatgctcaaattacataaacatagaatagtttcaatcgtaaatataagctacaacttcttgcaaaggagaggtgtgctcatctcgggaggggacaagctcagattatcctgcctccttaatcccaacattttgcaggtttacatagttgctagtcagagctacactgtgagaccctcccagggctcgagaatcttgaggggcctttctgcggcttccggcgagctaggcgccgccccctcccgggctgccgggtgcctgcgcagtga

SEQ ID NO: 34086 - DNA, 395 bp, Mus musculus
  source 1..395: mol_type = other DNA
atgcgccacctggcggttcaactaagaaggctccttgagaggatgttggaaaacgctggcttcccaaggcatgggatttctgcgaaagttctcgctttcacctaaaaggtaagagaatgtcaatatatatatatatatatatatatatatatatatatatatatatatatatatatatatatatatatctcaaagatctcacttaactatgcagacgtcatggttgctcactgacatgccatgtttacaaatcgtgcactcccacgccgcgcgccagcggtggcggctgccatggagaccggcaggtgagccgcacaggcgcgcgtggtccctgccccacccgcgctgagcgaagaggcgcagggaggtgactgaagcgagtccagccccttgca

SEQ ID NO: 34087 - DNA, 395 bp, Mus musculus
  source 1..395: mol_type = other DNA
tgcaaggggctggactcgcttcagtcacctccctgcgcctcttcgctcagcgcgggtggggcagggaccacgcgcgcctgtgcggctcacctgccggtctccatggcagccgccaccgctggcgcgcggcgtgggagtgcacgatttgtaaacatggcatgtcagtgagcaaccatgacgtctgcatagttaagtgagatctttgagatatatatatatatatatatatatatatatatatatatatatatatatatatatatatatatatattgacattctcttaccttttaggtgaaagcgagaactttcgcagaaatcccatgccttgggaagccagcgttttccaacatcctctcaaggagccttcttagttgaaccgccaggtggcgcat

SEQ ID NO: 34088 - DNA, 257 bp, Mus musculus
  source 1..257: mol_type = other DNA
gctagatttccgctgtctatcctgacagtggtctgatttcactaccagttgtcacctaaataagttggaggagaacgacatgttctggcacactgaacatgtgtcaccctttatttttcaaacacactgtctgggtccagtcggtctaattagacaggagcaagcaggcggactccccgtcaccacggcccggatcgggaagtgtcgggagccgggttcccccgcagtggcgggcggggctagactgacgtggccgt

SEQ ID NO: 34089 - DNA, 403 bp, Mus musculus
  source 1..403: mol_type = other DNA
tctctgtatagccctggtgtttgattccaatccaagattcacatatgctctttacattttatataaaactagtacataataaggaagcagggatttatgcctacttgtaatcgcagcacccgttggataacttagactttcaaacaaaatgcaacaaaacttgatttatggaaatcaatcctgtgtcccccgggacctccgagccactaggtggcgctctgtggttcctcccagaatcctttgaggtgccccagccacttcctcgcgagtgggagtgcggctaggtgcaaggcgagtgtgtgtaccccccctcccctccccgggtcgtgacccccgccccgccgggccgccccgaaatggcagccctcctgcgaagccccctcggtggggcgctgtgcagcga

SEQ ID NO: 34090 - DNA, 399 bp, Mus musculus
  source 1..399: mol_type = other DNA
aacctgagccttaggctttctctagcacatcttttgtaatttaaaaaaaaaaaaaagaagaagcgaggccggcccaggatagccagggctacacagagataccccaaactacatatatatattgcgtattaacggaggccccctatatagcggacctatttacataaaagaaagtagatatataattatataataatatagatactatatataatatcatggggcttgtgtacttgagtgtcagccccacctccgtaagtatgcacaaatttatcacttatgttttctgagacatgggctcatgaaacttgagctgattccagccaatcccaaggccggggttgggtaggcaacgctggccaggccggaagtgacgtacgtatcttataaaactcgcca

SEQ ID NO: 34091 - DNA, 287 bp, Mus musculus
  source 1..287: mol_type = other DNA
tttctgaagaggtgaggccatgacttaaactccaaacaggaagctgtctgaatgcttctgacaaccgaaagctttaggatcggaagcatgtggcttttgttacgaaagcttggctagatttccgcatgtctatcctgacagtggtctgatttcactaccagttgtcacctaaataagttggaggagaacgacatgttctggcacactgaacatgtgtcaccctttatttttcaaacacactgtctgggtccagtcggtctaattagacaggagcaagcaggcggact

SEQ ID NO: 34092 - DNA, 314 bp, Mus musculus
  source 1..314: mol_type = other DNA
atgctggagcagttgctaacagcttacacgtgatatggtggctccacttacatataataaataaatcctgcgactctttaatacagttataaaattattttcgttgagatactgctatgaattgaaattatatgatagcattcaaatgcatgagtatgggggcaattctaggagcctccaggcgtaggccccgcctctaggccccgccctaccctcctgggctggcccagccgactcttctgctcaggcacctgcctagccgcctcgcgaggaggggtcctgaggcggctccagggacgagcagtgattggctg

SEQ ID NO: 34093 - DNA, 399 bp, Mus musculus
  source 1..399: mol_type = other DNA
aaaagaactcaagttcggtttccagcaaccgagttttgtggcaggtacgctggcaactgcagctctgacctctgctggcaactgcattcatatgcgaataatctaaaacgactacaaatcttaaaaagttgtaaatgatgtatgtatacccaagaataccaaattaaatactaacagtgtctcattgccagttagtttttgtttggaaactgcaatatagtactagttaaccattatcttccacttagaaagttatgttcgaagtagatctacttattacttatttacttatttagacacgaccctgaactgggagcagaggagcgcggcctggtcccgcccccgcctccgcccccgcggcgcagccaatcagcaacgcgcgcgggaaggccgcacagc

SEQ ID NO: 34094 - DNA, 464 bp, Mus musculus
  source 1..464: mol_type = other DNA
tataatgcacttgctatataatgcacttgctatataatgcagtgtgatatgtaaatattttgttctttctcatatatacatattttccaaattctttttgtatctatttaatattaatgcaactattttaaagaacttaagtagactatacgtgtaaattaatgcaaatataagtccttgaaagagctctgttaatagcagtttttaaaagcttaaagaatcatgattttattttaaggtattaatctgatacattgctttttgtgattcccataatagtaataattacataagatgattacaatcctccatgttgaccgtcctgtctgtagtgactgcagctcaagttactttaggttaatcttaacaggacttccagcaaagcctcttctattccttttacagaaatgtctgacacattaccttgacctcctttcattattaataaagaagaagcaggggct

SEQ ID NO: 34095 - DNA, 437 bp, Mus musculus
  source 1..437: mol_type = other DNA
ggtctcattacaaacccaggtctggaacactatctctatacagttttccatgacacacatatagtggtcacggccatcaccacaatcctgtaaaacattaaaatttcatggcagtggctatagataatacagcagagactctagtttaaacatttgatgaacaagctaagatctattttacttgatatcaagccgccggagcggattaaattcgcctgctttcccaacatctggaacacgcagcacaccctcttggaagactttcccagggcgggactgttcaaagtctgaactagacccaggaaggagaaattcgaggacaataagcttctagttggcggaggatctatccgcagggagccctggctcgtctagccccgccctccacccgcctagccccgccccaccggtgccattggccggtccaaaaaacgcgg

SEQ ID NO: 34096 - DNA, 335 bp, Mus musculus
  source 1..335: mol_type = other DNA
atgtggtacatttacagagtggagtactgttaaaaacaatgaatttatgaaattcttaggtatcatcctgagtggtgatacacatgaaaatcaagaagatggaatgtattttatattgtgcttatgttttaacactgatgcttttgtgtgttgtcaattgagcgctctaattttatgcccactcaatacacattttggaagaggtgccacccaagacctggtggctccctcagtgatcgagtgagacctcagagctgtaaggagcatttgcccctacatgattcaacgttgtgggcttaggccagcacgttagcatccatgatgttgtcaatgac

SEQ ID NO: 34097 - DNA, 564 bp, Mus musculus
  source 1..564: mol_type = other DNA
ttgcaataataaagcttgcttcaattttagctctaaaattatggtagtggtgtggaattaacaattctaggaatcgtgctctataacttaaaatgtaaaattcttcataggaataagagggtctctcatttcttagacttttctgaaactctatcacagttctgggaataaataatcaatgatcttcaaaaattattaaaatgaagttcatatggcggttgaacaggcttctgaacgctttgctgaatgaaacattattttgtaaagcataaatgtgtcttgacaacttaggttccatcccaagacccacactgtggaagatgaggtcttctgactgcgagccttggtatgcacacatgcatacatacacacagataaataataaaaaagacccggtatgtataaattcataattgtataaattgtgttagttcacatatttgctttctgatgccaaattggacacagtgcacagaagtctgaccacactacgctgcgcgtgacgtcacctgagggcgcggcccgcggagggggcggagcctccccaccgcgaggggaagggcc

SEQ ID NO: 34098 - DNA, 403 bp, Mus musculus
  source 1..403: mol_type = other DNA
ttagctaatagctagggctttcacagcaggaagcatggcaacgtgcaggcagccatggtgtctaatagtgccccttcctaagggccaagcagtctgtgggacacctgacatcctcaggtttccacttaacacacttgtgcatgtgcaccaacattaactaaatacacaaataaataaataaatatgtcaatgagtgtattcttaatgcctatgttttaatttaatttaattttattttattttattttttacacccaagcagagaaatattgtgtgcctgtgtttcccagttacttaatgaaattatgatcaaagttaatgtaaaccaagatgaattcctttagatgttgaaatctttttagtcttccagagtcccagagaaaaatgcaaattttttggaggg

SEQ ID NO: 34099 - DNA, 146 bp, Mus musculus
  source 1..146: mol_type = other DNA
agtagctaagatttaaaagtatgcattttatattatatacagaattgaacctgggtcctttgcaagagcagcctcaggctggcctcaaattcagaggataacacaatgttcttcagggcttgaaaccaaggtcacaggagcttctc

SEQ ID NO: 34100 - DNA, 270 bp, Mus musculus
  source 1..270: mol_type = other DNA
aactctcaaacactattaatcttaaattattagtacctttgaaggcctagcccagtgcagcggtaccatagaactagcaccagcctgagctacatgctagctaaaatattatcctaatcttaggagaaaaaaaatgaaagcctcaaggactctatcggagtcaattccctgactctagtcgctccgcaggagcagtcacgcgtgtcaccttccccctgggccaaagtcccaggaggaacggccttagctcgaacgcccgggcgtatggcg

SEQ ID NO: 34101 - DNA, 421 bp, Mus musculus
  source 1..421: mol_type = other DNA
gtacctagaagtgcatttatgtcttacacacccctttcataaagtcactttgaactgcgtgtgtgcacaataagctctagactctcaagtattagaaacaagatgcaatttatctttgtgctacgcagcctatcagcatcatgcagagtagccagtgactgtttgaatatttactatttccttacatttctaagcgctgacacttaaaggcatgcatttatttatggtaaacacaagttttggaatgaatgaatgaatgaatatttatttgcctccaacactgtgactctgtacagcaagtgtaaatttgaaacactacacgttttctaagatcagacagcccttaaagtgtatatggtttaaaaaaaaaaagcattctgggccagcaggctcgcgctgagcccacctgcctccgtctctt

SEQ ID NO: 34102 - DNA, 483 bp, Mus musculus
  source 1..483: mol_type = other DNA
atttatggtaaacacaagttttggaatgaatgaatgaatgaatatttatttgcctccaacactgtgactctgtacagcaagtgtaaatttgaaacactacacgttttctaagatcagacagcccttaaagtgtatatggtttaaaaaaaaaaagcattctgggccagcaggctcgcgctgagcccacctgcctccgtctcttccgcgcacgaggagcctcgcacacgggccgccgagcacgcagtctggccgccagtctgggtcgcatccaacagtcgacgcagcgcaccttggaggcggcagccgggaggcatggggccggagcatggccgggcttcgcacgcccagcgaggaccctgagggcgcagagcgcaggcgcgaggcgcagggccagccagctgccaggtgcggccagccaggtgcggagcccgggtggagcagcagcgcggctgcgcgggcgtcgcgggggcgtcgggggggggg

SEQ ID NO: 34103 - DNA, 531 bp, Mus musculus
  source 1..531: mol_type = other DNA
ctttgtggtagcttgctagcatgcatgaacacatccctatcaccctgacatggggatcacaaggcaattaaattgataacatacgttttaacagtttgatattcatctaaaaagaattttttaagtatgcctttagaatctgacttcatgtgttcacagtatgtacagattttaaaggggaaagtattttaactcctggtcctttttctttcctgggtgacagaaattaaataaacaggcacagccccttgcttgggcacttggtgtggccacagcaaattttaatctcttaagagctagtggggtttagagaccctacagaaggttgaagctgcacaaggaagctttttcggctccgagctcgctgctgtcgcgtgttagcttgcccagcttccccggcggggcgcgcgcccgcccggagctcctccgccctccgcggaccgcccgcttccgcgctgggtgcgcttccggctgcggccgctgggggcgccccgggcagggaggcggcagcgaccgttctcctagcggcgc

SEQ ID NO: 34104 - DNA, 368 bp, Mus musculus
  source 1..368: mol_type = other DNA
aaagcatttagagtacttattgagttttgtgtggtggtggtaatgcgtgcgatccccaacccccggaaccagctctgtagacaaggttctccttagggcaactaaagggaaaaggtttcatttactcagctcaggcctcagcatgaggcacagataatgctaattttgaaaaagttgccaccttgtttcactgggttgtattaaggtgtaaaagatggggagaccccacctttacaccacggacctttgagagaggctccgggaagcttcttggaaatgatgtaaggagattccacttctgagaggcctggcgcatgcatgtcacacggtgccaggttctctcctggcaaggggctcgtgtctcaggc

SEQ ID NO: 34105 - DNA, 274 bp, Mus musculus
  source 1..274: mol_type = other DNA
tactggcagcctttatctgcagactctatttatacacagtatattttaatgtacagagtggaagtcctccacacagattctgctaagcagcagtgattgatttcatacccaagaaaaaggcctctagcaggttccagcccaacggggctttgaggttgagcaacctgctcatcaaacggttctggagtcatagtcgccagcgcaggcctgggccagctccgcccagagcagcagctgggcgaccacaccctgtgcggagctcagttcctgcgag

SEQ ID NO: 34106 - DNA, 408 bp, Mus musculus
  source 1..408: mol_type = other DNA
tcagagttcagtgaaataatatattactacaaaaagcttatacacccttttcggcctcggtactgaagtgagcttggcaagtcactgacgcatgcgcgctcttgcctctgtgtcaccgttccaagcctgggttcattgttcagggtgtccccggggacacccctgcgaatctcagtgttcaagccgcgccgatgggctaatccctggacgccccggggttgtgcaagctccactcatccgagggttcacgggcgggcgggggcgccgggatcccctttgtggccgccgccccaactcgccccgccctcagccccggacccccagccagggcggcgggcacgctcgcacccgcgcctccggggactcgcggaccgcacagaccggccaggcgcgctgggcatgctcagt

SEQ ID NO: 34107 - DNA, 391 bp, Mus musculus
  source 1..391: mol_type = other DNA
ttccctgtgaactctttggagccttttaaggaaacactctacagagctgtatccaggccttggagaagttctaacttgtctgagtaagtgtgaatcagttttaggaactaaacaatagtaaaaacatggtgtacctgtttataaatatatgaagtttttcttttaagtatctatctgtaaaccaaagtattctttctctaaaataaaaactaagtattaccagttaatatcatgaaaccctgtttggatcttaaaacgtgttgaaagcaagccttgcatcgcaggattggaccttgcatataaattagtgcaagtccttgttttaaggacttaagaaacaaagttaagcgtaacctacagtcatttaggggtatgagtcacctttctgaca

SEQ ID NO: 34108 - DNA, 247 bp, Mus musculus
  source 1..247: mol_type = other DNA
gaaaaaaaagataaagtcatgctactattttaactaattctttcagtgaatgtgatttccttacagaaaaagcaaactcttccatgactcttcgaggcatcggggcagcagcatgcatgcgtgagcagctgctgttctaagtgttataacactctgggcaaaggattccttagcccttgacctggtattccagtttactgggaagtcctagctaatcagaatcatgtcacagttactgtgtctgtgt

SEQ ID NO: 34109 - DNA, 151 bp, Mus musculus
  source 1..151: mol_type = other DNA
atgtaagtcggatgagctcctacttggacttcaactttttaggtttcacaccacggaggtccgaagcacccaccttgctcccagttagggtgaagagggtgggcagcggtggtggccagagcagcagggagttaggaccgctcggagcgcc

SEQ ID NO: 34110 - DNA, 101 bp, Mus musculus
  source 1..101: mol_type = other DNA
atgtaagtcggatgagctcctacttggacttcaactttttaggtttcacaccacggaggtccgaagcacccaccttgctcccagttagggtgaagagggtg

SEQ ID NO: 34111 - DNA, 307 bp, Mus musculus
  source 1..307: mol_type = other DNA
tgtagtgactattcctggctatcatcaactagactatatctggagtgaactacagtccaaaagacacctgtagaccaggctggcctcgaactcagaaccacgcccggccttggcaggaaaggtagtacatgcctttacagatccggaagtgacacctgcgggaggcctacaatggaagaatcattcacagctgctgctgaccatctttggggactacagattgtaagtcatcaactcttagagaacaacttgtcatgcggactacgaatcccagcaggccccggggactctgagcctgcgcaccgca

SEQ ID NO: 34112 - DNA, 604 bp, Mus musculus
  source 1..604: mol_type = other DNA
acatgataaagttgatgaaaattcttagcaccttctatagaactttgtgatatctctggtggctgagtcaccaattgcatttcccttaaccataggtacaggtaataatgcctcatcttttatagattttacatagattggaaaggcagtaattttttactttgtatgaagtattatgtcaggaagaaaagatgatatttcacaattccagaagtatttaaatttaatgctatcccccttatataattctattgatttagagtactttctataaattggcaacttgcacaaaatcttaacttttttttttactacagtagtaggtgcatggcacaatgcagcatcttaaaattaaatgaaaatactaaaaagaagtgaattgatactcccatttctatttggaatggtgcaatacaaagatttagagatgaaacgtcccagatatatttgatttcagtgtaagatatagtatcagtcaattagtaattgatatttaaaagaattaagtttattctccatgggagtttctgaagaaccttcagctaccttaaatatttactcatgagcatttactttggaaaatgtactttttgtagaaatataa

SEQ ID NO: 34113 - DNA, 361 bp, Mus musculus
  source 1..361: mol_type = other DNA
ctgtagaccaggctggcctcgaactcagaaccacgcccggccttggcaggaaaggtagtacatgcctttacagatccggaagtgacacctgcgggaggcctacaatggaagaatcattcacagctgctgctgaccatctttggggactacagattgtaagtcatcaactcttagagaacaacttgtcatgcggactacgaatcccagcaggccccggggactctgagcctgcgcaccgcaccgcgcaacgaatgctgggggtcggctgccggacagcggaggcgccggcgccggaggggaggggagcaggaggcggccccgccacgaccccggagcgggaccagctgtactacgagtgcta

SEQ ID NO: 34114 - DNA, 371 bp, Mus musculus
  source 1..371: mol_type = other DNA
tgaaaataattgagtcctttaaggagaatatcaataactcacttctgctcaaaggatatgaaaatgttttcaaaaaaattatagaaacttccacaaaatctcatcaaataataattaaataattgaaatttgagtaggagaaacaaaatgaactcaatagattatttgtttttttgtatttagaacttaaatactacaaaatttttgcaaaaataagcttagatatatttacctccaaaattaattttcttatattgggctttcaagagtttctaaaagtcctcacagcaaatcttttagattatgaagaaagagtttattctctaaatattattcataaatattgacttgataaaatgtacctttgtcag

SEQ ID NO: 34115 - DNA, 612 bp, Mus musculus
  source 1..612: mol_type = other DNA
gaaataattaaggcctttaacagtcttgataaacctctatcacttgataattgatatcaccctactgtttttctaacagtaacctggtctgttcatgtgacaagtcacttcggtcatttccatttatacatatctaaaaacttcaattaattttttatcgtaagtttcttcagataagttttagtctttagcaatgcaaaattttctagaagaagaaaatagagatcaattggttactgtttatatatggaaaggaaatataacaactacttttatatagatacttaaaactatatagaactccaattgtaattctcatttcataagtgatatgtagtataaatcaaatagtgcagacccaaacattcatgtacatgcatgcacatacatgtatttctggaaagggctaatatttcttcattgagaaaacacattaaaacttattaagaactcacagagcatttatatagtttccctgggaaaatttttaaatgttttttcacattttgacattgttattggtaattgcttatggcttataaatagctagtactagaatattgatttgagttaatatttctttcattatgtattttttcagaaataaattac

SEQ ID NO: 34116 - DNA, 316 bp, Mus musculus
  source 1..316: mol_type = other DNA
aattcatagttcacacactgagagtaggagacttagtgatatttgtagaacattttacctacacaaaagaaaatgcctgcaccttatggaaatttctccaaatttgaccatactgttggaaacaggacgacagaaatggagtacttattagaattcaatgaaaatgcgtacacagctaagatctcacctaataatagacctttgattaagtgaaattgattgaatttggctcgataaaataatgtgatctttaaacttattttacaagcctttaacccctatattgtatataagtgatttagagaaaatccaaagg

SEQ ID NO: 34117 - DNA, 356 bp, Mus musculus
  source 1..356: mol_type = other DNA
gtcctcatcagtgtagactccaacttctcagatctcacctattggttagcaatgagtcttaatccatgaatacgtacgctaacacatttttaggtatttactcatggaagaagccaattttgtttaataaacaaaccgtggcgagaactttcagcctgtatttgccgactgataacgctggagacttgtgtttcaccagtcctaaatgctaggaacacacttgacccttgcactttattacaacctctcattaaacttgaagagcgactctcccggaggccattctcgcgaggagttctcctctcgcgggatttccctgcgagaatccttagcgcgaagcggaaactatcttccgc

SEQ ID NO: 34118 - DNA, 532 bp, Mus musculus
  source 1..532: mol_type = other DNA
aaaaatcattggaaacagttgtttctgtattttcttttagttattctactcttagagcctgtaagaacataaaggtatcagaatagaaatatttgcttatcctttaatctctgtgaggaatatataagtttactgtcaagagagtcaaatgtctcaaaaatgctatacagaaaaaatgaatttcagtctgtattttagtaaattgtttataaatctattactaaagattagaaaaaaatataaattacattctgctgttcttctttagaagcattcctgcgtaaatactgctgtaatactgtcatacaagtgtattccagattaagtactttttatactttattcaaatgaaacatttctcaaattagttttgtttcctggacaaatttctatgctatcatttaagtcaatgagtttttatcagggaaagaacctaattcaggaacatgcttcctacttttttgttgctgtgacaaatactctgacaaaaaaagcgtcttagtgaagaagaagggatttatttggcttgcct

SEQ ID NO: 34119 - DNA, 503 bp, Mus musculus
  source 1..503: mol_type = other DNA
actatagtaatcacaacttctgtgttaattgaattttagtaactaagtccaataacactgatttcacattatactttacaaaataatacatgtattacatatatcatatgcacataacataaatgctatacattctcaaatgtttggtgaccctgcatctcccaggagatcccctgagaaaggtattactacttatatgtgtctgatactactgatatcattttgaataatcacaagtagaatttttaattaacacaaataaatagtttgtctcttgatgtaattggcttattactcatattgtgctcaaaatggagtaactcagagtagtgcataactcaaaagctgctcttctgttcagcattgaacagctcactgagagcagaactgcaatgcctctttgaccagaggaaatacacattgttaccagtgaaatatccatgcaagtttgttccaaatctaatggccaaaaataagaacaatgtttttcttagatgctaata

SEQ ID NO: 34120 - DNA, 384 bp, Mus musculus
  source 1..384: mol_type = other DNA
gccaggccaggccaactgactggattggttggagaattctgcaggcagctttccctttcatccagtatcaggatttgctggaaaagcaagtgactgattcccttagttaacaagatgagctagtttaaaaatattagtaaaacacttttggatgcaggcagcacagagcccactggttcctgattccatggctgccttaggaagcaaggactccctctttcccctcccacctccgaagaaagggggggggggctcagaactgcggggctgtcctgcaagcagctccctcccatttcttttcaggggatttgaggagggggcggaggagggggctgcgcgagcctcttgtccagcccacccacagcatgaagcctttaggggtgc

SEQ ID NO: 34121 - DNA, 365 bp, Mus musculus
  source 1..365: mol_type = other DNA
tttgtcatatctatagaaagaagaaaatgacatttcaagtataatctgaagtttagaactgttaagaagcctcattccataccagtgtgcaaatcttcacaaagtgaaactttcgttttccaaggcaaaactagaaactaagaatttctgcaacagaagtttctcttcaagacaagcagtagctgctaattaaagtgatgacaccaattttaaactgctgtttgaacaactgatcccctgttcatacttcatgatcatctcagaaattattaacagactgttctagacttgcccagagaaatctgtacaaattaagtttggagactctgttcctggctacagtgatgctgtttgtctagcaactg

SEQ ID NO: 34122 - DNA, 484 bp, Mus musculus
  source 1..484: mol_type = other DNA
ccagtgaaaacatgaggccagggcagcagcccacctcctcaaaggcctctgagcttcccagaatctggggcacaccgcctggctttgcggtcagctgagagaggggggggaagaggacagaagcttttcagtacttcggggctgctctcctccgagctgcggctctccgggcagtggctcgggtttcccctgaccgcgtggaagtggcccccagggcaccggaccactcgggctacacggatcctcagggctgtggggtctgggaccagaaagctcctcttaacgaagaaaagttttcccagggagtccgtcccgcgctggggactgcgggttctgggaggctgcttcttagcagcccagaccctgaggggccccctgccgctggcagagggcggaggagttaaaagcattaacccctcccgagccacccagcctcggcggggcgctcagagacagcgcaggcagggctggccaaccccagctc

SEQ ID NO: 34123 - DNA, 400 bp, Mus musculus
  source 1..400: mol_type = other DNA
gcattatctaacagtagaaaaatgtggatctcttagttatctctacgtagacagggagagactggccagtgaaaggacaggtgaggccagggcagcagcccacctcctcaaaggcctctgagcttcccagaatctggggcacaccgcctggctttgcggtcagctgagagaggggggggaagaggacagaagcttttcagtacttcggggctgctctcctccgagctgcggctctccgggcagtggctcgggtttcccctgaccgcgtggaagtggcccccagggcaccggaccactcgggctacacggatcctcagggctgtggggtctgggaccagaaagctcctcttaacgaagaaaagttttcccagggagtccgtcccgcgctggggactgcggg

SEQ ID NO: 34124 - DNA, 394 bp, Mus musculus
  source 1..394: mol_type = other DNA
gtctctttggaagctttcagatcgcttgctgaatgtataagcaatatccccaagagtgtaaaataacttttttttttttatttactggagaaaggcacaaaattagactttcatttcccaagtcactgagtatgaagtatgtgttttacaggggcttaaaaaaagtctaggcctggggacttccctacagtcaggactgaggtccaggcccttgactgtgatgtccttggcatctcccaggcccaagccggtggcaccatactcttagaaaataatggaatgactgtttttaaaagtgtgatccgattacccgcttagagactcggaggtgattcgctgacgtccctcaaagtctcactacggcgccgtaaagcgcagagcccttcacagcact

SEQ ID NO: 34125 - DNA, 407 bp, Mus musculus
  source 1..407: mol_type = other DNA
tattttgaggtgtatgtattttaatatggtgcaaagaataaattacattgtgccaagagaagcaatgaactgtcttcccaacttggataaagttaccaaacccaatctttaagaatctctgcaacaaccgctgagaggtttaaatttaaaattatcctttggttagcatactaagtaatgggcggtcactctccaccgagggtgactaaggcagattcccttgaggcattctggtatcagatgcggggtcggtcagggaagtccctccggttgttcctgcgagggcgattgggagcttgccgggagcgtgggcacgctgggtcctttccaggcgcacagctggtctgcccgggagtcagcgagtcctggagggagctcgttcctggaagtgctgtgaagggctctgc

SEQ ID NO: 34126 - DNA, 398 bp, Mus musculus
  source 1..398: mol_type = other DNA
tgagtggccacccctccaaaaaggctcacgtgatcggccagatgctggagagtgtctctctagccacctgtctgcggttgccttcagggctacaaccgaatgagccatagtctatggccctcttcctaaaggacgttttaaaatacctttaagtgtttcttttgcaaagctcaacgatcgcgtcccgcgtgacggtttccgcgggtgggggtggactcccctcgcacatcccgtgcagtggcggcgcagcacgtggccgcctgggggtgggtgacagcgggccctgaaccagtcagccacgtctgccagcaggggtatctttcgtgagttcaggagataggacccctagctcagctagagatagatccccaagtttcccgtcccaggacgcgttgcgc

SEQ ID NO: 34127 - DNA, 337 bp, Mus musculus
  source 1..337: mol_type = other DNA
gatcctctcatttttcctgaggcatagctaaggcaagctgttaaagagatcagttctgttaaatgagagtagaactgctacgtggcactaagcaaatagtggcttgtttccgggatgtcttgtccgacaggataagggggttgcggggacccctcaaaacccacacagcaggagggtgacgctcccatgctggacctcaggccatcggcgaagggccgggtctccgtggcggcagtgacagcggtgacgcttcaaacgcggcgcttgaccgccgcggcaccgccgcgaattcgaggacttccggcccgggccgcgcaacgcgtcctgggacgggaaa

SEQ ID NO: 34128 - DNA, 407 bp, Mus musculus
  source 1..407: mol_type = other DNA
gaattcgaggacttccggcccgggccgcgcaacgcgtcctgggacgggaaacttggggatctatctctagctgagctaggggtcctatctcctgaactcacgaaagatacccctgctggcagacgtggctgactggttcagggcccgctgtcacccacccccaggcggccacgtgctgcgccgccactgcacgggatgtgcgaggggagtccacccccacccgcggaaaccgtcacgcgggacgcgatcgttgagctttgcaaaagaaacacttaaaggtattttaaaacgtcctttaggaagagggccatagactatggctcattcggttgtagccctgaaggcaaccgcagacaggtggctagagagacactctccagcatctggccgatcacgtgagccttttt

SEQ ID NO: 34129 - DNA, 338 bp, Mus musculus
  source 1..338: mol_type = other DNA
ctcatttgtcacaatcgatgaactgggtgtttatctagtaggtttggacaaacgtacagtgatgcttaataacaagcacgatggactccatctgctgaatttcaattcaaatgtaaggtaattttctctgaaattgtactggggtatatttatctctgagaaaagaagtcttacctccaggatgattcagatggagatgaaattttactctaacatttaaaggagaggttaaccacaggattctctgaaaaaggtatttttctcttttacaagttagcagttactgaataattcatgaagcagggaaaggctgtcttctccctgggtgatggataact

SEQ ID NO: 34130 - DNA, 695 bp, Mus musculus
  source 1..695: mol_type = other DNA
ggtaaacccacatgtgtataatacaaggaagtggctattccggtttctttctgatgggcaagcattttgcaaggacatgggctatgcatgtgtaagacctacagaggcatttaagacacttaattgagtctttcaaaaagtcatttcactgggagtagaaaataataataaaaaaatggttgtcaattcatctcctaaagctaatctgtttacatattcaattggacttgtggctaaataaaccacaaaaatttagcagacagatcccattttttagcgttcaagtaacaaaagaaaagataattcccttcattctgcatcaacgtcctttcatttatttcagggaggttttttttttgtcaaaaattcacttatgaataaaagagtataaaaataagaactactgactcacattctaaaagagtgactcatgataatgggtcaataaaaacaaataaaggatattttcctttttttgttgaaagagaacaatttttattttttaaattgcaaatgcatttcttaatgaagaaaagtcagtggttatttactgagtgatctctgtcttttcaggagagatagccctttcggagctgaaggtcaggaaaagccattttacttggaagtgtcgtgtttcccaggactcagaatgacttcagcccagaaagtgaagggatttccctaagactttataa

SEQ ID NO: 34131 - DNA, 342 bp, Mus musculus
  source 1..342: mol_type = other DNA
tcctggagaggagcctttgtactcctttccagccaagactacagaaatcttctgttcatttctcttgtggacaagagatccctaggatagcctacagtccgagactagagccttacacttctggtgtaattttgcgctcacacctgtgcagggcatcagtccgtttcttttgaaaattggttataaagagcgcgcggacagcatctcagcccgccaggcagtcgcagcttcctgggaggctgtgtagcaattggtgaaaggcaacaaagctgcaactggctcctagtgacccgcggggcgcctggtaactggggcccgaggccggctagccgagctgtccct

SEQ ID NO: 34132 - DNA, 416 bp, Mus musculus
  source 1..416: mol_type = other DNA
gagatttttttttaaaaaaagatttatttatttattatatgtaagtacactgtagctgtcctcagataccccattttacagttctaaaatctgctagaccactttgcaggtcagtgttggcctggaccacacctagtaagctttccatcagaaccctgaagatagactaggtttattttctctaatgggaccacacgtaacaggcctgccaggggccaggctctgcgttccagattgatttaagtaatctacatgcttccaaaatactgtgttagtacagtatcgcagtgatgtttcatccacagtcgcacaacgccccgcgcggcctctctgagcgctgggtggagcgcatgcgacagctgccggcagggtcccctggggaattcgtttccacagcaacagtttcccgggaggcg

SEQ ID NO: 34133 - DNA, 361 bp, Mus musculus
  source 1..361: mol_type = other DNA
tgagctcaatttgacattaagactcaaagacaaagtgatgacatgtttattttagacacaaagaggaattcctaatcatggagaagtgttctatgaaacatagaaacatcttattttttctgcccttaatgtagttacagcacaataccagaaaagttaacatattcttttttaaaaaattatctatgtatgtgaacccaagtttctgcagcccaaaatggattgttgatgcgcgtctacttaacaacccaccctcaattcttttacacctctcaagggggaggggggggggcttcagtcggccccgcccctcgccctggttggctgcccggtgggaggctcgctattggccgctcaggga

SEQ ID NO: 34134 - DNA, 372 bp, Mus musculus
  source 1..372: mol_type = other DNA
tcttaaagttaattaagtctgaagtccccctgaaactgaagcttaggtgcagcacaaattgcggtgaagcactggggctttacggacttttagaaagaattcttttctggcacttagaaattgttctccctccaagaggccggaggcacttgctcctacccagggtcgttcttctggcctgcagggcactgcatgcatgtggcacacagccatacatacagttaaaaaatttaaattaatttaaaaagaaatggttctcccagagactttcctggtgtttgtaggaacacactctatcagagacttccctggtgtctgtaaaactcacgtacattatcagagacttccctggtgtctgagctaaaattagaa

SEQ ID NO: 34135 - DNA, 443 bp, Mus musculus
  source 1..443: mol_type = other DNA
tgtaattattattctgggacggagaaggaaaaataaataaaataacaaacttcaaagttgaaagcaaagttttttgttttgttttgttttttttttgtctctcaacagacattaatgtcataagacattttggttgaaacaaacaaacaaaaattgtttctaagtttctgtggttatcgttcaaaaacaataactataattaattagaacccagttaataaaacctagtgatctttttcaagcactcctttataaaaataatcaccaatgctcctcgggggctcctcgcggctccgagcggtgggcgggtccacccgcgactccgacctcggcggagccagcgtgttaagcgcttctcatctgccgtcgatgggaaatccgatcgagggcgaagtcgccgccggagcctccatgcatcagcccggctcggtcggtgcccgaac

SEQ ID NO: 34136 - DNA, 363 bp, Mus musculus
  source 1..363: mol_type = other DNA
tatgttgtggtgacccgcccaaccataaaattatttttgttgctaccttctaatgtaatagtcttcaaagtctaaaatattcactctctgacctcctagagaataattagcacttgcctgcgtgtaccctctgggccatcttggttctcagggaacgcccagagcaggttccaatctaattcagaataatagtgcctacttcatggcattattattgaggatgagattatttaatgcatacaaagagcttaagatagtaactagtatatgttaatgattccctacatcgtagttattattagtagtaaggtgtgaccacataagtagtaccctacctagaaggaagtggtgcgagcttccagg

SEQ ID NO: 34137 - DNA, 416 bp, Mus musculus
  source 1..416: mol_type = other DNA
gctttgccctgttaaaacaaggtcatccatcactaacccaggagagggagggagccccttccacttctcccagggaggaatatcactgatcgttcatacctagcactgaaggtatatttaaaggaaagttttccaacagttaccaaaatgaagactttgcagggagatctctcagtttgaggccagcaaagtaaatgtcagtactgttaatatcacattttcaaaccaatttttaaaagcctataaagtatggcatctagagcatgacctagctgggcatgaaacgtcagatttgagtagtaaaaacttccaagcggcacctcccagtcctccgctattgcagggttggaggggcgtgcccgcactgcgggggcgtggctgcgtcacgggggcgtggcgagcgactcagccgatcg

SEQ ID NO: 34138 - DNA, 525 bp, Mus musculus
  source 1..525: mol_type = other DNA
ccaaacctttaccacatgatgaatctttgggggacgttttaggttcggaccctaagttttctgaaggtcggatatggttttaatcatttgccacgcaaagaagcgtaagcttaattcttaaatctgctgtatccgatgattgtccacagccagcaatggctacagtggcagacaggaagaggtaaattgctctctttctctctcctgacactcttccaggtctcccagggtgggggacagggatcccagctggctcctagactaaggttggttttgatccaaaggactttcccgccactttctgccgcaggactgtggggagagagacaccttcctatcaaactctccggcgaccgtgagactgtcacgggagctgcgcgaggagcagccgcggttggggtcgcctcagggacgcgtcccgcaagcgcgaagctggggcccccggagccgaacagggaacggcgtttgccggggccgaggcggaagccggatcctttggcggaccggaccgcgggaacccggaaa

SEQ ID NO: 34139 - DNA, 480 bp, Mus musculus
  source 1..480: mol_type = other DNA
tcgggaatgtacttgaaatcacatacactccgttgttcatgaaggctttaagtttccttgtctttaaatcaacggtaaccaaataataataataaaaataaataaaaaataaaaatgcatgtttgagtgtttggcttacacttcctggtacctatggaactaaggcccatctgcccaggggtggcagggaattttaagaaacttggttttcccaactttgcatcttttcctagagaggcagagcgatcgcacatcagggcaatgacagcgtgcccacctctcgcgagatcagtggtctgtgctagcgggggcgatggctcccggaagtgggcggggaggcagggccacgccccccaggctagtccggggcccagcggagtcggcacgtcctccggccgcggggggcggagtctcggcggccctggcctgtcactgtcccctggcccgggtcccggcgcccctccccgtgcccttcacggc

SEQ ID NO: 34140 - DNA, 385 bp, Mus musculus
  source 1..385: mol_type = other DNA
atgactgtcacatttataagctagaatgcacactcattcttccattttactcgggaatgtacttgaaatcacatacactccgttgttcatgaaggctttaagtttccttgtctttaaatcaacggtaaccaaataataataataaaaataaataaaaaataaaaatgcatgtttgagtgtttggcttacacttcctggtacctatggaactaaggcccatctgcccaggggtggcagggaattttaagaaacttggttttcccaactttgcatcttttcctagagaggcagagcgatcgcacatcagggcaatgacagcgtgcccacctctcgcgagatcagtggtctgtgctagcgggggcgatggctcccggaagtgggcggg

SEQ ID NO: 34141 - DNA, 405 bp, Mus musculus
  source 1..405: mol_type = other DNA
ttcaagttgtactttacaaaaagaaatctcgaaagagtcctttcaacttttataattttgagacccgactggtctacacagctaaactgtgcgctacgatttctttacaaaattttgtaggtaactaaatagtatgtgtggtcccaggtgaactttgtggtactgcgtacttcagtactcacactgctaactgaaattgcagtggaacttgcctttgtctttgagtcacaggcaacaggtatggtgagttaaaaacacgcagagcgtttttattttttagaaacagaacccttctagcccatcccgggctcggaaaccaggtagggcagcttgggtcgccagccttccctgccggtttcccagtaagctggctccgcctagttgcagctccgcggtacccgccgg

SEQ ID NO: 34142 - DNA, 381 bp, Mus musculus
  source 1..381: mol_type = other DNA
ttacaaggctcgctcagcctgctttcttatagaacccgaaaatgactcacagttagatcacatggtgggatatgactgtagcttgtgtcaagataacatacaaaaacagccagtacaatgtctctaatgtctgtctgtctgtctgtctgtctctgagacaggacattaaagagaggaagtgtactcaacttcccactactttgtgttctaaggatgaccctgttgaggaccgtcagaagcatgttgctatgcaacattttgtacatttctcactgtggcatgaatgaatgtgcttgaaacccactttgtagctcaggctggccttgaagtcagagatgagttaatccttgcaaaacacttaataatgagttattgtctttg

SEQ ID NO: 34143 - DNA, 187 bp, Mus musculus
  source 1..187: mol_type = other DNA
taatgtggtggatgcaccacatcaacggttcactgccttccttaaagggcagggactgtccactcaaaatgggcaccttcctgaaattgacaagacctaagaaggtctctgtcagaaggctgcctgcggttactaaagggagataacaaacaagtgacttagcacttctctctctcagggcttgtgc

SEQ ID NO: 34144 - DNA, 305 bp, Mus musculus
  source 1..305: mol_type = other DNA
gggcatgctttacaaagtcagacagctgacctttgctacttattagccatgtggcaaatgactgttgcctcattttaaaataggaataatatttgtctatggacaaatattagctactactataacaaataatgtggtggatgcaccacatcaacggttcactgccttccttaaagggcagggactgtccactcaaaatgggcaccttcctgaaattgacaagacctaagaaggtctctgtcagaaggctgcctgcggttactaaagggagataacaaacaagtgacttagcacttctctctctc

SEQ ID NO: 34145 - DNA, 399 bp, Mus musculus
  source 1..399: mol_type = other DNA
ccgtaaaaaaaaaaaaagtgatttctttacagttcttgaaaacaaaatattgactcataataaatcatatttttattaacccgtactgggtgctgttactacaattaacagtcattagagttatttgattactatgtctgcttgccaaatgcagaatgtgtccctttatcttcctaatatgttttgctcactttgaaaatataaaaagagaaacagtctctctggtatcatgacagacttaagcatttgaagaactcggtgtttcttcaaagttggtcttatttggaattaaataataattaaataatgggtcgatgagacaagatgcattaggtattttttgtgtttctgttaaggaaaaaaaaatgcctgacaaaatcaacttaaagagggcttaaa

SEQ ID NO: 34146 - DNA, 306 bp, Mus musculus
  source 1..306: mol_type = other DNA
cagaagtgggtgatatccccatcacggaccctgacaaccagggcttgggcttagactccagtgtttggagttgcttccctgggagttacctccctagagatccagggctgtcacgcttgggtagcagccagctccgtgctaccattagaaaacaggcttctgttttctaggaaggcagtaggggaccttgtgagaccaggtgacttggctccagccagcagaggagcctcacggcttgggatctcagcaacagcttggagagggagctgctacgggggcgctgcatgcagcgcgctggttccagcg

SEQ ID NO: 34147 - DNA, 422 bp, Mus musculus
  source 1..422: mol_type = other DNA
ccacctccaaaagccaccatgttacagcctattagatgtatgaacatcccagaaatcctggtaagtaaaggaaaagagcagagctcttaaggttatttctgcactaagctacttaaatatccacgcacacgcgtggacatctacgtactgacctcagaggaatccctgcaattccctgaactctggaaatagcaagatgaggcacatagttctttccctgtccttggtgactggtacccctgggtcccaagccacccagaatctaaaatcctctgagataatttctgtcatctgctctggctgctctccagcgctggaggggtcacagcgccacccggacactcaccttcttcccaggcgctgtgcgggaggtctgaaacagcccagctggtgactcgaaagggagtttctagaagctccat

SEQ ID NO: 34148 - DNA, 514 bp, Mus musculus
  source 1..514: mol_type = other DNA
cagcaatatttggctcttacaggaatcttcatttagaaatttaataaaaatggaagctagttctaacatatatcaattagtactcaatttttcattaactttgaatctataaaaaccaagcaatgaacaactaaatagttccagctttatggcatgcaagattgtttctttctccttgcaatacccagggctgctggcagattaacttcaggaagagttccagtagctgaaaataattgttacaattgaaaaccaggaggttcagatgtctttaatttttgcattagtctctgtaaagacagacttgagaagtcagctggttgtgtatatagatcctgccagccaggttgtggctgggcaggccccaccgctctcccgccccggcccggcccggcgccgcgggctcccgcagttccgcgtctgcgcacggccgaggggcaggagctgggctggccagggaggcgcagggcgcctcgggagccaatgggcgcgcgcgggggagccgggctggcag

SEQ ID NO: 34149 - DNA, 422 bp, Mus musculus
  source 1..422: mol_type = other DNA
ggatttttctcttaatgtcaaaattagtcactttgagaatgagtttttattgggtttccttcttaaaattatttacttagggcagagcaatgtcaaggtgttctcaaccctgcacagtgatgtattcattagaagctcaaccagcttgtcaacttagtgagttcagagtaatgtttgcaaatctataagtatttgatttcaagtaataaattgaatgactgcttattttctgtgagaacatgcatttccaaaacacactgttgaaaattccatcaatgcatgaccctatcttgatctgaaggcaaatacatttgtaatatttgtgtgcttaacaccaccaggtaaactgaaggttacttctgctccgcgttgtctttcagaattggaaatagaacagcccaagctcagcccagccctagcca

SEQ ID NO: 34150 - DNA, 409 bp, Mus musculus
  source 1..409: mol_type = other DNA
tagaagctcaaccagcttgtcaacttagtgagttcagagtaatgtttgcaaatctataagtatttgatttcaagtaataaattgaatgactgcttattttctgtgagaacatgcatttccaaaacacactgttgaaaattccatcaatgcatgaccctatcttgatctgaaggcaaatacatttgtaatatttgtgtgcttaacaccaccaggtaaactgaaggttacttctgctccgcgttgtctttcagaattggaaatagaacagcccaagctcagcccagccctagccaggggcgggctccgcagcaagagttctttctggcggcggcggcggtggcggcagcggcagcggcagcagtgacagcggtagcagaggcagaggcagcggcagcttggccctctgact

SEQ ID NO: 34151 - DNA, 421 bp, Mus musculus
  source 1..421: mol_type = other DNA
ggcatgccgggaacattttccgagaaaacatgttctatgatattaagacctttagttctatggaaaagtgattggaatatatgtttttcctaacagatgcacaaatgcagctataaagtctttttctgcccgggccgggcctgggagcagcagggttgcagtccgggctagcctgaggcacacacggtgcaggctgcaggctgtcccaagccagccactgcagcgggctcgtctccgagggcgggaggcagtgcgcgcgcgggcgggcgggcgggcaagcgggcggaggcagccaacggcggaggcgcccactcccccggtccctgtgccccgccgctcgtctcccgccgccgccgggcgcccgcgcgctcggctctttccgccgccgcgcgctgccccgtgcgctccggcaccttcggca

SEQ ID NO: 34152 - DNA, 379 bp, Mus musculus
  source 1..379: mol_type = other DNA
tagtctgatgacatcattgtttcacaacccctgttcatatttatgaacgtcacattttagaatattactatatatttttaaaaaaataggcatggatatcacagggcaagtatctacattactacttataatggcaaaattatgattttggaatatcaatgaaataattttatggatgagaaccatctcaccttccagcctatttgctggtggcaacacaggtactccctggtccctggagagttctggttctgcacgttgcagggctcagaactcagaagaacatcaaagacgcaattgtttgctttctctgtgaggcgtgccttgagcgttgccccgccccagaggcgtgtcttagccccgcccccatattgccttg

SEQ ID NO: 34153 - DNA, 356 bp, Mus musculus
  source 1..356: mol_type = other DNA
aaatcataacatatagtttaactattctacagcactttttcttatagtgtgtacacaccagccctggaagccagaagtccacagagccgcatggccgcgctgatgacaaactggcttgtgtgactttagagtgaccccaaattgctgccattgttccagccagtgctgctcattggcagaaacatcctcattaagacgagtagtatgagaaatattgcacattcttttttcattaatttaaattagtaagatctattctggctataatgctgacctgtgatatatcaaagttagatatcatctatgttgaggtcctcaatccaaaggttctgccaaaactcccggggttctcacga

SEQ ID NO: 34154 - DNA, 444 bp, Mus musculus
  source 1..444: mol_type = other DNA
tgatgaactcacagaatgttatttctgatacaagaattaaaaatttttattttactacttaccacaaattaattttgcttactaaagtgcatcactgaaaccattaagctgagaggtaatagacacattatgttatatgcatcgaatatcaccgaaagaggccctggaatctagaccttgtgtgtaatcccgaggctagtgaccaaccaggtcagtatcctggaggtcctgaccacgagggtcactgaccctcatgagttttgctcactgtgggatctcaggacacaaagttcaaaagcctgacaagggctcgttcgccttggaagcacggtgggttcacatctctctctgatccagaaaaccacccccgcccggcgccatccgcagccgacctggctgtgaggccggggcgccccccagtgaccgtaggggagctttgctccg

SEQ ID NO: 34155 - DNA, 303 bp, Mus musculus
  source 1..303: mol_type = other DNA
ccaacccggggtgttctggtttatccaaaattcattcccccagggctgagccctgaggccaccacacggactcttgatgaggtgtctctgggagacagcccaggcgccctacgctctccagggcccccagagctgcagcaaggcatcctggccggggaggtcagccagcccagcagagaccagctggagaagctggcccagcggagctgtctgcagaggcacccgcagtagtcaggagaggagcccccatcctggcttgatttctgcccagtgctctgaaagtcaaagaaagaaattcaatga

SEQ ID NO: 34156 - DNA, 381 bp, Mus musculus
  source 1..381: mol_type = other DNA
tgcatggtcttttcagaaataattgaattgttccatttctatagatgagcttcattgagcttagttagctcagtcagctggagacagctcggctaaaaaatggactccaggttctaataaataggatttcggttctaaatgattatgtgtacattttctggcctaaattggcagcagatgctggtcaaatatgtaagctttatttggtaggtatttctcacaaacaactgccctatgtcattaatgttgaaatttccaggttattcgatttatgtagaattcatctagttccaaaaataggacttgtgactgcttttttttttttgagtttatagacttggcagtttgggccttggtcctagccggcttggcaccaaccag

SEQ ID NO: 34157 - DNA, 256 bp, Mus musculus
  source 1..256: mol_type = other DNA
aaactctagcagccagagggaagactactctgggcagagtggaccaggagcacatttattttaaaagacagttagactaggctggccttgaaatcagattctttaagcctaacacttagtgaatctaatagggcaagagacttgtcttccccagaatcatggtttctatttgagggacaaaagatcagtggtacagatcagatcacccaaacctatcagatcacccataccttcggcattagacttaataataagc

SEQ ID NO: 34158 - DNA, 389 bp, Mus musculus
  source 1..389: mol_type = other DNA
ctttatttggtaggtatttctcacaaacaactgccctatgtcattaatgttgaaatttccaggttattcgatttatgtagaattcatctagttccaaaaataggacttgtgactgcttttttttttttgagtttatagacttggcagtttgggccttggtcctagccggcttggcaccaaccagttgctggcgctgaccaacgcgggtccccggaaaagcccgcgcaccgcacactgcacccgggcagaggtgtgagctctcagggttccttcgcagcccaccgcctaagctcgcggcttcgagctcccgccgcgatccaagtcccagcgccgggaggtgggccccacgcgcggcctccgggccccgcccactctggcctggggtcgga

SEQ ID NO: 34159 - DNA, 182 bp, Mus musculus
  source 1..182: mol_type = other DNA
ggatttctggtttctaattctagacatgacattattgcattttttgagatctgtgaaactgtctagaaatatgcctctgactggcaaaaattttctcggcaggacaggagcagctactaacccggggcttcgtggtcactgagacgcaagagacgcgtcgttctgcgaacttggcaagctcc

SEQ ID NO: 34160 - DNA, 541 bp, Mus musculus
  source 1..541: mol_type = other DNA
aatgagtaatctttcgcaggggacagcgtgctctctgttctcacctttcctctatcagtttgcctttgagatcagaagaaaggaattggaccgaggcagaggtcagccccacaggtgcggcagctgcgtggggagggagacttggcagatgtccacgcaggcctcccccccccgcccccggcctggcacgtggattcgaaggctgctccccgggtttccagcgcaacatctgggcgcgctgtagcccgggccggtcagcggcgggccagctcggggagcttcctgtccccctccaccgtcggagcgccacagatgcctgggagttggaaccaaggcggctgagaagcccctaggcgccggggcggggcggtcgcagcccgctgaccagcggggaggaggggcgccgaggtcctgggcgtgagggcggggccgggggctgggaccccgcgggagggagcgccgcgcccgccgcgctgccattggccggggcgctcattggtcgggctcgccggccaatccctggaggcccgggggtgggtgg

SEQ ID NO: 34161 - DNA, 369 bp, Mus musculus
  source 1..369: mol_type = other DNA
cctggctcagtaattaagcctaattatgttttatggcgagaatgaaaaggcaagagtacgccagccctggctgttctggaacttctgtagaccagactggccgttttaaaatatttgttccacttttttaaaagtttagagcacaggccttttaatcccagcacgaggcaggcggatttctgagttcgaggccagcctggtctacagagtgagttccaggacgtttttttaagtcctgagaactgtttttaaaaatgtatgtttaaaagtatacgtattgtgtttgtgtgcctgcacactcgcatacaatgtaatgaatgcaattgctgtaatactttggtaaacccatgactcagtctttaaaagttt

SEQ ID NO: 34162 - DNA, 377 bp, Mus musculus
  source 1..377: mol_type = other DNA
tgctcccttacacagacttctctgagctccttaaagagagcttggaggggcagcaataacaaacacatccaggcccagcctttctctgtgtatcgaaagttaaaaattaaatgaatgcgtcctttacttggaaagaacaaatgtggtttttacagtcaattcaaactaaagtcttcttaattactatcaggtagatattatacctgagtgaatcattaactatacactaccatcgatcgtgtatacgtataactctgtgtgtacacagtttttaaaaaagcagtctctttctagaccttgactttttcctatgctagaaaacagcactctgagatcccagaacaagaatttctgtttgtccttgcagcataaacttt

SEQ ID NO: 34163 - DNA, 305 bp, Mus musculus
  source 1..305: mol_type = other DNA
agtcctttcacctcagcagcgctttggtgcccacctgaatgttgaagagaaaactgttcttgccagggacattcacatcagtccagggctttgtattgctgtctgatcttagctcaaggatgacaacagatcacttacctgtgtgtgacacacccccctcaggaatgatccctgaggcctcacttctaactccaggcgctggcaacgggcccagacagtggtcaggagcacttcctgggaaccggtgctgcgcaggtgccacccccgctcccactaggggaccagcgccctggacctctaggagg

SEQ ID NO: 34164 - DNA, 478 bp, Mus musculus
  source 1..478: mol_type = other DNA
aggctgacagacatggtctgtggccatgaccatggtgcccaagatggttctgcttttaaaaaccacacatgcataaacatacacatatacacctgtgggcattaacacacatgcatacacatacacaaatgtataaacatacacatatacacctgtaggatgtacaatataaaaacacacatacacacatgcatacatgtatacacacatatacctgtgaacaatacacacatttatacaacagtttcttagttaagagaatgataacatttccttgtaattgaacttttcattacactaaaagtccctgccagagctcgttgtgagatttatcggcagtcatatcactactgctatgtatgttattaaaattgaaattaatcaaattgtggccagcaagccaaagctttgtggagctgcctgggactggctgtctcccagcagggtgagaggaagttctgtgcacttcaattgctgc

SEQ ID NO: 34165 - DNA, 529 bp, Mus musculus
  source 1..529: mol_type = other DNA
acacctggctgccactaggctcagtgacagaggtgggctcctgggtccattcccagcatccaggaagggaaaacacaaattggaacgtccgaatgtttatttttcagttttggaggaattcactcaaacctacagaatccagggcccttgtccatggcagacacgtgcatttactgcaccgccctgtgcagcggaccaaagggactgacagaatgatctgctagccactgcgtgcagggccccaggtcgaaagcagaggaaaagtaagactcccttgactttcaactccccagccagccacccaggctggtcatccagggatcagcccgggagcctgggtctccgcagtacctggatccgcctgcgccgaaggggcagctcggtgctccgcggcgctgttgaccccttcggggtctcagccgcccaccgcgaaagcgagtgacccgggccggggggcggggagtcgcgagcttcggcggaggcggcgcggggtggagaggagccggtgtccgcgcggccctttataacg

SEQ ID NO: 34166 - DNA, 535 bp, Mus musculus
  source 1..535: mol_type = other DNA
cgctagactaaaagcattaatatttctgaatgtccctttgcaaagaacagagtttctcaaacttttaacataaagaaatacatttttttatcgccatccttgtacatatctaccaaaaaagagtaattgtttcttaaaactcttttcccactacattatttttataaaaaaattaacagagtggtggaacttgaaataagattatctgattgtagtctaagttgcaaattctttaagagggtggtaccgacccatccagggggtggcggaggggcagggcccacggagtccgtggcgcaggcccggcccgctcttccggctgctggagaccggcgcggaggactagcgttgtctgcccgccgcgtttccggccgagtccgcgggggtccgcgcgtgcgcagagcgtccccccggggaacgaccctttcgatcgccccgcgcccgcgcgcgcgcccgggaagccaaagtccacggtgggctcggcgcggcggcgcgcgccagggggcgttcccgcgcggccggccccgccctctct

SEQ ID NO: 34167 - DNA, 523 bp, Mus musculus
  source 1..523: mol_type = other DNA
agcaattttctctacaaaatattacatcctagagttatttttgtatttctataaaagttgttagaataaacttattaagcccattcattattaatcattcattttttacatacttactgtgatataagcaaaaaatatatgtcaagactgtagtctggacatggattcatctatttgaactatagtaaatacagagtgaaaattttaagtactgtagttggagattctgctgccagtgatacagggatctctctctctctctctctctctctctgagacagtaaggattaaaggtgtacatcatgatcactgtcctgccagaaacatttctttaagaaagagatttttgagcacacactgctcttgtagaaactaagtttggtttctagggcatctgcattcacatgtgtatacatacacatacacatagatacacacataattgaaagtaatagaataatgaaacatatatcacagatccttagattatgtgttttatgaaacccaaatgcatttgtacatg

SEQ ID NO: 34168 - DNA, 229 bp, Mus musculus
  source 1..229: mol_type = other DNA
aaagctattttacaatgtagcctgtcagccctcatgacttttacaaacagacccagttgtattgtggcagactttgctactatcctgcgtttggattataccaagcagccaggagagaacgggttactttagctctccctcattaaggagaagcaatcatcttcttcagaagccgcaggagcccctctgatacctgaagcccccattcagggccctctataaagaaacc

SEQ ID NO: 34169 - DNA, 230 bp, Mus musculus
  source 1..230: mol_type = other DNA
gtatgaatcttaaaaatccactgtaaattggaaaatttaagtgtctgtttttcagaaattaaatatcctgaggtgaatccagttctaaggtgacttttcctaagcaatgtcttctgtgaggagaccctgtcagaccagaagctgctgacccctgcgagtttgagccaatgggctgagccccagggggtgggctggggcggggcagaggtggggccagggcggagcacctc

SEQ ID NO: 34170 - DNA, 425 bp, Mus musculus
  source 1..425: mol_type = other DNA
tatttacatggacttttaagagaatataatcaaaagtctaatgaccataaaaaattcatcagaagaatcaattgtttatatttaagttgtaagagtttgttaaaaagtttgtttcctgggtaaaactttaataaacggttattatacccagccatctccagtgggaatgtaaaagtgtgaatcataaaacgttctctggaaggatggcttctgaaagtaaagttgtactctctggtttatcagctcctcctgggaggatggacctccggcggtcctctcgaagagggcgtgtccagggccgcagcgcgggcggccattggctgagcggcgctcccgggcgcaccgtcaactctcacgaggcgctggcggcgtaggccgcgcgccgcgctctggccggcagggggcgcacgtccgcgcgctgttct

SEQ ID NO: 34171 - DNA, 573 bp, Mus musculus
  source 1..573: mol_type = other DNA
gtttgttaaaaagtttgtttcctgggtaaaactttaataaacggttattatacccagccatctccagtgggaatgtaaaagtgtgaatcataaaacgttctctggaaggatggcttctgaaagtaaagttgtactctctggtttatcagctcctcctgggaggatggacctccggcggtcctctcgaagagggcgtgtccagggccgcagcgcgggcggccattggctgagcggcgctcccgggcgcaccgtcaactctcacgaggcgctggcggcgtaggccgcgcgccgcgctctggccggcagggggcgcacgtccgcgcgctgttctcccccgcggcgccgcccgctcccggccgcccggcgccacgcccgccgcaggccgagggccagtcacccgcgggcctgcgccccgcccctggcccgccgcgggacgagtaacggttacgaagcagtgaggtttctgcttagtcacaggaaacagctccctcgtttcagcggcggcggcggtggcggccgcagaagccgcagcgaccgtccgcgccggcgcctccctctctccgtcgccgcccg

SEQ ID NO: 34172 - DNA, 498 bp, Mus musculus
  source 1..498: mol_type = other DNA
gtgaaggaaaacgaaccccccctttttttttgccaggtgctgtggcccatggatcccaactcttgtctcaaaacaaaaatcctaaaactcttttgattctggctaacgtctttcaccttttttatttaaaaaaaaaaaaaaaaaaaaaaaaaaaagagacattttagttaaatcccacagctttctaattattctccgaaaacttgggtgcatttaacatacatccttgtatcccaatcaaatatcggaatctcatttattaagttattaaaatactgttttctaaaaggactaaataaagtctcctttgacttcccattttgtgttaaacggcgaggaggtcctcctcgctgaggaccgcacagcggacggctgggaactggaggcggagctgcttttgccccccccccccctggagccggggaaggaacgattctcccgagccgcggtttccgcagtttcgacgcacttccgaagcgtcggaacagaggaagccgc

SEQ ID NO: 34173 - DNA, 356 bp, Mus musculus
  source 1..356: mol_type = other DNA
taaaacatagtagtttctgagctccgtgttctgtcaatatcgataaagccgtgaaagataatgtaatcagcctgcaaggtagaataaagtctgactctttatagtttgcctctggcagcggccgtggagatggggaggggattagggaaccgaagacccactccctcccacgccgccgctcagattcgcggcgaccccgcccttctgggtccagcgctggcaccgggcgggtgggggatgtggggaccccgccatcacgctcggccgcgcgccctgcagccgaggcgctcgcacccgcgcgatccccacccgcgccgtccgcctccagaggccgcccactcggacgcgcgtggggc

SEQ ID NO: 34174 - DNA, 183 bp, Mus musculus
  source 1..183: mol_type = other DNA
gctcgacccactgtgggtggtgccagccctgggcaggtggggatcatagcgttcatctcagcaacagagcttaggctgcatgaattgcgtagaggagctcttaatgacaattaattaaggaatatgtagatctgaagtcctatcatacttagttttgataaacagcatatgtaggttcacttt

SEQ ID NO: 34175 - DNA, 467 bp, Mus musculus
  source 1..467: mol_type = other DNA
actgtcctgctcctctgagagagagaggtggaaatccggcacctccgagccgcagagacgcgcggcaagcgagcgggccccaactccgtgcggtcgcagcagcagcgggacccggactgggaagtatctcggtcccagtacggactggagtcctctacttaaagccggccctggagcaagattacttcccagcggctccggaagcaccactgcgggcgcgtccctgtggtcgtgctcctcccctgcccggcttgctctgaccctggaggggcggggaagccgggggggtctggaccaggccaccgggaagcctgggtgccgcagcttgcccgggtcgcccccgaggttctggctgcgtcgccgcaaggaggattttcgcggctttgcggcgcgggaggcggcccgggcggactcggggacccggggacccggagcaccccagaggccagttcttcctggtctcgagc

SEQ ID NO: 34176 - DNA, 397 bp, Mus musculus
  source 1..397: mol_type = other DNA
gctgactgccagtggaggggcaagagacgcctcaggctctgaacaggtcgggctttatgtgtgacacgtttttacaggtctgtggttcccggggatcccaggctgacgtgtggggtcgcctcctttgagggggggggtctccgagcaaggcagggaccgtgggcgtcctccctggctctccatcttggagcgggagtctgagtgcggcttttgctgagcccggaggccggagcggacgccgccgagggtccgaggatccccgccccgggcgagctgttcggaggagacccccgccggcccccgcgcgcgcgagtgcgggcccgccccgatcccagggtgcaccgcggcccgccccctcccccttccctccctccctccccgctgccgggaggcgggg

SEQ ID NO: 34177 - DNA, 225 bp, Mus musculus
  source 1..225: mol_type = other DNA
gatcatagcgttcatctcagcaacagagcttaggctgcatgaattgcgtagaggagctcttaatgacaattaattaaggaatatgtagatctgaagtcctatcatacttagttttgataaacagcatatgtaggttcactttctacacttgaagtctagcttctcggggttcggctcagcccggcgaatcggctgggcggggtggggccgcgaagccgcaaatcc

SEQ ID NO: 34178 - DNA, 553 bp, Mus musculus
  source 1..553: mol_type = other DNA
ggaattccttaatttacataatttactcacattaatcaagaataaaacattaaaacacctactatgcaattatatttgtatgaaatgtctatagaggtactgctagaaatgtatgcagtttctttttaacactgtttcagaatatgatgacagtgatgtttgggcaaatagctaatatattaaatttaagattaattttatttcaataaactaatcttagggaaaagattattcctaattaaaataaaaatacatttttagctccaacaatcactcaaactttaactttgaagttgcatttgtgtttataagtctcatgtctccgaagtttgatatatgttacaaattatattacctgctacatagtgtgcactttgaacttgtaaatagaaaactaccttgagagtttcttgttggtggaactcattatcagattttaattcagttgaatcccagcagtagattccatgtgaggcggttaggttatctcctgaacttcgaacttccacatcacagtatgaattggttcgaagataagaaatagaataaattc

SEQ ID NO: 34179 - DNA, 434 bp, Mus musculus
  source 1..434: mol_type = other DNA
taagttatggacaagttaagtttacaaggcttaaatcactttagatataatcacatttaacctgtcatgctctattttatttacttttatttttattagtttttagtaattattttttattatttacgatagatctaatacacttaacctccacactcctcttcgagaagactgaagcagccgccagcttccttcccggactgaggtgcctcatcgaacgagcccctccgttcccggacaccgtcggtaccagacgccgccgcgcaactgagaccgactaggcgccccgcccccgccgccgcgccccgccccgcccccgcgtccccgccttccggactgcgcaggcgaggaattcgccttcttcggcattcccgggaacgcgcagactccgctgggccggctgctcttggcgcaggcgctctccgcacgcatgc

SEQ ID NO: 34180 - DNA, 435 bp, Mus musculus
  source 1..435: mol_type = other DNA
aactgtttcaaaaattatgagcaaatcgctcaagtctgtacaaaatcatccaaagttaaacatgtaagaaaccaaaaagtttacacctttttacattgtcacacaatgttgtcgttaaagttattatcagagaatctcacgatctagttttttaaaacccacacgctcatgtttataaaaagactacttttgtggttcctgaagttctggcatcatctcagagacaccctgcaaggcagcgtttgagctacgtgagagagctcaccgcacagagcgcatgcgtgcggagagcgcctgcgccaagagcagccggcccagcggagtctgcgcgttcccgggaatgccgaagaaggcgaattcctcgcctgcgcagtccggaaggcggggacgcgggggcggggcggggcgcggcggcgggggcggggcgcctagtcg

SEQ ID NO: 34181 - DNA, 449 bp, Mus musculus
  source 1..449: mol_type = other DNA
acataataaacagggttcaggtaaactggagtcccctttgagtttatctaagtcaacttttgtttttccttttaattatcatcccaaataaaagtttcctagtctggttcgcagcagcagcagcttgcaactcaaaacctgctggatgctgccaaaatttctgacaaatactaactgggtcagcgtattgactccctaaggggaccgccggggtgccgacccagtccgccgccaaccaaggcggacgacggcgggacgcccgcgtctgccgtggaaatccgccgcagtccccagccgaccggcccgccccgcgcgccacccccgcgtcggggcagaagcccgagccctgctctcgcgggatctcgcgcctcacaccccgcggggcgagacgaggaggcgggcccggcgcaagggggcggggcgtcctgacgcggggccagagacctgtt

SEQ ID NO: 34182 - DNA, 363 bp, Mus musculus
  source 1..363: mol_type = other DNA
aggtggttgactctgagaacttttctcaaatattacctattgttaaaagctgcaacaaatcacagcagatattggccataatgttcatttttaaaaaggttttcatgcagatactgtgggtgactgggacccctgacatttttattatgaataatttgtcattttgctctaattaatatacacttatcctaaggtatgggataagaactacatcttcagaaagtttttaaatccattttggctgtggtactttccaacggaaagtgttcagtaaaaacattcttcaggcccagtgaatgaatatttcattcaactatctcaagatatgagtagctaaagtatttggtgctatatatagccagt

SEQ ID NO: 34183 - DNA, 409 bp, Mus musculus
  source 1..409: mol_type = other DNA
tgggaaggcataaatattccaggcccaccaatcctctgaagagccagttttcctcaggggctgtgacactgaggcgtgagattggatctaaacacatggtatgcatgcattctcagacaaaaccttgcgatagaaagttattaggagatagtatatgttagttcagaaaagcacaatttcagaaaacattttcaaaaatgctcttgttttaaagggttgctttcttcgggcagcaggtagaacagcaacgaaacttgttttatcttttctttctcattcatcaatgtggcaaacatagaagtgtttctttgagaaagtctaactctctagtaatgagagagcttacgttttattacttgtggaggttaaaactatagaataattacttttagctgaaaagggagggcgg

SEQ ID NO: 34184 - DNA, 376 bp, Mus musculus
  source 1..376: mol_type = other DNA
gccagacacaagcactgattgctctctgctttcttgccaattttatcacagcaacaggaaaagttactcaggtagctaatcatactttctctctgatagtgagacgattttagggccaaataggtgttgtccaaaggtgagctaaaagttatctacctttgacacaggcctgtttgtgggtggggcacacccagttaagtgggcaagcccacggaggtcctgcaaccctttgcttcctcagctgacacgcgtcgcttccagtaaggcgagcgcagcgcagcgattccggctccggagcgcgagaccgcagtgggaggtgcggccccgcccccgccagggcgcgccgcgggagcgagcgggtccagcacgcgcgcgc

SEQ ID NO: 34185 - DNA, 369 bp, Mus musculus
  source 1..369: mol_type = other DNA
ttgcatttatttatttatttatttatttatttatttatttatttactacgtaactaccgctatgtttttgcatttatttatttatttatttatttactacgtaactaccgctatgtttgcatttatttatttatttatttatttatttatttatttatttatataaatgaatgaatgacagatttatttatttgtttgtttatttatttatataaatgagtgaatgacagggttctgttcttatttatttatttatttatttatataaataaatgagtgaatgacagggtttcattaagctcgctaacttgccaaggttactgagcggcaaagaaaaacttcttttatgagcgcatagcctgtttcagg

SEQ ID NO: 34186 - DNA, 447 bp, Mus musculus
  source 1..447: mol_type = other DNA
tgaaatgattcctaaaatattaagtgaagttgaattatttaaattctgaataaaacctagattttaacaatggtcatttaaattttgttcaattagggaacggagtcccttcgttgctgaaacatcaacccagaaagcaagcttaacatctcccataggtagagtctacttttattgaagctagctggaggaagctagctcttgcctggggcagcaaagtgccgcagggacacagcgtctacactggtgtccttaaaggactcagctctgccaagtggttttaacactcctggtgggctttcataacttcgaggtgcatctaattccggtgccaggcgggagccgacgacagggctgtggtggtgcctgttggcaccggcagcctagaccttcccccgcgttggcaccgagagcccgcgcctccgcctgacagccgagggtggggtg

SEQ ID NO: 34187 - DNA, 475 bp, Mus musculus
  source 1..475: mol_type = other DNA
aacatctcccataggtagagtctacttttattgaagctagctggaggaagctagctcttgcctggggcagcaaagtgccgcagggacacagcgtctacactggtgtccttaaaggactcagctctgccaagtggttttaacactcctggtgggctttcataacttcgaggtgcatctaattccggtgccaggcgggagccgacgacagggctgtggtggtgcctgttggcaccggcagcctagaccttcccccgcgttggcaccgagagcccgcgcctccgcctgacagccgagggtggggtggaggtcggactccgggctacagagctcctggcgctcatcgcctctggcgctccgaccctggtcccggtgtgatcctccagctgccccgggggctgggacagcagggcggcggcgcgagcgtgggagggggctctaggactctgccggccccgccccgccccctccgcgggga

SEQ ID NO: 34188 - DNA, 299 bp, Mus musculus
  source 1..299: mol_type = other DNA
tggccagagaaggaaggcccttaatctcggacttctcagctctagttctttcaattcagtagtgattattttaagtaaaatcgggctgcacgcgggagtgagatatgccttcctcccggaaaagccgagggccgggcgggtctgctcgcactgcccaggcttccaaccccgatgggggcagaggagccgccaacagctctccttagactttgggtcccttctgaccgggccgggaatgggcgggaaagccccgcccctcgcgcgcaggctcttgggagagcgtcacccgggcaaaagcg

SEQ ID NO: 34189 - DNA, 373 bp, Mus musculus
  source 1..373: mol_type = other DNA
aaatcattaagcaatgcaaagtgtttggtaagtgcacccacgtgacagttaggatccaaagagtccaaaataggaccgtccacttgctctcactgcctttaggcagtgacctatgtcatttgtgtccccaaaaatgtcctttaaatcaaaaatgccttttcattcgccgggcaccatcacctgtggtgcagctcccgcagcttcccgggcggttgggaaccaggtcccagctcgcgcctcctcccgctccagcgagcgcgcgcgggcagcgagcacccaggagactgcgcgccggcgtgggacgagcgccggtccaagagcgcgcgcgggagaccggtcgcgccgccccgcctcgccccgccccgccccgccc

SEQ ID NO: 34190 - DNA, 433 bp, Mus musculus
  source 1..433: mol_type = other DNA
taaaactaattggttgctagtttcctttactgttaaaacatcttgctagccaatctagtaaaatgattttcaatttgtatgtctgttgacacactgataacatagagaaatatgcttaattgtatcaaaaattacattatatgggctaatttgttgtaaatttagactcaagttatgatatgacactatcagattgtcatgaccagaggacaagaaaataacattctctatgttgatttgagtcactatagacacatgtttatacatctatttatctatgtatacatctatatgtatgtatatagttgcaaaaacatgttatttcttaaaaatacttgtgtctcaacaattgcttaaaaataaattttcaaagccaaccatgtgtcatttggtggcacgagcctcatggttcagcagttggtctgccaactgc

SEQ ID NO: 34191 - DNA, 470 bp, Mus musculus
  source 1..470: mol_type = other DNA
ataaacgctttgtttcttttaaaagggcggactttacactcatatgacagataaaggacaagaaattcattctcccttatcagtgatatttgaaaactgacataaaacttctgttgacaaagctaataacatggcttttctttaaagtgaaatttaacatttgctaaaaacgttaaaatgaaccctgagattcatgtctgtcatctctggcagacttctaatataattagaagcataacatagagacagcactgatatttattagacctgtggtgataataatgccgagatcagtagagagcactagggaactcgctgctgtgttgccatggtgatgatggcaatggcaatgacagtggcaccagatttcccagttcccctctgtgggtgggcggcggcgatcggtgcagcaaatccgcgctcgcacccgggcctgcggggcaggggcgcggcgctcgatgcctccgcag

SEQ ID NO: 34192 - DNA, 555 bp, Mus musculus
  source 1..555: mol_type = other DNA
ggaggtaaatgttaaaaaatttaatggaaaaactctataaaaatgattctagtaactagatttacagtatccgacaataatttcagtagtgaaattttaaacaaagaataactagtaatataaatccccaagtgaacatccatatgacctttgttacgtgatgaccattaaaagggtggtcaacattgtcagttgttatgactgtacaaaaatagagcattttcttagtagtgctttatttgtataagtattcaaattccaggcctataatcagatatgtttttgttccatgggctcatgtgataacccatgtggcgatgacacttgagagtttgtttttctgaatcgaatgacaaactttacatggaagttatttttcaaatctatgacgacagtataaatgtgagtctgatgtgacagtatcaaaactgctcttattagatgtcaaatcatttaatcaaacatactattgatctaaatcactataaacatttgaactattatgatgacactttgtcagttgcaacatgaagcttagaaccatgatgtcacctt

SEQ ID NO: 34193 - DNA, 448 bp, Mus musculus
  source 1..448: mol_type = other DNA
aagattttataaacataaactttttctcaactcactgtgcatgagaatttaggcaatttgccgggattttactgaaattgtccgaatattacatgtattgcacaccagattagagagtattctgcattttcattttttttcttgtatatttatatttaaatatatatatgaatatatatatatataatttttaaatttgagaaatagaaatgtagtttcccataggaatcaaattttacctctgttaattaacattatatagttttacatatttatctgtccttactgataacacatgtttatgctattataagtatcaggatttggtggaaatattcaaactgtccagtgaacgattatccaaatcgacatcacaacagcttcaggtccttgaaagtcttgaggatgattagctgaaggaattggctgtttctgccaatcataaccc

SEQ ID NO: 34194 - DNA, 461 bp, Mus musculus
  source 1..461: mol_type = other DNA
gagcataataagactttcaaaaggatgttattatcttcagaaataacattcaaattcattgtttcaaatgcttctttccagaaataagtcaaccatctgaaactccagttccaggggatcccatcgacgaataccagacatggatatcgtgcacagaaaatatatatgtctatataggctcttaagcaagcctaggaaacttagtaagattcagtagattagtgacagagccaagaccctaggttcaatctctagtactgaaaatatccttaagtatgttatcttctattattctatttcaagaaaaaaagaaaaagaaaaccatatgagtttctaaataatactaacgtctttcttttatctttttttttcttttaataaaaagatgatggtaaattcattgcataaaaatgaagaaaacctgacctaagtttaaattcaggtaaactaacaggcaggta

SEQ ID NO: 34195 - DNA, 555 bp, Mus musculus
  source 1..555: mol_type = other DNA
ttaaacacaaaatttgcatggagacctttcagattctgtatgtatgtatgtatgtatgtatgtatgtatgtatgtatgtatgaaaagcaaaggaacttttcctattttctgaaactgtaactttgccattgacacttaaagggatggcttccggtgtctggggtaccggaggcctcaagctcgacctggacaccatcttgatttcaccacgtgtgcgcaggcgtgtgccctcctcacggagcggctctctcgggccaaggggcgagcggcgctctacaggctccgctcctttccagtgcaggcgcgtctcaggtgcagcctcgcagcatctctggccgccgtcgaggcgcgtgcgcatcggtgtcctgggccgaggcagcgcgcgggggggaagccgggggcgcgcgcgggcctgggcgcgctcccgctcagtagtggcgcgctgagggggagagggggcggggcgcgcggggcccggcggaggagcaggcgcgctgcggccccgagggggggcaccgcggagcatcgcctgccctagagcgcccgtcttaagcc

SEQ ID NO: 34196 - DNA, 253 bp, Mus musculus
  source 1..253: mol_type = other DNA
tatgttcagctggcagatatgctcgtcttaacatcttcactaaggaaggttgacagaaaaagtactagtttaaaagttgcacttgtgccagccacagagtgttctgtgccattctatgggcagacccacagctgaggagtctcactggggaccccagggagccgccccgcagcccgcccttctcgggtccatccttttcctcgcagaaaggagggcggagagccagcgcctccccggcctgggcccgccctca

SEQ ID NO: 34197 - DNA, 398 bp, Mus musculus
  source 1..398: mol_type = other DNA
agatatgcttaactgtacacgttcttgaactcttaaatggttttccagcgctcacgtgacgctaatgacgtcagccccctctgggtcgcgtggccactggcgtgggacatctcgcgagaagccttcttacttgaccatctttgcccctagctaagggacagccgggcgcagcagaggtggccaaggctggcagccccaggcagtagctgcgagccgggggggacccgggtctgggagcgaaccgcgcccagatgcaagggtctcggcttccccggcctcgcggccatcccgcccgggtagaggcatcccatctcccttcggtctccctagacggctgcgggagagcagcccgaaggggaggaggcgccggggaggagccgcggctgccagcttcgccc

SEQ ID NO: 34198 - DNA, 436 bp, Mus musculus
  source 1..436: mol_type = other DNA
ctctctttgtttctctgtcacacacacacacacacacacacatgccctttaaaggaaaatgaaatcaccattttctcagactgcacttatttcccatgttaatgcaaggaaattgaagtctctactatttcattagatacatatctaatcaactcttaaatgggtcaaaattgtgaccaaagtaaggtccaggcttggtcaaaaatgacatttggcattctctagatcacaccctataaggtaaaatcctttttcatgcatgcatgaaaaaaatagattttaagcaaatgccaaaaaaaaaatgtgtctatctttattatatattctgcttctatttcctacttgtacaataaagaaccctggcgggtaaaaattaagtgcttacattcggaggcaaccaaccaacgggtgtttgtattagcaccgccctggacag

SEQ ID NO: 34199 - DNA, 547 bp, Mus musculus
  source 1..547: mol_type = other DNA
tgaccatctttgcccctagctaagggacagccgggcgcagcagaggtggccaaggctggcagccccaggcagtagctgcgagccgggggggacccgggtctgggagcgaaccgcgcccagatgcaagggtctcggcttccccggcctcgcggccatcccgcccgggtagaggcatcccatctcccttcggtctccctagacggctgcgggagagcagcccgaaggggaggaggcgccggggaggagccgcggctgccagcttcgcccgagccgagcgagcgcactctgtcgccccgcgggttcccagccttgcggccccgtggagaggagggagcgcgggccaccagcgcctcctctgcccgctggaacgaccggctgggtgttcactcggccgctgccgcccgccactccgggcgctgcgttgagctctccgtgcggcctcggtgaccgcggcaacccccgccccttcgggagccctcggcccggccaccgcggcgggaggaggagaggacggatcgcggagcgggctggtctggccacctcgccc

SEQ ID NO: 34200 - DNA, 419 bp, Mus musculus
  source 1..419: mol_type = other DNA
ttttttcactgaacatacagctattaactggaaggttgattccaagtggaaaatgagtacttacaaatactctttactagaaagcgtttcattactgaagtgtaataaaagcctttatgaagctcctgtaggaagtcattgtaacccgttctgagttaagaaagaattgacagctgtgctcagcctggctcagctggatttcttacttttgaggttcattagggaaagaaaaaaaaaacatgtattttaaatttaaaatttattctgctgaaatattccacttctcctaaaaacacactgtatgaggcactgtaatgtgaactcatgcataaagtcacttgacatatgtgtccatttgcatgtcggcatatgcacacagcctgctgaagaagtttgcatgatctgtatgcatgagctag

SEQ ID NO: 34201 - DNA, 357 bp, Mus musculus
  source 1..357: mol_type = other DNA
agcatgagatttgattctctttcacggttgtagatcttctacagggtatgtggatggttataactagcagcagcctgctcatctttcctaaggaaaaatatcgttgtaaatgccaatcagttaaaatataataagagttacaatttgcgtttatcttgctctaaataagcaatgaggtccttaaggctaaccggtgctgccatgatggacagaatggctacacacctttgcaccaagctgcccagcatgcattttttaaaaatgtggtacatcgcccttgaacaaactgtggaaagccctcccttgggagtggggccctcgggttctgcttacagctggctctcagatgtgagcaca

SEQ ID NO: 34202 - DNA, 475 bp, Mus musculus
  source 1..475: mol_type = other DNA
taaaaatgttcagagcgaagagtttcattataaacattttctaagaacactttcaacatttttctctacttataggatttatgtagaatcagattatattgttataatttttgtttctctaaaatacgaaggttgaagaggaaggaccttcacaatccatctggataaaattttctagctatgactttgtccagctagaacttgctaaaattttagcaaacttaggaaaattgaacagtgttttcccctgtatttccatactgagcatgtaagagaacatccagaaattctaattttacttgggtttaaaacagcgttgcgaatttcaaagccctcttaaacctcgccaaagccggcttatacagcgctagcccggttaggcggcctcacgtgggtcaccgcaccggggagcccgggcagtgctgcccgtagcaaccgcggcggcggcggcagcagcggcggcgccgggtcctta

SEQ ID NO: 34203 - DNA, 249 bp, Mus musculus
  source 1..249: mol_type = other DNA
gtaaaaccttgaaccccagcaccatataaaatgtgggtgtggcagccacactgtgacttcagtgtgggggcaccattactttcttttcttatcacaggaatggaaatagaaatatgcaaatgcattcagtgcaaataggacttgcttaaagtatggcacaggcacacgcatgcatgcacgagatggatgagagcttactgaataaatctaaatttagctgatctgatgtcagagcagatcatgtggtgc

SEQ ID NO: 34204 - DNA, 424 bp, Mus musculus
  source 1..424: mol_type = other DNA
atggttttagcagttaacattgacatctgtttacttcaaaaaaggaaatcttgtaattctaaagtcggcgtctttcaccctccgaggacagaacaggactgtctcatcgaagagtaagtgcttccatgttttagtagaagtgaattcaagaaactctggaataagaaagctagccttttaattcagagtctgatgggagtcccctctgctttaacatggggttacctgctgtgttaaacaaaagcaagtgctttcttaaactgttcaacattttctctaagatgctgtaggttaaggttgtacttgctttagacctaagaaagtaagtgcttctctgcttaaggggcctcctttactttaacatggaggcacttgctgtgcatttaaaaataagtgccaactctgttgaatagaaattggaatt

SEQ ID NO: 34205 - DNA, 447 bp, Mus musculus
  source 1..447: mol_type = other DNA
tgtttaaaataggatctgaccatattgcacaatcccgtcctatctggaaatagctgggatattacaagcaatgtgctgcagcagccactgtaactaccatgttaactataaggtcaaattttgaaatcttgaaatcggacatgacctgacaattagttagcaatgaacattttaggtcctattctttaggtcctattggtgaaaaactgtcattcacttgccaagccttgacacttcaaggtttgtatggatgggccgctatggtgaccgcctcacccggcactctaacggcgcctcgtgggtcgcttccgtggaggcgaggtctgtccacccttcttgcctagaagggagagcagggacggtaccgcggaggccccgcccgccgccgttggaactccgcgtgccagcgcagtcaccgcgtgcagcaacgaaccctgggcctcggac

SEQ ID NO: 34206 - DNA, 421 bp, Mus musculus
  source 1..421: mol_type = other DNA
cagaaagactttacttcttggaacttaaattcttttttctatagaggaagttctcacaactgatgtcctttgggaagacaacctctgtactgagctccgaatagcaggggccgccagggaactgcgcgtgcgcacaacgcacggcgccaaaccaacggcacagtggcgacgggggcggggtgagcctcaggagacccgagaggagttcccacctctacgggtctgagaggctctgcaggccagtagtgacttactcctgcggtcggcggaaatttgcgtcattcgagtagcgacgcgcttctctcagcccgctacggaaagacgggtccgaggcccagggttcgttgctgcacgcggtgactgcgctggcacgcggagttccaacggcggcgggcggggcctccgcggtaccgtccctgct

SEQ ID NO: 34207 - DNA, 415 bp, Mus musculus
  source 1..415: mol_type = other DNA
cccaactggctaaagcatttaggtgagaagagcactttaaaaagaaaagaaagtccattcctattctttctaaagaaacttcctcaaaggctcgagaaagttaaaatattgttgacctcttaaaacttttccaataaaaaatgtcttttttttgataaacattttaacatcttttcatgtacttttgacatgtttttttatcaaaacttgagtctcagatttcatttgcttcgaccgttgaaagacaaaccagttatcagacaagttcctttccttgtgaaagttcagggaaactccttatttggagtaggaacataatgacactattttgatgtcatcaaaagaccttgtccccttttgggggtcgatctcggaattggagcgtgtatcaacacgccctaacggggcgtgttgc

SEQ ID NO: 34208 - DNA, 402 bp, Mus musculus
  source 1..402: mol_type = other DNA
gggacgtctctgtgagtttcccaaacagtcatagacacgttttggcacacgtacgtgaccccttccttttcctaattagactaaggtgttttaaaacccgttttctgtcgcccgcccgtgagaccccggctgagacgggcgggacgactcgggcgggagcagtagtcggggtgcccccccccccccccgccatgggcccccagcactcgggcccctaatgagctgctgaaagggagcgggctccggtgcgcgtggctcgcaggcctcccggagtcccgggaacactgattgctttcattaataaattagcggcacgctccagccagcggcggcgacaacagccgcagcttgagccactgccgccgccgcggcttcggtagcttgggctgcagcctggagcgc

SEQ ID NO: 34209 - DNA, 402 bp, Mus musculus
  source 1..402: mol_type = other DNA
aaagtcatgggtgaagaattattgccgatcacaagtccccaactggctaaagcatttaggtgagaagagcactttaaaaagaaaagaaagtccattcctattctttctaaagaaacttcctcaaaggctcgagaaagttaaaatattgttgacctcttaaaacttttccaataaaaaatgtcttttttttgataaacattttaacatcttttcatgtacttttgacatgtttttttatcaaaacttgagtctcagatttcatttgcttcgaccgttgaaagacaaaccagttatcagacaagttcctttccttgtgaaagttcagggaaactccttatttggagtaggaacataatgacactattttgatgtcatcaaaagaccttgtccccttttgggggt

SEQ ID NO: 34210 - DNA, 327 bp, Mus musculus
  source 1..327: mol_type = other DNA
tcacttaaatgtacttaagtccttaaacagtttccatggaaagactgtgggttcggaaattaggtcgggtatccggtccttgaaagacccactcagcactaggtgttgggcgacgcagggtggcagcatcccgaggaaggttccaatcctgtctactctcatccgctccccacgcctcgggttgagcagagagtagccactgtgctggtccaccatctagagctgcctcttgttggagaaggtgcggtcgccccgggtgcccggcgactcaaacgggctggacggcggcggcagcctcttgcctggctctgcggggctttcctcccg

SEQ ID NO: 34211 - DNA, 253 bp, Mus musculus
  source 1..253: mol_type = other DNA
taagcttatgaaatacgtgatctttataaaaacccacctcccggccgtagccgggtcacaggaaagcccgaggattcgcatccggttgctggggaggctccgctggaaagcgctgagcttgccttctctctgaaagactaagacagggcaagagagtaaaattatcttttgtttctttgtttgtcaagaagagaagcttttttgcaaaaataaaaactcccttcttgtaaaattgggagccgaaaaacatctg

SEQ ID NO: 34212 - DNA, 341 bp, Mus musculus
  source 1..341: mol_type = other DNA
tcttaacttggaattagaatattatatttgaattagaaatggcttgttctctccacctgaaattacttttaatttaaaaaataaaaaataaaaatacaggtgacctccaacttaatgtgtatctgaggttgactttgactggaacttttcgtttttaataaaagaaaatccgcctaggaataaaacaaaaagcctcttagtgtgttctaccgctgctgcagaaggggtcgaaggctaagcttgcgctcgagcatgcgctgcatgcctgcccggcgctgccagccaagccggaatccagcggaaatgacgcccgcgccagccgccggaagcggtagccgcca

SEQ ID NO: 34213 - DNA, 254 bp, Mus musculus
  source 1..254: mol_type = other DNA
tactccgcgggcctgaaaggaggtcacgcgcgcgcaagaaggggtttgacgcacaaccgttttttcgccactggtcagctccgtcggtcggtagccgggaccgcagtctcctgggcccctgggcctcacttgaaggctgtgctcgccccttgatcgcccagcgtacagcaggctcggccgcccgcccgcgcgccactgtgcactggagtttggtggtgacgtcacgacactccgcacacggagtcggagcggag

SEQ ID NO: 34214 - DNA, 328 bp, Mus musculus
  source 1..328: mol_type = other DNA
atttaaagcgtagcttctcttaatcaacgttaagtagaattcatgtataaatccagagtgaaccacaagcagttgttcgactaaagtcaaggtaattttctttaattaaagtaaagcttctcagattagcgcgacattcacctgacagcaaaagccgaatagcctttggctgcgcgcctgtgtagaccgggtgggcacagcaaggaattagttgggcctcgcactgcgaaccatccctctgccgcggctcggggcctcgtgattggtgtggagccacgtcactccgacccgaagaaccaccaggaagcccgcctctggttttaagatg

SEQ ID NO: 34215 - DNA, 445 bp, Mus musculus
  source 1..445: mol_type = other DNA
tcacaaaagactctggtatacagtcttccacaaattagacacaggcttttataatactctatcagacagggtctcatcacttggttacagtctgttacaatgtttcttacacacactttcctctctctctctctctcacacacacacacacacacacacactaaacacaacatctaagtgtgtgtatgtgtgtgtgtgtatagttactcacacacaatcacacatcctctctctctgtcttttacacatacacacacacacaacacacacaccacaggatatctgtctgttgtgtacagatagttacagatacacaatttcacagatgtcatatactttaataggtgtcagacttgggccgcggtccgctatggccccgcccctcctcccgcccccgcccccggggttccgcccccgagctgggggtggggcgagcggctgacag

SEQ ID NO: 34216 - DNA, 330 bp, Mus musculus
  source 1..330: mol_type = other DNA
caaatagaatcaattgcatgggattgtgggaaaaaatttgtatgctagtttctataaagtaccttatagaaaatactatatataattctcaaaagcattgccattgtcagcaatggctagtgtttattgctaatggctctctggtagggccagccattacagctgctgtaactctgtcactgactgactaaatgatcagacgcttagcttctttggcaagcaacctaataaaatagtgggctgagagcccggctgcttatggcaaaggttgcgttttctatcgtaagccagaggtttggcaacatctcggggagacgctgtttatatagc

SEQ ID NO: 34217 - DNA, 325 bp, Mus musculus
  source 1..325: mol_type = other DNA
aaacaaacaaactaataagtgttgatcagtatcttttgttggatctaaatattatattattaggtaccttaggattaatcttttcttcctaatttcacaagaataaggcagaactaaagtaaagttttggtatttagatcagtaggcctaaagttccgaaggctacctggccctaaggtcaaggtcacatttatttgcctggagttctcatgccagagaacctggcagattttactatttcccaaggcttgagtatgacctcaatatcccccagggcgatgggaggcctctcgcgcaaagggttaattttcccgatcgcacgagg

SEQ ID NO: 34218 - DNA, 519 bp, Mus musculus
  source 1..519: mol_type = other DNA
aagttcttgttaaccttttgaaaaggttgcatgataccgttttgacatttgggtctgaaaagtcaaattaccataagtgaatttaacctaagcctcagtttatgggtaataagcacacgtaacagtagtactcagttaaacgtgacttaacccaactctggctaatttgcccctttacacttcccctgggatatgtcatgacacattggatgccagcatgcaatattcagaagtgaggcatatgccaatagtatgaagtatgaaacctgcttctttaaataatgacctgaggtgtatttcagtcaagaaaaacacattgttaggtttgaggtttttaaactcttaaagatatagtatgcatagttttaatatataaatgtaaagcaaaacctgagcgcgaggctgtagcggcaccgctgtgacgtcactgcgaggttaaaaacaaaccgcatttccatttgctctgatgccgcttcggtctctgtgagcgagaccccaagtcccgcatgcgctgagggc

SEQ ID NO: 34219 - DNA, 304 bp, Mus musculus
  source 1..304: mol_type = other DNA
tcatataaaacaccattttgtttggtggcccagttcatccttaagtaggggttttgacaccccagacccgagacaattgccttcattagaaaggaacggactcaggacaggttctcactctgacactattggacataaatctgaattaaagtcactttttttctggtaaagatgcaaaaagtaattagcatatgccaagataccaagctctttgtaactttttaagctataggaacattttaaagttccaactatgagacacttgaaggttaagtaacttcaggagagccactctggagctatg

SEQ ID NO: 34220 - DNA, 412 bp, Mus musculus
  source 1..412: mol_type = other DNA
tgtctaaacttgaattatgatgttaaaaggtagcctaggttcctctttacacactgtgagctctacagaattgcatagagcgtggtgtatccatgctgtgtgtgcgttacagacagacatactggttacatataacagatgacctcatttttgtttaaaaagaaagaagtgaaatacatgtttgcgtgcgcgcgcgcgcgcacacacacacacacacacacatgtgtttacttggtaatctgcttataaatacaagtctttgttttactaaggagatttttctctcattctaagaattaaaatcttttcctcttcaattatgtattaatggacagtctttgtgaaaaggcctttctttgaatgatttgttctgaaagagcattcttgaccgatcaccattgctgagggctgc

SEQ ID NO: 34221 - DNA, 318 bp, Mus musculus
  source 1..318: mol_type = other DNA
attattaatgtttctatatcttttacaaagatctttcaaaaatctattcacaataatcctctgatatgcggatcagtctctactttctttcaaataaaaggtgatattgtcaatagaggtcacttctttcttgatgaagacattgagaccatatttaaaaatggttgcctttctgtcatctcacacaggtcgggacctgccgccacacttccggaaacgtcgcgtacggagggcgcttccgccacctctagcgcggtggcccttgcgtggggaccgctgcgtccggtagtgacgggcccgacggcggaggtttgagcg

SEQ ID NO: 34222 - DNA, 481 bp, Mus musculus
  source 1..481: mol_type = other DNA
gtgtatacatatatatatatggtgtgtatgcatgtaaaattacatatgtaattattacatatattataattcagtattttataattgtatgttctatattacatatattatattataaatataatatataattggatatatatggttataacatctaaatttaaagtacatttgcccaatttttaaaaatatttggaactggtgtgtactttttcaagaagtttacagtttagagtaactggcatactggaattattaatgtttctatatcttttacaaagatctttcaaaaatctattcacaataatcctctgatatgcggatcagtctctactttctttcaaataaaaggtgatattgtcaatagaggtcacttctttcttgatgaagacattgagaccatatttaaaaatggttgcctttctgtcatctcacacaggtcgggacctgccgccacacttccggaaacgtcgcgtacgga

SEQ ID NO: 34223 - DNA, 412 bp, Mus musculus
  source 1..412: mol_type = other DNA
actgtggcctcactgagttagggaggtttcccctaataactccctcttgggagttttctctcaggaagaagagacctgggggaaatttggaagaactacttttgtagttcaaactgtgaacgtcttccagacacatcctgtatgaacgatcttgccagccgtctgtgaggaccagaaaacaccagataacaggcgctcctccgtgttcgtgtcagctacagagaccttgtctacctaagggcagcgcctctcttaatagcccagagcgccacaggcaggctttgttacaggagtcttgcccctagatttatttaccaaattgtgttccttggaaaacaacagttcaaaagtacaaagctctttaggaggcttttcctttttaaatattttttcaggggttaaatattaaatg

SEQ ID NO: 34224 - DNA, 419 bp, Mus musculus
  source 1..419: mol_type = other DNA
ttggcgccaagatcctagcacttgagaggcagcctgggctacaggccaagactctgtctcagaaaaattaactgagggctggtcccaggtaacctctacagtatttagaattttaaggagggataactgccaacttctccttccttagaattagaagcaatggaggaagtgctctggcagattgagcagagttccatcttcaacaatcctccagaccatgctgcgctgctaatccaggcttggaccccaggccttgtccagtaaaggctgggactgactgtggtgttaaccaaagcaatgactatgtctagggcattggcaaggcgtttttaagactcctacgggagcgttccggagaccgaggctcccacgctcgggcgcatgcgcactgtgggcagcggcgcgcgtgcccgggcggg

SEQ ID NO: 34225 - DNA, 333 bp, Mus musculus
  source 1..333: mol_type = other DNA
atgttaggatatagaacttgtaaaatcaagcttcttatgagatattgcagagttggtaaacttaattttaaaaaagtctctcctgtaaacctgtgccagcttataagtctacagatagcctccatctttatgataatataaagaacattccattgaattcattctagggatacaccaaaaagaatattttcttcctgtacaatattttgtttttaactttgctaaggcacaagttctattttttttattagatattttacattttaaaaggacaagggcctctcctcccattgatgacatatgcagctggagacacgattggggaccctggag

SEQ ID NO: 34226 - DNA, 267 bp, Mus musculus
  source 1..267: mol_type = other DNA
cctgcagatgcccaaagcctgctgcagcaggcatgagactacttaagtagtgtaataggtaacaccttaacataatttttatcatctatagttgcttgcttttaaatgaagatagaacaaagacagttcacagcactgattgttttgtctaaagctgtccaaatgtagagtaagctctctacactgcaacactgagttcaccaccctggacgtgaagttgacagccaggctctgtgcaggaggaagacgcagtggcgtcctggcgtc

SEQ ID NO: 34227 - DNA, 461 bp, Mus musculus
  source 1..461: mol_type = other DNA
ctgacagtgctcgaggcagccaggaatcaggggaagcctaacagctgccaattaggaagccaaattgcctcctgcttagatcgttaacgctaatagcggttttaacagtgacccctcggggagcagggtcctgccccccaaagagaagcaagctttcgagtcctgggctgactttgccagtgatctgaggcccaggagaggctcatcccaagccttggagcccaccctctttccagccgggcaaaggagcgcaatttccagggacctttcagctcccagctcccagtccttcagagtgtactccaagcgcttttttaaagagagagaaaaaaaaatgtttctttttttgtcggaggaaaaatacccagcctggagcccgggtgtgcaccaagcgagacacaccctcctgtcgccgccccagtcggcggggcgggcagagcccacagcgggctgggctatag

SEQ ID NO: 34228 - DNA, 315 bp, Mus musculus
  source 1..315: mol_type = other DNA
ttctttaataaatcatgttttctggaagcagcagtgtccaattaaattattttttaaattgccttacaaagcaattttatgtgtttctatatgacttttatccgcctggaactcaaagcagagggcatcctgtcctctgagactactcttggaagagtagccagtgctcataactgctgagccttcagacgttgaatttgaaggatgctctcagcagctttgctcctgatcccctcactaaggatcatttttggagtctggctacatgatgcctgtaacaatacgtatctttgacaaatgcaagttccatctggg

SEQ ID NO: 34229 - DNA, 536 bp, Mus musculus
  source 1..536: mol_type = other DNA
tccggaaatgccatcttactagatcacattctgaatccgaacgtgtctttacttccagtcagcatcagacttcactaaggtagtcaaagcaagctgacctgtcttctgcaccaacgggcgggcggagccaacccttggtggggcgtttaaagcaaagagaaatgttttctctctgcttgggaatcacattttcaatcaacatttagcttgattgcgctgttaatttggaacctgacccaggactcgggacctcagcccgcagctttgcaccgctctgcagcactgcagggcgcaggctccatccgggtagcggcggccaccgtggcccgcgcctttcccttcggcggcggcgccgcagccgcagtctggcctgtgcggggaggtggtcgcagctccggcctgcagggggcgctggcgcgggagggctgggccggggtccgcacgcgtgcggtggtggcgcggccgagcgtgggtgcccgggccgcggtcgtcggtgagagtgactcggcctgtgacgcgggcgcccatctcccgcc

SEQ ID NO: 34230 - DNA, 293 bp, Mus musculus
  source 1..293: mol_type = other DNA
taaaatcaattggatgcaaaatgctacttgttatcaatttagaaaaaaaaaaaaaatcccaggaaaaactgacttcattcttcagcttgtgtaccctgcagacgtcagctctcggcccctggctagggccggagagatgggggggaagggtctccaagctcctctccaatcacagctatttgcatatattatgctaatagagcccacccgcgctcccgccccttcgtgggtccaggcgggctgggcgactcctgcgggagggggcggtccgcgcttcaggcgcgcgcgcactg

SEQ ID NO: 34231 - DNA, 523 bp, Mus musculus
  source 1..523: mol_type = other DNA
aattatttactataggatagttaatcttcattctatacggtatgaacattatttatagttgttccatatataagcttgtgtagcaatacaaacaggaaaccatatttattgacctccttttcacatcagcttctgagaagaagttcaactttgttattgatgtggaaagccacctcattatttgtagctttccctcacatagtccaagttggttcaagttaatagaatacttttatagaagagaattttgtttttttttagaatttgaacttgctatgctatattggaaagaatacagagtaatacagagtggcttactgcttttcataccttgttttatttaatgctataataggtaatgcagtagttcctggagtagaaatcaagactgcatctatatctttgacttgaagagaatgatattttaattcttaataaagcagttcttaaaataatttatggacataaacatttgagaaattgtaaaggggcaaggcagaggctcctcagcaccctcacaccc

SEQ ID NO: 34232 - DNA, 264 bp, Mus musculus
  source 1..264: mol_type = other DNA
aacactccatttcattttttccacatagttagaaaaagcaccttaacataaattaatatttttatccaaatatgtattaagtggatcgatacaaacaaaccaggctttcagttcttataactcagtagttatcattaaataacgttgaagccatctctgtatttaacttcaaattctaagagaagagacacaggttgaatcccaatcctgtgacatgccagtcagactggtggcctggctgctgacttggtaagcaggcaccag

SEQ ID NO: 34233 - DNA, 427 bp, Mus musculus
  source 1..427: mol_type = other DNA
atgttgcttaagctttttatcatagataagaggcactgcagcggagcttctgtatcaggattactgtctctagctagtaaagtcctttcttatttacctactaagagaaaccagaatgacttcaagatttttggcctgggtgatttttactaactcaggcgtgactgaaaatggtttaaagtaatatttgttctgtcacattttattcatttattattattattttttataaagcccatactactttggcaagccaatttgagctttttaaagcacacatctaaactttcattcatcctccagctctatgaacttatcctggagtatataataaacctctcagtaagaaaaaagtaaaaacgaccattattatttatttttaaatatgtatattatttatcactcggcttacgcatgcgcagtaggc

SEQ ID NO: 34234 - DNA, 250 bp, Mus musculus
  source 1..250: mol_type = other DNA
aaatgtattcattcatttattcaaaactaggttttctctacaccagcctttattcttgacaattctttcaaaggtgttcattacttttgacaacatgatgaaaaaccgttacatagacattgacttgcggacttgcccaaagtgagatagctagtaattagcaaatgcttggtattttaaaccaggtctaattaccctaggataaaggcatcgtggcaacatggcggcgcgctcgctgacgcgccgcctt

SEQ ID NO: 34235 - DNA, 224 bp, Mus musculus
  source 1..224: mol_type = other DNA
gtctctacacgctgagtcgagaatctagtagaggtgtcgaccacagctcctccccttgcctgagtgagggggcacagcacccagttgggtgtcccccccccaggcatgaacaggcgggcggggggggggggagagaacctggatctcctcctcctcctacctccccacccctccagcaggcagccaaggagagcaggaggcggcgacgcaagtgaatagctttg

SEQ ID NO: 34236 - DNA, 409 bp, Mus musculus
  source 1..409: mol_type = other DNA
cacagcacccagttgggtgtcccccccccaggcatgaacaggcgggcggggggggggggagagaacctggatctcctcctcctcctacctccccacccctccagcaggcagccaaggagagcaggaggcggcgacgcaagtgaatagctttgcagcgccggctaggcgcggcgaggagaagcggtgggaaggcgcaaccgctcacctgcggggcagcgcgcaccggagggaccgggctgcgctttcgtgggccctggcattcggacattcccggagccttgcaagcggctacgctccgggtgttccccggccggtctgcccggaggagccgaggggccaccggcagctctttgcttcccgagctgcgggctggaacatttgggcccgaagctcctgctgattaaatgct

SEQ ID NO: 34237 - DNA, 353 bp, Mus musculus
  source 1..353: mol_type = other DNA
gtgcaggagagtctcttcccagccacatgcaagagcccgaggccatcggcttacagaacattgctgcaacacattgcttaagttcgatgtaacctaagttagatacagaggtactcgagctctaacattcagaggaagttagttttattctgcttccagtggggtgaaacctcagcagtaattctgttatcactagcacagttaagttggccaatagccagccggagtccatgctggcctgagtcctggcaccgccctctgggggggggggcggggtggaggcgggtgggtggggcgtgttcgaggccccgcccccaacgtcgccgaccccgcccacgacgctccgggacctc

SEQ ID NO: 34238 - DNA, 469 bp, Mus musculus
  source 1..469: mol_type = other DNA
cgctggcctataccggaccggtttcacacggcgtgggcctcgcagaaggggccgtcccaaccgccgtggagccggggcgcgcgccctaactgcgggggcgttgcggggccgggtccccacagcaggagaggctgctgccgggagccgtgggcgagccgatccgagccagccaacggcaccgataccgcagtccttccgcccgcaaccccggcgtttaaagtgggccctggatctctgcagaagaaaggcgagccctcggcggaagccgggcggcggctagggtgccggcgcgagggagcggggagcccggccgcgcgcgagcatcggatgggctctgtctcagcagctgaggaaacctcatgatgtgcccaacgttttttccttccagagaaacttggagagtatagccttttccttaaatggcccccacccccaacccaaagaaagggtggtttcgggggcggggagt

SEQ ID NO: 34239 - DNA, 316 bp, Mus musculus
  source 1..316: mol_type = other DNA
tttactaactacggcaaattcatatttataacgcaccataggtgatctaacacaggaaccaacaagcatgggctagaatttgacccccccagatgttggaatatccacacatcacattgttggatactagctcagcagtcacccagcccgggttctctgagtgttttgatatagtcaggccatatgctcacaccccctggaggagcctgctgctgctagtgagctcagctgtgctgcgagagaccactcgcgtccgacgtcccgcctgcaggagcagctgactggcggcgcagccaatcggaagggcgtgccttgc

SEQ ID NO: 34240 - DNA, 393 bp, Mus musculus
  source 1..393: mol_type = other DNA
gtaacaaataaacctaacctttgtgtatgtgagtgtgcatgctgtgtgcatgcacacacacacacacagattgcattctcacaggtaatcaagcttgtataggccagagttcaacatcagatgtcttccttaacaggcctgttaacctgccagcgatcctgtgcttgcacagcaggcattttttaaaatcagttaaaatacatgtacaatacattattgtagttaaccccattgccactatagtagtttcaaggaaatagctatattttctttttgattcatcaaataaaggcttagctgtcactaaattgaatttaaccatgcctttaaaattggaagagcagactaattacaaggtttcaactcggaacagctgggccatagtgcgggcca

SEQ ID NO: 34241 - DNA, 450 bp, Mus musculus
  source 1..450: mol_type = other DNA
gtcctctgcaagagtagcagatgctcttaactgcaggctccaagatgatcatcaatccccgtttttacacagtgactcacactgttcataactccagttccaatggatctggcctgcttggccaccagggacgtgcatgacacacaggcatgcatgcaggcgaaataaaaaattgcttctgggttattttactataatcccttcctaattttaaacagtacttaagtttctgtactatgtcctactttgtagttaaaacatcaatagagggcattagatgggcttgtaaagaccttagactacttcggtgttatctaggtgtaacccaagcaggtgaatttctaattataagaatgtacagggcatagtcattgtcttcacaatgaacactgagtctggaatacggtgtgtatttaacctgagggatcttcctctttttatgttctagaa

SEQ ID NO: 34242 - DNA, 363 bp, Mus musculus
  source 1..363: mol_type = other DNA
aagggttataactcctggagaaggcctccccctagcaagtactaaaagcggctctccaagttgagatttatggtgaattcacttaagtaatcctactttttgcagggctgggaaacattttttcaaagtcgagcccacgtcagcttctgagcgtctcccacgcccagctctgcaggcgtcgctccgcctcgctcactgcgcatgctcagcatctgaacacgcccctcgtcctgggtcaaggcggagcttcaagcgcgttgaggtctcgaccccccctcggacctagctccagccgaggcgatcactagctggagcgcacgtcagcgcgcgcctgagcccggggtgcaggccccgccccttctc

SEQ ID NO: 34243 - DNA, 129 bp, Mus musculus
  source 1..129: mol_type = other DNA
tgcctcatcaagccttgaggtagggggaagaatggtcccttattccggctgtacacagtccaccaagttaacttgcctcctagcagccatggttagtggcagtcaccacaaatagggacaacttttcct

SEQ ID NO: 34244 - DNA, 309 bp, Mus musculus
  source 1..309: mol_type = other DNA
ggtaactccaggtcccaggggtcgttttgcacaaaacatatcaatattaaaatacagagtgttcaccttacttttaatgctgtacttcaacaataagccacccaataactaaacacctttgcaggaaacaaggtaatgcattcacgcgcttcccactaccatctttttcccgggtgagagacccaaccgcagctcttgagcagcctcagccgggagaaggaagggccagcctcccgcagtccccggcagagcggcccccccggggttgcgtctcggcgatgtgacgtcatgagcagtggccgacccgag

SEQ ID NO: 34245 - DNA, 331 bp, Mus musculus
  source 1..331: mol_type = other DNA
gaaaatttactcagggaatactttgaaacttctacgttaagtctgacgtttctccaggtaaaatcgtatttgcctgaatctggggacgcagagattggggggttgagctcctaagcgcggaagctatgcctggcagtgcttagtcaggcgcgtctacaagaggccgggagcgacacgcctccgtccgcgcgggcctcccgggtccccggctcagaacccgagggtgagcgcgcacctcgctaccccctcccccgccgccgcctcgggtcggccactgctcatgacgtcacatcgccgagacgcaaccccgggggggccgctctgccgggga

SEQ ID NO: 34246 - DNA, 473 bp, Mus musculus
  source 1..473: mol_type = other DNA
atgatttaagtttgaacgtatatttatgaaaatcatttcttttcagtcctagtaactacttcaaatggttctaaagaggtcccccccttcctctggggtggagcacttgccctacccacgggggtgcaccaccgttaaaaggtgcagggatattccagcccctatagaccacctgtgtgtgtatgtgggggggcatctgtctacccccacagcccagcctctggcggctgggctcgcagcccgggggcaagcgccacccgtggccgaggctgcctgcgcgccgcatccccgcccctgagccgcccctgcccctggggcccggggaggggcgagccccggcgcgcgcccagggcaccagggcggcggggcagggagggcggcgggctgcgcggcgcgtccctcccgcctcgcccctccccgcgggcggcgcggctcccgccgcagcgcctcccctcgccaggagggagccggag

SEQ ID NO: 34247 - DNA, 435 bp, Mus musculus
  source 1..435: mol_type = other DNA
taatttaagccaaatccaagaggtctttttctcgcagccgaggggcccacgcgtcactcagcggaacggcgcgactccatctgcacccacagcaaaagcctgcggtgaatgtggggctggcaagactctcaagggctgcgagccgtcaccggtcccaccctggcctccaagcccagccccgccgacccctgagggcgagcgcggatctcaggaggcggcggggggacgagcggcccgagcgccctctttacctggtcgcaggggcgcggccaggcagggagggcgcgggagcatgcgggcgacgacgcgggccaccgcgccttcccgcccagctcgagccgggactccgaggctacttctggaagccgcggcctgaggaggagcactcgcctcccagcgaggccctcggaccggaaggagtgccctacgtcactt

SEQ ID NO: 34248 - DNA, 390 bp, Mus musculus
  source 1..390: mol_type = other DNA
aggaatttccctggcaagtagcatttcacaggtgtttttaaaaaatatttattgaatcaactggatttttgccaaaatgagtttcaaacaaacttctaagttgatcacttcgaaaattgcctcgaataggggtaagtccttctcaagctgtacagaggtctccggaaccctcggtcaaaggtcttggacaattccacggtcccggtcccccgggccaccgtcctcggcgccctccagactaggaggagcgctcagggtctcccctccagcagggaggagaccgacagcccacggagctccgctccggccgcccctcgcggggtctcgagcctccccccgaggcgccaggaagcggggaccctcgtcaccactcaccgctaagtgacgtag

SEQ ID NO: 34249 - DNA, 147 bp, Mus musculus
  source 1..147: mol_type = other DNA
cttctgagatctctcccttgggagagcccaaaaggcccttcgaagtttttaaagaaatgtcaatctttacttctcacgagtgcacctgcgcacgcccatgggcacacgttcaacccgcaggctgagggttgagctaatgtgcagcag

SEQ ID NO: 34250 - DNA, 435 bp, Mus musculus
  source 1..435: mol_type = other DNA
ggaaatgtttccatttttgtcaaaattttttagagactaggctaagcaatgtctaagtggcacctctaagagatctgggtaaaaccagtttgggttttaactgtcacaatttagagctcacatggataccccgttgttactggaccactgctgttgtaactagttgtggccacaaatacttgtatgcaattgcagagaagttaaaagttacctgtactataaatctgttgtgtatgtgtgtgcgcgcgcgcgcgcgtgtgtgtacactccctccttcaaatttctggaggtatgcatgcaaccaagtgctacattaatgtaatcaaagtctgaccgcagacactgacagtgtgtgagtgggtgaccgcggggaggcagtgcgggctccgggcggcagggggcgccgtcgagcggccgcgccgggcccagcaccga

SEQ ID NO: 34251 - DNA, 266 bp, Mus musculus
  source 1..266: mol_type = other DNA
tctcagagggcagccatgctaggatcctgtttcacatgggtcccaatttgggccaggaacaattctgcttgacattcacttctttcaaagtatatatataaaaatttttttcttgtgatgcatgtgcttgcacttcaagtatataattcatttatataatgccaagcaaattatttccaaacatgcttcagtgacattatgagatatgtcagtttttaaaggaggtgggagaggcccagaatgttaaggcacctcccttaggagcc

SEQ ID NO: 34252 - DNA, 699 bp, Mus musculus
  source 1..699: mol_type = other DNA
tctctgctttactttaccgtacggagtggaaatttggcaggggctcggtgacaccgctcctctgggctctgccagggcctgggcggggagagccccggcgccgccggattgctgcagagtggagagcgcccaggcccctctagctctcccggcacggcctttggggaaatgggggcagcgggagcgcggggagccaggggcccctggagcgcgcaggagggcgcagagtttccaagtgcctacgcggcccccgcgggagacagaggcgcggaggccgcccacgcgtgggtgtgcggccggcggcacccggggctcaggaaaggccggggaggagccgagcagaggaggtcccctagccccccgcgagggagtgagcgcgcagccgggactcgccgcgcccccgcgagggagcgagcgcacggccccgggtcccgccgcgtccccgcgagggagcgaacgcacggccccgggtcccgccgcgcctccgcgagggagcgagcacacggccccgggtcccgccgcgtccccgcgagggagcgagcgcacggccccgggtcccgccgcgcctccgcgagggagcgagcgcacggcccgctcccgcgctcgcgcccgctccgctcgcatgccagtcacgtccgccccctcggcggccgcctgagagccggccccgccgagccaaactgccttatgaatattgat

SEQ ID NO: 34253 - DNA, 419 bp, Mus musculus
  source 1..419: mol_type = other DNA
cattaaaattagttaaaagagatcatttagatatgaaagtaaagtttggaattatttttacattccggcataataactttaaaacgataatgattctcttttaaagagtctctcccggccccgccaggaagatcctttaaattcctgcagcacacaggacctcccctctgtgtctggcacagctcttcccagctcagcccccagcgtgcacaaacacacccgcagagagcgagggcgcgaggggcgggaacgccctctcttccatcccttccccttcgccgcgccggaggctggcggggtggcgggcgagccgggaaacgtggccgcgccggcgagctaaaggagcgctggcccgcgtgcgggaggtgtccgcgccctgcgtcctgctcagagagagcgagagagagagagactccccg

SEQ ID NO: 34254 - DNA, 209 bp, Mus musculus
  source 1..209: mol_type = other DNA
agcaaggcaggcggatttctgagttcgaggccagcctggtctacaaatccaggacagccagggctacacagaaattcaaggccagcctggtctacaaggaaaatagatcttactctaaaactcagagcaattcctatctcagaaagactgtgattccagggagaaagcacatctttcctgtgctgtcagctgtcagctgccagggaagg

SEQ ID NO: 34255 - DNA, 247 bp, Mus musculus
  source 1..247: mol_type = other DNA
aaatatatatttgcccactttaaaaagacaccttcagactttagaaaattccagctgtttctgaaacctagtactggggatttctgaaaagaaaatcttcctttcctggctggggctttaaaacaaaacgaaagctttttttggtttggtctacacaaaagagttctgaggctctcagttccggggactgtcccgtgacgtcatgacgctgcaaggcggggcggcccgggagctcggtcggcgccgt

SEQ ID NO: 34256 - DNA, 465 bp, Mus musculus
  source 1..465: mol_type = other DNA
tgctagagactgaagccagggcctgaggcaggagctagcacaggaagccaccctgtgcctgccttacccacactttaggagccactagaaccttctgggaggcatcacttttctcttcaagaaggaagccctcagaaagcctgcgtccccagcagacctgcatggctggccagcccaggtgacaaaggaggctcgcagtgccagagcccatggcaaagccctggatttatgcaggacattcacacatgtgggtgtgctcctcggctcaggcccagtgcactcaggatgccagcattctgcagctgaggggtcagaaacaagactttacccaaggaagttttcttttccccgctcaaagcaatctgggttaagatggacttgcacaaacaaaagacaggcctttgtttggcgttcacagttccacgttctgatcactagatggcagcatggacaggggacctgaac

SEQ ID NO: 34257 - DNA, 309 bp, Mus musculus
  source 1..309: mol_type = other DNA
atttttgcaagttttagaaaatgagttcgttttaggaaaagaatcatttcatttcctctgagaaagggtactggatgatgcttagcacttgaatatttaaaatctatgttaaaatccaaactccaactccgatttaaacggggaagtgacagacactggcccaaggtttcactccgccatttgtcacctgaaggaaagaaccctgcctgtgagaagacactgagagtcctggaatttgcgtgcagaaggagattcacctgctgctcgctgctggaagctggggcgcgtgggccagggtctccctctggc

SEQ ID NO: 34258 - DNA, 498 bp, Mus musculus
  source 1..498: mol_type = other DNA
atggtggctccctcttctggtgctgtctgaagagagctacagtgtacttagatataatgaataaatctttaaaaaattttttttgtttgcaagtctgccttcacactagaaatgtaataatacatagtaaacattgtttcaagtaaagactttagatgtttccttcacaaatacatgggaaataggttttgttagtttaaaaaaaaactatataaattcccacatacagcatatattgtatagcatgttatcttgactgtcatgtttaggacaatcacaaatgtttcgttttaactatcaattcgtgtttgtaaataacactcttggcactgcctaagaattcctatgtaattcgactaactagaaagataaataaatgaaaacagtgatcgttataaccacttgatcaagagttatgtttgggagactgaagcaggctgcttgtgaaacctgttttaaaaacaaaacaaataaaatattaacataaaatccatgtga

SEQ ID NO: 34259 - DNA, 529 bp, Mus musculus
  source 1..529: mol_type = other DNA
tactatttaagtctcttgaatagacaaataggcccatttggatgaactcataaaggagggagaacagtggttacacctttattcttcccgcaccagatagcaaacttaagatctttggctcagtttagaatagtttcagttccgaggattgtaagctgcagactgaacttggggtctcatctgactagcttgctattcaacagtaggctcctgggtcaatgcattaccctggctattctaacctcagccaagataggtaagtcatttggaagatgaagatactcatagttatcagcctcctgaatgtcagggggtggggggcaaacacatttcccccctttaaattcagccgcttccgcagacgtcaagggtcgaaagcggacgcccacccccgcagccgagccgaggacaggccgggctccgtacgctgggcgctgcgttgcgctcggctccgctccgcagcgcgcacgtcactcgccgcgcgccaatcgcggcccggcgggccacctcccgcccgagcccgcgagcc

SEQ ID NO: 34260 - DNA, 481 bp, Mus musculus
  source 1..481: mol_type = other DNA
aacgcagaaccctgcaggccgctgctctcagattggcccctcggggtgctcagcccctgaggagcacgccggcagaagccgtgaaccggctccccgcccacagcacctccccgattggacgcccgggggagggccgtgtcggcgcgcgacggccggccggtcgggggaattccatttcctcccccgcccaggggcggtgcttccctcgcaagacccgcccagtaagagcccagggggggggggggcgggtcccgagccccggagctgctgcgagcctgccacgaggttctcgcgagatccgccacctccatcccaagtgaggaaacggggggccactcagggaggggcgtggggcctcgaccgcgcagctgccgctcagggagacggcaagcgggcggcacgtccactcggcccgagcgagggactgaacccctcggctcgccccgcgctcgcgacggcggcgttggcggacggatacgcg

SEQ ID NO: 34261 - DNA, 689 bp, Mus musculus
  source 1..689: mol_type = other DNA
actcgccagggcctcggagaaaccctgctgaccctgaaaaccgccgcgatcccggcagggcggggcggggtggcggagccaccagctaccgagatccgcgcttcgccccagatttaacttcccggccccagagccgggcagaggaggagccggggcctagtcggcgctaggccggcgtcactcgggcagaggaggggagcgggcggctccggaccgacgccgggctcctttcggtttcggctcggcaatgggccccgggtgcgctcccgtccccacggcgagggctgttctgggtcgcccctgacaccaccgtactctccgcctcgcagcgcgctcctgcgtgcgcgcgcccgcccgctcgctcgcccgccacctcgccaccacgcgcccggcggccgcggagctccggcgcgaggacgcgcccatgccccctccccctgcggccgggccccggctccgccgccggcctctcccacccagccgcgagggctgcccgctcgggccgcccacagccccccgggcaccgcgccggccccggcccgtctccctcgcgtacagagggccggggcctccctcgagctgcggcctcggcctcctccccgcgcggcagctggtgcctccccggccctacggggctcacgcgccgcgtatccgtccgccaacgccgccgtcgcgagcgcggggcgagc

SEQ ID NO: 34262 - DNA, 488 bp, Mus musculus
  source 1..488: mol_type = other DNA
gtgttttgtttatttaaaagaagatgaagaacccagcctgcgtctccgtacagggtttctctgtgtagacctggctgtcctgaaactcactttgtagaccaggctggcctcgaactcagaaattctctgtgtagccctggctatcctggaactcactttgttcgaggaggctggcctcgaactcaaatgggattagaggcgtgcgccagcacgcttggcatctgcattcttttaaattcagggaatgggaattctgttgcttgttcagtcccacaactcaacacagactcacctgtaacactaacgcagtttcataggaacctcagaagcagctccatgatgtaaccactgtccccgggcagagcctgggagcgagaagcccagctcacaggtcgcagagaccctggccctgggcggtgcttgtacccgcgtggcgggtcccggccctccctgcagggctgcgggaagcgctcagctgacctgggggc

SEQ ID NO: 34263 - DNA, 622 bp, Mus musculus
  source 1..622: mol_type = other DNA
cagggagacggcaagcgggcggcacgtccactcggcccgagcgagggactgaacccctcggctcgccccgcgctcgcgacggcggcgttggcggacggatacgcggcgcgtgagccccgtagggccggggaggcaccagctgccgcgcggggaggaggccgaggccgcagctcgagggaggccccggccctctgtacgcgagggagacgggccggggccggcgcggtgcccggggggctgtgggcggcccgagcgggcagccctcgcggctgggtgggagaggccggcggcggagccggggcccggccgcagggggagggggcatgggcgcgtcctcgcgccggagctccgcggccgccgggcgcgtggtggcgaggtggcgggcgagcgagcgggcgggcgcgcgcacgcaggagcgcgctgcgaggcggagagtacggtggtgtcaggggcgacccagaacagccctcgccgtggggacgggagcgcacccggggcccattgccgagccgaaaccgaaaggagcccggcgtcggtccggagccgcccgctcccctcctctgcccgagtgacgccggcctagcgccgactaggccccggctcctcctctgcccggctctgg

SEQ ID NO: 34264 - DNA, 437 bp, Mus musculus
  source 1..437: mol_type = other DNA
tagtctatttatgttttgttgttaaaaacacagcattggttcgatttgcaaatgtatagaattaccagctatagatagatacctatcagaaattcagagaaattaaattttcttctacaagagttaaaaaaaatcatgtagcctacagtatgactccataacgtagcctgaagccaggggctacagacatccctaagcaatggggctgacctgagccttctggaccgctggggcaactctgtcctgcacctagctgccaaagaaatcctgccaccccaatggggaaggtaagagcagtcgccagggcttggcatttgacaaatgcatctgacatgacttacagcaaacgcccttaaagagtatttgtgagtattgcttagtatctttatcccgagaacacagtgggggaagtgctgcgacctggtggtgtccctcct

SEQ ID NO: 34265 - DNA, 633 bp, Mus musculus
  source 1..633: mol_type = other DNA
ggtctctacaatttaatgatatagctttaaggttgattacagggctctttaaggtcacttaaagactctctaatatacagtgtgggggggggcagtttccctcaacaacatcccactgagagggttttttataaccacttgaactcagtagaaaataggtttaagtcaaaactcacttgggagctacctagccccaggctgtcattcctggcccatggaggcggtctcactgtcgctctaattccatccacagcgatgatcacacaggccggacaatgcgctgtggctgaaataatcgagcggattgaagacttcatccagacccaatataaattcatggttctctggagagaacctcagctacgatctcgaaattcctgtccgctctatggagcgatctgagtgtagccccagcgcgtggggaccaggccggtctcccgtggcctccagctgtccgggcctgcccttgggctgcgggcgcctcccgggggcgtcgcggccgccgcggggcttggggttcggggcgccgggtcggggcgcgcgggcttcccccacccccggaggcgaccccacctcccgcccccgctgtgcgcgcgcgcgtgggtccgtgacgtcagtgggaatttccagcca

SEQ ID NO: 34266 - DNA, 298 bp, Mus musculus
  source 1..298: mol_type = other DNA
cacacacacacacacacggggggggggagagagagtgctgtttttaggagggtaaaacgaacagcactttgaattctttttctttatctgcggatatcccgagcggcgtcaggaagggcccgcgaggcccctgctggctcagctagcccctctttctcctctgatttttaagaagtgaggcaaaaaacctttgagacaatgcaaggggctctagacacgatcccaccgtggaggtgggctccagggagaccacagcggccgccccggcgtggacgcagtgtaccgacaacactctccc

SEQ ID NO: 34267 - DNA, 474 bp, Mus musculus
  source 1..474: mol_type = other DNA
cgtcaggaagggcccgcgaggcccctgctggctcagctagcccctctttctcctctgatttttaagaagtgaggcaaaaaacctttgagacaatgcaaggggctctagacacgatcccaccgtggaggtgggctccagggagaccacagcggccgccccggcgtggacgcagtgtaccgacaacactctcccagggcctgatctcagagtttcttagatattttgaatatatttgaacctcaggggctgacatagacagtagaggtgagaggctagcaacttctccgtttcaacttgccaagctcacagccagttcagcgtagacgcgggaacctggggaccccgtgggagcttcagtcccgacccttccacgttccccgaaccaggctccgggcagctggccccacgcccggctcggagttcgagactctggccactcagagctctggggcccgcagactgctgacccagtgc

SEQ ID NO: 34268 - DNA, 478 bp, Mus musculus
  source 1..478: mol_type = other DNA
ccatgtagaagataaatgtatatctaatgcttttcaaatgactttctgtgacacttgatagttacagtattccaaaaacacttagagtagaactttctggttcttttcgaagaaggaaaagtgaactgtgtgttacttgaatattttctttatttacatttcaaactttgaatttgattgtcaaacgattgggtatttcttattctttcaaacaagcaagaacacagccataattcatgtacctggcccatttcaaaattagagcagatctaggagacttagcctggagcctgggtaagatgaaatactaaaatttcatacctttatatcttataaaagtctactttctgtcttgcagaaggaataagctctaggtcacctgagcttaaagataagctctctcaaacagcaaggcctaaccctagccttgcggcctgagcccctgggctgcatttccggcaacctcggctgcagggga

SEQ ID NO: 34269 - DNA, 404 bp, Mus musculus
  source 1..404: mol_type = other DNA
ttatctgcggatatcccgagcggcgtcaggaagggcccgcgaggcccctgctggctcagctagcccctctttctcctctgatttttaagaagtgaggcaaaaaacctttgagacaatgcaaggggctctagacacgatcccaccgtggaggtgggctccagggagaccacagcggccgccccggcgtggacgcagtgtaccgacaacactctcccagggcctgatctcagagtttcttagatattttgaatatatttgaacctcaggggctgacatagacagtagaggtgagaggctagcaacttctccgtttcaacttgccaagctcacagccagttcagcgtagacgcgggaacctggggaccccgtgggagcttcagtcccgacccttccacgttccccga

SEQ ID NO: 34270 - DNA, 562 bp, Mus musculus
  source 1..562: mol_type = other DNA
atacatagtaagataccttattatataatcatttataataattaccttattatataattatgtattataattatgtataataataacttacatattttgagtactgtataaaaacaggacgtatttaatctttacaaaagtactatcaaataaggccaatctaaggatataatgagtataaaggtatatattactatttaaagaaacattttatttatatgtaatgaccctttcattaaattttttcaccattatttataacacttgatactggtaaatgatatgtaaatggtggttataatatattatttaggggctaactaaatgaatctgtgcatgttcagtatggttgaaaaagttcccctaatacattgtattcaaagatggtgtttcaaaactgtctataggtaataacaaaataaaaataaactgtacccaaatatttagattagactaggtgaattcatgccccacccctaccatctgtctctgggagactctggggataaaggtgctgtatcacattaaggctcttgtgacatcattagaatctgatgctaac

SEQ ID NO: 34271 - DNA, 252 bp, Mus musculus
  source 1..252: mol_type = other DNA
tgtctcttgtgaggctatgccgggggcctagcaagtctctagctgcatatgaatcagaagatggtctagtcagaaaatatctaataaaaatatttaaggcagtaataagaggccagcttacttgaagagagaagaaatgcaattccttgtggattttacagcttctctaaaatgcactttcaaaacaaaagttagaaagctctctggccctttctcaagaagggtctcttcctgtttttttgttgaagaaga

SEQ ID NO: 34272 - DNA, 603 bp, Mus musculus
  source 1..603: mol_type = other DNA
ccactcacacactcggagcggccgagacccacccgggagtgtgtgcaggacttcgggagtgggcaggcgcgggggcacgcagcagcccagctcctcccggccccccactccagtgacacttgagcggtcacagggcggtggaggcagggggcggggcggtcacccagaccaccgccttaaacgtggggcgggccctaaggcggaccggcggaggcgggcgcggtggtggcggcggccggcgcggcggcggaggcgagaccgagctcagcggctgttgcctgtgcgtggagaagcagcggcgccgcgaggcagaggaggatcgcggacgagcgcggcggcgggacgtctacggctgccgcggccccggcggcgcccggcgacaatcggcgtggggaagcagcggcggccgcagcggcagccgcctctccagcaccgggaagccgaggcgcggctggcggcgctgacatccgcggccctgccgtcttaatcccgaccgtgtgcgcgcgtgggggctccattgcgcggcgcccggtgtcggtgccggggtgggtgctcgcgagcacacacgcgcagcccggagcgaggcggcggggctggcggcgg

SEQ ID NO: 34273 - DNA, 283 bp, Mus musculus
  source 1..283: mol_type = other DNA
gaaagagcgaagccaggtcttagaacagggccaggctcgccctggccgcgtattcagaatgagcaaagttttgggttaacaggacctggagcttctagctgcttaaccgaagggaccagtggccggtgaccagtggccaactcagggcaggtgtccgcccggatcaccaactcccaggggcttgcctgggcccctgcctgggaaggaactgaaaggtgacctgaccctgcaggggcgggccggggcacgggcccgagcgagtggcgcaggtgggcgtgccggc

SEQ ID NO: 34274 - DNA, 486 bp, Mus musculus
  source 1..486: mol_type = other DNA
ccttcttatgagggacttgatcactgagtgactgacttcacctatcgccaccagtgactgctagctcctgtgaacagggaaaaggcgacactgagcacttggatagctagccagccagtgaagttgtgcacgctagctcaggcagagctgcctccccaaggtaagctgccttccttggcgatcctccctggacagctgcggcagcgacagcagctgcgccgcggccgggagcgtccggcgctcctcccactcacacactcggagcggccgagacccacccgggagtgtgtgcaggacttcgggagtgggcaggcgcgggggcacgcagcagcccagctcctcccggccccccactccagtgacacttgagcggtcacagggcggtggaggcagggggcggggcggtcacccagaccaccgccttaaacgtggggcgggccctaaggcggaccggcggaggcgggcgcggtggtggcggcggccggc

SEQ ID NO: 34275 - DNA, 438 bp, Mus musculus
  source 1..438: mol_type = other DNA
catgaaccatctgtaactgcttgtgaatcatgttacagttaccccactgacatttaccaacatttgtcatgtggcaaaatgttttagtgtaggaaagctgacacataatagctttaatgtttcaacaaatcaactttatgcgaagtcttcgcaaatagacaaatgttatccccacggtgctgagctcttcttgccggacgccttcgagccacctgtcagaaggcaggactctccgggaagctcacgtggtctccggagcaccgcgggggagggagggggggaggctgcagcggggaggacgccagcgcgcgctcctccccagcctttcggtggcgcagcgctctggccgcggctcgagctcccgagcgcccgccccgccactccgctgtctcccattggctggagcctcaaggacgcgtcccgagggcgggaggcaac

SEQ ID NO: 34276 - DNA, 585 bp, Mus musculus
  source 1..585: mol_type = other DNA
aactcaataaaggtcatatcccaaactagctttaaacttgcttaataatcggctcactcagcaacaagtacattctctgcttactaattaaacagtgcatctgacagttaactaatgtgaaagggcctgtatcctaaggtgggacacaagtacagagacgtacctccaccgaatgaacttcggatataatttgctagtcacatcttgattcatcttaagcagcctatgtggatgaaagaacttcctgccttacagctgctttaacccaaagagctgcattgtacctgccaggtggcaggtgggtcagcaggaagcgcctgtaggacgaatccatgcggcaatcactccctaacggaggcccagggcttcccaagacctaagggccaggaggcctggcctctgatccttgtgggggtccctgtccccaccccggtggcgcggaaggcgggctccgggccacaccggagcctaggggccggggcgtccgcgctccgccaacccacggcctcccctaccgcgtcggctttacggtccgccaggcccgggagggacgcggctggcgccgctgcggccgcggggggcggg

SEQ ID NO: 34277 - DNA, 476 bp, Mus musculus
  source 1..476: mol_type = other DNA
caaaatgcattgtatgaaattctcaaagaataaaagtattaaaactttgtggaaatgagatttagtaaaagaattccaaagtaggtgctcaccgttttctttaacggtacacgagttaacatgcactggggagaaatggagaagcctcccttttgctttcttgaatgtacaaacaccaacaaaaaatataggcagtttttattttattttaagaagatacaacaaatagcccataggcccatggctcctgcacttctaggtaattaggttatccaaggacctgggacttctaataagtagggtgtacacatactccgcacaggatcatcttcgagttaaggtgcaaggaccgcagatgccaacccagctgctcgtggcgcagcgcgctccagggggcggggcggccgcgcgcgcaatttccgcccgggtctccccggaagttccgagtcccggtactggagggtgcagcaagtgct

SEQ ID NO: 34278 - DNA, 596 bp, Mus musculus
  source 1..596: mol_type = other DNA
gacagttaactaatgtgaaagggcctgtatcctaaggtgggacacaagtacagagacgtacctccaccgaatgaacttcggatataatttgctagtcacatcttgattcatcttaagcagcctatgtggatgaaagaacttcctgccttacagctgctttaacccaaagagctgcattgtacctgccaggtggcaggtgggtcagcaggaagcgcctgtaggacgaatccatgcggcaatcactccctaacggaggcccagggcttcccaagacctaagggccaggaggcctggcctctgatccttgtgggggtccctgtccccaccccggtggcgcggaaggcgggctccgggccacaccggagcctaggggccggggcgtccgcgctccgccaacccacggcctcccctaccgcgtcggctttacggtccgccaggcccgggagggacgcggctggcgccgctgcggccgcggggggcggggaggcggccgtgaggaggcggagctgcgaggccgcccgtcgccgggccgccgccgcggtgcccgctcctccccgcgccgtgccgcgccgtgccccgcccggccgcctcgcctc

SEQ ID NO: 34279 - DNA, 316 bp, Mus musculus
  source 1..316: mol_type = other DNA
tctggcttcccatcagagggccactctagtatcctcagttggcctactgacacaaaggcctaatcatagcattatccttatcaatggtggtatgacttaggataaattctctttgtaatggttggtgatagtataaaaattcaaaaataatcatagaagatgtattctggttcagtagggttcaacgaggttgggatttattgaacctcacgtacttgagcagaaaagtatcacaactaggtttttttgttgtttggaatacaagataaactcgtagccctggctgtcctgaaactcactttgtagaccaggctgg

SEQ ID NO: 34280 - DNA, 321 bp, Mus musculus
  source 1..321: mol_type = other DNA
gtacaccccggacagcgtagctcacctactgggtacaccccgaagtacgtagctcactgggtacaccccggacagcgtagctcagcctactgggtacaccctacctctagagtgctgggattatgttggcgacagcctctgcccgaaacaagtgttcccctacagtgtgaggtgggtgtgcgcgtgcacatagccccctccccgcccccccctttctctgctgccagaggggttagttagcacacttcctgactctgcctatgcctcaggcccacggtggcagaggcagtgtgggaggagcaaccaagtttcacttccttg

SEQ ID NO: 34281 - DNA, 378 bp, Mus musculus
  source 1..378: mol_type = other DNA
tcaaaagtaattttacaatcctcagctgaccacgaggccgagccgcctgggcagcaactgcccctcggcgcccttacccctctaggcgcaacgcagcgttgcgacaagctaccctgagactcccgcacaccgcggcgacaaccgggcgcgcgcacgccccgagcggggccctgcgcccgcgaacgaaggcgaggggctctactccggaagccttggttgcagcggaggctagggtagctcacgctcctttggcatccgaaagcagccgcagtgccatatttaccgtgccgcggggccggtggggaatagaaagcctttctgaagtgttcgcccggttacggcacttacggcttacgtcatcggactgcgctaactcca

SEQ ID NO: 34282 - DNA, 464 bp, Mus musculus
  source 1..464: mol_type = other DNA
acatgtgaagggctccattcacattttactgccaatgttcagttaacagaaatctctaagatttgagagatccacatctttttcataaaaacagagtttattcatttaagagcctgtaacaaagaaaaatctaatgatgggtctttatttgaaaaatagttttttatctgcaaattctacagattcaaaaagaccaacctacccaactgtttggtttttcttttctatatttagcaaaaagattatataaggtcatatcactagtgttttgcaaaaaaacaaaacactgtaaagtattatgttttactaaggacataaaaagaaaactttaaaattcctaagttcgatgaatttctattaaaaatttcagtttacaattttttcacttatgaaagaccattggtaactttcttacataaattagaaaaaaaataagagcatttcgtctgtttcgtggagttagc

SEQ ID NO: 34283 - DNA, 369 bp, Mus musculus
  source 1..369: mol_type = other DNA
aaaggcaaaagcagatccagaagggtctgatgctgctgcctatgcttgcccaagtagattcctttaggaatgcaagagcctctttgtatagcaggattctgattccgatcttgagccaaatgacaggtttgagagcaaagacaagttatctactatacatacatacaaacatatattaatgcagtgtgtgtgacaaataacacaacatacgtacatgatatacaattgtatgtgtatgttttctacaagctatatcgagtgcaaatggagttcagctacctgacagaacagcttgcacgtagaaggcatgcaatgcactctgtatcaattcacgacctgtttttatattctctaaaataaaatgggtaa

SEQ ID NO: 34284 - DNA, 376 bp, Mus musculus
  source 1..376: mol_type = other DNA
cagggaactacctttgtatatatatatatatatatatatatatatatatatatatatatatatatatatatatatgcacatatggtgggtaaaagttcagggccatgcataaactttatagcctcttagagattagacattggtagtatcttctcttacactgaagaatatttttgagaggtagatttctcaaattcacaaagattcccagatgctgtgactgtgggacactgctgtcagagcctgatagcaatagtactatgttgtgacagtgtataatggccctaataaatgaaaatgagttgtattccttaaaaaaaaaagtgagaacattttcataataaaaaatgagccagctcgccatacaatggtaact

SEQ ID NO: 34285 - DNA, 383 bp, Mus musculus
  source 1..383: mol_type = other DNA
aaaggacagtgaagtgacttttttgtcccatcttagactaattcaagtgtatgatatcttcagggatggtagttgtagctataaatcattgataataagccatgtacttgttgttttatttattcacacagtctttgaaataacaatcttattcatctctatcttacagagaaggaaactatgagatatgtccaagttctctcagcacgaaggcatagggcatattgagtgtgtgctgcagaaaaccaggggcctcagcaccttgctgtgactgaaagtgcatttctgctttgaagcatggaagccaaacctttcaggtttgttctgtaggtaaaagaaaacttctgccctgtgttttaacttaacttgcaatgagaataaac

SEQ ID NO: 34286 - DNA, 307 bp, Mus musculus
  source 1..307: mol_type = other DNA
tagaaattctggagaagaaactagtctttcatgttcacatgtacttcttgttccagcagctggtgacaggtgactagttggagtgccacagaggcagaccatggggtttccccaagttctcacagttttcaaaaggatagtgaaaattagctacacaaactgtaagtcattggtgaatactaagttaacttattttttaaagctcaagaaatctaagaatactagtgtgcacaaaatcctggattttattcccagtatagcatgaattgagcccagattattcactgaccctgtgtcactaaataat

SEQ ID NO: 34287 - DNA, 183 bp, Mus musculus
  source 1..183: mol_type = other DNA
ctacagactgagccccacagtatagcagtggtgcaccttgagaattcccggagcatgctgcagtcaaaggttaaattatcattcatagggatgcttgtacattttcattcctttggcaatagcatctatctaattgcccttccattttaatggctttcggtttcatgaaccctataaatactt

SEQ ID NO: 34288 - DNA, 583 bp, Mus musculus
  source 1..583: mol_type = other DNA
tctctgatgacatgttacacatcacacagtaaatgcatttgtttgtgtgctgcagggtgcacttccagcagagtcatccctctccattctcaaaaaatctgaaagccccgttttatagagggcctatactctgaaaaagatcaattaccttgtttacctaatttagctaaacagggttaaacattacaatacctcataatgagtactgattttaatttagctcatgtataattcattcttccaataaatattgaattctactaaggtctaattctacgttacattgggccaaatagaaaagtcttttatatatcatcaatattaaggtcactcttacatttaactatctcttacctttgaacctcaatgtcatgagatgtaaatacccaagttcttttttatcttgcagatctattatattaaaattgattgttttaatctcatggtgaaatgatagttaacttcaagtaaaatgccaaaaacagttcccagtagtattaactgtacttcaggcctttttcttcaggagataaagtcttaatgttcaagggcaacttctgtgagaaagaaaagttagtttcaa

SEQ ID NO: 34289 - DNA, 318 bp, Mus musculus
  source 1..318: mol_type = other DNA
caggaacttccatagtaaggaacttgggagacagcgaacttctctgcactatggttcatacgagtactggcttactcttctagactaggggcgctggcaacctctcctggtttccatggacaccaatatcacatgtgacattaaatacatacggaatacatggaagggtatacactttgagtctattcacacaaacctattaataaacaaaattaaactatttgattgcttagtaactatttgtaactcaattacacaattaatgcactttgtctagttgatacattgtaataaaagttttaaaaaaaaggaactgac

SEQ ID NO: 34290 - DNA, 398 bp, Mus musculus
  source 1..398: mol_type = other DNA
agcaaaggatggatcatagggcccccaatggaggacgtgtctctagctacatatgtatcagaagatgacctagtcggctggtctatgtcccagtaaaatgtaaatgaagaaaatacctaatttaaaaatgtaaaatgcaaaaataaataaataaataaatcttttagaggggagtatacactcttgagtctattcacacaaactaattaataaacaaaattaaactattcaaacaagaaatgacctttgcttagtaattatttgtaactcagccttacacaattaatgcactttgcccaattgatatattgtaataaaagtttcttttaaaagctatttttttaaaacctcttggtagatgaactatgacagtacaaatgtcacagcataggacagca

SEQ ID NO: 34291 - DNA, 272 bp, Mus musculus
  source 1..272: mol_type = other DNA
gcttggtacttcaagcctggagtttaggaacactaccctgactggagacagactatggtgatcatcctattaattaaaatgcggtgttttagtgggtacattagttggtccactcttaaaaggggcccacaggacctgaggtagctcgctagcgcatgcaacccgcaaatcagtagctcgctagctagcgcgtgcaagcccgagttgcgcagtagccgaaactcaggctccgaaacgcgggccccgcccttccggtattaggcccgcctccc

SEQ ID NO: 34292 - DNA, 565 bp, Mus musculus
  source 1..565: mol_type = other DNA
ggctaccgggttgtatctgataaactctagagcggtttctatgggtaaccctggctatccaagaacttactctgtagaccaggctggcctccaactcagagagatctgcctgcctctagatctgagtgctaggaattcttgattggtggaattcgctcaaactataaaatcagataatatatatatattttaaatcatcgatattgaactatctggcagctactagcgctatgtatttcaataaagaatgagctttttctttctttcagaatttcacgctcggggtcccaacgtcatggggtgtaggatctccgctgaccccacgtggcgtcgccgccaccgcaagccttggggcggggcaggggaggcggcgtaaaggctgccgggcgggtcgccactacgcgtgcgcggagagggcgtggctgtccagcaggtgagcgcgcgctaaggggcggggccctggccgcgcgtgcgcggaggggggcgggggcgcgctgcgtaggggcgggccctggtcctcccggtccggcgcctaggcctgccatcggagctcctccccggctgg

SEQ ID NO: 34293 - DNA, 401 bp, Mus musculus
  source 1..401: mol_type = other DNA
aacttaaacagaagctttcgtttaaaatcttgtgcatccattatgtactcaataatagctatgacacagctctggaccttcctggcatttttaagctgcgtggaagccatgagatcctggctctgccagttctgtttgttagttgttatgaacataagttcatgaacacgaagtttctgttgagagcagctacattccctttaatgcttgcctagcgctcaggaagccctgagagttcaaggccatcctccccgtccttaaggaaggcacgcgcttgcttctagattccgaagcgttttcaaagctatcatctttggttcataaatgaaaaagttgaggcactgagcgtattaagtcactcgcctaatatgagtcaacgtcaagagtcatagttgacccgg

SEQ ID NO: 34294 - DNA, 492 bp, Mus musculus
  source 1..492: mol_type = other DNA
tcatctttggttcataaatgaaaaagttgaggcactgagcgtattaagtcactcgcctaatatgagtcaacgtcaagagtcatagttgacccggtttaacgactcctgaccttcagtccagggctgagtcagcggagccccgagtggcttccctggctggcacctggacgtaggctatttccgtccacgtcccgcgtgcactccccttgggggcaagcccgcccacccgcttggagctaagcaaatgaagttatgccccgcagtgagtgcaaccggagctctgcccgctgcccagcagaggcctatcggcaggaagcgcccgcggcgccgggagccacgcaccctcgccagcgaccacgtgatcactttttttttttttggaagaaaaaaaaaaacttcttgccttaagaaaaaaagcagctgcagtcttgcgcaggcgccgctagggccaaacggacacgtccgtcacgtgggcaggagccggccacccct

SEQ ID NO: 34295 - DNA, 642 bp, Mus musculus
  source 1..642: mol_type = other DNA
agctaagcaaatgaagttatgccccgcagtgagtgcaaccggagctctgcccgctgcccagcagaggcctatcggcaggaagcgcccgcggcgccgggagccacgcaccctcgccagcgaccacgtgatcactttttttttttttggaagaaaaaaaaaaacttcttgccttaagaaaaaaagcagctgcagtcttgcgcaggcgccgctagggccaaacggacacgtccgtcacgtgggcaggagccggccaccccttcaggagcggttgtgcgatcagatcgatgagctccccgcgctccggcttcctccgctcagggactcccgcaggacggcgttaccggcgcgcacggcgcctcccgccgcgtccggtccctgcccgcccccggcctgaccttcggcgggcagcctcggcgccgggaggctggcggcggcagcgtggagcgcacacgccgtgtgggggcccgggcaccggggcggtggggggaggggcgccgcgcggggccgcgatgcggcgggcggagggcggctcgggacacgggcgcggggatcggcgtggggtcccggggtctcgggggggctggggcgggcggctcctagcgggcaccgtggctggtgggcggcgagccggcccgagagagc

SEQ ID NO: 34296 - DNA, 391 bp, Mus musculus
  source 1..391: mol_type = other DNA
tgtcctctcccagaggtcaggagccaactgggatttcccagagggagacagtcctgtatgtaactcctgcatcgcttcctgagtttcatcaaaggacctgggtcaggacgcctctgggccagttgggaggagggcgctcacccagccctcgctccccgaagggtccctccggagctgctggtggccaagagaaggacccgcagctcatccacgggggtccggtccctctgccctcgtctctctcggcggggaccgcgacagaggtggcgcggctgcgtcgtgcggctgcctctcgggagctcccgagcacgagtcgagcgcgcgcgcgcctcgccgacccaggcgccgggcggagctgcgggccggggcgggcggagcgagcggtgggagg

SEQ ID NO: 34297 - DNA, 635 bp, Mus musculus
  source 1..635: mol_type = other DNA
aggcaggcaggggtcaggacacgtgcaggtctcctactgcagagcccagtctgggaccccgagccccgcgagacggtcacagtccccgggtccctggcacagccggagtgcggcggacacagcctgtagggtcccgcccgacgggtgcactggctcgccgagggtgacgctggaccggctttcccgccagccccgcaggacagcctgatgcgccctggggacgcgcccgcggacatctacgtcctcctgctccgccaccccgcacatgctcgcctggggcgtgcgctgccaggcacgctccgggctgagacttcctcccgggaggctccgtcccagcagcccggagatctgagcccaccgagctgtaccgctccggtctgtagacgcacagcccccggcgggctaagcctcgccggccgtgggcaggaggcagcactggccgcactgagcatgctcggcggagagggcggggcgctcggcggagagggcggggcgctcggccgcgcgtcgggagggcgctcctcaggacggctcggcgcctccgcgccagcccgcccgcccgcccgcccgcacgttcgctcgctcgctcgctcgcagccgcgcccgccgcaggctgcgcccggccgccccgcccc

SEQ ID NO: 34298 - DNA, 416 bp, Mus musculus
  source 1..416: mol_type = other DNA
agctgctgaagattcctgcaggtgctgatcccaaaccctgttttggggagtcaccctgatttacagggaaggcaaatcaaaatcaaattaattggcggagctgaggtggagctgaggtgcagcaccgccctgcctagcgcagggagcttcgtcatctccgagctctgagcgctcgaccggaaatgctccgaggccggtgccggaagtgcacctacaggcccgagtccttccggcctctgcccttccaaggtttccgggaggcggggagtgaagttcaggcggctaagcccggtctctggcgtgacccgtgagcgctgaatgacgcgctcgccactttacctctgtgccgaggacccgagggaaagctgacgagtcccgcgtgtagggacgacgcaggccgcctgtctagtttccgg

SEQ ID NO: 34299 - DNA, 407 bp, Mus musculus
  source 1..407: mol_type = other DNA
atgttctgcttcctccagattatgacagagtaggagaataaaaactgcattgtctttaagaatattaactattgttttaaacattttagcggcaaggttatcttgaaaagctagcatttaaacagtttaaactacagataatttgcaaatttctttttcattaaataaaaataggataggatggaataaagtgtactttatttgtacatacttttcaataaatgttaagatgttgttatttttttcttttaaaaacgaaaaggtagaagaaagaatgatgtcattttgctccctcccctcaatgcctagtgtctgagattacaggtatgggacagggagatcctccctttccaaggagcaggccccgtgggcgtggcttccagcttgctgacgtaggcaacgcgttt

SEQ ID NO: 34300 - DNA, 586 bp, Mus musculus
  source 1..586: mol_type = other DNA
gcttaggcttggccggctcagggacactgccaggcggtgggctgagctccgctggacaccgccaagtggcctgaggcgtgcccgcagcgcttgcggagcaggagtctggcgccaggcggggagactgtgctgcccctggccgcagttgcctctgcccccaggactccaccttccgcgcgaggcgtggatttcgctccatcctcgcttacataaggcgggcgagcgcgctcccgccgccgcttccccccgcgcggagtggggccgcgccctccacgcctcctctgcgagcgccccccgctcgccccactcctggaggcgacagtcgctggaccgtcggcgggcgggcggcagcccgggagtctctccggcacagaagcgcaaggatcagagcggggagcgcctcgctggctcgccactcctctccccggcgcctgtgcgatccgagcgggcgcggggacccgagagcagcgcccgctcggctggcggcggagctgcgggagctgtggtggtggccgcgctacacctcccagcacttcccgcgagggaccttcaaactcctcctcggaggcctgcccttggagaaagt

SEQ ID NO: 34301 - DNA, 416 bp, Mus musculus
  source 1..416: mol_type = other DNA
agcatttacatttatgttaaagaatgcttatgaaaatagttgaaatgcacacactttaaaatgcagaactagttctttactagatataatattaaaaaggcggggaagaaactcgttttcttatacttggtccacatcatggtcatattgaaattctcttaggtccttaatccatttgcagttgaatttttcattttctatataaccaattctccagatgatgagtgattgttttgttgttgaaattccagtgaacttaaatgtgacttttatcatctctagttagtttttttttaatattctaatgaaatttcacttcttaagagatattcttcaatgaaacgatattttatctttttgttcttttgaaaaataaaactttaaagggtttcctaacttttttgaataaaaattca

SEQ ID NO: 34302 - DNA, 274 bp, Mus musculus
  source 1..274: mol_type = other DNA
ataatgagaaactcataagaaattcacttctctattaaaatttcatcgaacacaagtggaattttttgcgttgcctttcattgtttacaatttcaaaatatctgtattaaggaaaaatttcattttcctaggaacttctccaacggagaagttgaagttcccggctgcagcgccagggatgctctgaggacggctctggaggtggctgggaccgctccaggcgccgggccgcgtaatccctgcgctaagtgcttggctcgcagtctgcaggaca

SEQ ID NO: 34303 - DNA, 511 bp, Mus musculus
  source 1..511: mol_type = other DNA
tttaatggaaatcctatcctactcatgtataaatttagattcataacaatgatataaaacatttttacaatgagttaaatagacatatgtggccagtggctactatttgaacaactttgaacctactttaggagtttgcttgtacctctagagcagactccagactcttttaatattttaaaagtttcttttcgagtattcgttaaacattactaacgtttgcttgtgaataaattctctgcaaaaccaaacaactttacagaagtaggtaaatgtgctgttaattttggctgaatcacttcagagtttgcacttctgtagtcgctgaacttgcaccggcagagatttagctaccaggtaccagtccgttttttgtggcggcggcagccggtcccagcaagtcacccagccttctaagccctgagcgacgtggccccgcccagcccggaccatgggggcgtgaccgcgaggcggggcgagcgcggaggcggaagttccccaccggcttgaa

SEQ ID NO: 34304 - DNA, 460 bp, Mus musculus
  source 1..460: mol_type = other DNA
caggacttgttaacatattattttggcttgaattctagacaagtgagatagaagatctttcttgaagctccgttaataaagcatagctattttattgacctattttaaaaaattagtttaacccactcagtgtcatcagcagatgttcagctgcttacagcctttctgtgactgagtcagcttgctggtgcagtctctaaatatgggattcaagaacctactaccaatgaaaacaacttttatcctaagtggatgcagagacaattgtaagaaatgagtcttcaaatagtacgtgaggtttcccttcaaaacaattgtgattcaaaaatgacaaacgatgtcaacgttctctttcagattgtcagtctgaacttgtgtagtttcaatttcagtttagaagttctctcccagctctctgggagaggaaaggaaattcccagggctggccgttatttctcag

SEQ ID NO: 34305 - DNA, 497 bp, Mus musculus
  source 1..497: mol_type = other DNA
atggttctcaggccatcagacatggatacttcactagtctggtctgtatgtgacatgaatatttgtgaatttaaaatgcaccaagacatttaaccaaacaaagatgacagcttagtctgttgtatgttaccagacatctggacagtcacttaagacaaactgttgtaattcatttcggttttgccaaaaaaaaaaaaaaaaacaaactttcatatgtgctgctgcacagcaagatatgttaacagtttgaagagatagctatgttaacccagtctgcatcatatatcacatgaggtatccaattacctttttaatatgtacagtattgcgcgttttttaaggtaaaaacaataagccagtggcaggagctggcacatttctgttgcagcattctgtatttcccaatagaagtcagtatagagaccccacagattccgttttctttccaggaaaagcagaagcttctcagaaagtcagcacaagcctgtgtgtgcagt

SEQ ID NO: 34306 - DNA, 548 bp, Mus musculus
  source 1..548: mol_type = other DNA
caaattgatactcatatgtattatataaggagccttaaaggatagttaatgataacttgtagcagttaataataaaagcatatctttaactgaaaagtcagtctgtctatttgcatgaattatttgaaagtagtctatacatgaagtacatgaagtagtctgagtcccacatattgtatatatattttgagacaaaattttcatgtagcccaggctagcctcaagctttagacaatattttaaataattcatgaaagcaggaaacttttatagaacagattttttttacttgtgattttatgtcagaactcaaaaaaaaatcagtaacacttgtgttgctgggaacttcctggcccagagttgttagcactgaatcatgcattgttcttgccaagcaagctgcactgtaaacagtggccatctctatagttcaccatcacactttaaggaaactggggacttgttttcctttaacaaaaaggttgagcaatcatctttgactccctaaacaaagctggttcatgtcaggacttctatttcccagatcc

SEQ ID NO: 34307 - DNA, 492 bp, Mus musculus
  source 1..492: mol_type = other DNA
tttatgtcagaactcaaaaaaaaacacttgtgttgctgggaacttcctggcccagagttgttagcactgaatcatgcattgttcttgccaagcaagctgcactgtaaacagtggccatctctatagttcaccatcacactttaaggaaactggggacttgttttcctttaacaaaaaggttgagcaatcatctttgactccctaaacaaagctggttcatgtcaggacttctatttcccagatcccagtcgtctcgaattcacagcctgagttccatctgagggagcatttcctctgtagactgcagtctgcaatgacaatcattgattagtagtgttccctggtgagtactacagacagacttgtgtttttttttgcatcggtgatggaacacactgtaggaaagaaaaatctgggaaattcctcagctcagctgaggtcacaaattctgttattttgttcaagccctcaacgactgactgagtcatcaag

SEQ ID NO: 34308 - DNA, 398 bp, Mus musculus
  source 1..398: mol_type = other DNA
aatgattcagcaacgaaaatatctttaatgaaaggaaagagtactatattggcttttttccaaagtttgctctctgctatattaactaatcaatatatttatttgtggcacggcatctcacagtgggagctatcttcattattatttattaattttccaatatctacatgggtacacatgagtaattaaggccactgtgagtttagtgttcaacattctgagcttctcacatgaacatggctgtatgtcagctggataatcctgagaaagcttgtgataacctgtatgatttaggactactgagtacttctaatttcactttctttttgcagaagtagctctaatttaactgcctcagcagaaaatttttgctaatgctctggaccgccccagaaatt

SEQ ID NO: 34309 - DNA, 438 bp, Mus musculus
  source 1..438: mol_type = other DNA
gcatgaggattaattagacatcagtgccagtggcttgtcttagctcagagactcacagatgtcagtctcagttttgacagtggcttccctcagcctctgagagatgttatttctcatttagggtcaggactctgactcgtttaaggaaagaaaagaaagaaatcccttttgcttactcttaaattctacatgtctacatgattgaaaatatttaagtggtgctaaaattgtattgtacataatgttaatagcgattattaacaagctagctgatttcccagcatttgacatgtttaaaggaactcagattcactttcactttcagtttttattctttcacagtacagagaaatgatttttaaacgattcatgtccacttctgaattgcacaattgtaactttgtgtaacacagtgctgcagtgctggttgagtcatcc

SEQ ID NO: 34310 - DNA, 561 bp, Mus musculus
  source 1..561: mol_type = other DNA
ctcagctcttagacaaacttgaagaacagtacatacatctaaaatttcaattgacaagttacaagtagcatctgaaagatttttatttttatttttaagcagaaccagggtttgccctgccttcttggggtgaggcacacaccacatccagatgcccttggtgtgagactgcgaaaaaataacatagttacatttgaaagagaaaatgacttcaagtattgattgaacaaatgggatttgaaatatctaatgttgatcaatatattcatttcttagagctaaaatcataattcattcctaaggaagttaggcagatctctgagttcgaggccagcctgatctatagagcaagttccaggagactatagagaaacctagtctataaaataaaataaaataaaataaaataaaataaaataaaataaaataaaataaaagaagttaactttctcaatgtattagttctttctactatacctttcagttggaaagcaaaggtactgttcacatctgctttcaggatgctggtgacatgagtgaacagaaggaaccaagcacaga

SEQ ID NO: 34311 - DNA, 134 bp, Mus musculus
  source 1..134: mol_type = other DNA
atgagcacctttaatgttcgtaacaagaacctgcttcgaatccacgcagcggagatttaaaaacagttctccctgtcccctagcctgggagcttcttgtgcactctcacagggcgcgccacaccggagccaatc

SEQ ID NO: 34312 - DNA, 316 bp, Mus musculus
  source 1..316: mol_type = other DNA
gcagatgtgagccctttgtctgcatgcatgtgtatgtatcacatacattgattgataccagaactctggaactggagttacaactatagccaaactctgagtattaagagttagggcagccatgaaataactgattatatatatatatttcttaaaggagcttgacaaagagcagagcagcagctgaggttctgttataagcgaaaggaaaacctttataatcttatgcttttagttactcggtcgcatgggccaagatggcgccctggcccattgatgcgcagtgaaactgcatgtgtaagactgtataaatata

SEQ ID NO: 34313 - DNA, 269 bp, Mus musculus
  source 1..269: mol_type = other DNA
ggtgacccccaagacctgccttgtgctacactgttgagataaaggacagaagacaacaactaatttctctttttaacttgagagtatcacccgaggaggcaactcccattttaatttcctctgtttgagagctagctcaggcgcagcacattctgagttggagcaccctgtgtggatcaggttcctgtcaaggaccgagcgctttttagccctcctcccgacccgtagccgcgcggagtgcgcgcgagcgactcgcgcataaaagcccg

SEQ ID NO: 34314 - DNA, 666 bp, Mus musculus
  source 1..666: mol_type = other DNA
gagtgtccactcattgattagacaaaaaaagtatctgttgatacttgtgatacataagtgttacttgtagaagtccattttcccacaagttacactatgttactaagtagactgtgctactaagtagctaattccgataggctgctaagtagctagttaaggctcactactaagtagactctgcaactaagtagttagttctcatttctctttccattaaacttacgttgaaaaaaaaaagtcagctttgagctcagtagttttctagttggggactgctcggagcagaggctggcgccctgaccacgcccacggcgacgtcgcgcggggtgggcgggcgggagggcgcggctccccagcagggagggccgaagcgaggctcaatctgcggccggccggaggccagacctagcgttcgcgcagagccgttaagcgcagccgcggtgggtgtggtctgctcgctcgacttcccgcctcccggcgacgcgagcccggggcctttcgcccatccgggcccgcccagagtccgccccgccccgcgcgcctggccctggggtccccgccaaccctccttggcttcccagagcccgcccagcagggggcggggccccgcggcagtcacgtgcgccggcagccgccaagcgcggccgcttttgcgacgcggtg

SEQ ID NO: 34315 - DNA, 760 bp, Mus musculus
  source 1..760: mol_type = other DNA
acctagcgggccaggggcgcgccgcgccgcgcagcgtccccgaccccgaccccgcggccgccttcccctcccgggttccccgggcggcgctcccgcagggccgcggcccttacctgcagctcggtgaggaggatctccccccggtcggggttggacgccatggcgctccgctcgggcctccgcacctgaaggcgcccagcggcgcggccgagggagaggcgcggcccggcttgcaggcgcggctcatggagagcggcggggagcgagggccctcgcggcgcggctcccctcgccgcccgccgccgcccgccggactcccctcagccgctccctcagggcgacgccgggagccgactcggagctctcggtgcggggcgcagcggccgcggcggcagctcctcctgtcgcaccgcgtcgcaaaagcggccgcgcttggcggctgccggcgcacgtgactgccgcggggccccgccccctgctgggcgggctctgggaagccaaggagggttggcggggaccccagggccaggcgcgcggggcggggcggactctgggcgggcccggatgggcgaaaggccccgggctcgcgtcgccgggaggcgggaagtcgagcgagcagaccacacccaccgcggctgcgcttaacggctctgcgcgaacgctaggtctggcctccggccggccgcagattgagcctcgcttcggccctccctgctggggagccgcgccctcccgcccgcccaccccgcgcgacgtcgcc

SEQ ID NO: 34316 - DNA, 356 bp, Mus musculus
  source 1..356: mol_type = other DNA
aacaagctgcttaattggcagtaaataacttgatctttttatagaataagtgactggggcaacaaattaatcggtttaagctaagctttataaattgattcctataaaagcagtttttcgtgacatcaagactggcttgaatgaaaacactcattgatcttcaaaatgaaatgagattgtttaaaatacgcaaaaccagtttcgcaacgcaccctcacttccctaggcagagctcgggagggaacgtggctgcggcggggcggccacctccagcggcccgcggctggctcgcggggctcggcgggggctggggaggggccgggcgctggagcgcgccacagagcctagctctcgga

SEQ ID NO: 34317 - DNA, 672 bp, Mus musculus
  source 1..672: mol_type = other DNA
ccttccagtttacactggggttaatgggagctggcagtacttaggtaggaactacttcccactttgcttaaggttttgaaatctgcaacccgaagaagagacccatttctgggaaagtaagtttcccgaggctgagccagggaaggcgatccccgaggccctgcgggggcgggctccacgcgtcctcgcgcgctgggcaggcaggtgtggtcctgagcctgggcacgcgctcgctggccgcgtcccccgcgccacccgggtcccttctcgtgccccgaccccgggccccccccgccttcccgggcccggccggctcagccgcccgcctcgcggttttattattccgcctgaacaatccggccgcccagtggctgagggtcgctgacgtcggcggcagagtcagaacaccgaaggagcgagcgagccggctagaggcccgcgccgccgcctcctccgagccgggcagcagcagcggggcagccgatcggtccagcgctcccggccggcccgcagctccccactccgtgcgtcctcgtaccggccgcgggaccgagcctgcaccgccgctcccgggccgcaggtcgcgggaggggggagctcggccgagccgccggcggccccgagcgggcgggcgggcgggaggaaggcggccgcgggcgcggcgggggcggg

SEQ ID NO: 34318 - DNA, 375 bp, Mus musculus
  source 1..375: mol_type = other DNA
caaaaccctttaaggtttgggagtttcattcacttgtgtctcactcaaagaaacgtccctcctaagcggacggctggaattctgccacgtttcattccggatggaagcggccgctaaggcagcccgttccacgggcggctcccaagcgtggccccgggtttgcaccagccttgaggcagccccagaggcggtcagcgcagccccagagcgggccgcagccacccaccctgccctgccgccccctgccgtcaatcttcaggggtctgaggacccctgtgccggggacgtccactgcactggttaaacagtcctcagggcgagaagcggcctctcttcggaccagccgggcagcgtgcgtcaaaggggagggggcgg

SEQ ID NO: 34319 - DNA, 671 bp, Mus musculus
  source 1..671: mol_type = other DNA
atctctgcacatgactggggctttcctccagcagcaccagctccaggcagacctgggtcccctctctcagtgaagggccgacggggcagccctctggccagagacctcgcgcgtgcagctcatcagcccagcttccctccccggtggcgggagctcgacgtgcccgggtcccagctctcgaggttctccgaggccccctgaggaagccggcaatgcccacccgccagcccggccccggcgcaccgctcggctgccgcggcatcataatcctgaggagccccatgaaacccgccgctcgcgatcaagacataccgcggggggcggggagcggggccccgagggcgaccgaagcgccgggaggagaccccgacccgggagctgcgcggactgccgcgccgcagcgaccccctcctcctctccggtctcccgcccgcgggagccagcgccggccgcctggtgcacgcttctccccggcccctcgacggccctggcgccctcctgccgctgccgctgccgctgccccctggcttcgggaccccacggccgccctcggtcgctcgcggccgcgcgctcctccggtggcgatgcggctgcggctgcgccgccctcggcccgccccctcccctttgacgcacgctgcccggctggtccgaagagaggccgcttctcgc

SEQ ID NO: 34320 - DNA, 468 bp, Mus musculus
  source 1..468: mol_type = other DNA
gcggcatcataatcctgaggagccccatgaaacccgccgctcgcgatcaagacataccgcggggggcggggagcggggccccgagggcgaccgaagcgccgggaggagaccccgacccgggagctgcgcggactgccgcgccgcagcgaccccctcctcctctccggtctcccgcccgcgggagccagcgccggccgcctggtgcacgcttctccccggcccctcgacggccctggcgccctcctgccgctgccgctgccgctgccccctggcttcgggaccccacggccgccctcggtcgctcgcggccgcgcgctcctccggtggcgatgcggctgcggctgcgccgccctcggcccgccccctcccctttgacgcacgctgcccggctggtccgaagagaggccgcttctcgccctgaggactgtttaaccagtgcagtggacgtccccggcacaggggtcctca

SEQ ID NO: 34321 - DNA, 578 bp, Mus musculus
  source 1..578: mol_type = other DNA
ataccttcccaggggatgggagatactttccttcagcacctactcaatcacacattggctaggtgtctacccaagccataggtagccttgggcgattctgtcacagacactcactgagatgctgtgggagggaatcagggtgagagcccaggaggctctcggagcctcagccgcggctccacccagtggtgaccctgcaggggtcgctgttcccatgagaacctctgcagcggctccacccagtggtgaccctgcaggggtcgctgtcccatgagaacctctgcagcggctccacccagtggtgacggccaccctgcaggggtcgctgttcccgcgaggacacccccgcaggctcccggccggctgttttccgccgcggttgcacagtcgccgggcggcggggcggggcggggccttcctccggacgcgacctcggtccccgtggctcgcagctgctcggcgacgcgacaggcccagcgtgtgagcggagaggcgcgcgctcgcgggcgcccgccctcttccctcccccgcctccccgccaggaaacgacagctgcgcggggctggcgccgcctcccg

SEQ ID NO: 34322 - DNA, 429 bp, Mus musculus
  source 1..429: mol_type = other DNA
agccaggctaggtggccttttctcagaaaacagaaactaaattagctgagtgctcatgcctttatcacacagctaagataccttcccaggggatgggagatactttccttcagcacctactcaatcacacattggctaggtgtctacccaagccataggtagccttgggcgattctgtcacagacactcactgagatgctgtgggagggaatcagggtgagagcccaggaggctctcggagcctcagccgcggctccacccagtggtgaccctgcaggggtcgctgttcccatgagaacctctgcagcggctccacccagtggtgaccctgcaggggtcgctgtcccatgagaacctctgcagcggctccacccagtggtgacggccaccctgcaggggtcgctgttcccgcgaggacacccccgcagg

SEQ ID NO: 34323 - DNA, 204 bp, Mus musculus
  source 1..204: mol_type = other DNA
ttgattgtgcttaacaaataatggagccaaggctcatgtttaatatttagcacagcatatatataggaagttcatagctgcagctaaggcagctgtttctgttcaggccgataaggcctatcatacaaagtatgtatatcctgcctatcatggcaaatagccaaggtcttctgggaagaatgttcaaggactgcttgtccagga

SEQ ID NO: 34324 - DNA, 337 bp, Mus musculus
  source 1..337: mol_type = other DNA
gtctccattccagacaagagaatagatttctcttatgctgtattttttatcactgttaattacatgtcgttgaattcctggaacctagggttaagggcactgtgttaaaaagaaaaacacattctcataatatttctgtctttaaagaaacaaaatttcttactacagatggccctaggaaacacattttttaaagactcgttttgagtcagaaaaactgagagagaagttatactcagaaaaataatctcttgctaacaaaatatttaaaatctagtaagaagatgtgttatatcagcatttctatcaaattatgcaaatattctgcataaatgcc

SEQ ID NO: 34325 - DNA, 300 bp, Mus musculus
  source 1..300: mol_type = other DNA
tctgattagcaaaatagcctataacatgtaacacacgctatttaagttttccatggattaattcatttagcagttccaacatctcataacaattcagatattttacaaaccctaacagagaaatatgtgacttttaagagttctcaagttacaaaaggatatggaacactcaatttgtgcttctaacagtcccatcagccctgtggggctgtatccttatgatgatggtggcagtgatgaagacggtcacaatttagaaagaacgatggatgtgttttttaaccgttaaacataaatgcc

SEQ ID NO: 34326 - DNA, 409 bp, Mus musculus
  source 1..409: mol_type = other DNA
attaacacagtaaagatacgctgtttatctaaattgggctcagctagctcagagaagccttcctctgcagtgactagacagaatgcaggaacttgaaggttcagacctaaataagatatttacactgtcccctcaaagggtcaggaagcagctggttatgaaatcattccttcagagcatgagctcactgaacttcaggtcagaatgtgttatatattttctatcaaagaacaaatccagttatataaataaataaataaataaataaataaataaataaatctgtgtttatgcttaggaaattaatatgtattttataattttctgatacctttaaatattaccaagcaaaaaaccaattttataaccctgctatgtgatttctggatttttaggagtatatatagac

SEQ ID NO: 34327 - DNA, 481 bp, Mus musculus
  source 1..481: mol_type = other DNA
gtctgtagctgcatatatagcagaggagggcctagtcggccatcaatgggaggagaggcccttggtcttgcaaagatcatatgccccagcacagggaaatgaacagaatgggttatgtgtgttctttcaaagatcaaattcagttatttaaattctatgttgtgtatccttcctcaacagtgacgcaagttctattcctatatacaaatattttatttatatcattattgtatagatgacagagagaataggtaataagtgatttgctctttaaaatggataaacattttattgtggttttattttatgatcctattctataaaaataagaaagtctttgtgtatgcttaggaattgtgtctcaagaagaaaggatgctatgtattttataattttctgatcactttaaacaataccaaacaaaaaactgttatgtaacctggctatgtgtatcctatacatgaacattgagtatatatag

SEQ ID NO: 34328 - DNA, 473 bp, Mus musculus
  source 1..473: mol_type = other DNA
aatacttcatctgcaattgtttcatttggaaaatactaattcagttgttatgagcttgaatgcctttgtctatctgagaccaaaaggatgaaaatgacttccaagcaatttgaaatcagcagcaatagaccactttgggctttcttctaaagttttgtaagcttgaaagaatttatggggtagcagagccaccttaatttatgtttaatttcagcaatttgctttgcaaaatacaatgagcatcaagattccttacaggaaactaaagcttccttaaatgcatcaatgtctccctgactagacaaatatttgtaagtaaacagatactccaatggacaacctgctttccctggtggaaccacccacccttgctcccttttaattagaaacacttaaaagtacagtttggtttttaaacaacacttcctcttatattgtaggcaatgtgtgtgtgtatgtgtatatatattgga

SEQ ID NO: 34329 - DNA, 274 bp, Mus musculus
  source 1..274: mol_type = other DNA
gtgaaagtattttctccatcgagggaattgtcagaattgaaaagcagatgactatacaggttggaatcaagcccttatcctcaggggatccctgcttagaaagaagttcattttttctccttggcatcaggaaaaaaaaaaaaaaaggcctcccttgggagatatctgatcttcagagctcgcccagactgcctgacccggggctctgcagccagacttcccttttcccttgagaagagacaaagccaggaaaggctggatggcttcctgacca

SEQ ID NO: 34330 - DNA, 367 bp, Mus musculus
  source 1..367: mol_type = other DNA
agcttgtactagccatactgaagggccgacagttcagagatattcaggacagtgtataaaacatgtttgtttgtttgtttcccatagaggcaaataaatggataatagccagttgtacgctgactatgtttttaaagaagaaaaactcctgtgggggataatgccatacactggaaaggtttttctgtcttgggttttttcaaatcctagctacaaaaaagggcaagagactcggaacggaccttcctttcagcgacgcacaaaagctacgccttttctcaaagctaaagcttttgaaaaatctcagcaggaacggcgctcgcgctctagagctcccgaccaattagctgcgtcggagcgggctggg

SEQ ID NO: 34331 - DNA, 277 bp, Mus musculus
  source 1..277: mol_type = other DNA
tgagagtaatatcagatttttgtctcactaaatttacaaacatcagtcagaaaaattagatgagaatatttagtgtttttattatgagcaaattcataagctcgactttccagtattaaaagactgaaaataggaactcagactgaaagcctgtcacagcaatcagaggttgtaaggctggaagccggtctgcttcaagagctcagggtgcagctagcccagcctgaccctgctaggttggtggaccagggcagcagtgcgcggtgaaatttaacac

SEQ ID NO: 34332 - DNA, 439 bp, Mus musculus
  source 1..439: mol_type = other DNA
tgggctagggcccagccaaaggccttattttaagtgttatgcccttaaaagccttgtcttcgaatatagtcaaaattctgaggtattggggtatagttatacggatccctgtgacagccagcagtgggagcagatgagagtgtctctcctatgtagaccaggctagccttgaaggttaccttagaccaacggttctcaacctgtgggtcgcgaccttatagtacgattcataacagtagcaaaattatagttatgaagtagacacaaaaataactttatggttgacagtctaaactatctattgccatgcattattagaattaatccttaatactgattaaagtgggtcacttatttgagacaacaagatccccgcccctgggtgggagtgaacgctacacgtcgtgaagagtcgtggccggaacagctgctttacggc

SEQ ID NO: 34333 - DNA, 510 bp, Mus musculus
  source 1..510: mol_type = other DNA
agccctgggtgacagaggtgtgctgcggtccccagctccatgtgggtgctggagattttaaatcaggctctcatgcatgtgcagcagacatcgagcctctcagagctcctcagcgtggaacctactctgcagcccaggtatgccatgaacttgcaattcctcaacctgggctgcatcacccacccagctgagagagggaggtaaaatgataaaataataaaataatttaaatctagtctcttagaaattgcatttgtattaaatctgattctctctcttgacactgcaacagacttgttgcagatgaaatgaaaagccaacaaaagactcttgttcctttattccttaggcctagtcagctgagagttctctgaatctcactacacttgagtgcagccctgtgcagtggttaaggggtctgggggtaatggcattcccagagaaagattgttaagatcagaaatatataggttaaaactttaaattctatttttttcatggtatgggccc

SEQ ID NO: 34334 - DNA, 280 bp, Mus musculus
  source 1..280: mol_type = other DNA
ggccaggagggttgacccggcctccggcatccgtgaggaagtggacgtcaggctccggccaataaatatgccagcgaagagggaagcttccctccccattttgatgcatgcctctttgaagtcccaccttggttgtaaacaagcaaacagctcgctgatctgaagttgttatttaaagtggaaaaaaacgaacttttttttctctctgatggatggtgcttggcagcagcccgcgccaaccaacattcctgagatgtttgagaattctagaacgcgcggg

SEQ ID NO: 34335 - DNA, 279 bp, Mus musculus
  source 1..279: mol_type = other DNA
gggttttgccaatcccactgccctctgttgtgaccacaggttaaactcctttattgaatgaagatactaatgcagggaaagtttatccataaacaatcgcccttaggtcctcatggggaccatgtgaggcgtgcacctgcggtgggatacacacaccacggagggagtcattgacccaggccggtctgcggcagatgcggagggaataggcccgcgggcgctgggccggcgcccggagctctgggcatgctcagtggcgcgggcagggctccgggcgcg

SEQ ID NO: 34336 - DNA, 333 bp, Mus musculus
  source 1..333: mol_type = other DNA
atgtggagcacctcatccactaggatatagctttttaaatttgtctctactgcatagattaataaggagaaatgcttctaatgaatagagacttaaaggtaatttttaaatcttttaacagtttaagttatgtgtgcgtgtatacatatacgtatgatcacgcaactgtcgtggcggggagatcccgagcggtccccgctgtgggcggagccacgtgggtggggcctgcaggcagacccgcctcgccgaagggtggtgcctgaacgctgagcgcggcaccgctggccccaggggcggagccggaagtggggcgttgaggtctccacctcctcg

SEQ ID NO: 34337 - DNA, 263 bp, Mus musculus
  source 1..263: mol_type = other DNA
gaagtttttctagaaacactcagacctattatctcagaaattacaacccagcaatattccttgatgtactccagggacggatttttctgtagaatttagcagataagaatcagaacaagttattaatgactatgtcacctactgtattagtggcaaggagatccttaagaaacccatgagtaggagcgcggctccgccgctagggggcgcctcgccagcctggggggcgggatcagccgtggcttccggcttccggcttccgg

SEQ ID NO: 34338 - DNA, 384 bp, Mus musculus
  source 1..384: mol_type = other DNA
cactaagttaatcttggctcagttaagctgtggtgacatcgatccatccatctatccatcctacagagggagttctacggcagtaagatcctgtcttaaacaaaactctttaaatattgttgtggtcaactgcattactttgctaaattttgctagatcacaaattagcagttttaatttgtacttttaaagaaaagacagaaatactcaaacaagggaggtcaggtggctggcctaggagctgcccatccgcaccccacgacttccctttgactaaggctgaagtggacgcaagaactagtgcttctgggattacgttaggtgacgtcacaacacaacaaccaatcacgcgtcctagcaacaactgccagcccgctgttgctg

SEQ ID NO: 34339 - DNA, 510 bp, Mus musculus
  source 1..510: mol_type = other DNA
gctgaaatcagagatgatggcaacactgattcttatcgatcagtgccaggccaggcagggtttggtattgagagtaggtatttccaaatttcaccctagtgaacactgaatttcagttagcatttttacatttaaaagctgtaaactagcgcttttacatttaacaagtttgtttgatctagggtctagtacataaaggactttttttaaaaattccttattgaataggatttgctacagatagggcttcggaacccctgacactggagtcggttgttactctcaagctaggacttgctgcaccggagccccgcctcgcgcagggggcagcggggaggggccggggcggttggcggggtggcagcccgacccgctccaccttttctgcagccgcgcaggccccgcccccggagcgcccacctcgggaacgccgcgtgttggcccgcgcgccccgtcgcggctctagttccggggcatgcgcgctgcggcgcccgcgcccccctctaccga

SEQ ID NO: 34340 - DNA, 324 bp, Mus musculus
  source 1..324: mol_type = other DNA
gttaactttcacctaggtgagaattcacttaagtagttagtctgtgcctacctagtatggtataggaacaccctatgtatggacactggagcagccatgcagggtttcttataacctgcagcaatctaaggagcacttatctttcagggttaggtttattaatgatgtttaaacacagtttctgagcatgaagaataatacattctcatgtgtgggcatggacttctcaagagagggacccacattgcaaagcgctgctaagaaacttctttagagatatcttagatggaattataatctaattaagcaaactagtcagacttc

SEQ ID NO: 34341 - DNA, 495 bp, Mus musculus
  source 1..495: mol_type = other DNA
ttgtcttgaagcccctgctttcaggcaacacggtcaagcagactggctgcagatcctaactacttgttagggagttatcagaataaagactccttagtgaaactcaggcgaggccggaggattgctctggttgccagtgtgggccaggacgacgggcggcctcatagcaggctttccggacgacttccctttataagggtcgcagacacccgtaggcggagccggtcacgtcatgcccggagacgaggagacgctggacctgcctgcgtggaaccgcgtcccggacctgacttggggtccccaccacaggtgggtactcccccagtggacgtggtcgtctggattccagcgtcccctcctggaatatccccgccgagaaggtgtccctgagctctggaccccattctgcctcgcgtccgggctctccgctacgtagcaaaagtccttcgtgacagcgccctgggtcgcccagcgctgaaggaaggggccacgcgt

SEQ ID NO: 34342 - DNA, 349 bp, Mus musculus
  source 1..349: mol_type = other DNA
tgggggtggggcagaatattcctcaacaccaacagccgttatatgaggttgaggctctgtccagctctttctacgacaggagcctctgagccggttctgtccaaaaggccctgctagcttgggtactgtagccaggttcatagaaaccaattgtcttgaagcccctgctttcaggcaacacggtcaagcagactggctgcagatcctaactacttgttagggagttatcagaataaagactccttagtgaaactcaggcgaggccggaggattgctctggttgccagtgtgggccaggacgacgggcggcctcatagcaggctttccggacgacttccctttataaggg

SEQ ID NO: 34343 - DNA, 353 bp, Mus musculus
  source 1..353: mol_type = other DNA
gatcaaattcaatctgagcttgccatcggtggtacagagatgggtcccataaaggtgggtcagttttgaaacagcaccgctccctcttgtaacaactctagagcatgcttcccagcagacaccgtctagggcctctagatgctactgtccccttaggggaccttaggtagcagagcgcctccatggaccgctggccttctgccgtgccgatccgagcctggccggcggggggcgcgctcccgtgggaacttgcagaggcacaggccgggcgggctggcgggcgggaccgggccgccctccacctctccacccccagttgcccgggactcccggcgcgtcgccgcggacgctgg

SEQ ID NO: 34344 - DNA, 569 bp, Mus musculus
  source 1..569: mol_type = other DNA
attttcctttcccaggggaacttagaggcaagtggatttggccaattgccactgtcctacattcatggagagggcctagggagtttttcattgcagtcctgaggaatgaactcggggtttcaaccgcctgacctaattctggaatgcctccgttctggggagcgcacctggttctccagagagcattggggttcaggggtggcctcagaggcccggctctaagaccctcctcttgtccccgtggagagctgggggcggggagcagcggccgggtgaccccgggtgtaacaggtgcggtagccgcagctgcgcgggggagagcctcgctggaccaatgcgggccgcggttgttcgtcgcctggcaaccggcggagccaatgggcggcgccagcgcggggcggggtgggatgggcgcccgccgaggaaagcggcgagaggcgggccgggcggaccgggcgggctggaggctgcgcggagccgctgcgtgccgccgcgggtgcgggcccgcgggctgcgggaggcgtgagccgctcccggagccgtgacggtgagcgggctggacgtggacg

SEQ ID NO: 34345 - DNA, 386 bp, Mus musculus
  source 1..386: mol_type = other DNA
cattttcctttcccaggggaactttagaggcaagtggatttggccaattgccactgtcctacattcatggagagggcctagggagtttttcattgcagtcctgaggaatgaactcggggtttcaaccgcctgacctaattctggaatgcctccgttctggggagcgcacctggttctccagagagcattggggttcaggggtggcctcagaggcccggctctaagaccctcctcttgtccccgtggagagctgggggcggggagcagcggccgggtgaccccgggtgtaacaggtgcggtagccgcagctgcgcgggggagagcctcgctggaccaatgcgggccgcggttgttcgtcgcctggcaaccggcggagccaatgggcg

SEQ ID NO: 34346 - DNA, 447 bp, Mus musculus
  source 1..447: mol_type = other DNA
ttaaactcatatgctataatgggtgttttaattgtcattatgagtttaatgacattcaatttcctttatagccataaagagaatttttattcctgttgctacttaaacagaagaattgttctccttccagcattcagattctcatagccaaaggaaaggcttttcttgaggtcatatctctcaagcaaaatcaccgcacagagtttatctttaaattctctttatttaatgctggaaaatcacaatactggtaaattgacaataatatcacccgtccattttacattttaaaaaataccctgtacaggagctcttggagttttacagtgaaccctactagcactggagtgtaaggaaggcccccagcagccggggtgggatcccagtcaattggctgcaagtccacctaccaagcagcaggctgggtcgcctgcccataggacatca

SEQ ID NO: 34347 - DNA, 567 bp, Mus musculus
  source 1..567: mol_type = other DNA
agaattttagcagcaaaaatcctggcctttgttgcttataactttgcttagtcaatctgtttttaaaatctatataacctcaaaaaagtacagctttctcatggtatgagcatgtctagtggctatgatgactgcttcttagcagctaccaaattatatttgaaaactttgggagggttcccgccaccaaatcctatctaaaacttcagttggtggtgatacattgaacccagcctggtctacacagacacaaataatttggtctctattacttgtccagctagaaatgtctaaacatgactaaaataaatattgctaaatattgctactttgctattacttgagaaaaagcacactagagtgtagtttaccaaaaaacaatagtgaagtagatctttattgatagttcttgagttctcttaattacaagtttgttctgaattaatatatttaatatatctgcataaagttttcagtttcttaattcaaatactatttagctaattcatacttatataagtggtactttaaatgttatttactgactctattagttgttaatatgac

SEQ ID NO: 34348 - DNA, 543 bp, Mus musculus
  source 1..543: mol_type = other DNA
gtttcacatgtaacccgacctacaggccagcggccagcggtttctcgggtaaacagacaccccagcaaggtcagccgagcacgccgcggcgtctgctgcaaacacctctttgttcgaggctggacccccacaaaggtggagtccggagactcccgggacgatcgagacggaagtcgctggcgagacccgccggggccgccgagagtcggcgggcggcggaagggcgggccccctcctcgccctcggcccacagcccggccagaggagccgcgtgtcggctcgcgcttccccccaaccccggggcccaggtcaccttcacgcggttgagcccggcctccagccggagctgctggaccaccttcttcatggccgacatggcgctcgggacagccgggccgactcgtcagtccgggcagggggcggcaggtcgcgggacggcgggggcggggctccgaacttcgtcgaagtttccggggctgtgcgcgccgcgcatgcgcgccgacgccccctccccctccccccgggacggccgcgggctccccc

SEQ ID NO: 34349 - DNA, 705 bp, Mus musculus
  source 1..705: mol_type = other DNA
tttttccaagaaaacgttttaacttcggcagtttaaacggcgtgttggcccagagcaaaccatgtcatttttcaacagcaccgacgaacctcctgtttagagatgttaggtctcaacaggactaatttaaatcttactaaacttttgagtccttctgaaaacccctctggggttccaaacgatccccgaacgcgaacgctttattttttaaaaaagcacgggggacaggaagctgtgcggggcggctcgcacctctcggcgacaggccagcctccgaccgtccagggtcccgcggcccgggtccgttacggcgccctgggccccgggctgggcgagctgcggccggcgccgccggttcacccgagggcgcctcacacagggctgagctggcgggacttgggacgtgtcacggacgccccgaggcagcgcggccacgtccctcaccccgccgtcggtcgcggacctccctccccgcgctcccgagtccgccccggggcggccctacccagcccctccagaggcggaaggcgccggccgggcgtcgggccgcaccgcccccgtcgccaccgcgcccaccggccgctccgccccttctctctctctcgcgcgcgcggggggagcccgcggccgtcccggggggagggggagggggcgtcggcgcgcatgcgcggcgcgcacagccccggaaacttcgacgaagttcgg

SEQ ID NO: 34350 - DNA, 319 bp, Mus musculus
  source 1..319: mol_type = other DNA
aaaaaaaaaaaagaattatttaatgtatatgaatacattgtagctgtcttcagatacaagccaccatgtggatgatcagtcagtactcttaaccttaaataattattatgagtattgttttttatgtgtaaatcaaggagactgtaaactgctgctaaggggcctcgcatgaaaggattttcctgcattgctgcataagcattaatcttgttctgtttagaaattgttctattagaaataatgtacagagggtttctctgtgtagccctggctgtcctggatctcaggctgtagaccaggctggcctcgaactcagtaa

SEQ ID NO: 34351 - DNA, 422 bp, Mus musculus
  source 1..422: mol_type = other DNA
gtctctttcattttaaagggaggaagcctggtcagagacagttggtgtccccaggacaaagaaagaactgttcttagaggctttgcgggacgtggagtcagtgtttgggcacaaacagaagaggctctcatctgagtcacaacattccatgctcagttgtcgattactcagctacccatgtagttaactcttttaaatgcatgtaattcatacattagctagaaacaacaaagcctttgccttcttaataattaggatctgtcctatagtagcctatgtaataggttaataacctataataacccctattctgaaggttgcttcaaactaagagcaaattcaattgagtttcagcaaaaatgttgacattataggcatttggctttgaaaggcctttgtgtctcactgtccatcagggcagt

SEQ ID NO: 34352 - DNA, 461 bp, Mus musculus
  source 1..461: mol_type = other DNA
taacacagataaggtgagtactccttggtcctctgtcttaggagaaacagagccacaagcccttatagaagtgacctgatcttcagggctctggtttggtcccaagatgactccaatctgagtctataatcatggagagacaagtgaaaaaaatacttgcagatgtatgtgtatctatctacctttcaggttcgatttcaagactgccctgatggacagtgagacacaaaggcctttcaaagccaaatgcctataatgtcaacatttttgctgaaactcaattgaatttgctcttagtttgaagcaaccttcagaataggggttattataggttattaacctattacataggctactataggacagatcctaattattaagaaggcaaaggctttgttgtttctagctaatgtatgaattacatgcatttaaaagagttaactacatgggtagctgagtaa

SEQ ID NO: 34353 - DNA, 491 bp, Mus musculus
  source 1..491: mol_type = other DNA
ggtgaattttctctccccgagtgggaatacatcccccctggcaagctgagatcggacctgggctcagatcacactgatttacaaaggggaggataaagtgcaactggtggcccaaggttgctcacatgttgctaggtaccgtattcagaaagagcatagtgcttagtacccacagatgagggtatcaggctgctgggtgcactctgcgtacgtatgcaaaatgcatgtgaatacccctgctgctggggattggattcagatggccgactgcctgaccctgccaatgcgtttcaacacttagccgtaatgcctgcgggacagcagagaaggtcaaattggaacataaaacatgactttccattttttctcaagtaaaacgagtcacagagggatcagttaccaccaaactttagaattctatggtcgcacagtgtcctggattccactgtgggaatacagtgtcgtggattccaccttgagaacacagtctt

SEQ ID NO: 34354 - DNA, 382 bp, Mus musculus
  source 1..382: mol_type = other DNA
gtactattaacaatgtgttctttgatgaacatgggatgctttggctcggctccctggctccgagtacagtcagcccagcttgttcccattaacaatgtgttcattaacaatgtgtccattgacaaatgaacggatttttttctttcatcagaaatgtatatatgatttaaaatattatgacactgctcttccagagatcttgtagccgctgcagagactgcaggtaaaatcattttattgtggctgttaaaaacaaacaaggcaaatgctttttaagctacacaaatggcttctctctgttgacaagacatctttgaaacagagaaggtctttccgctgagagtctgggagatgctaaagtgatgacctcatagtcacagcc

SEQ ID NO: 34355 - DNA, 352 bp, Mus musculus
  source 1..352: mol_type = other DNA
ctgtaatgggcctgtaccagagcagtgcaggtcctttcctgcaccctggcagctttaaaggtgcagattcacctgctgaagttctgccaatcagaggtctctgagatacagtctgtcctcagagtactgtatcatgagagtcttttaaaaataatatcttggtaatatcagatactcaatgctgaatttaatggaaatttacaagtgctattccctgattttcctttataaaagaagatttagataaggtacagaatgtttaaatagttaacatttgtgccgcagtatatgtcgtaatgtggacatcacgctaccctaaaataaaaaggtagtttatttgctttagttggtt

SEQ ID NO: 34356 - DNA, 371 bp, Mus musculus
  source 1..371: mol_type = other DNA
ataacagttttaaattttggatctcaaatggtcagaccaagctggagggatctgagcagacaagaacacctcagacttgagtctgtaatgggcctgtaccagagcagtgcaggtcctttcctgcaccctggcagctttaaaggtgcagattcacctgctgaagttctgccaatcagaggtctctgagatacagtctgtcctcagagtactgtatcatgagagtcttttaaaaataatatcttggtaatatcagatactcaatgctgaatttaatggaaatttacaagtgctattccctgattttcctttataaaagaagatttagataaggtacagaatgtttaaatagttaacatttgtgccgcagtata

SEQ ID NO: 34357 - DNA, 639 bp, Mus musculus
  source 1..639: mol_type = other DNA
gatatgtttcagaaggacaaagactttttaaacgtctttccctttcctttatttgaacttccaaagagaaaactattgtatgtgatgtttctaagagatccttaaattagactaaagagttagggctttgacattaaaatttcttggtatggctaatagcctataaaattataatagatggttactatatgatttcataattccaatctgatttctaagctttccaaatgttagaatgttttcagatgttatttatagacaggcacatatctataaataaattaattaggcagtattggtatgcaactttgattcttttgaaattatgaaattagctcagattttttcttagttatgacatgctatccattgataccttttcatactaatgttaatgaaaagttaactacttataaagattcatacagtctgtcagctgacatcctgtaaactaaatacatgtttaactagttttccacattgtcaaaaatactttttctcatttatagttactgtgttcattctcctgcatattagtatcagaacactcaaacctagaacctttagcagatattgcaagttttaaagtatgcatgctgttttatattaacaggaaacagccacagtagtggtttgcaa

SEQ ID NO: 34358 - DNA, 416 bp, Mus musculus
  source 1..416: mol_type = other DNA
ttttataggtaactgccaattttcttctagatggagagctatatcaaagaaatttcatgcttatgaactttccctatcctgtgaggttcatctcatgtgagataacgattatttccgggttaccaagacagtaatcatgaacagaaaacttttgatactctattattattatctaaatatagctaaatagtaataaaagaccagaagagcccttttacatgtggacttgatggcccagatagatgtcaggccagctcccctagcatccccttaggaggggatggcaccctcgttctaggtgcttgaggggtgccctggaaagcccagctcattcttctgcctggtgcctccatgcacgatgcgcacccctgggcgcagtgggcaaatggtctggcccatcggtagctaccaccccc

SEQ ID NO: 34359 - DNA, 392 bp, Mus musculus
  source 1..392: mol_type = other DNA
cctgggcgcagtcctagctaggagggagctccagggagcggggtctcaagctgcaggccccaagcccggcccccggtggccggaacgcgatctctgcgcccgggctgcagagcgtgcagcgggcgcgcaacccccggacctggctgggggtgtttgggaggggcgcgagcctgcgcgggcgcctctggggcgcgttccgcggccgtgcgcgcgtcccccgccgccaccgccaccgccaccagcgcctcccggaaagccctgcggccgccccaccgggccgagccccggccggccagttttggggcggctgctcggccgtcgccaccgccacccggcgctcgggcgccccgctgccgcagctgctccaatggagggtgactccagttcagccc

SEQ ID NO: 34360 - DNA, 275 bp, Mus musculus
  source 1..275: mol_type = other DNA
cacaaaataacaggtggtgggttttacaattctttgaaaaaaatcttgttccaggggattaaattgcaagtaacttcttggcttggagtccaatgtctggtctaagataacaggagattcatgtaccaaacttgacagagaccctgttgccaatcttggcctcttttcctttcaggacagaaaccaggtggccacaggctgagactggagtccaggctgtttgggtgaaggggcctggctgccggacggcagggggacagagcgagaccctgcgg

SEQ ID NO: 34361 - DNA, 434 bp, Mus musculus
  source 1..434: mol_type = other DNA
ataaataaaaagcagtgttctgcatcaaattccatttttgattttttgttgacacctgacttttcaagctcagaaaataaacttctttgtgtttgcttatttatttatttatttaaaacattttttctctgtatagccctggctgtcctggaactcactttgtagaccaggctggcctaccactgcccagcagcactgccctgcagcactcttatttttaagagaagatcactgatgtttgtttgtttcccttcaaatttagtgaaataaaggcgacatttaagatgcatttcagagattcaatacatagttaattttgctttgcatgtccatctacagcaacttgttgaatttacctaagaagaagaagcctactgaagttggctcgctgccagcgtgagtaggtagaggcaaacagaggaaaagtttctctt

SEQ ID NO: 34362 - DNA, 327 bp, Mus musculus
  source 1..327: mol_type = other DNA
ctgccataattgtgtattgtttcctagaggaaattaccaatgtgtttttacagaaataggaccagggaccctccgtctgagatcgaaaggccccgctacacagcgggcgcaaaacgcatactttgagtgcatttctgcctcatacatttgggttatctaaaacttaaaagaactcaatggagactgttacagtgaaagattatagctgtgacatcctaagataaagatttcctagattcttctgccagcaaaacccgttcagcattaatgaattaattatggatttattttaggttgtcacatattgactgactgtgtcaacgcaaa

SEQ ID NO: 34363 - DNA, 370 bp, Mus musculus
  source 1..370: mol_type = other DNA
ttcgatcttcaggaatttggaagcaccttctggctctggaatggagaagcagattccatgacatatttgtggatgttattagctaagctcaaataacagttcttaatgaaaaatgagcgcgcctttacttgaacacaaagtacattttacaaaatctataaggtgtatatcctttgttgtgggaaattctctcagcttcgaattgcactccagtgacagtggagcctaaggcttgtggatatctgctagaagttgaattattcatttggaaactgctgctcggtggccaaagcatcagaggaccgtgcagcagcctcaccctgtgcgggcagaggaggaaggggcggaggtcacccagccctccaccctg

SEQ ID NO: 34364 - DNA, 346 bp, Mus musculus
  source 1..346: mol_type = other DNA
cattttttttttttttaagattagcacacaaagttatgagtccccgacacatgtagattctacacaggagaagaaaaacaggcaacatttttctctttgaatctgggtgtgtgtttgagacggactcactctgtaggccaggctagcctccaaccattaaaggccctttgtcatacaaaccaattccttttcactgagaggaggtctgagtgagtaggtagctgcccggctcaggtgccctgtccttcacagggaggggacctgaagcccgcgccgctaggcggaagcgctgctaccattggcccagcagccgctgtcacctgcgcggagccgggcccccaagcgc

SEQ ID NO: 34365 - DNA, 525 bp, Mus musculus
  source 1..525: mol_type = other DNA
taaaaaattacaacaaatcgcaacaaatgttttttaaaggtatgaaatatactaatattacaagggaatactaaaaacttgtttcaaaaaaatctttgtcaacaagtaaatacttaaaattaggggaaatgtgttttgaaggaacttgttacctaactgcggtcccgggtgacagttacactgaccttttccgtttcattgtgataaggaatggttcttaagtcacctatttatgttaaaatactgcttttcaatgttataacagtccttttaccatgtgacattttatatagtggctccctcacttttcagatcgatagaccccagaaattttgaaaatgacccaaattatttgaagattttaaatgtaaacacctcatattttagttctgcacattttatagctaggtaacttgaaattgaagttagaatacctactgtaagttgcatctataattatttctgttgcctttttacctctaatggagtaaatgtatctcagtactttgcctagaggccgctggg

SEQ ID NO: 34366 - DNA, 647 bp, Mus musculus
  source 1..647: mol_type = other DNA
cggcggcgcgggaagcggcggggaccgctagccaggcagccggccctccctggcttgcccttgagcgcccagaaccttccacgcgcctgggtcgggcggaaccggagccgagggagccggggcaggcagggcgcacggggcggcgaggccgcgcgcgcggggcggaagtggaggccacgctcggggagagcgccacgacaacgggctcggcctcgagccgctgggacccctcgtgagaagacgccatctcctcgggcggcagccgcgagtgcgagcagggccggacctgccccgccggcggctctcgggggtcggggaggggaagccgccgcgcggtcggtccacgcttacctgccgcgctctctgcagggcatctttgaaagcgtcgttaacgactccgccgccgccgccgccagccgagccagacgacggcggaggcactgtggagtagtcggccatacccacgccagccgtgccgtttcctcgcggagggaggcgccgctctcgcgcgagacttgaccgggctcccacgagagtagggtctctctgggcgcctcctcgcagcgcgagggccattgttccctcgcctcggcggctgaggcagtggcgcccgggaagtgtgccgcccgcgcgggcctgacgtcgtc

SEQ ID NO: 34367 - DNA, 355 bp, Mus musculus
  source 1..355: mol_type = other DNA
tctgctgatccggggccttgttttgtgacacaaacatgctcctcatgaagcggggcctctctttatccaaagaggcctccagtgtagcacctctcctcgaggttaaagaggagcggcagacagaacactgtcgccccattccttccgaaggaaaggaagcgggccggcaggttgccaggaggcagcctgcggtggcagccagcgcccctctccaccctctgctgcgcggcggtgggggtggggactggcctggtccgggaacagctgcagcgggcgctgggcccgtctggaatgcgggagccgctgcaccaggacttgctgctggcgcgcggcggccagcgggctcgggcggcgg

SEQ ID NO: 34368 - DNA, 700 bp, Mus musculus
  source 1..700: mol_type = other DNA
tttttgttttttgtaagagatgtaaccaaaatcttacaatgagctgttattcagtgtaactaaggcttgaaagggacatttttaaaggctctattatgatcaaagtgtgttcatatttaaaagagaatttaaatgaagcttggtcaaactattctcaagctatctggtgcttatagtatagtctactgagtaagtccacgggctccttaagctcttcaggatttaaaccatgaaccttttattctctgtatatagtcttaaaggagctgaagattatcacaactacttatttgaacttctgaagtgaaatacaaaatttatatattcctatataaatatattaaaatttaaaatataaattacacatatatgtatctatacaatttacaatattacaatatatacaaattgtatctttaaaagcttatattgataaaatatatcaaagggaaggtcattaaaattcatatacaatattgtcttatttatttatatccctggctgtcctggaactcactttgtagaccaggctggccttgggcttaaaggcgtgtgtgccaccacgccagctctggctggcctgaagctttccatgcagaccaatttggcattaaattcaaagagatctgcctgtctctgccttccaagtgctaggaataaaggtgtgtgtgctaccacacttagcaacatcatcatcatc

SEQ ID NO: 34369 - DNA, 466 bp, Mus musculus
  source 1..466: mol_type = other DNA
cattaggctagcatggctaagatattggcatatatgacaaatattagaaactctacccgcaggggcgtcaggagcatgacacgttcgtgacataaagggcggtcatactttcgagaactaagggcccggtggtctggttcctccccgcttgtgaccggcccgggtggagacatgggcagaggcagctcggcgccccggagcatggtgggctcccgccgccgggccgcagacggttccgcagcgtcgccgcggacgccccgcacgccccgtgcgcgcggccctcgggctgtgcggccgcgcgacactgttgcgtgacgtccccgcccgacgacgtcaggcccgcgcgggcggcacacttcccgggcgccactgcctcagccgccgaggcgagggaacaatggccctcgcgctgcgaggaggcgcccagagagaccctactctcgtgggagcccggtcaagtctcgcg

SEQ ID NO: 34370 - DNA, 346 bp, Mus musculus
  source 1..346: mol_type = other DNA
cggctatcagagttagcctcagactcacagagatccgccccacacagctctgatggttgatttttaaccctcaatctaggttgctaaatttagtggaagattaaaaataaaagaattaaaataataataatgcatcatttatatatggtccattcatcctgccagaaattcttaatttgggatttactttaataaataatggtgctgggattaaaggcgtgtgccaccacgccttagctctggccattttttattctctgaacggtcctatagtcctaagaacagcaggctaagccagagcccactgagcggcctcgcacgtagcccctcacgcagtccgcccgcg

SEQ ID NO: 34371 - DNA, 548 bp, Mus musculus
  source 1..548: mol_type = other DNA
tatttagatacatgctcccactttggggttaatcatatagacatgtcttactctgtaatccaggactttttcagctttgcagtttgaattcacatattataaaatcaaactggttaggaccactggctgctcttccagaggacactataatagaaataattggaaaaatattaaaaagtgaatgtaacagtcacataagtggaaggttttttttttttttcctattgctctaagtaccaagaagatctcaaggtttcagtaactatttcatttgatcttgatttaacctagtggaaaatggtagagattaatttcttctttgtatatatggcaaagagaaatgcatttgcttccagaaaatgtaggtcttaaaggagttaaagcaaggaacttcagctttccactgcggataatgcaccggaagtggtgtacacgtcagctcaggttgcctgtctagcacaggcctagcggagaaccgaggccaggcccgaggccccgccccggggcgtgtctccccaaggtcccgcccccagacgcccgcagcggcc

SEQ ID NO: 34372 - DNA, 420 bp, Mus musculus
  source 1..420: mol_type = other DNA
tctgagttgaattggagacaaccaaatacaagtccacttctatgatctaataacttacctcagagcttcacgtagttccgggttgagccatacttggtgctggacacaactgtggctgcctttaaagagacttcattcttggcgcctgcgtactgagcgggcggcggctggcgcggcagtccggggcgtcgtgcggaaagcgccgcggggccaggcaagggacgcgggcggggagcctctccgcggatcacagcacgcagcgggctgggccggtgaatcctcccgcccgccggccggccgggtcgggatcgctgcagcggccgcggccaccagtaggtggcgcgccgagcgcccggctcccagcgtctcagagccgaggaaggaggggaccggaaggagccgccgctgctgcgggaagtg

SEQ ID NO: 34373 - DNA, 320 bp, Mus musculus
  source 1..320: mol_type = other DNA
catctctcaagataaatcttacgctaaggatttcaggccttctactcaaatgtttaagtaaaatcactgaaaggccattaacttaagaatatatgaattctctgactttttcccccctggaagagctcctggaggagctcccctggctgccctggctgcgttgcgggctggggagtgactgcagcccgcgcgtccccacccccgcgccccgcgcccgcccgcgcagcgtgactggcggccgccgcagcgagctccggaggcgcgggccgagcgcgcagagccgggaggcggcggctggtggcgtcggccgcgtggtcctc

SEQ ID NO: 34374 - DNA, 882 bp, Mus musculus
  source 1..882: mol_type = other DNA
ggcgcctgcgtactgagcgggcggcggctggcgcggcagtccggggcgtcgtgcggaaagcgccgcggggccaggcaagggacgcgggcggggagcctctccgcggatcacagcacgcagcgggctgggccggtgaatcctcccgcccgccggccggccgggtcgggatcgctgcagcggccgcggccaccagtaggtggcgcgccgagcgcccggctcccagcgtctcagagccgaggaaggaggggaccggaaggagccgccgctgctgcgggaagtgggcggggacccacctggaagcgccgcggcgccgctgtggcgcttcctgcggcggagggcgctggagccagtgcggcggccgacggcggccacgcgggcggcgcctcccggagcggcccgccccacgcgagaggtaagcgggatccccggggcgcgtggcggggccggcgcaggggcgggagcggagcgcggagggaaaggcgcgcgcggggccggagcccttcagagcgagcgagcgccgggagggggtggccgaggcggcggcggcggcggcgcccccacgtgggccgggcgcgcgcgttcgcggctgagggggcggggaggcctgcggaggcgccgggcgcgcgcgcggggctcacgtgacggccacgtgaccggaggccaggccggctgagggctagcgcggtcctccgtggcgtccggagggcggcagagggctccgcctttccttctcccctcagacgactcagaggaggaatccagggcggggaaggcttgcctctcctcccgtttgcccgcggcctcccagtgcgaggacgacgccatgttggctccagcgcacgcccgcccgcgagatgccagcgggtcggtatcgcgagatct

SEQ ID NO: 34375 - DNA, 519 bp, Mus musculus
  source 1..519: mol_type = other DNA
tgcacacacattgtgcttaggcatatatgtaggaaaaatatccatacacgttacataaaatccaaaaactaaagttgttttgtgtgtgtgtgtgtgtgaaacaaaaaggacacaaaatggccatggtagcacgtgcttttaatgaggtagggcttcataatgagaccttgtctcaaaaaaaattaaaagaaatattcaaagaataattaaaatggatgagtaatagtgttacaacaaaaatttttttcaaaattagaaaacagaatgaccagaaatactgtatattttttcccttctttacaggcccacttatggaagccagaagcaggtgttgggtgccatcgtcctttaagatttagaaatcttggacaacatcaaatattgtggatccccaaattatctttttaaaatttcctccttaaatattgtgtctattttacaaaacaaacctagaaacatagctgagtaagtaattctccaattaggttcccgtgcacggcagcggcagcgctgctttac

SEQ ID NO: 34376 - DNA, 625 bp, Mus musculus
  source 1..625: mol_type = other DNA
gacaacctcttcttgtagaaatgattcgagtccattaaggacccagagaggaccaggttcttgctcacctcttgggtaaatctgcactgctctttaacacagaccttttggttgttgaaattttaactgagttctctaaattccaagatagtagtagtgagtagcaaagtcctgtgcatcatactctgtacataggtgtacacacatgaacattatctttatacattgtgtacataagcattttacggaatacaacagtcacagctgcatatgtttatgtgcccatatgctacacatgctgtgcacaatgtcacattgtgtgaagattgtggccaagagtgttcaatgtgttttcaggttgacagacgatcaatcattctgcagtgcccaagggctagccctgggcacttccagctgctttcaagaatcctgtgatgggccccatgcctgcatcgcagatcctcaggttaagcagatctgggtctgctgcaagccgggctttacatacctccatctgcagaagggtttgcgggctgcacggagggcacgtgactaggggcggggcctcgtgtggcgccagccagtggcggggctcgggggtggggcctgagcgcgcagctcccgc

SEQ ID NO: 34377 - DNA, 435 bp, Mus musculus
  source 1..435: mol_type = other DNA
acagtgttaagagagacattaagacgactatgttcactgaataatgtcacgtggctgaaatacgttttcagctaaattagaggtctctaattgcatacttagagcaggctactgatctgaactcagcactgaacaatgatccagcttttaactggaatccaggtcctgctaggatgatgaatgggatgcaccgagtgtttccaaaactttaaaatcatttaaatgatattacagcggcgtaatttatgcaaatttaaagagatcgattgacatttgggaggctaacttgtttctttattaaaatcacaaacctgaaaatttagtaaattttcaaatggctaccgtgttcagaacctttatggtaacagtcttgccccagaaattccacttcactgagaagatctctaggacccagcaggcggcggcaggcggcag

SEQ ID NO: 34378 - DNA, 482 bp, Mus musculus
  source 1..482: mol_type = other DNA
tacatgtgtgcataagtatgtatgtctcactgtgtgcatgtgctcagagggtaacttgcagaaatccattttttctggtgtaatatgcttcatctaagatatagaaatacagaaaccagggttctccatttaaactatatgtccagcctagatttgaagttttaaagggctaaaaaatttaatctatatccttatattatgtaagtaattgcatttctaatgtacttaatatcaaaccatgtgtttattttttaaatgatattccaattatatactttctgccagttgcagaaaaaacattccaaaaccacatttcgagattttatttaccgtgtggggatggcagactccctcctacacgggaaccagtgaggcctaaggcagcactcacgcaacatgactaatcaatattaatatgtagtgtgatgtacacagggtgcttctcacacctgagagacatcaccctgctgccttccctctgg

SEQ ID NO: 34379 - DNA, 380 bp, Mus musculus
  source 1..380: mol_type = other DNA
gtccaaccaattttgaataattgggcgtcgtcctaagcttttattttattcaaattcagatgagagcctgaatttatgtaacttaggcctttatactttataggcattttaatttccctagtgatatgtgcaaaggcactaaactggctcagagctcagctccgcgggaaacagatgatgtaaatcatacgtggagacctgaataacaggaggtctttttaaagttttagaaagccatctgtttaaagatctatgttagatatgcatgcattcatcatttattcaatgattaactatttaaagaatgtctaatatatattccactatggtaggcacttcagatagtactagacggctaaccactctgaacagctcctcgg

SEQ ID NO: 34380 - DNA, 465 bp, Mus musculus
  source 1..465: mol_type = other DNA
aaccttgggcagccaagagtctctgcatagaaaggcttatctgaatatggctaagagtagcatttttttaatgaatataagcatagatattcactttaaaatgagaagtgtggcacacaatttgtattttataaatgaacttataactagttagttgcattgtttcagttgtgagttcaaggcccaggactttaaaaaaaggttaaaaatgaagaggttaaaccatattaatttaccagcacagagtggaaaaattaaccttattttaatgatttcagggtaacagacactctataactgatcgctttcccagtgctgggataacaggtctgcactagcactccgttgacatcaatgtccaggagccggctgcacggccgcggggcgggcagagcgtggccagctacgtagggcgtgggcggccgggcgggcgcgtgtgcgcaggcgcgcgggccctgactcccc

SEQ ID NO: 34381 - DNA, 405 bp, Mus musculus
  source 1..405: mol_type = other DNA
agcaaagtttacaaactcatgagcaaaatttcacggatgtcacatctatataagtggaaaaaatagatgaaataaacactattgtgctttggtttgtactgagatgtcttttaaattttagctctcccgggcagcccagaacgtgaccggtgacactgggcacacagtcttcttctccgggccaagcacagaagtttaggctcaggacgcatgcgcagagggccttcaggccactccctcttctggcccaggtccggacccgagacccaaagaccacgcccaaggtcttctgctctcagccgaagtcagtctgagagctcagacctcatcccgaggtctgcagactttgacccgcacgccaagccacgcctcctgggggcgggacccccgtccgttttgcttgct

SEQ ID NO: 34382 - DNA, 422 bp, Mus musculus
  source 1..422: mol_type = other DNA
ggtcagcattagttgctgctggcccctccactacccctaataagacaagggagtaagattgctcttccttgtgtttctctaactaaggtaacaaaaaacgtttctcttttgcttatctaaagggacaaataaataaaagtaattaaaaaataacttcttacaaaatttttcttctataaacaaagtaaaaattttacacttaagctttgtctagaattaaagaaaataaaaaaatcgtaacatactttcgtttttcttgtatccttgatttcaaatctagtcgcgaatcaatcattatcttgccttacctaagacttgggaatccagaagaaacactgaactcagagtaagttgtctggtgcagataaagatcttaacatgggaggtgaggctgtcccttcaggaaaagacttttccccctt

SEQ ID NO: 34383 - DNA, 499 bp, Mus musculus
  source 1..499: mol_type = other DNA
tattagatagattgtgactattaaaccacctctacagtgtagatttaaaatcccagacatttagcttttcctgttgcctgggggcagtagcaggatataccaacctgcccctcgttagcacccaggaggggacagttccagggaacttgaaactttcccagggcctaagtttctgtaggttaagaaatcagggctaacccagataggcaaactttatttgccttttcctggcattgggacccgagcaaggtcacctgccagggtctggtgacaggccggtcctccagcttaactccctcaggaggaccagaagtagctgacactccagcgcatcgcccaggtgtggtctcagtcagctggggaccccggtgcccttgagagaatgccagactggggtcagccccgtcctcagccgctaccaactgtcgctggacgagggtgccgtgccagggctggcggcgcccgtgggacggagggctcggctgggttggcgctccgg

SEQ ID NO: 34384 - DNA, 338 bp, Mus musculus
  source 1..338: mol_type = other DNA
tcagtctatgcagctttgaaagatcctgttttagaaggtttaaaaaaaaaaaaaagaacaatataaatttggattttctaaagtaaattctgcttaaaaatgaaaatatataaaatatatatcatattctattatgattatattttgtataatcataattataatatgttttcattatagatattttacacatagtatatacatatatatttatacatttataaatatattatacatatatgtgtatgcatccctcatatgcatatacatatgaatgtgttgtctgggacttaaataaattaccctatttcacgggccaccagggggcagcgacccct

SEQ ID NO: 34385 - DNA, 235 bp, Mus musculus
  source 1..235: mol_type = other DNA
tatccagtccaagtcttctggctatatgacagaatgctgcttgctacaagctgctggacacgaagtccacacagtggccaagatgtagttaacaatgtattaggtttttctaccaccggccgcctgctgtgcagttctccagtgcagatgggtgacttaccctcctctagagtaggaaacaaaacctcctaagctccagaaggtcttccggccaccgtggcggcaatatggctgc

SEQ ID NO: 34386 - DNA, 215 bp, Mus musculus
  source 1..215: mol_type = other DNA
tctgggacttaaataaattaccctatttcacgggccaccagggggcagcgacccctgaagggacttggagactcgagctcctccagtcccccggcccgggcctcaccccgtccagaaggaggatgcgccctgcgcaggagctggtggtgaaaaactcttcccgcgagttcaggagcagccgaacgcgcagccatattgccgccacggtggccgga

SEQ ID NO: 34387 - DNA, 464 bp, Mus musculus
  source 1..464: mol_type = other DNA
gagtctatcttttaaatatgctgaagtcatcaacctaagagattgatgctgactaggtatagttactataaaatagaatctacctaaacagggaggaacaggccaggccattcccaatttggggagaggcatttgtgagcttaagaattggtgtcatgaacataattgtcattacaggacagggacaaatgggcttcattcctttcttcagacgcaagtgcagcacctcagcttactcaggtagtctcccggcagcttcctaaacaccaaaagaaggtaattgggaaatgattttctgggtcttagatctaggaaaatcctttgttagtttttagtaatctaaaatagatttgtctcgatcagggacaattaattcaccaaaagttatcaaatggtcaaactttatgttttctccctggttggcagagccgcctgggagggaggcagactcacaatgagaaggt

SEQ ID NO: 34388 - DNA, 303 bp, Mus musculus
  source 1..303: mol_type = other DNA
aaagctaagtgtgactttcaagattggaatttaaaatatatagaaaataaccaataagtttcctatgttatttccatttaattcataattctgcttattgcccagaaatgtgtaagaaagcaatgttgaaatgtttttctgatcactgttgttcttatgataaattggtatttataaagcactatgtcgtgtgtgtgtgtgaaccctagtccctgcagatacacatgcagccaaagatgccaaacactggctactcaacaactgaaatgcttgctgtttactttttagaaagactatcaacat

SEQ ID NO: 34389 - DNA, 460 bp, Mus musculus
  source 1..460: mol_type = other DNA
actataaattacaagctctgactgctattgctgtggagtgtattgtgaaacagactttaaatacagaattaaatgctgaggtcaaggctttaagtgaaaaactaagcttactcagaaacttaaaagttcatagggagctgctatgcagaattctgagttaagagaagcttctcaagtcaaatagatttaaagattaaagagatcaacctgtagtactcgatatataaccactctatgaaagtgtattaagtctttggttgaatctccttgaagcaagtgaacacaacagagtgtgcagtttcagtactggtagtctggcccaccatcccacagagccgagcctctctctggttcaggggcctggcctccctgggaggcttctgacagaccgcgggttgtcagacacgatcgttgcccaggaaacgccgcttgcgcgggcgcttccagggccgcggtgacg

SEQ ID NO: 34390 - DNA, 383 bp, Mus musculus
  source 1..383: mol_type = other DNA
tttattaacgatgataatgaactcattaaatgacaaattgcactttcaatctaatcagcaaaaatattaataaggtttttaacaagttgttggatttaatagttccaatcattctggtatccaaatataagaccgtacattttaggactcataaatatcaatacttatcaaatttaaagccatgattgcctccgtattggggtttagagtggctggcctggccaggacggactgcgcggggtccttgggaaggcgctctccgtgcaggggggagaactctcagaaaatctgcgcagtttccgcagggtggcttcgcggagagacgccatggccgacttccgcgtcaccgcggccctggaagcgcccgcgcaagcggcgtttcc

SEQ ID NO: 34391 - DNA, 504 bp, Mus musculus
  source 1..504: mol_type = other DNA
ttactttaaaaaataagcatacagtatatgaactaaatcttttataaagaattgtatcaatactatttacacatattaaatatttttaaagctaagttttgaaggagagatatctcccttcattaagtgagaccctatgttctcacaggaaaaaaagtttatctttttgacgtgaaacattaggcaacgcgcaagcccgtgggctatcgagccgcgccgagtcacttccgcctctgcgccctagccccgccccggaaacggaagcgccttcagggtccttcggcctgcggagaactcggctgcgatggccgccgggccgggctgtcctcacaacgcctgctcaggaggcgaagcagagcctcaggacgggctgctggctcctgggcgtcgtctccgcaccgctgctccaggctcgcggtccggcggtgtgagttctcccccaccccagggaagggcgggtccggcggcgcgaggacagcccggcgcgaggcccccgcggctccg

SEQ ID NO: 34392 - DNA, 513 bp, Mus musculus
  source 1..513: mol_type = other DNA
gaatagaactccaggccgggagtcacagtggagacactccatgttgaagtctctctctctctctctctcacacacacacacacacacacaatgtaaacaagttagttattaataaatataaaatttttgatctaactaaagggtggcatattttctttgatgtatgaattccagaatactcttaaaatttaaatgtatcattatactgaaatgtcactcagtgaaaatgtgaatttgctatgtttaaactgacattatcctagaaaagtattttaccaatatgagtttggaattagtccaaagtaaaataaggcaatagtttcaggaagacagatgtgagtatcatatgtatatacatatgatattgatacatatacatatatatatttatatatatatattaaataaaacaaattcaatgaacctagggggcgcggcgccaggtgatcccagcccacaccgcccttcgcgcaccgcccctcgagctccaaggcgcgggaggagcctcgcgcg

SEQ ID NO: 34393 - DNA, 323 bp, Mus musculus
  source 1..323: mol_type = other DNA
gttgcgcctgcgtgtcgcgcgctcccgggcccagcacgcgccctgcacacgttctccagtacgcacagactggcagtttattaacagcgctattagctaggcgtcatgatggcgccgaccccaacttgagcactttaaagtcgggggcccgagcgaaagcaccagagggcaggcctggcccttatgccctgacttcccagccccgcggctcgcaaagctctctagttcgcgctgccaagccggactagcatccctgggcggggttgctacggaaacggccgcttggcaacgcgcgcgagcccgggggccgccggccgctgctg

SEQ ID NO: 34394 - DNA, 483 bp, Mus musculus
  source 1..483: mol_type = other DNA
gcagaggggacctggctccaaagtggcacctgggaaagcgacccctgccccggggtccgagaagcccaggaagggtcatgttttgctcgtgagcaacagcaggattcactctgggtgtaagtgtagagagggcgcgcggtccctacctgagcacgcaagggaagtccacgctctgcccggccgggaggcaagagccactggttcgagcaacaagcgccctgcgccaggagcaccatgtccgtgcctgccaggctgctcgctctccggcagcgtcggctcccaccccctgctgctggcgaggctgcccgataaccaggcggcgcgcgcaccgcgctccacctccttcggggcgcccggccgcgtccggagcgtggctaatccctggcggccgcacaccgtcctgcgaggctgcgagcagagcgcgggaggcggcgcaggcagcgcggggcgcagcagcggccggcggcccccgggctcgcgcgc

SEQ ID NO: 34395 - DNA, 578 bp, Mus musculus
  source 1..578: mol_type = other DNA
tcaatatgctaaatttgaactcatttttaaaggagtcttaagctatcagagcatttaaaaacagctgtttgaatgtaataaacagcctttgaattccaaagtcacaagtcacgtcacgtcgtcttcctacgtcgggaggttgacaaacagggtttcagcctttaagctagagttcgtaactgccgttgacctcctcctttacgaaggcccagagcaccaggtcagagctctgagtctgggtctgaattcagccgcagggcccggcccagggtggaaccctgtgcgagaggagcgcgggcgctgcccggaccctgaccctccgcggcggcgtttcctccgaagctctcgcgagaggagccggggaaagatggctgcgccgggtctttccgagtgaggaggaggcggcggcggcggcgccgggcgtcgtgcggtcgctttcctcgtccgagacgagggccgccgcctccgggagatgcgcgtgtcgcggacccgcggtcgccccgggagttcatgctgcgtgctaggctcgcggccgccgctctaatcgcccggcgccgccgccgcgccggctcggcccg

SEQ ID NO: 34396 - DNA, 485 bp, Mus musculus
  source 1..485: mol_type = other DNA
ctcaggctggcatggtaacccgttagtgtttcagaggctacccgcttcccctgaaaagcatactgattgtgtttgctcttttaaaatacaccttccaaattcgttcaacagtgtttcaaagttttagtgtgtctgaagacagctacagtgtacttacatataataataagtaaatataaataaatcttaaatcggacaagtttgggagcaaagcttgggccttaaggcctgatcttgccacagctgtggcggtcctcagatccgagggaagcacctgcctgcgtgacccttgccggaactctggggccacgcgaggctgctggctctgggctgagtgctgcacctcagtgctgaggtgtcccacgtgggcactgctctgtgccactgggaggcggggcaggaaccctccactgccgaccaataagcagggccgctgcctagggaccagcgatgattggttgcgtcggcccctccccaccctggat

SEQ ID NO: 34397 - DNA, 509 bp, Mus musculus
  source 1..509: mol_type = other DNA
aattatcaatcaagacaggtcttcatagacgttcttcatagagaacatgatctaaataatccctcattgattgtgtcaacttgacacaagtaatcatcacattcagtaagcatacacataatgtctttacttagtcaaccttacagatacataagtacattattagaagtggaagattttaatcaatgcaagtagaaaaaaatattacagaaagaatgcttcacttctcaacactacaaaggtatttatttatacttagtaatatgtagatttgtgcttgtgttctcaaattcatatactccgcagcatttactctgaattagtacttaggataaggagtatattttcctcaaggcgaatcaaatacctgtgggtgcacaggggaccaagaggatgttcgcgcgctgcctcaccttcgctgccttcagcaggccctggggaacagaggggcctctgtccttgccctccgcgtggaatcccgcacgagggtcaaacctagggatggctgg

SEQ ID NO: 34398 - DNA, 308 bp, Mus musculus
  source 1..308: mol_type = other DNA
agaatctgtaattaacagtgagtgatacctgttattcgagatgtgcttaagaactatgtcactgaactagtgagtagacctagcaagtcaagtattggccaagagttatttggagatttgtaacaaataaattagcctgtatgataaatgactaaactcagaatttgttttgaataacaaaagcagtgctgttactaacaggtggtatgctgaccgtatactgtaatatattgaaggacactgaggtggctcagctgggtgggcgcagccgggacagttgcgggagcgggcgcatgcgcgggcgggcg

SEQ ID NO: 34399 - DNA, 482 bp, Mus musculus
  source 1..482: mol_type = other DNA
ctggacacaggattcacggccctgcccacgttagggaattatatccccagccctggtaagcaggaaatcgctacttattaaataaaattttcttttttgtatttacaacaaaactacgcatttaaattttctttgctgtagacctggctgacctccaattcaagagatccatttgccgaagttatttttaaaacttcttaagactggattatcggtaaattcgaagtccgagcccttcaccacactgtcaggtgggatcaattcgatcaccgcactgaactcagcgatccccaggcctggcgcccagggccacaggccgcgcctcaggtttcgacgccggttgggtagcgcagccatgcccgaccgcgctgtctagggagcccatcttacccgaaagaagtttctcctgagggagggctcgtcggtcctgcggtcccgggagctggcggtgacgacatcagcgcgcgcagctagccagccat

SEQ ID NO: 34400 - DNA, 394 bp, Mus musculus
  source 1..394: mol_type = other DNA
gaagttgggaaacacttctcattttttgttccttgggcagcctgcaacctgcagcctgcaacgcaggcagggaggaaaccccgaggaggcactcctggcggtctctttgctgaggtagcaggagcggcagcctgcggagccacgcgcagcgtcactgaactggtgcgggagcacccagcgcacaggcctggagccgcggtgctggcggattcccggcgctgcagaacaccgtgccgccagcaggagcgccccgggctggtgggagaacgccgggggagcccgcgctgccccgtgcgagctactccaggcaactgagggacctagagagctcaaggaaaatctccttgacatttttcacactttgaagcagctgcagctggtcaggcgcgagcca

SEQ ID NO: 34401 - DNA, 507 bp, Mus musculus
  source 1..507: mol_type = other DNA
caactactttaagagaatgttcctttttctatgaatttctactataaaggttaatttccagactttttggtgaccttttctcaacaacgacaacaaaaattcataatgttttcactattctgtgcaaatgatttctatgtcattgttattatataaatcactaccttttctagaaggtgatatttacagaggtgtgaacacacaaatgtatgtatcttggtctaaaacagtacaactaaagacaactgatttttaaacagtaataattcatcttaattgaaaaaatcatattaaatcatggcaaatatagtaccctctaacaggtagggttttgatatgtcaaataggtatctaagctgctgtgtgtgtgtgtgtgtgagagagagagagagagaaacccagcctggcttatattcaagaagggagagtcgtttctgcctttggttctgtgctccacagctctccttagcatcatgtgactcaatggcgccgccaatcaaatcagca

SEQ ID NO: 34402 - DNA, 479 bp, Mus musculus
  source 1..479: mol_type = other DNA
acaaaagttaggtttaaaaaagtgtcctttcaacaaattttgtcattcagaagaagttttacactgtttcacaatgctttttttcttaaaaatgtggttttccaaaatgctttgtgtaaattaagggaagtctccttaagaggccaccattttccagataaagcagtaatcctctcgatgtttaaccttgaagacttttcgtatgggagttcacccaactccaagtagcatctgaatgtcacagtccactggcattggagagaaaagggggaggcccctagccctatcacttcgaagttgggaaacacttctcattttttgttccttgggcagcctgcaacctgcagcctgcaacgcaggcagggaggaaaccccgaggaggcactcctggcggtctctttgctgaggtagcaggagcggcagcctgcggagccacgcgcagcgtcactgaactggtgcgggagcacccagcgcacagg

SEQ ID NO: 34403 - DNA, 320 bp, Mus musculus
  source 1..320: mol_type = other DNA
gcaagtaagctgggaaaacacagctttgctgtataaggaaaagttgttataaccatttaaatttaaatttatcccttagttagtgatatctgttgacatgtgaataaaatggcattatttcctctaatgttgttaacaatagctaacttttatcaaacagtgtcctgtcaccatgacagttacaacataatgataatgactgtactttctctaaccaggtctagatcacttataataaatatatcttttagtaattgagtaaatgaattacagtgagctaaagtattgaaagccacttttgttaccttccatcagctgag

SEQ ID NO: 34404 - DNA, 542 bp, Mus musculus
  source 1..542: mol_type = other DNA
taaatgttaaatttaacatggtgttatatttcttttttgaggaaactttcagatatcttccctcaagtacataatgaaaatgagtaccttcaaatttaaaatttgtcaatgcaaggtactttctattctggcaaaacagttaacacttttatctcaaataattagacgtttcagatacataaatttttgttggaaaggattttacagtttgcaaatagagctctaatttgatccttcatctcaggccaaatgttgagattggcccttcatttatggaaacccgaaatgacacatataccacatttaaaaaaaaatcaaaattatattaatcttccctttagtaagaaagtgaggcagaggcaaaggatcttgtactcctcctcgcggtcttcaatgaagagcagcatttcggccctgggccgggccgggcagaggagcggaacgcgcctggggacgctcgagccgggagccagccagccgcgctaccggaagcagcgacagcagctaccggaaggggcggggcgaccgacggtcctacaccc

SEQ ID NO: 34405 - DNA, 324 bp, Mus musculus
  source 1..324: mol_type = other DNA
aactggtactatttaacatgtatactacctacccaactaaagtcctttaggctttttaaatgcaagctgtgggcttgcttaaacattcactcaacaaagagaattgaacttggtcccagttgcattcataaaaaacaagaattttaaaacaagtcgagttttcaatgaactttaaagcgtttagggtaccagaacagagaccttatttcttctcttgttagctgttgccggggcaagctgcaggccagacctgagggcgggtagccagagctggcgggagctgagatccctgaactggcaggcgtgtcatgtgatccgcttccc

SEQ ID NO: 34406 - DNA, 429 bp, Mus musculus
  source 1..429: mol_type = other DNA
aatatgtaaaattattacatgccattggctttttaaagaattttaaaatgtttttttttaatcacttcatgcacccgtgaatgaaccccttgagttcaagcttcttttacattaccttgcaaagattttgtttttcaatataaaaatgctcttctaagtcactctctccaataatgctgtaagacatttagttattttcagactaagctggccttgatctcagagagatctgtctcatgcctatctataattcacatctagactggtatattgaatttgcgcaggcgcagaggccgggaactagtccggctttccgctccgggccccgcgaccaggacaccacgcctgcagcatggagaagtccatggggagctcgtgccggtttccttttgggtgtaggaccgtcggtcgccccgccccttccggtag

SEQ ID NO: 34407 - DNA, 330 bp, Mus musculus
  source 1..330: mol_type = other DNA
gctcacaaatgttagtcttccttcattagtaacaaatgacagctgtactacaagagtgactgaggctaattgcatatcttggttcagtaaggggcatttatcaagtcaaaatttggtttgaacaagcaatcttttatgtacctacagtatgccaagtactgtgtacacatagtggtgttaccattcttgatgatgttttgattgttaaagcaaactctctggaagctccaaacacacacagagagaagacacagtgcattgagtcctcttccacgcagccctggggagaatgttgtttccgaggctaccgccaagtagctgggacctctc

SEQ ID NO: 34408 - DNA, 375 bp, Mus musculus
  source 1..375: mol_type = other DNA
caagaaaatattctttacatacaacatggctgtgttcaatttatccctttagaataattcatctggaacatgttaattcattcacactgcattgatttctcttcactcagaaattccttttttcacagtaaacttaataactttttgttatttaaactgaactagatagaatcaaatttatttttgatttatttctgtcttactttttaaaaaaagatgttcattggactgaaacttgttaccagcctcaaactcaactagaaagttctatttagagggggaagtaaaagtattctaaaacatcagcatttgtaatgaaggaaattatataaactcatttgaattctgtattttacaaaacaaatgtgctacaca

SEQ ID NO: 34409 - DNA, 500 bp, Mus musculus
  source 1..500: mol_type = other DNA
cagatgacctgagttcagtacaaactgcttttaattcaaattccaggaatattgtggtcacataatagacaagagcttttgaaaattggttaaaattgataagataacattctcaagctattaaaataatgacaaaacttatagttgaaaaatacaggcattgaactggttgtcttataaaacaaaatcctaaaagaacgacttttattaaaatgaagtgtaagaactggtctgcatttctatagctagtgagcagttatctggcaagtgatttctgtatggtattggaaatagcccccacaataaatattctttacactgaacattgaattttcttaggaataatttatccctagaattgttcatgtctggctaagaaaggcccacattctattggccaatctgttccattgtaggtgacacttaagctggatgtagaattattcaccagccagtgaagcagtcacagttctggatctatggctctgtgtgaggcctgt

SEQ ID NO: 34410 - DNA, 431 bp, Mus musculus
  source 1..431: mol_type = other DNA
atttttataaaacaaaaaattatagatgggtaccgatatttacagccgtggtcatcaattccaggaacttgctttctgtgaagtctacagagtcttaacttgctgtttaaatcaaatacagtgtcagacttctataagtgattgtatttggatcaaagacattaaagttacagatgttaattcttacaaaggttgcatctaataaccctggcaagtagttcaacaaatgtctgctgtttgtattgcaactcttgcagccaatagctgctgggagtgatttaatgcagctggaaaagtgtgcaccaagttcactgtacttgtcgaaggactgattaatgatcatcagaatgtacttgattttttttttcttccattgtattgtgattgcacctgacttattttttaaaaaagaaacaccttgtgggatgaag

SEQ ID NO: 34411 - DNA, 333 bp, Mus musculus
  source 1..333: mol_type = other DNA
aggtacaatgccctgtgaccccacagagcactgggatgccttcacttaattgaactaactgaagctaaacctgggtttccttcagctccgaaaagcagtttccgaataatttttagaatataagcttagtcaatgcatgcgacagagagcacctgtcctccgagtcaggacagggactccgccgagaggccagagggcgcgcgcgcgtcctcgcctttcccgccaactaggcggggacgcagcccggcctcccccacggcgacctcttcgcgggcggggcggttcctgttccgggtcacaaagcacccggatgcgcacgtgctttataagcgc

SEQ ID NO: 34412 - DNA, 515 bp, Mus musculus
  source 1..515: mol_type = other DNA
cttctcaaaacctgtgattctgaagtcaaagggacacagctgtcacatgaaaagtgatcacttatcacctgtatgcataaagcagctaagaggaataactcctagatatagcataaaactgagcgcatttttataaaacaaaaaaggttatagatgggtaccgatatttacagccgtggtcatcaattccaggaacttgctttctgtgaagtctacagagtcttaacttgctgtttaaatcaaatacagtgtcagacttctataagtgattgtatttggatcaaagacattaaagttacagatgttaattcttacaaaggttgcatctaataaccctggcaagtagttcaacaaatgtctgctgtttgtattgcaactcttgcagccaatagctgctgggagtgatttaatgcagctggaaaagtgtgcaccaagttcactgtacttgtcgaaggactgattaatgatcatcagaatgtacttgattttttttttcttccattgtattgtgattg

SEQ ID NO: 34413 - DNA, 593 bp, Mus musculus
  source 1..593: mol_type = other DNA
gtccggaccgcaccgccttccgaggtgccgcgccgcagaatcggacggtggtccggggtgcccagacctgcatggggtcaccttccgctgccccggccggacgaatcgcgtggcgtgagtagcggcaggagcatgccgcgccgcggagggccctcggcgcagtgctgtcccgggcctgctgtccagggagggaggggccggagaccactcaccacaggcacccgggccggctgcagttcgcaccccaacgtgctgcgccgctgccagattgacaggcgcgcggaactctgtgaggttggggcgggctcagttcgctccgcccccgggcagcgggaggagggctcaagcaggaggagcgggtgggacggcgtgagaccccgccttctccccgccccacgccacgtcaaccaatgagctcatctggacccggcggcggccgctcggactggccaggccctgggcggagcgtgaggagggcgggcacctcggcgggcgggggccagggcgggccggcgggcgggcgcggggcgggggcgggggcggcggccgagcgggcggaggcggcggtgggcgcgacgtcggcggctgcggcg

SEQ ID NO: 34414 - DNA, 518 bp, Mus musculus
  source 1..518: mol_type = other DNA
cgacctcgggagtccttgcagccaggggctgggagtagcacaaacttttcctcctcctgccgccgccgcggccggagaactcaccgcggagcttccgcggaatttctaattgtatgcgctgcccctgcagctcaacttgcagctgccgccgccgccgccgccgccgccgcagccgccgacgtcgcgcccaccgccgcctccgcccgctcggccgccgcccccgcccccgccccgcgcccgcccgccggcccgccctggcccccgcccgccgaggtgcccgccctcctcacgctccgcccagggcctggccagtccgagcggccgccgccgggtccagatgagctcattggttgacgtggcgtggggcggggagaaggcggggtctcacgccgtcccacccgctcctcctgcttgagccctcctcccgctgcccgggggcggagcgaactgagcccgccccaacctcacagagttccgcgcgcctgtcaatctggcagcggcgcagcacgttggggtgc

SEQ ID NO: 34415 - DNA, 740 bp, Mus musculus
  source 1..740: mol_type = other DNA
tcatgccagctgagcatttcagagttgcctagtatgtgaattttcacagcttcaattacaatgggtatgatatcatttttatgataaactttacggttctacatctaataatataaggtgctcatgtagggttgttaaagtataacagatgaaaactatcaccagaaaaatgtgaccaaatattataaatcatctatttttttaaatgtgggggctgaagagatggctcagcagttaagagcatggctcacctctgatgtgtgttaagacagctacagtgttctcgcatacataaaattaataatacttttttaaaaaatggctatgggtaaaggacccattagttccaagaacagctgttctagttgtaaagacctgagtgacagttacggagacttctgcttttgaatagctagctatgtgactgcccaatgaaataactgaagattttctgtttcagtataaattagcaatactatacttaacttatccctcccaaaagtaattatatgaatcaggtgaaaatatatagaggatttatgtgtagtataatatgatttctatattattattaaacagtcaccaaatagaagagcattatctattagatcattaagatgactcatgtgttcttgttttgttttgtcaacttgacaaaagccagtatcaacattggcctgcaggcaaaggccaacagggggcccagctcactgtgaatggtgccacccctgagcaggtgg

SEQ ID NO: 34416 - DNA, 381 bp, Mus musculus
  source 1..381: mol_type = other DNA
aacagccattttgtctcttctagctcctgtcgacagggaattctgtgtcccttgctcaaggtgaggaggctctcactaacaaaaacattacattctttgcaaacaaaatttgttttaagggtcgagagactggttcctaaattgggagacaacagcttggggatcaacatttggaagctccaggtaactttggtccacaaaggctcctgaagtctgcgaggagcccctcaccgaaccaggcggtagctgcatttagcgcagtcctggctgcattccgcctgcactgtagccaggaggcaggacccaagcgccagtcagaccgcgcacccgttctgtctctgacaaggttctcttagagagaacccaggaccagcagggaca

SEQ ID NO: 34417 - DNA, 350 bp, Mus musculus
  source 1..350: mol_type = other DNA
ggagtgggctgctctaaaagccccagcctcaccttttggagccaggcctctcctggaggacaagatgtgcaagacaagccacttgtgacagcaagttgctaaagaagaaagtttaaagtttcaattattgattttcggatagttcagcagaggtcatctctgaaatatgcctcctccccagagttcctaactgctcggtgggggagcctccggcgcccactcgcacccgccaccctcggggccgcgtgctggggggacgtcccctcccgctaggcgtcggcgcgggttggcgtagggcctgcgtcagctgcagcccgccggcgattggggcgcgcgcgcctccttcggct

SEQ ID NO: 34418 - DNA, 496 bp, Mus musculus
  source 1..496: mol_type = other DNA
tcttatttctcacaattcaaagactttaatgtaagacctgaaactttgaagctgcttcagatccaattgctctgggaataattgagaagttttgacaaatgagatcacatgaaatttaaatgattgtacatccatctccatctgaaatggagatagaggattcattcataaactaaggggccaataagtaaatgaaaatgaaaaagtttgacattattcttatggggcaaataagcttttttcaggatgtcaaaaaagggatgaagacatcctgggtgctcacaagagagaacctaggtccacactcaccagggtgatggatagcccaaaggaaggaatttatttgtaaagatgaaaactaatccttgtatagagtaaaataagccaaatatagatttaaatatatgtatttcaggtcacaactgtaggaaaacgtggtatgtatatgaagacgtcataatgaaactcattgttttgcaagcaaaccataataaat

SEQ ID NO: 34419 - DNA, 560 bp, Mus musculus
  source 1..560: mol_type = other DNA
taatataacagcatatgtgctttttaaaatgaagagaaactcctgaatacttagcacttactaaaatttagaatttgttatcaatgattggtagtattatacatggcagttattttaccccaatgcatctgtaatataccgatttggaggacatttattgcctcacaataaatcaataaatcaagtgctgcactgagtgcagggctaaaatctccatgaaaaggagagaatccttgaagtgttttccctagttaagattagttagcacagcttcacatgaatgaattcatatgaatagagcatgcgtttagaccagcggttctcccaaccataaaattatttgtttctacttcataactgtaattttgttgcaattataaaaatgtagacatctactatttggaagaaccatgtgacttcttaagaccacagtactctggctcttttgaataatcagagtaataaaatttcaaacacgtgtagtagcacaagagcaggccccgcccccaattatgggcccgccccggggaggggcctgtttgggcagtctccgccccctc

SEQ ID NO: 34420 - DNA, 534 bp, Mus musculus
  source 1..534: mol_type = other DNA
tatttcaaaactattacctataattaatttttaaagattattgagtatgtgaatataatgtctcatttcgatttctccacagtggtacaagctttctctccagaaaataaatgtatcacattcttgaatatgttcatttaatgaatggtctcagactatttgggatttctctaatcaaaatacatttaagcttaagactcttaaagctttccttatccctgaagaggtgcaggcatttttgtgctgaaattagtctactacttgtttatgtggttaatctcaacatgtggaaaaacatagtaagcctgtcattgtatattgtgtagtcatagtctcatataacacaatggctattctcttcaacaatattttacaatgaacacaccatatatggaggtgtcagaataattaatatgcttactattaaaaagcataatcaccttctgcataaatagaaagtgcttttacttttgttaaatttctgttttaattttgtacgatagattcacaatttatataatgaactttagtcat

SEQ ID NO: 34421 - DNA, 498 bp, Mus musculus
  source 1..498: mol_type = other DNA
agaggctgacaaggaccctgtttgcatgccaacttgcaaatagccagagatttgttgtagctatctgatttttagttgataatttctgaactacagggaatcaaaagttgcataatttaaatatgtatagatggcctttccgcaaaactcatacaaatgccattacatttcatagtactaagggttaaaaatagagaaatttggggcaaggaatatatattgtgattcccctaatctccttattttgatatacgtgcattttaatttttagacttcccactagcaaaactcatttagaacatacttagtctttctaaggcaagatcttcaagaaggggctatcagaaaagctcatcacatctgccacatgttcgtgcactgtcctgggcggggcgctctgggggcgtgccggctgcgcagagacacgcgctctgggccgcagcaactggcttctcctgcggagcctgcctgagcccgccccttcggtgcggaggagca

SEQ ID NO: 34422 - DNA, 382 bp, Mus musculus
  source 1..382: mol_type = other DNA
aaattattccataaaaaatgattgcttaattttgacctcatgtgctcactgcttagattatgtctgagaggcagaatgtcagaaaactgtataacaggcaaattcacctttatttatatctgcatggcattttaaactatattgaaaagaaattaattgatcagcacttttgaaaattaatggcaaattactaatcatggtaaataaagctaggcttggattttctagctccctcactagtagcacactcattgatctaagtattctttgtttcactagatgagagggaaataaacattaatcttaaattggggtttaatttattaaaatttaatttactcttgtgctagcaaactagctataattagattagcagccgcat

SEQ ID NO: 34423 - DNA, 441 bp, Mus musculus
  source 1..441: mol_type = other DNA
tatatgatgatacaaaagagatacacacacaatctctctgaacatggagtgtggttctgggtgcacagtgcttctctgggtcccagtgggaagcagctggcacgcagcttctaacaacttttaaagagcattatacagcattatacagcaaatgcctgatgtattcatgaagaactgggtccttcttcctaaagaaaatgctgccttccagattcttacaatacaaattgtaatatttatttcagagtaacttttatttttttaagtaggaattagaaatttcttgcagaagtattttgcaacttgccagatccaagcagtcctgagccttgctctgggaaaggggacctggccacctctgcagatggccttaggaattgctgctgcagacaaatggggcaggcagctcactttctaactaagggactggactgatctgtc

SEQ ID NO: 34424 - DNA, 416 bp, Mus musculus
  source 1..416: mol_type = other DNA
gaatatcttcaaagagttcctggaacataaaaatgctcaattaatatttatgttaacatacagttataagaggtaaattatgaattcatatttactttgacaagaagtgttgtagtctttatttgaaataaaagtacatcttaattacaaataaaaattggtaatttcgacgatagtagatagactacatgaagcacctgtggctttataattttgtatacttctggaaattaatttaaataattttccccaaaggttaagccaggatggaaagcttctgcctgttttgctttacaacacacgtagtgtgtttacttctttttctacacacagaagcacagtgttagctgttgtccccagctttgaatgttatgtcagaagatggaccaaatacccaagttcaagttattggatca

SEQ ID NO: 34425 - DNA, 398 bp, Mus musculus
  source 1..398: mol_type = other DNA
atatggtgatcttcctctggactttcattccaacctatttacagcatgaaattctaattaggagagctaagtattttatcttgatatatttttaatattcaattccaattgcttacatagataatcaactcgttttacaagttgttcttgtcatgtaatgcttattgttttaccagagataaaatttcaaatgactgtgatgatgaataatttagatagacaattgcttgcatgccaatgatgtcatatactgttaggaaatggcctcccaaaagcacatagtccgtgtttttgtgtgtgtgtgttcaacaccgagagtaacaggccgcgttgtcatggggacggcgcgtgcgcctgcgcctgcgcggcggaaggcgggggcggtgatgacgcgcagg

SEQ ID NO: 34426 - DNA, 296 bp, Mus musculus
  source 1..296: mol_type = other DNA
taaataaattttcaggagaaaaggacacacattttattttttttaaaacaatcatgtgattttgtttattttttttaagtgctcgaaactcaaagaacagccaagcagcaggctgtaggctcccacctagcatggtgagtaataaatactctttgcaaagtaaagtgtactctgttacctgttgagttaaatgaacttggaatgcgcaccggctggcccggcacggctccgccccctctccaaggcagtgggagtcacggagtggctccgccccttccacagtcggcaaccaaccc

SEQ ID NO: 34427 - DNA, 352 bp, Mus musculus
  source 1..352: mol_type = other DNA
tcttatgcaaaaactgtccagttaaaggtgactttattctagaggaaaattgctagagcaattgctatgcatgagatctgtgacatctcatttggtctaggtcaaaaaagactgactggattttagggctaacccttggctccagctggttggaaaacttttgttcatctagaaggaagctattcaattaattgcttatatagaaaaaagaaacaaagcatctggtctaagagtgtttcccatagctgcttgtgggatcggctagcatgctctattataaactggaaataagtcgtgttttactgagattagagtagttctatcaaattattgaagcacttgatttgtagcc

SEQ ID NO: 34428 - DNA, 532 bp, Mus musculus
  source 1..532: mol_type = other DNA
tcatagaatttttataggaattcttttagtgaaagcttttgaatactttattaaggagcacaacattgtggcattttgatgaataagatttttatgattttgttaacatctttaatcaaatatggtaatgctgagtatttcaaaattcattaacaaattattgtagtcctaatagcaaaagctggctgctcttccagaggaccagacctatctggcagctaaaaactgcacacacatgatacacatgtgtgcaagcaaagcatcttttttaaacagaaagaaactgaagcttcaatgtgtaaatttgtaagcatatttactatgtgttgctgaaaattttttgcttaacattactgaaaatttatttttaagagtattcaagaaatatttacagttttcgatgtatcctaagtccactgcagcaggactgtgtcctactaaaggcggtagtacagcactaaggggcatatgcagctagctccttctaactaggaaagcgttgtctgtgcaaacccagcctcacatgctgagt

SEQ ID NO: 34429 - DNA, 571 bp, Mus musculus
  source 1..571: mol_type = other DNA
caacactaggagtgtttcaacacacacaacttagaggcttgttatttgagagtcccttaaaggtaaaagcgtattctcagggtattgagaaatcataaccccaatgaaatacgagtgaaggtaagaacctttctttactgctactttgaaagcacagtagcagactttcagagttcacagatggacttattaaaacagtctagaaactccaccctttgatttaaatgaaagcatttacacacataaacgggtacgtgaatgcttacaggaatgcagtgtgtgatacaatggaatacacttccgtgataatacctcatcagacacaaagaccacatattgtatggatgtttttattctagatgtccaggctagttgctaaaaggtaaaggtttctttttgagatagtaaaaatatcccatcactgtgataatagttgcaacctaataaaataaaatcccatcgattatttatttcaaagactgaaatttgggactaaacatccaaaaaacgaactggggggctcccgggcaggtctcaggctcacgtgggaggtatcctcgccgcagcagcg

SEQ ID NO: 34430 - DNA, 420 bp, Mus musculus
  source 1..420: mol_type = other DNA
ggttgcgctccctgcaggctcccgagcagcgccacaagacagcctctcctctacctcccgcgcggggcagaggttggcagtggcgggtgctgggcgggggtgcgccacagcgcccccttgctgtgcgagccccacggtgccatggcacccacccgggggtgctgactggggcactgacgctgcccggggtcccgccactgggccgcgtccagcctctgtcggcaccccgccggtccggggctaccccgagcccgagcgcgagtgccgggcggcgaagggcgcgggcgtgaagttacctgcccggcggcggcgggccgacagcgccggggccgagcggaccaggcaggctgcgcgctcggtgtggacgggtgcgcgccgggggggagaactttttttttttttttttttttcaaaaaggaa

SEQ ID NO: 34431 - DNA, 417 bp, Mus musculus
  source 1..417: mol_type = other DNA
tccaagagtgctactgggaatccaacagtaattccaaggcaggctcagcctctgcaaacgctctcccaggagcaccgctcctcggggtcccttggtcagctgcacactagaatggggcagaggttgcgctccctgcaggctcccgagcagcgccacaagacagcctctcctctacctcccgcgcggggcagaggttggcagtggcgggtgctgggcgggggtgcgccacagcgcccccttgctgtgcgagccccacggtgccatggcacccacccgggggtgctgactggggcactgacgctgcccggggtcccgccactgggccgcgtccagcctctgtcggcaccccgccggtccggggctaccccgagcccgagcgcgagtgccgggcggcgaagggcgcgggcgtgaagttac

SEQ ID NO: 34432 - DNA, 390 bp, Mus musculus
  source 1..390: mol_type = other DNA
cctaggtgagcctgcagctcattgtctttgaaatatatttagtaaaaatttctcaaactatacctatgtctagttgctaaattatttttcgtgaaatgtttgttggacttattttgggaaaaataaaatccatattcattttccctgtgttttaaggacggattaaaaccaccacgcttggccccatggtggtggtgcattcttgcaagcccagtgtttgcaaagtggagcgcagctccactgggaggagtttgaagccaacctggtctccttgagacccagttcttgttgggttcccggtctcaatcccgttcccaaagcaaggcaactccattgggtgctgcagtagggcggggggcgtgtcctcgagtcagacacgcccccaccgcg

SEQ ID NO: 34433 - DNA, 454 bp, Mus musculus
  source 1..454: mol_type = other DNA
agaatgttataaatgcatggcttcttgtaagtgggctctctagaaaactgtttcagatagtaaactaactcttccaccttctttaaaatctgggcttttaaagaactggatatatacagaatatatgtatttatttcagtttttcgtacaatacatacacaaaacatgattaagccatatattgtacacattacacctacagcatgcaaatgtatatttacttcaatatttatacagttgggtttttttttacatctttttaagagcgacataacaggagagggcggcgactgaacctagcaggctccgtttcctcgcgactccccgagccccggcctggtaggcggggctccggggtaggcgggactccgaccggagggcgcggccgcggctcctcccctctcctccggcggcgcaggcggcggcagcacttccgggtcggcgcggaggcggg

SEQ ID NO: 34434 - DNA, 571 bp, Mus musculus
  source 1..571: mol_type = other DNA
agaatgttataaatgcatggcttcttgtaagtgggctctctagaaaactgtttcagatagtaaactaactcttccaccttctttaaaatctgggcttttaaagaactggatatatacagaatatatgtatttatttcagtttttcgtacaatacatacacaaaacatgattaagccatatattgtacacattacacctacagcatgcaaatgtatatttacttcaatatttatacagttgggtttttttttacatctttttaagagcgacataacaggagagggcggcgactgaacctagcaggctccgtttcctcgcgactccccgagccccggcctggtaggcggggctccggggtaggcgggactccgaccggagggcgcggccgcggctcctcccctctcctccggcggcgcaggcggcggcagcacttccgggtcggcgcggaggcggggcggaggcgccgcggctggctgtgctccgcgctcggctcggcctttgctgctggctctgacggcgaccgacggcgggcggggcccgggttcgcggccgagcggcgccggtgagggcg

SEQ ID NO: 34435 - DNA, 237 bp, Mus musculus
  source 1..237: mol_type = other DNA
actccagagcaccagctcccgggctgtaactggggttgtagaaaattctccctctgaaacatttcctggcacggctctgcttgatcatgtaagacagtcctaataatgtgctggaactgaactcaggtctgatgttctttaaaaacatttgaactttacatttattgtggtgccacctgatgactgtttgaggaccatcgggagctgtagctgaggccccttcccatgctgctgttg

SEQ ID NO: 34436 - DNA, 608 bp, Mus musculus
  source 1..608: mol_type = other DNA
tttacaattgttgaccgtttataaatctgctccgtgtttcacacacaaaagatgcttagtaaatgtttaaatatctattacacaagagggaaactaatttaaaaaatgtcttcaaggttaatattcatcttgtatctgacacgtttaaaaatggttcaactaaaatcaatgctctctagttaaaactttttgatttagtggccgaggcctcggtccgcaccgggctggccacccctcgcggtggcggggggtcactacgggctccgggcctccgcttcctgccccagggcggcgcaccgcggctccgggaaggtgctgcgcggaaacgtggcaccctctgcacccgcgcgagagcgctggcagcaggcggcccgagaggctgcggcggccgcgcaccgggaccgacacccgcccgctgcgccggcgcccggcgggacgggaaggggcggccgcccgcgccgcgccgcccccttctctcggcctctccccggccgaattcttgcataaattatgccaggcgcgcctgacgtcaggtggcggcgcgcgggcgcgggcgcgccgcggagagagccggccgcgggcgcgcgcggcccgggaggctcgtgcgc

SEQ ID NO: 34437 - DNA, 575 bp, Mus musculus
  source 1..575: mol_type = other DNA
aagatccagcctatataaaattaagtttattgtttttgataatttctattatcttaaatgaaatttatatgcataaatacctacacaaattgctgagtagaattagaagactgtatatcatatatattttcagactcttgaagactttctcacttaatgtcttaggatatggatactgtgtggatttaaatgtttttgtcctaaaccatacttttaaaacagcattttctttttattatgaaatagctatgcatgaaacacatttgttgtgatttttttcaagtgataatttacatgcatgattcttgagattaaaaaatattttatgcattcaactttgctgcttagaaaatgttttaaattttcattgatgtatttaacttacctgtttttattttgacaagatagagtcttaatctgagccttttctgaatgtcatgtcatttgttaataaaaataattatttttccatagacatatggtgctttaccatttgtttgaaatttgaaataatctgtactttttgtcctagttgttaaaggattacaacaatccttagactgtattgggtgacc

SEQ ID NO: 34438 - DNA, 253 bp, Mus musculus
  source 1..253: mol_type = other DNA
tttaagttactgacttctcttcagagtgtttaaatatttcatttgcttatgaatacttaagttggactgaagaacaagcagctttgaaaggttgctgcttgtgctctaaattaatttcatgtattaattagagctagaatgaattctgtaaactgctaatcttagaacagtgaaaaaaatgatattaaaattgggccaatttcatttcccagttgtcaggagtgcagtctgtctgcctgagcgattgagcagt

SEQ ID NO: 34439 - DNA, 360 bp, Mus musculus
  source 1..360: mol_type = other DNA
gcaaagtgctggatttatcaacactgtgttattacaaaagcaacacattccatgtgatgtattatcctgttgggaggctctctagagtccttagagcagtgtttttgcaggagacactgtggccatggcaactcttataaaggaaaacatttcatgtgtgactggctggtgctgacaaagcatcttgatctgcagcaaaataaaattattttgttgctactttgtaactgtaattatgctactattatgaattgtaatgtaaatatttgatatgtgactcctcaaaggggttgtgacccacaagttgaaaaccactaccttagatgtgcttcctgtcaagtagggcatctctatatagag

SEQ ID NO: 34440 - DNA, 427 bp, Mus musculus
  source 1..427: mol_type = other DNA
cttctacaaggggctgcttccaagaactcctggaagatctcgacatcagcaatgtattaaatcaccacatacttcatgtttttttgttacccacagacaccatgtgggcaattggtaacaaatgatcagtacactgcatattgagtcatgttaacattttaatgtcttaactaaaaaactacgatggcacaaatccttatttttgacacgtgcgcagctctcggagaacaccaacgctcgcgagagtcctgccggcttcgtttgccacgttccagaggatccaggcagactagaaagccacaagccgctggggctttgcagtcactgcgcagcaaaagacaagctttggcctgaggagggcaggcgcgcgtagcctgccccgccccctgccagcggtcctcgggaggccgaggccggggggagctga

SEQ ID NO: 34441 - DNA, 532 bp, Mus musculus
  source 1..532: mol_type = other DNA
aagtaatatttattttgaattttgaattcaaattgtgaatcattcattaggaactttgaattcatacactgggtctcaagactgaaagacagcagggtagagacactgctgagtcatggtcaaactcagcagaaaacatatcagtttaccggttgagactttgaaagtgtacagtctagtaacccgggatgctgtcagactcactacctgaacggctccagcatggataaagggaagccactttcctgaacttgaagattccatatctacagatttgatccctcacagatttctgaggagtgtatgtatgtacagtctttctttgttatttccaaaaataatgcagcataacaactatttgtgtagtgtttcccttatatccagcattaaaagtaatctagggataatttaaagaatgcagaaaatgtctgtagattgtattaaaatgttgcaccatttgacgtatggaaccggtcgcgcaaaaggctcagtccagtgcgcagaggtttttgcgcgggtatcctcaagggac

SEQ ID NO: 34442 - DNA, 489 bp, Mus musculus
  source 1..489: mol_type = other DNA
ctaattcctgagtctggggcctgcaggagagcgcggcagctccgagcaccggtccaaactctactggtggcctttgcctgacctcgaaggtcgggggactggcccctgcgcctggcttccgggactcaggtgctaaccgcccgcggtgccactgcccggagccagggcgcagcctgcggcagcagccccccacccccacccccgctccgagccagccgccgcggctgccactcccccgggtccctggagaagttcgagcagctggtggggactgacggtccccggcgcaggcggctgcctgcgggctctggctccccaaccctgggacagaggcgctcgcctctggctcgcccagtcggcgctccggaccctctcccctcctctccccacctcccggcgaggggcgggagggggcgtggcagggcctggatttgtgtagctgctacccggctccccgcactcgtagtctgcaggaggagcgcggccccc

SEQ ID NO: 34443 - DNA, 266 bp, Mus musculus
  source 1..266: mol_type = other DNA
agaaaacataaaacattgacttaaagtcctttgaatacattcccatggggatagaaactaaatgcagtctttatttgtatttattcgctcctttatagagtagtatattaaacttataagtaggtatctaatttttatggttctttacatagtttatatattattactctatctgatatgtagtccataaagggttttaaattccacttatcaattctttgctagaagttttagagttacaggtgtcacattaccatctttgataa

SEQ ID NO: 34444 - DNA, 556 bp, Mus musculus
  source 1..556: mol_type = other DNA
aacacagactacatctatgtattttctttagaatgatctttctttgacaaggagaaaatacaataaatgtatgaagtctaaactcacgtgaactgtagaaacgtcatttgacatatcaaatgtgaagtcttttaatatggcccaatgatagtagagaaaacatgttagactttccaagtgttctttctcacttaggtttaataaacaattcctgattctttataggatcattgactatattatttttatatgccttctggattcaccatataatatatgtattctgtcttgaaaaatcattattctggagaatagtggtaaaggggacctttatacattgttcttgggaattcaaattagtataagcactatagaaatctatatggaagttacttgaaagcaaaatatagcatctgtaatactccaaggtatattactgtaagtaaaatcatatggtcatctgctccccagagaccttagacataatggtgatggccatcaaagcaaagcagagcttgttgccatcacactatccatggcaagttcaacatcacat

SEQ ID NO: 34445 - DNA, 343 bp, Mus musculus
  source 1..343: mol_type = other DNA
tacagagtttcatttttatttttaaatgaaatccacaaatccttccatatggtatatgtgtatatatatatatatatatatatatatatatatatatatatatatatatatataaaatgcatgcatatgtaatatatatgcacatatatgcatatatgtatacacaaagctacttgagcaccctagcatccatgctgagatggttggaagaaaaagtcaaaatttctcttagatttattttttaaaaagaagttctaggtgactggttaaaaaatgacttaggcaattgataaatgttccaaatacatattgtgagttgttggacaacatcttggtctaccct

SEQ ID NO: 34446 - DNA, 368 bp, Mus musculus
  source 1..368: mol_type = other DNA
gtcttgcgattcataaattgataggaatcactattttattgtggccagaggtcctgcaattccagtcagtagccggggccccacacttttatgtcacagaaaagaggggcaggtgcttatgcagagtctacatagaatcttcctgcacgtggcggaagcgctccgggcacgcagccaccgacaacatccgcggcggccggcctcagcgggtccccgggcctcgggaccccctgccaccgcgagtgcgcgcccgtcagcgccgcggcagcgcgcgcgccccccgagtcgcccggaggtttgcgcaggcgcggaaggttgtggggaacccgctcccgggcgcgtcggtttctcgcgttgccgtggaaacc

SEQ ID NO: 34447 - DNA, 426 bp, Mus musculus
  source 1..426: mol_type = other DNA
ttgcggtggtctccaccatataattatttgttactacttcataactgtaattttgctgttatgaatcataatgcaaaatagcagcctgaataaaactttaataataacagcaggagcctgcgggtcatgggtgcggtaagcgcagacccctcgggaggcgtggaggcagcttccgcccattcttccagagaacttcgcggttcgaaggctagcccgagtcaggaaagtcaggtcaggcgacccagtccagcctcagctggctcagacgcgcgtcacctctgcagaggcgcgcgttccccaaccccgccgggggaggcccccgagtgggtgtggcctccgctgaagagcccgccccccgtgcggtcgcgtggggatggaggggctgtttggcgcttgggcgggggcgcgccggtgcgcgcgcaggag

SEQ ID NO: 34448 - DNA, 285 bp, Mus musculus
  source 1..285: mol_type = other DNA
ctgtgtagtgtaggctgactttgaacactcattaaagcaggaaacaaatgactccatgctcttgggcttttagtgttgtgagagacaactaacagcaaatgatatattgttactgttaaaaatggcgctcgcctttaatcccagcactcattttgagttcgaggccagcctggtctacaaagtgagttccaggtcagccagggctagaaagcaaaaggaaagaaattaaattttgtctctgtctctctaacgtcagtcgcttctttaaaaagcaggcgtggccac

SEQ ID NO: 34449 - DNA, 274 bp, Mus musculus
  source 1..274: mol_type = other DNA
gtgtactgtgtgcctgcacagatgtacccgtacacatacaaaacgcgcgcgcgcgcgcgcgcacacacacacacaggatgtatacacacgtgtaatatttttaaagaaaaaaaagaaacaatttgtttctagaaagaataaacaggaatgttctagaagatgttctcatctgaggtgaaccttagtaccgttgctggacaccaggagcccaggcctgggagatacttgctgagcttgagcgagcttttgaagtttagagttaaggacaattgaa

SEQ ID NO: 34450 - DNA, 426 bp, Mus musculus
  source 1..426: mol_type = other DNA
acaggaccaacatgactcctgtctgtgaatgtttacattttgtaaaaaaggtcataacctcctcagttcttataaggctttagagaaacagaggtaattcttcacttttgtctttctagagcagactcttggggggcaagacctgagagcttcctgttgagtgggacacaggcatcccatgtatttggggccctgacttcttagggggctgagtgccttgtacccacactctgggctcctactcagccgaagcggctccgggggcgggcttgtttctgccccgggcgcgccgccggcccagtgccaggtcacgtgcgcaacctctcgcagggcggccccggaggcccccgcgcagccgattggtcggcctgcggctggcgcggctcggggcggggctgggaagccgatcagctgttcccagagacc

SEQ ID NO: 34451 - DNA, 794 bp, Mus musculus
  source 1..794: mol_type = other DNA
cggcagcgctcgcaggcgggaggcgctcccgcgcaggcagttcgcgcgggctccgcagggcgcgctggctgccgggcagggccggggcggggcgcggcgcggcgcggcgcggcccgggcgcgcacgtggtgcggaccgtcctgctctccggccaggtccccagagcctcggcgctcgtgcgtgcggacggggagggcgcccgctggagtcccgagaggtggtcagcgcccggaacaaaggcagcgcgcggcgccaatatttcccgcgcgggctctgggaggagagcggagtggccgctcggcggcgcgcggggacaaggctcccacgtacctcgtccggccgcgctgaggcaccttcctgtgcgccgccgcccgctcgtcgcccggcggatggctccggctccgcacgtggcgggcggcgcgctccggcgtctgcggccgctccacgttgtgctgccgtcctctcctgccattggccggctcctcccggaggggtgggccctaggctcccgctccccgtgcctctgaggagacttggggttccccaccccagcccccgagagccggggagcctctgagccgtgcagccgcggcgcgcgcaggtgaagcgccgagaggtccaggagggcagccgtacggccactcggcgcccgcccgcccgccagcccgtccgcgcgcactgagggcagggcgcggcgcgcgcgggcgagctgggcgggcgcgggtggggcgccggccgaggtgtcagtctgcggcgcatgcgtgcggggcggtccgggcccggcctatatattg

SEQ ID NO: 34452 - DNA, 512 bp, Mus musculus
  source 1..512: mol_type = other DNA
ggttgattcaataaaataagttttctgggctacagagtgaaaccctgtttcaaatctaaaagaaactgactaaatctgaatttttttctttgtttctcagggtccctttatgaaaacaatcatctttagtaacacatatctgaaattttctatgaggtgtgtagctggccagtcagctgatcactttttagttttattgataatgatacttaaggacctttcactgaggaaaattaactagcttcttattccgagagttagtcttgaggaccgaacccagggccttgggcttgctaggcaagcactttacccaagacaaagcaactagatttggtctctttggttttcttacgaagacatcgaactcgcttcattttctctgggaatgtccagagaatctggagagccccgccagaatctagcttctgaagggccaggagactccatggcagctaaggggcggagcagtctgctgttcccgcccctgagcgtggctagctgcggatccgggg

SEQ ID NO: 34453 - DNA, 551 bp, Mus musculus
  source 1..551: mol_type = other DNA
aagaaagacagacagacagctatcctttttttatgagtcatgcactgcacaacaaaattaaactgcattctattgttatgaaataatctctatacattcctcatagcagactataaagtactattgtgctttcttccagaatattgacatgagcaaacattttgttctatgataataacttaatttgcttggaataacctggtacaaacttttttgtagccgccaagtgtctactatcttgccattgcagcagtagttgcctggctttgaaatcatcgtaacaagtccaggactccggccggacatagggactggatctggcctacagtctatgactttctgagacggatcccagcgtcacgaaaagcttgctctggctcctgctttcctgtgaggctcagcaaggagcgagggcggcggcggggactcgctcctcccaggagcattgccatcccgtggccatcgtgggcatggctgaggcgctctagcgaaacgctccggccgggccccgctccctgcactctggttcccggagcgccttggagggaccc

SEQ ID NO: 34454 - DNA, 357 bp, Mus musculus
  source 1..357: mol_type = other DNA
cgagggctgtgattgcatcccaggacctgcctagccagccaagcgtcgggttctgcggctcgggggtgggggcggaggctcgccccgaggtggagagagcgaatgccagcctcccgcgccgtgaggggcagggccagcaggacaccctcctccggctgtttgcacaggtgctgggctctgcgtcctcgagcagggacccttgaaggagccaatggccgggcgccgccaggtgtctcttacctgcaccacgtgggggaggggggtgcgcgcgcctcccgggggtgcagcccgaaagggcaggcctgctcttccctccttccaccccccttcctgcccagggtgtggagcgccggccag

SEQ ID NO: 34455 - DNA, 285 bp, Mus musculus
  source 1..285: mol_type = other DNA
gttccggtctcgaattagcagccgagggctgtgattgcatcccaggacctgcctagccagccaagcgtcgggttctgcggctcgggggtgggggcggaggctcgccccgaggtggagagagcgaatgccagcctcccgcgccgtgaggggcagggccagcaggacaccctcctccggctgtttgcacaggtgctgggctctgcgtcctcgagcagggacccttgaaggagccaatggccgggcgccgccaggtgtctcttacctgcaccacgtgggggagggggg

SEQ ID NO: 34456 - DNA, 378 bp, Mus musculus
  source 1..378: mol_type = other DNA
gactatgtatagtttcaagtgtccagaaattaaaacaaacacactttttattttgatttatatacctttttgaaccttataagaattaatcctcataatcagctcgtgggattattcatcatatttaacattttcataaacgagaaaattttcctttcgttttcatgtagctcaagctgggattcaactcctggctggctgaaaacagtgtcttttcagagcatgcctcgtgggaggcatacggtgccgtgtgtctagagctccgctactccggagaaccacgggatttggtgggctcgcagaaggcgccctccgccgcgctggaggaggcggggcttacggctccggaagtactgcagttttccccctagctggggg

SEQ ID NO: 34457 - DNA, 579 bp, Mus musculus
  source 1..579: mol_type = other DNA
cctgcagcggccggaggggtctcaccagagacctctgctcagatgaggcctttgccaaagaaaataatttcagaattgagttaagagatgttaatgtagatttaagcaaggctttaatagaaactgctcttaagagaaaaaaatcaaaggtttctaaaaaaccttgttttcggagattgtcaaacgtgtataaaatctagtgaatgacctttaaccactctctcttttaagactttgtctatcaagaccttgtctacaatactttaagatagtgtctttttttttttaagtttaaaggagctcttcttatactcctagaccttaaaagggcttgtaaaacaggggctgcaactactgtagctcagtgtcacttgagtaacaggatttcgtgtacctcagtggtgcacacacttctatgatccgaatcctaatttattgatttaagttgtgaggcttatcgcctcagctaggacctgaagactgaaaccaaatcggttcgttttagatctagcagtcaaccggaagtcgggggcgggaccagcactgcacgccgtggtgcgcatgctcggcgcccggccc

SEQ ID NO: 34458 - DNA, 481 bp, Mus musculus
  source 1..481: mol_type = other DNA
tttcatgatgatcacgtgcttcagactagcattaaacaggaaaactcatagctagattaggtgttccttttcatagtccatgtggtgtgattaagataaacaagacattgctttaatagaaacacgattttgtttgtacatgatcatgccatttctcttaatttttacacatgagaatatttttatctgggttttatatctagtattcagtaaacacttgtccttgaataacacaattatgcagaggatcttagcgtttttcggtctactagatttgtaaacaaataacacagaacagttcctcttttgtttttattaaagtggtgggaaatgtgatattctcactaaatagaagctagctttatgtaggtcaggcttggcttaagcggctttcctgaacctgcgtaagtcagcttaagctggaggaattttaataagccctcccctgtaggcgtgggcctaaatgaggctagcctagtta

SEQ ID NO: 34459 - DNA, 470 bp, Mus musculus
  source 1..470: mol_type = other DNA
acgctcgcggagcgtgagctgatgtttactgtatttaaataagcatattgtgaaacaaagttcactaccatttaaataattttgttcattttcaaaattacatttaactcctgtattaatttttaaggggagcaattatattctggaaaaagaacgacacattttcccgtattctttcgagaaatggatctggaagatttaaatggtctccagaaaaatgtttgtgacatggacagaggtctcaaggcgtcagacttctgagggccctgtcgggaggcgacggggccttcggacgcatcctctaaacagtgagactctttgggaagcagatacccttcaataagccttcaggcctctgaattcaacagctttaaggtctgtgcacagtccattagccaataaatagacaagttctgtgcttatttattttctgtgttgcaaacacaaatatctgggtcagaatttattag

SEQ ID NO: 34460 - DNA, 569 bp, Mus musculus
  source 1..569: mol_type = other DNA
tgggaaatgcccacgtccccgggaaatacccatgtcctggggaagaggtcacttagcagtgcagtttaaaatgtacttaaggcagcacagtttgcaagcagtagggctctctggaagtcctggctctaggccaaagttccagccatgctgagcagctcggttctgagatgcgcgcagtgtttagcacaagctgcttggagccaacctgcctcttttggatctcttccagaagaaggaaacaaaagcaggaagggcctggttgcttctcagagcatgctctgaaggtggtctgtccactcagggtggctgtagcctcatcctggaggccggagtcccgctcaaagtgtatttttccagtgtccacctgataaaaagaaaataaaacaaaatcaacgattgaactgtcattttttttctccctcactcccctcaaggggataggggagtcacatgacctgatttagccaagtggctgcaactcagtttgctgcagagccgccccctcccggcgggagcgctgacgtcacggaaaagccccgtcgcggggctgccgggcgcgctataaacgg

SEQ ID NO: 34461 - DNA, 383 bp, Mus musculus
  source 1..383: mol_type = other DNA
caaaatttgagaagttcttggccgagttaatcttacttctctaaacacagtgagcttagccgtgttcaggagatcttagagggagggagctcccattaagagtgctacccagaaacagggtaaactttgacctatgtggacgccttggcttaagatgtctgtggacaaaacaaaacagaacagaactgtgtttgttgggttacctggaacagccactgtgtctttcagcatggctgtcagtgtctgtcagtgggtgacactgtcagcaaacagacactacaataagtgattgtgtaaaatgtataaagtaacttctttcctggactgaatgtaatgataccttttatgatacccagtgactctcagatatcaataaaaatgtt

SEQ ID NO: 34462 - DNA, 581 bp, Mus musculus
  source 1..581: mol_type = other DNA
caacagggcgtggtcacggggcgcgcgcacgcgtggaaccaataggctagccgcgcctggcggggagcgcgccctcttccgccccccggggcgaggcaggggcgcggagtgggctggcctgggccgagctgcagcgcgccggggtgctgcgtggtgcaggacgcgcacggaggggtgcggccgccacccggggcagaccgcagcgggtgctcgactgtgcccgccaccgctgccgagtcgtgagggggcgtcagagcggccgcgggtggagggccgggtgcgcgcggagcctcggtcgcgaggagctgccgcgggtcccgggcggcacccggctgtcagcgcgcggggcgcccgctgtggcccgggcgtgtctgcctcggctccccgctgacacgcttggccccgcgtggcggagccggctgcccacggcgggctgtgcctggagctctgcggaagcgggcgcggcgtggggccgggcgggcctgctgcatggagcggcggcggtgcgcctgtccgggctcctggagttgcccgccgggggctgtgatgccgcctcgcctgccggcactgggctgctgcga

SEQ ID NO: 34463 - DNA, 553 bp, Mus musculus
  source 1..553: mol_type = other DNA
agcagcggctcgcagcagcccagtgccggcaggcgaggcggcatcacagcccccggcgggcaactccaggagcccggacaggcgcaccgccgccgctccatgcagcaggcccgcccggccccacgccgcgcccgcttccgcagagctccaggcacagcccgccgtgggcagccggctccgccacgcggggccaagcgtgtcagcggggagccgaggcagacacgcccgggccacagcgggcgccccgcgcgctgacagccgggtgccgcccgggacccgcggcagctcctcgcgaccgaggctccgcgcgcacccggccctccacccgcggccgctctgacgccccctcacgactcggcagcggtggcgggcacagtcgagcacccgctgcggtctgccccgggtggcggccgcacccctccgtgcgcgtcctgcaccacgcagcaccccggcgcgctgcagctcggcccaggccagcccactccgcgcccctgcctcgccccggggggcggaagagggcgcgctccccgccaggcgcggctagcctattggt

SEQ ID NO: 34464 - DNA, 197 bp, Mus musculus
  source 1..197: mol_type = other DNA
gaatgtttaacatgaagagtgctcatagtgaaggaaactaaacttcctctctctaactaaagtgctctctgggtcagccatatacacatgtcactgacagcaacaacagctgctcctgtgactgagccgtcatgagtcaggcctgggacaaacactgtattcatcgaatatctacagagtgggtattaagctctctg

SEQ ID NO: 34465 - DNA, 261 bp, Mus musculus
  source 1..261: mol_type = other DNA
ctggctgtccgggagctcactctgtagaccaggctggcctctaattcagaaatctgcctaggcatgtgccatcactgaccagtgcaggcctgtgataaatacagattccgttttgtttttgcaggtctaacagaaacctcaatcttttccttaccctgaaaagaaaaaagaaacctgtttgatttgtgtatctttgctgacaaaagctttatattacctaaggaaaagccttcctgcacaagtgagtccagagcgcccctg

SEQ ID NO: 34466 - DNA, 502 bp, Mus musculus
  source 1..502: mol_type = other DNA
aaggcgtgcaccaccatgcccggctttgtttttacattatttaaaaaacactaagggtagggattgtttcaagtcctgagtttgagttttagcaaagcaatacaaacagaaaccctcattgattttatatataatacctttatgacaaaagtctaggagaaacattgtgcataaagcaccacttggtttgagaaccaaatttggatatacatgaatattgcctattaaagtgcacagccttgcagactgttaagtgtgattgttgggaattgtcacatacaccaacacagggatgctttctgtaatacatactttaggtaaggcagcccgaaggcctgttgtaaatacagcttagaggatggaaaactctgcagctttccacttccaaagcggttcattatgatgaaaagaaaaaaaagaaacctttttgatttgtatattttacaatccccagtggaagttttcaggggtgggacgtctgcgcacgcgcgttcagagcgcc

SEQ ID NO: 34467 - DNA, 192 bp, Mus musculus
  source 1..192: mol_type = other DNA
aagctagaggaaggctctggttaatttgaccaaagttagagttaccagggaacattcagaaaatgtccctatcaatgttgcgctatagaaatctaacttatatgaatccttcgctcccagaagcctgggagggctagagagctgcaggagtcttgaccgccggggcgcgcgccgcgtcgccacggaaacgcc

SEQ ID NO: 34468 - DNA, 494 bp, Mus musculus
  source 1..494: mol_type = other DNA
aacactaacagtctgcaaggctgtgcactttaataggcaatattcatgtatatccaaatttggttctcaaaccaagtggtgctttatgcacaatgtttctcctagacttttgtcataaaggtattatatataaaatcaatgagggtttctgtttgtattgctttgctaaaactcaaactcaggacttgaaacaatccctacccttagtgttttttaaataatgtaaaaacaaagccgggcatggtggtgcacgcctttggctagcctggcctacaaagtgagttccaggacagccaggacatagggcacctcctttgttgtccactttcatgaaacacttttaagtgctaaaacggtaaatcgtcccagagttttaaatacattttaaataaccgcccctaatttatttagcattgtttcccgcgtgcgtggtaacctagcaaccaggcgtcgcaacaatcagctcagcggactcaccgaggaggctgctgggg

SEQ ID NO: 34469 - DNA, 157 bp, Mus musculus
  source 1..157: mol_type = other DNA
aacaactgtgagcactgtaagagcaaagactttattctcagaaattatgggaagctagaggaaggctctggttaatttgaccaaagttagagttaccagggaacattcagaaaatgtccctatcaatgttgcgctatagaaatctaacttatatgaa

SEQ ID NO: 34470 - DNA, 356 bp, Mus musculus
  source 1..356: mol_type = other DNA
tggctcccactgtgtgcaggggacctggcatggacccatgccgcaggccctcctccacacagactaactgttaaatttagtttatgtcagtataaagagaatcactctttgttcagtggcttgttcatttattaaataaactcacctgcttctagtctggaagcagactatggataataatactacttccaatattgtctgctcctgttttacagatgcgaaaactaagtttaaattgactctcttgttaaaagttaaaaattaaaataaaagtatcttacctaagaagtgtactgaatctaaggtgtagaggccccgcccctcctcgtctggccctcctggagtaggggtgtgcg

SEQ ID NO: 34471 - DNA, 484 bp, Mus musculus
  source 1..484: mol_type = other DNA
gttttgattttagtcaatgcagtaactgaaaatcttccattttaatttgtccatatatctcattttaaattacagtaagaaaaatcaaccaagagtgtaatttttggcaaggagttgaatttgccaggaatgctgcagagcttctgagacttgcttcttccttttttgttacagagggcactattgtaataagaaaatattttacatgtttttatgtgtaatttagacatatcaaagtaaatcaagctaaattcataagctgtgtgcggattttatctggcttatttgttaaataacactgtactattgtgttctgacttgttatagtacatcattatgcttagtacattataatatttagtaattacttattggttatagtcaatgttgcaatatgttaattagtgaacataatcatagctattcagtgttacatttactatttttttaatgtattgacacatggcttcaaaagaaaaacaaa

SEQ ID NO: 34472 - DNA, 273 bp, Mus musculus
  source 1..273: mol_type = other DNA
taaggacctgatcagatgttcagattgtctgaaggggctcccttgggactactcaggtgtatccccctgctgaccctgctggggtggcggaggatgaactctgccggctggcagagcaccctacccctggacttctgcaagtggcgcaggtgtctgagtcatggcatgctgcaagactattgtgtcagcacagtagatttgttttgcaaaggtgttgaaggtgtcacagtcaaaccaccgggctgaaaggcaccggctaccctgcggccttga

SEQ ID NO: 34473 - DNA, 629 bp, Mus musculus
  source 1..629: mol_type = other DNA
ttatctgatcatatttgacctacatattaatattttcatacaaatatttattctggaaatatagtattgatattaatagaggtctctcttaatggtatactacaggagaagtaaaaggggggaaaagaaatgataattgttttctctaaggctattatctaatgcgaaagcaaatagtggcttgatttctagcagagctgtctctgcagccagtgatgagacacaggcagggcagctaggagctctccagatggccaggtggtcgtcttgggttactgcagggcactggggccacatccttagggagccagccccatgtccagcctggaccagagagggcgaggccagggagacaggcctccggcccgccagcgcacccctgcgagccgggtcgacccccgtgaccacctggtcgcggccacgccgccgcctccctcccgagcggccgcggcgcccccgggtgcgggcgcgcgcggcagccgacctggtgcgggcgctgtgggcgctgtgcgctgcgcgcggcgctcctgctccccggcggacgcccggacgccctgcagataaatgcagtcgccttcctcgagagcgagcgagggcgggcgaggcggacgcagacgccgcctgtgaca

SEQ ID NO: 34474 - DNA, 315 bp, Mus musculus
  source 1..315: mol_type = other DNA
gtgctgggttgaaaggcttataccaaggatcctgtaaaggaaccacacttaagaggaagctcattagaaagcttgcttgctttcttgcacatttaggaaagttaacagttcattaacttaaatgaccagtttgatctggcgttctcaagcagctgtttgcattaattaatattaatgtaaatgtgctctctgagaatgtctagcttaattatgtttttcaacctaaactactgtttctagacagaatctgtctctgacagaacagagagctgcaattgatagcatctgtatgccaggcctcgggctgggctatgt

SEQ ID NO: 34475 - DNA, 480 bp, Mus musculus
  source 1..480: mol_type = other DNA
gtaaataactacatgcttgcttttctttctttggggttaattccaatggttcagaccataatacagacttattcggaaataatactataataaaatctttgacagtctattctgttataaatgtaacactagcttttaaaagaatgctctactaaaagttatacatacacacacatgtgcacgcacgtgcacacacccgtgccaaacaatagttttaatgatactgaatttctcaataaattttatttacaatgacataagtgtgttaattaaaaacatagccacaaatatttgctcattgtgaaggagatgaaatttcagtttgtttataagaactagctagtcctttctcaggaatgttttttctatgaatgaaaacttcatattccagagaatagaataatttttagtgatgttggaaatatatacctcacaaagaagtgtggctgtagcatattctttacagaaaatcctctggca

SEQ ID NO: 34476 - DNA, 316 bp, Mus musculus
  source 1..316: mol_type = other DNA
ctctaaaaatatttacattacgattcataaccgtagaataattatagttatgaagtagaaattgagagccgctgctgtaaagctttagcctaaagctactgttagaacttggagaaatgatgagttttctaaggcttgttaaaattcatttattagctccaatttctgtatgaataaaaactatgaactatttgaatatagtggcatgcagtttatattacaatagtgtaatagatgcttgattcatttcttaagatgcatcataatggggagtggagaacaattctgcgattacatattctaaagatatataata

SEQ ID NO: 34477 - DNA, 543 bp, Mus musculus
  source 1..543: mol_type = other DNA
tggcgctcttacagctgtcgacttttgagacagggtctcacctatgtaactctctggacatcctggaactccctatgtagacaggctggcctcaaactcacagagatctgcctgcctacaaccacaatcagccctaaatagagatttttttttttttttaaatttcgttttacaactgaatttagcaaatggactttactaagcttagtcctttccccttttaccacattgtaaaaaaacaaaaaagtgtatgactaatttgaaaacaaaccacgcttttattaaaattaaaaaaaaaatcttttcaacatgttttggcaacatctccgtgcgccccgtcagggccaatcgcctggcgcgtagctttgtgctgcggttgctccagcgccgggcgcccagcttccggcgcgccgcccagagcggtccgagcgcgcaggcgccctagcccatgtcggcgtctcccggtttcagtggttagacctggatccggagccgccttgaggcggggctgggccttcccggcggccaatggcgccccgggtg

SEQ ID NO: 34478 - DNA, 495 bp, Mus musculus
  source 1..495: mol_type = other DNA
tttgttctgtctcaggcatttatatataaaaaagaatatgtttgtctatctattttttttaagatctatttatttattatatgaaagtacattgtagctctggcgctcttacagctgtcgacttttgagacagggtctcacctatgtaactctctggacatcctggaactccctatgtagacaggctggcctcaaactcacagagatctgcctgcctacaaccacaatcagccctaaatagagatttttttttttttttaaatttcgttttacaactgaatttagcaaatggactttactaagcttagtcctttccccttttaccacattgtaaaaaaacaaaaaagtgtatgactaatttgaaaacaaaccacgcttttattaaaattaaaaaaaaaatcttttcaacatgttttggcaacatctccgtgcgccccgtcagggccaatcgcctggcgcgtagctttgtgctgcggttgctccagcgccgggcgc

SEQ ID NO: 34479 - DNA, 373 bp, Mus musculus
  source 1..373: mol_type = other DNA
tgagtatttaaaaacatttattaaaaaaactgtgtgcaaagggtgctgagaactggcttttgtgacctaagcaagatcagtgagcaccttaatcagtgtgctagctcttcagtacaatgacctttttttaaaaaaagaaaaatcttttgtaggaaaaaggtttaatttttacattatacaaaaaagccccattattctacaaaaactaaaatgacagtctattttgtaaaacggaagttgtaaaagttaacacttatgcttaaagtgccaaaaatcatcactcttattagctatggttcaagttttgacaagttagactctcctacttcctggaggagctactccagtacaggccctgggccctcccggaggc

SEQ ID NO: 34480 - DNA, 227 bp, Mus musculus
  source 1..227: mol_type = other DNA
gctcttaaaagcaagaatgacaattcattcatctgttttgaagttgacacacactctaagtgacacctggccaccaccctggtgatcgttttgccgattcgtaaacactaagctttaaagatttagcaatttgttctgtttccatcaaggatggagtaggcaaaactcgattccttcttagtgactaagggcttgtcaaggccagggaatgctcactggcagaggga

SEQ ID NO: 34481 - DNA, 497 bp, Mus musculus
  source 1..497: mol_type = other DNA
tctctctctctctctctcacacacacacacacacacaatttgtattcaaattgactttgactagctaatttgaagctttcaggcctgtaatctggctggtgttcaatgtgagccaaacagaccgtcccgttaggtgtgtgtgtggctttgtttgtttttggacacagtaacagaaaagtaatagtggaatccacagcacctactaggtagagctgctgccagcccttttaaccggggaaacaaaggatttgggcgcctgctccagagcttgggtcacagcctctcccaccgcgtcggcctccctcacagaggcgggctggctcgcaccccaccggtccgctccaccacgccgcgcagaccggctgtctagcggtcccgcgaggaaggagctcggagctcggagtccgaggcggttcacccgggcgccccgtcgagggcgagctcgcccgtgcgccccgccccgccccgcccccccggaggtcgccgcccgccgtgcg

SEQ ID NO: 34482 - DNA, 518 bp, Mus musculus
  source 1..518: mol_type = other DNA
ggaatatttagtacacctactactagtcatcgggtggatatgcatcaacttcatttgtacatagttgtaatattttccttaagtcaatcttctatctactatctcagataagaactctagctaacatctttgattcctaaagggctggtaacagcaaccctttttataaaggtcttttgcagcacagtgcttggcattcacattctctgaagagtggctcttcacaaccaaacaaccgagttatctagacgccagacagcttttgggggagcaagagtcccagcagctgcggccaagggtctttgacacgcaggcacgcgcgcgcccgtggaagctgagagcgcgcagccccgggtccccactcttctgccccgggcagccgaggcctccgttgcctgagagacgcgggtacctcgccactcatccgcagcaccagccgggcgtcacgggggcgtgaccgaccacccagctctccgccccctctgcgcgtgccccgcccctcgggcccaagggggcgg

SEQ ID NO: 34483 - DNA, 522 bp, Mus musculus
  source 1..522: mol_type = other DNA
tgttactgtaaccagattttcagcagaccataaggtctcataacttagaaatacttacgtaaaagaaaacctaaatacagtatttgtcatattaaaataccaattgtaacatgtagccggatatttttcccacctctaatgatttccagtttctggaactgaatcagtgagtctatcagtttctactttgtaagatgcaagtaactaatggcatcgataaaatcacttccttcctaacatcttaaattcttataagttaattctactacattccaataattaagagcagcagactcctgcattctgctgtctcgaagcattgttacaattaaccacagcaacgtatgcattaatcaaattaaactaacacttgacatctgattttgttcaaattaaaaaaaaatcaaacaattctaggtatgttgctttactctaacattcaggagtgaaagcctccctgacccaccacccagctccagctatttcctgggaagagagaggcgtggcccggcctggggccgg

SEQ ID NO: 34484 - DNA, 532 bp, Mus musculus
  source 1..532: mol_type = other DNA
aatcctgttttttcaaagtgtttaaaatttttaaatagatttattattttgtgttcaaaggcatttgtgcagacctcagaagacagcttgaacttgggcttggacgcaagttccttcgccagaggatcagagtgttttatcattccgccaagaaaacaaaccaagaagcatagttttaaggattttttttttcctaataaggatagacttttttttttaatgggttccttctggtgtgtttgaagacagctacagtgtattcgtatacacaaaaataaataaataaacaattattttctcaagtctgaaaaattgtaatcttttgtagacactatttccttggacaagccataatataagtacaaaatattaatctgatggtatacgcgaccgatcgaaaggcattcgggacaaaattctcccttgagagggagctgcaaggagcaggcggggagccgccccctcccgaggctagactgtccggggtcacagcctcgcccggcccctccctccgccctgaactgagacttcc

SEQ ID NO: 34485 - DNA, 540 bp, Mus musculus
  source 1..540: mol_type = other DNA
gtggccttgaactcagagactgtgcatcaccacaccccacacccttaatgtatgatttattaatattacaactggattaaaaaacccatttgtcagtgctggagaaatggctatggtgaagagcattaactgctcgggattcgatgccttctggtgtggctgaagacagctacagtgtactcatatacataaaataaatacatgttaagagcactgacagctcttccgtggctcatcttaagtgtctgaagacagctacagtgtacttacatataataaataaataaatctttaaaaaaaaactgtttgccagtggtcaactattcaaaaattgtggacttattgttattcagtaaatcctgacattgtataaagatgtaaacatggttctggtataaaagattaaacatattttgacatgaaatcttcatcttgactgatactacacatgatgtaacttttgaaaatacagaagagctttttaaacatcacagttcattgaaaatgctaggtggcgcccccgtcagcggcgcgctctgg

SEQ ID NO: 34486 - DNA, 134 bp, Mus musculus
  source 1..134: mol_type = other DNA
cacaagaaatggttttatatttctatttgtgagtacacaagtggcagccactgagtacagactggagaactccggagggattttccccggaggaaatcttttccccgcccagggagggccggcggggaggagga

SEQ ID NO: 34487 - DNA, 639 bp, Mus musculus
  source 1..639: mol_type = other DNA
agacagggtctctctacaaagtcctggctgtcctatgtagatcaaactagacttgaactcatggagatccatttcccagggctgaaattaaggcatgggctcttttaaaaaatgcagactccaaccaacattcttaaagagaatttcttttaaagacataaacatacaagtggagcagattaattaattaattaaggtgattaatcgctctgacagtaccaagttggagagactcaaaacatcttttgtctctgcatggctgagtgaggccttgcccagtccggggaatggtggagcggcgctcttctgaacatggccagggggagcgccaggcgagcggccggagcacctccgacgtgagctcaggtaggttctcgcggccggacttccctgagacccgcaggcctgacgcaccccgagccccgagcctaggcctcgtgaggacccggaccgcagcgccgcggccctgcgcatccctctccgtggacccgcccctcgccgcgactccaccaatcggcggcctcgtccacgcgccgcacctggtgggcggagccgcgcgtcgccgtcgcagcgcccggtcccgcccccagcgcggcgctcatcactcgctgcgccgccctgccgccggcggggaggagc

SEQ ID NO: 34488 - DNA, 399 bp, Mus musculus
  source 1..399: mol_type = other DNA
aggactcgccgcggcggagccggcgcatcgccatagtgcggccggtctgtggaccacccagcccgcgtctgtgtggggccccgcgccggcgccctacctgtcgagcagcggcgtgtggatgtgtaggtgcttcactgccacccgcacgcgccagtctgcgtgtcgtgccgacgagaccgtgccagaggcgccccggctgcgctgcagatggcgtccccgttcatggctccggctgcgcggcggctccgcccgaccctggccgcggcgctaggtcccggggcggcccattcccgcgtggccgctgcagttccggcccggtcagctgtgccagggagcccgtcgggtctgcggccgcgccggggtggaccgtcctcctccccgccggccctccctgggcgg

SEQ ID NO: 34489 - DNA, 360 bp, Mus musculus
  source 1..360: mol_type = other DNA
caaagtttttgatggcagaaatttgccatctcggtcttacaaacttggtgagtctggataactgacccagactaccaaatctttttgaacatctttaactaagatgctgaatacccttcaggaccaggcccagactgctccagcccaagccccacccaagttctggttggggaggggcctctagtgctaggtaccagacatcgaactagggcctttcgcaagggcccggtaccgagcgcgtgcgcgcgcgtgtgtggtgtgcgcgcggggcccccaagatccccgcagaccccgagcggctgaggcccttcccgcacgggctggaggcggcggctgcgactcggcggcgctgggaatcgg

SEQ ID NO: 34490 - DNA, 393 bp, Mus musculus
  source 1..393: mol_type = other DNA
attcaaacctttagtaaatgggtatttaagtaatttaagacaacaaataaaagttaaattaaaatctgatttctctctcttatctgaattcttaagatgcagagtctaacagtctcactcagtagttcagactagactggaattcactgagtagttaacagcgctgagattaaaacaatcaactttttttttttcttttttgatatagctcaggatgaccttgaactcctgctaccactccaatcgaatgcagtgctgagaactgagtccaggacttctatgtaagataatgtaattcattcaagtacttattttcaaaaagtaccataagttttactgttgaagactttaggacgttatagacgctgacagccagaggagggctctcgtccc

SEQ ID NO: 34491 - DNA, 464 bp, Mus musculus
  source 1..464: mol_type = other DNA
taagtaatttaagacaacaaataaaagttaaattaaaatctgatttctctctcttatctgaattcttaagatgcagagtctaacagtctcactcagtagttcagactagactggaattcactgagtagttaacagcgctgagattaaaacaatcaactttttttttttcttttttgatatagctcaggatgaccttgaactcctgctaccactccaatcgaatgcagtgctgagaactgagtccaggacttctatgtaagataatgtaattcattcaagtacttattttcaaaaagtaccataagttttactgttgaagactttaggacgttatagacgctgacagccagaggagggctctcgtcccgttatttccggtctctggaaaccgaggcccggaagctgcgggccggcgtgaaggaggtggtgctggccgacctctggaactccgttccggagctgac

SEQ ID NO: 34492 - DNA, 453 bp, Mus musculus
  source 1..453: mol_type = other DNA
agacagaatgctcactgtggcttgcttaccttatttaaaaaatacgtgcttacacatgttttaacattcaatatcacaaaatgtagtttaacaattcttgatcatggacctgtgactctcaaaggttggagacactatgaatctgaacagacaagataagtttaatagtaaagtcatgtttcattactagataacacacatgtttcactagttaatcattcacatatatccctgtgtttaaaattaggcacaggtagcatgattgtcttttaaacaattcaactcaacttgtttaatcctctcgtcttaaattatattttgattcttggaagtagtgcaaatcacccaagcagaagtaatttactgcttttaagtcaaagccctgcttagctagggagtcagctaaatcctgattaaacagctaatcggtttgtctactaatggaaagaaaaa

SEQ ID NO: 34493 - DNA, 301 bp, Mus musculus
  source 1..301: mol_type = other DNA
atgtaagtgaagtaacttccagcagatattttaaattttcattcaatagaaggtccataggcattttgagattagcataatctgatgactttaggcaaattgaacaagtgcgaccaaataaaataaatatatattaaataaaataagcatgtaaaattaatgttttgcttgcatgtttgtacacacacacacacacacacacagccagatcctctggaatgtgctagaaggttttgtaagaattctttattgggcagcaagctccctatccgggactccgcccacgagccccgcccctccg

SEQ ID NO: 34494 - DNA, 636 bp, Mus musculus
  source 1..636: mol_type = other DNA
attactaatggaccctaaatcatttggctgcgaaagcacggacgtgcctatgcaggaagctctgcagctgactgaacagaccaggtagctgctgttcacaagtcaccaccggcttcccggcggctgcctgcctctccgcctgaccgcctggaagacccggaggagcggagtggcccctaggcgggctgggcgcgcgctcgctgcgcatgctcgagggcagctggattcccggtctggaccagaggctcagagcggccccggcggggaggcgcgcccgtgcgcggcagcggcagcggagtcgcgagcacgctgcgcgctcccgagggcgggatccgagtggctgcgggcggcctgagctgcccggccgacgcctgctgcgagatggcgcggagggctgaggaggcgccgccgcggtggctgcgggccccgggagccgcagctttgcgccagcggggctctggagggcggccgggccggagttcgccggggtggggtcgccgggcttgccccgagctggccctggcaccggcctgtgcgggtgacaccggagcccggcgaagtggctcggtgagcagtgctcagcctcctgaccggcggcttgctggcgtcccatcccaccggcgcgagccgggacgc

SEQ ID NO: 34495 - DNA, 478 bp, Mus musculus
  source 1..478: mol_type = other DNA
cttgttacaggattcgtgaacttttctgacaagagaacggtcattacactgcagtgtgatctaaaccagttgactcattgtgtcaaagagtcaaagactgtgtccattaactgtatgtccctgggccactgtggtgccaagagaaaggaacaaattactaatggaccctaaatcatttggctgcgaaagcacggacgtgcctatgcaggaagctctgcagctgactgaacagaccaggtagctgctgttcacaagtcaccaccggcttcccggcggctgcctgcctctccgcctgaccgcctggaagacccggaggagcggagtggcccctaggcgggctgggcgcgcgctcgctgcgcatgctcgagggcagctggattcccggtctggaccagaggctcagagcggccccggcggggaggcgcgcccgtgcgcggcagcggcagcggagtcgcgagcacgctgcgcgctcccgagg

SEQ ID NO: 34496 - DNA, 270 bp, Mus musculus
  source 1..270: mol_type = other DNA
ctcaggcgcaagactcaggacccatggctccagctgcatatgtaacagaggggcatcaacgggagaaaaggccattacgtttgaaatgtaaataaataaaatatccaataaaatataatttctcataaaactttgctgatctttgctttgctgagagaggcacagagaacttctcctggactgaggcctggctgtctttgctagattgctccgaagaacctttctaagtgtttaagacccttcgttaataataggttttgaaaaaaatta

SEQ ID NO: 34497 - DNA, 410 bp, Mus musculus
  source 1..410: mol_type = other DNA
attcaagacatgaaccatcctgggaaaaattcattgcagttttgaacgtaaaacagagttttgaagttttaagctgagcacaatgtacagtgattgagttctcgaacttggagaagccagaaatggagattataggaattttacatcttgattctctgaaaatgctcaggtctacgcctgccctgtgtacagcaaggctcggggcagccaaatacccaaagaaaaatctagttctttctcagttttgaaagatgtggtgaacataacatagacaagttctttgcaactttaactgaatgccttattctgataattattaaaagaagggtcaaactaagcccttacaggtaatctattttatctcacttaaaggtactttgttaattattgaacatagaccatatttaata

SEQ ID NO: 34498 - DNA, 229 bp, Mus musculus
  source 1..229: mol_type = other DNA
aacagttttcagatggaacaatgttctcctacaccatggaggagatttacagagttctgttttgaggatatcctcaataatcggaacattgttttgtgaacatgcactgcatattaagttttaatggaaatgaaggaaaaaatacttccgtgtgttcattcagattttcaggttccttaagtaagggttttgattgaaacactctagtagagccagatggcttcctttt

SEQ ID NO: 34499 - DNA, 446 bp, Mus musculus
  source 1..446: mol_type = other DNA
cggaactctgacttgacgtggggagtcgcccttggcaatgtcaagacattgctaatttgtttaacagaaatacactatattacaaaattatctcctcttttagaaatatttgtaacacccagcatttttcagtattttaaaaaggaaagttttagtgcctttaattccaccatttgaaggctgaggcaggtggatttctgagagttccaggccagcctggttcataaagtgagtttaaaactaagaaacatttgttcatattccagaatgaaataaatataatttataattaatgtactaatgtggaaaaggtatatttgcaagggaagagatgccaggacccctcctctcacctctccagtgcactcaaaccattggactgactcactgttgttgtaaaaacaagacccaggcactgtgttgactgcccggaccagggccagtgt

SEQ ID NO: 34500 - DNA, 334 bp, Mus musculus
  source 1..334: mol_type = other DNA
agagttctgttttgaggatatcctcaataatcggaacattgttttgtgaacatgcactgcatattaagttttaatggaaatgaaggaaaaaatacttccgtgtgttcattcagattttcaggttccttaagtaagggttttgattgaaacactctagtagagccagatggcttccttttgctgcggttaccctggtgagcaccggagggcaccacgtgggcttctgggcgccgtgacccttgcaccggcggggcacgggagatcggggcggcccgggtgggcggcggccacggcggggggcggagggtggctctgggcccgcacttttcccccc

SEQ ID NO: 34501 - DNA, 652 bp, Mus musculus
  source 1..652: mol_type = other DNA
aaaataccgtttcatcttcaacagattttctattttaacctggagtttagttgaaccttatgagtgcatgcatttgaacattcaaaatatattagtcaacctgagtttttaactgcttagctttgctcttatcattttataagatacccagggttctaaaggaaagggagacacaagtactctaagtactctgtttgtgcccaaataaatatgttatcagtggtttttcggtgtcctaacatcgaatgctgtcaggatatcacagaaaacctatgcgttttgcagcatagttctctacagagccaggtgggacccgagctcgccatcaggtcccggggtggtcgtatgtgtaggtgacctcgccaggccacataagagttcgggagcatggctgccttcgcgcgcgtgccactcgctgggccgcgggatgcgagttgcaggtcgcgcgttgggcgatggacaagcttggagcacgctcccagagccttctgtccccggcccgcccccggcccgcctcggcccgcccccggcccgcctcggcccgccccccggcccgccccccggccccgcccccgcccggcccgcccagctcctgcacttcccagaggcctgagcggcgcggccttgcgcgccctcgagcttggcaccgccc

SEQ ID NO: 34502 - DNA, 225 bp, Mus musculus
  source 1..225: mol_type = other DNA
agtaactagattattctagaaatatctcattattattaaaaggccctgtcttttccttgtcagtgtctctatgaagactcccaaggcactccaaattaaagccttaagtgaccctaggcaacttttcctagaagattccagcaggggcgcctgcctgggacccagacagtggctcaggggtaaacctagctccaggttttgcgtcaagaagccgaccctcgcgct

SEQ ID NO: 34503 - DNA, 206 bp, Mus musculus
  source 1..206: mol_type = other DNA
ttaagtaactagattattctagaaatatctcattattattaaaaggccctgtcttttccttgtcagtgtctctatgaagactcccaaggcactccaaattaaagccttaagtgaccctaggcaacttttcctagaagattccagcaggggcgcctgcctgggacccagacagtggctcaggggtaaacctagctccaggttttgcg

SEQ ID NO: 34504 - DNA, 367 bp, Mus musculus
  source 1..367: mol_type = other DNA
gaattcttgactaattttcagatcatttagagacattttttaatttaaattaaaacttaaaagatttagatagaatcacccagagcttctggggcaccagcaagcttgcaatgataacagcaacatttaaatattatttaattgcatttctagatgtacatttatatgccatgttttgttaagtctacacttaactcttaaggccaaaattactttcatttatttctcctttcagccctagggaaaaagcagtcaacctcggggagagcctctcgccaccgggagcctccggcggttgctagcttcctccgcaactactgccggaaccggtgtacgccgctcagtgttgtcgaccggcgtcaaggcg

SEQ ID NO: 34505 - DNA, 253 bp, Mus musculus
  source 1..253: mol_type = other DNA
ttcattattgtgatgacagaaagcacgggtgtggaggccaccctcattctattagcagctggtggcccacgccgaggccagcctggtctacagagtgagttccaggacagccagggctacacagagaaacataaaataaagtaaaatattatcaggagtttttaaaaaaaaactataatttctgttgttttaatccagtaaatatgtggtgcttgaaacagtaactgtgtggcaggggcgctcaagagcctgc

SEQ ID NO: 34506 - DNA, 502 bp, Mus musculus
  source 1..502: mol_type = other DNA
tctttttttccctggaagaaaatgaccttctaaaagacaattatgtacatttgtctaatgaatggttcctataaacaacataaaggaagagttctctcctttgccaagtttccccatggaaatgaattagatttttaagttaaaaaaaaaaaaaaaagaaacccagtcagcttttggttcttatcacaacttgtcccttgtgaaagactgtatcaactagtgcttgcaagaaattattttttgttttttaaatttttttattttttgtaacaggaagagggtatcggatcccattacagatggttctgagacacatgagtagtcagtgttcttaaccactgagtttttactcaaaagcaaggtgtacattgttgtgatgtacaatctagttcagaagtgagaaccactaatgccagcgcctgcatccaggccccgtggctggcactgtaatcagttggctgcagggcgccatccagatctgggtctggactcaaagtcccgc

SEQ ID NO: 34507 - DNA, 433 bp, Mus musculus
  source 1..433: mol_type = other DNA
taaatcatttttttaaaagttctaaaaggtttttaatctattagtctctggacttaatcaatctttgcagacacagacttgttacactgacatttcaagaaagtcattttccaatatttaggttaagaatgctgtgtttcttagaatttttgtaattaaactcctagtctggaaagttgacattttagatatatgaacattgttcacgctctctgcttctcagttacttttccttaaagagtagctgagcgaagttgaactgaaactcaggctctgcgactcaggcctggcacagtgagttccacaaagcggaactgattcttagaacgcatttgctcttcgattgtaccgaccaactcggtaagcctggctgagaatcagtgtgacttcagccgaaaagcggatgttattatcattcacttccgggtgagaa

SEQ ID NO: 34508 - DNA, 542 bp, Mus musculus
  source 1..542: mol_type = other DNA
tttgggatgaccctgtgacaactttagctatgggaaatgggagcccctttcatcagcacccattcttatagtcatacttgaattttaaattgtgacaaatcatatgtcttcaatatttttatttctttaaggatttaaaggatctagaacattggttacccagagtgggaaaaccatttaatacacagttgcttattttgcgatatccttggtaacgatttccaaggtgggaagatttctcacctagagcttacctgagctctttaaagcaatgagagcggctcagggcaggtgagttccctgcgctccgcaaggcgcctgcgggcgggagcgggtggaaccgagggcggcggctctgggctcggctcagccgcagccatcgcagcctcccgcgccgcccgcctccccgagcccgggcgtccagccccgcagctgcggccgagcagaggcagcgcaccgcggggatgcggggcgggggcagggcgcggggtaggtgacattatcccgcctctgttgccgggcccaggggagcaatgacatca

SEQ ID NO: 34509 - DNA, 400 bp, Mus musculus
  source 1..400: mol_type = other DNA
tagctcagaggatgagagcttatgcctgctgaaatgtagaatgacgccctaaattttaggagtttacccttctttagttgctgggataaaacactgactaaaagcaactctaggaagggtttctttctctttggcttagagatcctaatcaatcattggaatcaaattaatgtcaagttgacaaaaaaactagtatgaacttcatattagattcatactagaatctttctacttccaataaacgtctaaactgagtgtaaggagttttctgctacatacggtgtatcctgaacagaataaaggagcgcattgaaagagaatgggtttctcggaaaaagcatttccgtacttgattttaaggtctcgagttaacggtgaccacaaattcacattataatgc

SEQ ID NO: 34510 - DNA, 465 bp, Mus musculus
  source 1..465: mol_type = other DNA
tgttttgttacagcgatggaaaagaaagtaacataaaattaacaagtattctttctattttgcttcttcaagagaaaattggaaatctaaataggagacagctctttcagagaccctgtttggttcccagaatccacttctgacagctcacaaatgcctgtaatttcagccaggatatctgatctcttctgccttcaatggcacctgaacacatgtgtgcgcatgaacagcacacacacacacacaacagattaataaaaaattaaaataaatcttaaagtttttttttattaatggaaaccttgtttcatcacaggtggtcaggtgaactgctctagaagttcagcagaactacattacttctgttctgcaactggcctggcagcccgaccctggccccgcccttcgccaggccccgccccgcctccggccccgccccgcctcccggcctcggtcttccttccg

SEQ ID NO: 34511 - DNA, 179 bp, Mus musculus
  source 1..179: mol_type = other DNA
cgcgcgcgcactccaccagagcgcctggaccgaccgcccggctgctgggtttctcagcctaggagacagatggggggcggggcccatcggggggtacagctctgcaccaatcactggctcgtggagggggcggggcccaggcgcgtgccgctgcgagcgggctctgccaagaggcgcgg

SEQ ID NO: 34512 - DNA, 225 bp, Mus musculus
  source 1..225: mol_type = other DNA
ccagaaaagtatccgtacgggacacctgtgcgctgtaattctaactatacgcgcgcgcactccaccagagcgcctggaccgaccgcccggctgctgggtttctcagcctaggagacagatggggggcggggcccatcggggggtacagctctgcaccaatcactggctcgtggagggggcggggcccaggcgcgtgccgctgcgagcgggctctgccaagaggcg

SEQ ID NO: 34513 - DNA, 418 bp, Mus musculus
  source 1..418: mol_type = other DNA
atctgggctgcacaaatacatgtactatagtagccctacactgcagatgtcatttgaaaatacgttgattttaacatctaagagttagggtatatttaaatgcagcaggcatttcaactttaaagaacactttaataaggaaaatggatcggaaaatatttttacaaaattgtaactcttgtccagagttacaatgtattgcaaatttctgggtcactgctgcagagcagaaggccgggctgcgggaggccgaggcaggcgcggggctctccagagcccggcctgaagctgatccccgccgttcgccttcagcggagagctggccacgaatccctggacttgtccgggccgacgggctctcgcgagatctcggtccgcgccagtgaggactcgcgagagggcggcgccggaggcgggg

SEQ ID NO: 34514 - DNA, 253 bp, Mus musculus
  source 1..253: mol_type = other DNA
gagtctagatgattgctgaaccattggtttgagaaaaattagaattcctggatatattttaagtcttgcagtattttaattcaggtgcagtattacttattaaaattattcattttccataaaagggactattctgggctagtgcctctgaatgaggcggaggcctgggagcaggctgtgcgcgtgacccgcgacaagcggctcgggtgcgggggacttccggggagcgcgcgtgtcacgggcgaacgcggcg

SEQ ID NO: 34515 - DNA, 698 bp, Mus musculus
  source 1..698: mol_type = other DNA
acataggcttataccccaaattcacctgaccttaagtgacataacttttttgaaagaagatacagcatcctttatgcaaatcactccttagtactgttttttaaaaatatttatttatttaatgtatatgagttcactattgctctctatggttgtgagccaccattcagtgctctctgcaacacagatgctgcaccagtaccagcgtggtagcacattgctcctgtgcttccatgctaagtaagcaatggtgacttttgaagcaacaaaactagcttactaagaaactttcccaaagaacaatataaaattattcatgagcttcagatattatgcatataattgattatgaaaatgtaccagtaacctaattgtagaattcctctgctctatagcacaaaaatatttaaatatgtcttcgaagactgccagaattagaacatgttttttcttatgcattctgaattgcttttaatacttggtttttatttaatcaaaacatataaaatgtatatttttattagcatatggatatatagttacttaaggctattcagaaatgtttaaatatttgtatataaatatgtctctgtatatattttttgtgtataaatatatcaatgtatgtatttatacacacaaaatacctgtgcttacattataaataagtctgatctacatgatcattgaaatgctta

SEQ ID NO: 34516 - DNA, 525 bp, Mus musculus
  source 1..525: mol_type = other DNA
tcaacaaagttgtcttctggctttcagtatgtgcacccacacacatcatgcctgcatcatatatacgcacatgcacacatgcacacatacaataataatgttcttattccactgaatatgggcacataatatgaagtgagaattaacaaacaaatgtcaaatgccagatatgcaagttaagaactgtgtttattatttagttactttctgaatcctaagtatttactctctaagattttgtttccttatatgtaaaaaatggcagcctttaatagcacatgcattcatttgtacaaggtgtttgcatgataattaaatgaaatataaatataaaagtcacagctggaaatcaaatttcaagttctaggcatatgccatgcatgtcactgccacatgcttgttagtcagatgcaacggtctgcttctcatgtcccaccagggtcctggactcagttctgtccaggaaggtacacaggtaaatctgccttccgcccggaagtagtcactgcaggctgctaggaccgc

SEQ ID NO: 34517 - DNA, 402 bp, Mus musculus
  source 1..402: mol_type = other DNA
tagtgttttctctattatgaaacagtttaattagtaatagtccttaaaaaaatgaaaacttttttctttaagttggttagacacaactaatctattcacctaacaatctttaatagatttcacaaccacagtctgggaaaaatattaattcgaaaacttattttcttgctaaggaagatagaatgtgtaccgtagattttttttttcttttactcctctgaagaggttggaagatctccgctccactccggagtcgccggccggcgtccctgacaacgcccagatgtctgcgcatgcgcctgtgcggaagggtgggcggggcggagtccagggtgcgtcctcccggccaccagggggcgacgagcgcgtcctcggcgttttaccggtgcctggcccctggtg

SEQ ID NO: 34518 - DNA, 415 bp, Mus musculus
  source 1..415: mol_type = other DNA
gcatgatgctgcctgggtgaagcctgggttgcggcatggtggagacctgcatatccctgaggatgggtgttaaagcttcagactgcatgtagatcaaataggagctcttagctactgctccagcagcgtgccatgatgctccctgccacgatgatagtggccaattaaatgatttcttttataagttgccttgtttgtggttctaaaaataaatcttgtgctaattcacattttaaatagtgaattaaaaatgtccaatttgaaagtgccaagtttctcttctattgaaatacttgaaactattaaagacataaaaatataaagaattagaacctcactgtgcagttttgtttttgtttttttttaatttttgtcaatgatacaaactaggaaggaacctccactgaggaattgc

SEQ ID NO: 34519 - DNA, 384 bp, Mus musculus
  source 1..384: mol_type = other DNA
tggccagaggaacgtcctgcaaaacctgacagtgctctgggagattctcaagacccgaacgcaaaagataacttgagggaatcagtgaaagtgacctcacaacttgttgggataggcactgtgacatcaccaagactgattccattttcgtgaaaggcagaaacgattttgctgatcagattagtgaataaaaaagtagttaattgttatatttagctaattttgattttgagaaatatttacatatgcttttacggcttaaaaccaggaaataaatggctttacggcagagcatttctctttaaaaacagatgccatttgtcatatctggacacttcctgttttgaagatttcaaaagaccagagtcacacagtgtggctcat

SEQ ID NO: 34520 - DNA, 519 bp, Mus musculus
  source 1..519: mol_type = other DNA
aatcagaatgcgaagattatgaaacaaaatcaaggttcacagaaatcagtcagcgatactctgattgtcgttatatttactaaatgtgtgaataaatatactttctatatgtatttgaatcgtagtctaaaagtaaatttcgaggattgacttgtagtccaacaaaataaacaaaaactttgcaaagtggagctctatctatctatctatctatctatccatccatatctatccatccatgtatctatctatccatctatctttctatgtgtctatctacctatgaatttatattttaatgttgcttacagagaagagtcaattctgagcacttgcctgcattgagctccctgctgtcgccttctggctggacagtctgtctgcatatcggagacgcagcaatggaaccagtggctatgtgtgcgcgcacaggtgccacaggcctggagagcaatgctgtgtctctgcagcctcccgactcaacacacgcggtggcttgctgaaactgcatccgcagcc

SEQ ID NO: 34521 - DNA, 683 bp, Mus musculus
  source 1..683: mol_type = other DNA
cacatacagacttgaattcagagcccaagctcatcttgaaacctgggtatgatcatcaacctgactgggagatgaagccgggctggctggccagtaaacctacttgtgggaggctggcctaccttttgccaagctttatcatggagttctctaaatttaatcaaagctaggcacttcagaagccaaatggatttatctactggacgtgttatatggactaatatatttacataggaaagaagcaaaatattctttactaagtacaatcagccttctgatttccccattgattaagattggaaaattctaatgccaaacgattattcctttgtccgagtaaataataataataataataataataataataataataataataataagctttagaacacatgaactgaagtccatggcgtttgctatacccaaatagattcattttggaagaacaaaattcaaactgatgcagtagtgtggaacaagtttctctaaaactgacttcattcttggcaagtaaaagccccattcactgttcaaagtggattagtccgctcagcgatcatttgataaggattactgagtcagagccgcttcccgcaggccacgcccagctgagggcggagagctcggcaccctctgcgcggtccgtcccggggtgcctgcggcaggctgaaggctga

SEQ ID NO: 34522 - DNA, 615 bp, Mus musculus
  source 1..615: mol_type = other DNA
atttacatgtatatttcaaatctcttttataatccggtagttttttaaagggaagcctttacaatacttttcacagccttgttaccatgcaacaaaaacaccagatgcagcctcgcctctgcctttctactgtaattgtacaattacacaattgtattgtacaattgtattgattcctagtatacttgtggaataactgtttgataaactaaaacacgttttcaactttaaaactttggaaatacccaatgtattataaatctgagtaacatttaaaaggattttttaaaagtgaaaaacaaatctggtctctatcagagagtctcaaaagtgtaaaagaactttcatttctccttggagcaatttttcctccaccatgaccctgcagtagactccaggacaagctaggggactcggagcctctctcgccccgcgctgtcctttaggaacctgggaggggtagcggtgcggccgcaagagctgtcagccctggtatccacgcggaggcagggtcccagaccccggtgagcaattgtgaggccccggaactgagacccacagggactgcgcgctcgcccgccagccaatcgtgggccgcctgcctgcgacgccctt

SEQ ID NO: 34523 - DNA, 316 bp, Mus musculus
  source 1..316: mol_type = other DNA
gaaacgttttctaaggtcctattttgcctgagaagaacttttgtcgggtttattcagccagtgaagctgcagtagctaattcccggcaaccgatctgggagggaatcctggactcgcaacccgactccgctcggcgttgattggctcctgctcaggaccccgcctccaaggtagaggcggccacttcgtagggacccgccccccggccgtgggaatcgccgcctagcaggcgggctgcggctgccactcagtcggagtggcggaggctctgggttcgtagccccgcctcctcccccctaattgatattattggagt

SEQ ID NO: 34524 - DNA, 463 bp, Mus musculus
  source 1..463: mol_type = other DNA
taagttatcttaactcagagacattagtccttcaaagacaatgtcctcaaaggacataaacattaaggacaatgaagcgtgactctccttatagctctcacggattctcaaaccaaaccctcggggctgttgtggacgacagcaactgccttagcgccagtgagcgctcacgcgtcacggtgctccccccgatggcgcgcgctaaccgctgctcccgaaccccctcgccagctcggggttcatctttcccgctggatcccgcaggaccaaccggtccgccttcgggctcgctccgcgccagttccgatcgcggaggccctttcgcaaaagtctcgcgaaacctgttcctcgggcccacgtccccgggtcaggaaattccccgctcgggtccggcaggcgcgcctcctccctcccagttccgagttcaaaccggaactggaagtgtggtgggcggggcccggcg

SEQ ID NO: 34525 - DNA, 321 bp, Mus musculus
  source 1..321: mol_type = other DNA
gttcagtatttgaaatctttaacagcaagaatagatgtagacagccactctaggattctgtgttcaccctgagttctctaacggttttgacttcgagggcatttctagggaaactcagagctagcttacctacaagagataacggtgtgatttctgaaagttacacttacactgtaaaatgtcaaaaggagccagacccaagttttaaaaaaactctgtctgtggtccaagctaggcctagtgtgaaaacatcacagtctccccttccacatgggaagtgaggtatttcctagagggcatctttgcactgtggacatcccc

SEQ ID NO: 34526 - DNA, 411 bp, Mus musculus
  source 1..411: mol_type = other DNA
gagagcagctggcgctcttagaacttctgcagttacatctgtttctgcaactcctgcaaggcccagcccaggctatcttggcttggccagcagatggcaatgtaagcctaaatgtcatgtgctaggctaacctttaatactaacaccagtcagagaggctaaacttacaagtgtatgtcagtcaggtgtagtttgagcctagccaaggttgcttgtttcagaaaaaacaatccaggtgagtttcattttaagaacatgtcatttatcccagtgtataaaatatttctaatgtaatctatacaagttatttacaaaaaattcaatgatgaaaaattaaaatctaaagcacattttattgttccagtggcttgctagacatgtgtaggacgtgcccaggaatcttacagatct

SEQ ID NO: 34527 - DNA, 551 bp, Mus musculus
  source 1..551: mol_type = other DNA
ttacttttttaaattttcaacttctaagatcttttagacttgggtagggagctgctcttctcaaggcccacttcccataaaagggggcctgatgggaagctgtagtcggccgcggaatgtcaggttccaggtcatggctggcgacaagccctgactttcaaggcccgggcaaagagagtccgggcggggaagacagggctcttcgggccgcgcggcccgcacaaagcctggagcccggcgtccgcggcggcgagaggcgcgccccctccccgagccagccggcgaagcgcgcgcccgccagccggagccggagccccgagagcgccaagcttacgccagtcacccggcgtaccgcgccccagcggccggggaggtgcgctgccccgctcccgtaaagttattgtgaatggggagcgggcgccgaatgtcaacgttccgggagagcgcgagccgcgcggcgcagccagcagccccgccgccgccgcctcagcagccagccccgcggccgcgcaccgggctgcggtcgcccctgcgccccgcttcgcccgccg

SEQ ID NO: 34528 - DNA, 360 bp, Mus musculus
  source 1..360: mol_type = other DNA
gcatgtcagaaatgtcacatatttctgtgatttgcaggtatagcttccctgtaatatatattcccttgaaccttaagtgtaaaggttgcattagtaagtcttaatccgttcttcattcttatttaaaatgtgtttttaaaagttaatgttggaagatctggaagggctcctgtcccttcagcatcattaatttaaaaaagattcttgagtctgaggcaagcttgctctgcagagtaggatagccagggctacaaaaaattcaaagtataatataatgaataccttcattgttttattttaaaaaatgtgtaaatttttaaaataaggcttttttttagtacactaattttaaagggaaaa

SEQ ID NO: 34529 - DNA, 262 bp, Mus musculus
  source 1..262: mol_type = other DNA
aaattgaattttttttctttctttttttgagaaagagaacatgaagtaaaacgataaaaataatttattgtatatatatatgtatatatatatatatatatatatattttttttttttttggccaggctgggggcccggctttccaggatggcatcttaaaggtcagatcttagcgctgtctcgtcttttccgcggagaaaccccgccccgttgtcactgacacagaagagtaagtaccagagtttggcgccgcgtccgaga

SEQ ID NO: 34530 - DNA, 325 bp, Mus musculus
  source 1..325: mol_type = other DNA
ttgaaatcagtttgccagacttaggattaaagtcacgccttcaatcccagccctggggaggcagaggcaggcggatctctgaggtcagaggcctgccctgtctacagagcaagaacaaaacaaaacaaaaactggtgtgtgtgttgtgtgccacatgtatgtatgtatgtatgccctcaatatattttgtttgtttttttaattaagcaattatttccaggatttgtaagaatacttcaatttttctcaaaaggtcacaggacctgtgttctagcagtggcgcggcagtgacgcatttccgcccacgggggcgtggcagtagtcg

SEQ ID NO: 34531 - DNA, 269 bp, Mus musculus
  source 1..269: mol_type = other DNA
atttatagcttgatacctcctgagaaagtcatgaattatttaataaatgatcttgaatttttagtcgaaaataacttacgtaaatatataataagacaatattgtacagcctgatatgttaatgtagagttaaagctctctatataaagaaattatccaagggccattgaaatggctcagacatcaataacctgacttctgggtatggccagcataatggggttctccgcggaattccgtgaccagggtgcccgagggccacttccgct

SEQ ID NO: 34532 - DNA, 254 bp, Mus musculus
  source 1..254: mol_type = other DNA
aggctgccaagtgctgggattaaaggccaccacgcccggcttaaagtgccggtgatccttattctccctgacaggacaatactcttagggttttccctgagagcagcacccaaacaaacttgactaagtgaggcgcttccaggacaggccaaatgcttgttggcagccgctggctgaatgggatgccagacagggtgtctggtttgcgtattgacatgtaaatggcagagccctcagccctctcctatatctgt

SEQ ID NO: 34533 - DNA, 271 bp, Mus musculus
  source 1..271: mol_type = other DNA
cctctccttggagaagctttcctgttgaaagcacgtcacggattagtaacggctccgggccgggagctgctggcacctgcaggatccctcacactgtgctgagcagctggcgaaggaggagagcacctcctcatccgcataagaagccccgagggcgttatacacatgtttatatataaatcacgagacatgtgacttctccggaaacatgtctacgtagaccacagttttagtgacttctcccagctcccgcaggctggagtggcggtgg

SEQ ID NO: 34534 - DNA, 346 bp, Mus musculus
  source 1..346: mol_type = other DNA
ctcacactgtgctgagcagctggcgaaggaggagagcacctcctcatccgcataagaagccccgagggcgttatacacatgtttatatataaatcacgagacatgtgacttctccggaaacatgtctacgtagaccacagttttagtgacttctcccagctcccgcaggctggagtggcggtggggcactgcagaaagcaggcggcagggtccgggtggtccccgggccacgcttgcagcagaagtccccgagggcggtggccagtgcgctctggacacccgaattctctctaggtgtggccgagcaagcggtggctgcggccggcgagcgcgcgcccggtggcag

SEQ ID NO: 34535 - DNA, 463 bp, Mus musculus
  source 1..463: mol_type = other DNA
agagagagagagagcatgcacatgcgcgcgcatgcatgcctgcatgtgtgcatgtatgtgtgttaactttcttgcttgcatttttcttgagtagaatggcattcatataaggctatgaatttgaaataaacacattctttgaagtaaccttttgtttacatttttaggtactgaaaaagtagcgtccctgctggtccttcaccaggcagcagcgggagagaggatgcccgaccctctctaaagccgaggtggagggctggagggttctccggtccatccatggcctggtgcccgatgccgctgaggaaacagccctcagcgcgggtgtcctcccgctgctcgtgggtcccagtgggagccaccccgcacctccgggatgtgcggttcgaccagcggccgctgcggggcgctgtagccctgcggacagccgggtggggcgtggcccgaggtatggggcggggcc

SEQ ID NO: 34536 - DNA, 679 bp, Mus musculus
  source 1..679: mol_type = other DNA
agtaatttgtgctacctgccttaaaagatatgacaactgataatgggttttttgttttttgtttttagtgcaccagaaaataactggaggtagtactgaaattggatatttcaaccacaataaaaatgggatatttcaaatgtgagtcagtagtgcggaccgtcgtctgtctcctgcttcgctccgcagacaccgggaggaagaggccaggagcggaggagcgccagcgcatcgggggatccgcagcggccgcccgctctgcggcctgcacccccggaccggccgcggcctcgcgtaaagcgcgagcccggagcagccgcgagggccggcggacacgagcgggccgaggcgccgcgctctgagtcccgggtcccccgcccgtccgcccgcccgccgccccagcccggctcacccgggctcttgcgggtctccatggcggacgtccccgctgccgctctcgtcggcgccgcagctgcccgggtctcgcgcggcggacgcgcctagcgagggcctccgctgacaccgcccagtccagcccgaccgcgggcgaggtgcgtgccgcggggtccgcctccctgagggccggccgggcgccggggcgtcgccgaacggggcgccgggctgcggacggcctgcgggactgacgtcccggctgacgcgccgctgcgtcaccgccggc

SEQ ID NO: 34537 - DNA, 610 bp, Mus musculus
  source 1..610: mol_type = other DNA
gagaagcacattgaagctcggttttgcttgcttctctattcttcagattatcaccgtactattcagaaaaccttttttttttccctcctccttcagacggctgggaaaaatttgacaatgttaaacaagaacactaatctgtctaattcaccgcggagctaggggccactcccgtccatcgcaccgaggccaactgcgggctcggagaagcgcacatcacggcgccgcagtcccaggccgcgctcgcccgcccgccgctccgggctgcgccgttcctccgagctccctgcgagctccgcgggaacccctgaagggcccgcggcgagtcggtctcccgggctgggccgaggggacgacgagggtgccgcccgtctccccagggctgccgggcgggcgggattcgcgggaccgccgctgccgagtgaccgaccgccacgaagcgcccgccacgtcaggccgacttcacagacccggcgccggcggtgacgcagcggcgcgtcagccgggacgtcagtcccgcaggccgtccgcagcccggcgccccgttcggcgacgccccggcgcccggccggccctcagggaggcggaccccgcggcacgcacctcgccc

SEQ ID NO: 34538 - DNA, 377 bp, Mus musculus
  source 1..377: mol_type = other DNA
caggctggccttctctttgagtctatccctttagagacatgaatattggctatatagagagagttcaagttaagccccgaatcagtttattgacacagtctgaaagtctcaactgtctgataatttggagtgctgaatgtagtcctacttcatgggactctgactctgtcctgtgatggagacagaacctgggcacatagttattgatgactgttcatttatgtccagacatttccaaatggaacagtgtggggtacgacagacagacagacagacagacagacagacagagtctctgcctttctgcatttacttttttctttctatccagttgacttgaaaatacaactaatttagacccgccccagggaccgtcc

SEQ ID NO: 34539 - DNA, 506 bp, Mus musculus
  source 1..506: mol_type = other DNA
tataaactagtaaaaattgattacagtctggctggctttgtagaccaagctggcctttgggattaaaggcgtgcactccttaaaaaaatcatatatatatatatatatatatatatatatatatatatatatatatatatggtatcttatttgacgaaaacctcagactactaattattaggtgtgtatcatcaataacaattttgaactttcctcatcaactttagacccgttatgaacacaagctgtgcaaatcatgttactcttgtcaatcaaaattttggataaaacttgtcctatacaattttggcgccccagctccaggccgagccttgagggcggagctacagggcgcgagcgcggggcgctggtcgccgaagccgccgagggcggccgaggggactgccaagggctgccgaggcgcctagccttgcggagggctgccgacagctaagcgttgccaagggcggccaagcgctgccaaggtgccgccgagcgcggcgccg

SEQ ID NO: 34540 - DNA, 421 bp, Mus musculus
  source 1..421: mol_type = other DNA
gactcctgtgaatgttaaaaaaagttttaaaaaaggaaagtgagtccattcatgaatttatatcacattataaactagtaaaaattgattacagtctggctggctttgtagaccaagctggcctttgggattaaaggcgtgcactccttaaaaaaatcatatatatatatatatatatatatatatatatatatatatatatatatatggtatcttatttgacgaaaacctcagactactaattattaggtgtgtatcatcaataacaattttgaactttcctcatcaactttagacccgttatgaacacaagctgtgcaaatcatgttactcttgtcaatcaaaattttggataaaacttgtcctatacaattttggcgccccagctccaggccgagccttgagggcggagctacagggc

SEQ ID NO: 34541 - DNA, 459 bp, Mus musculus
  source 1..459: mol_type = other DNA
gaggccagcctggtctacagatcattaaagaagtatgtttcaaacaagatgaattacagaaattggttctgaggtccctgtattaaactgtgagtagagaattctgttaacccagttagctagcaactgtaaggccttcggcattatagagtacttctgatgagctgaagaatccttcagtaaactagccaaatttcactgtaggttaaatgcagatcttcaccagtgctgtaaatccttagtgaaataaatccttagtgttctccgaaatctcttaaaatttttatgtagggctgaaatcgaaaacctacaaagcagtcctttctggaggtcagaagcttaagagcccgttgggcgcgcctgcgcaacgtgcgctctttgactggcaggcgcacgcggattgggccgccgcagggaggtgggcgggcacggggcggggcctcgggtaacaacactggc

SEQ ID NO: 34542 - DNA, 423 bp, Mus musculus
  source 1..423: mol_type = other DNA
acaggtcaattaggtcctcaatcgaggtttcctcttctcaggcatgtcaagttgagaaccagcttgctcctagtggcccacaaccaagcttatagctacagcttttcatatggtgttgatcccagcgaggccagcctggtctacaaagcagctccagaaatgatagtcttaaggcttctggtcatttataataacctagactctggtttgaaaagcactttttcacctgtgaaatacccttctgaatgtagcaggtcagtccacaggtggaaagaagcttggattccttctactttgggggtttctccggtttagatggaagcagaggccggcgccctgagatacaggggcggggctgaagggggcgggccaggtggaaccgcctatctactgacctcggaagaaagggggcgggccctttgg

SEQ ID NO: 34543 - DNA, 663 bp, Mus musculus
  source 1..663: mol_type = other DNA
gtagccacaaccgcctggtccccggggcccgggcggagaatggccccctcggctgaagctattcctgcggcggcggccgggcgcaccgccggtccccaggctcccgccccccccgcccgccgcggatgcatctccccgcgagcaggaggtgcggggagcgccagggctggggagggggcgccgggcgcccacagagccgagctcgtgcggccacggctggaggctgggcgcgcccgggtggtcgcgcgggccagcgcgggaggcgcccaggcgacgccgtccgccccgagggcggagggctggtggccgcggccaggtagctgagggggagggtcgggcggagacctcacttggccggccttcctgccgccctgtttccggatcccgaccgcccggcgcgtgacctccagtgaggtcctggcagcagcgctggtgattaacggccccgaggtcgcgggcagtgaggcacgcgtcccctttggccacgccagggtgggagggcgcctgggcgccgagcgccagggccgtccctcctagcccccgggccagcgccgcggcgggtaccgcgcagcaaagtttggagccgcgggcgccgcgcgccggtccctccccgcgcagatcccttggcggagtctctgctgccgccgctgccagggcaggaca

SEQ ID NO: 34544 - DNA, 444 bp, Mus musculus
  source 1..444: mol_type = other DNA
tgactcaaaaatctgtttctattcccaagaagaaatatagcaattgaatatcactcttcattcctgtgacaaaaaagtgcaggaaattataaactctaagatcttcaactgattcaagtacaaatagtatggtattagttttagggaaagatcttatctagcagaagagattctaatttaaatcaatatagtcactgctgaagccatctgaagatgaatttttcaaatctaacttggaggagatctaatatttttaagacaacaggatttttatatctctttgaaagttgagtcccattaggtgtttaaaaatgcattggaacccaagcaactgacatgaaagggcaccggaagtcccgcccttgtcctagccctggctgttgaaggggcttcgaatgggcgcggtgacgcctcaatggttaccagacacggtggggttcgcag

SEQ ID NO: 34545 - DNA, 460 bp, Mus musculus
  source 1..460: mol_type = other DNA
taaacaaatggatatatagagaggtattgtccaacatatgttgatttctgagtaagcagaaaagagtgagcattaggcgtattaatacttataatcttgggcagaagatataaagtatctacataaattacttcatcagtgctgtagtcgatccctattttagatagttgatgaaaaaacaaattttagaaatatttcttcccactttgctaataaacaaatttctggtgtttgctccttttcagctatgcagaatttaataagcaaaagatcctgtaatctgatattatttttcctgacagctaaattaatctctctccaaatattagactggctctttgttacgtttaagtcactatgccaaatcttcacagggtttaaactctcttacttatgagggggtatttaaattccaagcactctggcgggcccgcccccggtgcgcaggcgccctggggcc

SEQ ID NO: 34546 - DNA, 421 bp, Mus musculus
  source 1..421: mol_type = other DNA
acaggcaacctgtggcctacattaaagtcatctctgtaggctgtcagaattgtctaagtctgtgctagcactagcaaactccaggcacacgcgaggagtacaggtcaagtgtctttctccaccttatttgaggcagactctcaccgaaccagaggctggagccaccggtttctgtttccacctctgaagtgtggggttcaacctaggtatggtctccaagtccggatttacaaaatttcttattcgagatatatcctaccaggttctaatcatggcctctggacagtcccagtgagcactcagggctctcgaggatcttcccactccgcagcgcaaggaggaggcagggtcggcctaggctgcaccctccggccctggctggcgccgcctccgcgccggaagtcgcctctgcttccgccag

SEQ ID NO: 34547 - DNA, 459 bp, Mus musculus
  source 1..459: mol_type = other DNA
aacaaatttctggtgtttgctccttttcagctatgcagaatttaataagcaaaagatcctgtaatctgatattatttttcctgacagctaaattaatctctctccaaatattagactggctctttgttacgtttaagtcactatgccaaatcttcacagggtttaaactctcttacttatgagggggtatttaaattccaagcactctggcgggcccgcccccggtgcgcaggcgccctggggccgcaggactacctcgcagctcccgcgcgtggccgccactcacgagcttccgtctgcaccggcgtgtcggagatcgcgtctgggtcgcgccactggccgggtccacttccgaagggagcgggtctccgcgcaggagccccggcgcgctcagcccgagcgcacggcgggggcggcccggcctctcgggagcggccccgagccggcggcgcgaccctc

SEQ ID NO: 34548 - DNA, 389 bp, Mus musculus
  source 1..389: mol_type = other DNA
tcttagaacaggagtcaagtaaatatggttgctaatggtaaacttaattttaagttatcttaattccagatgctagggggcatacaagcctaggatctcatctgaattacatttttattcttttgccaatgagccaattcaagatcagctgcttatgagtatttctgggaacagaaatctatttcttaaagcacagtgtccgctctcctagccttggcgccatggcctagttgcccagagcaaagcttgcctcgaacccggacctgggcaaagcctgaggcgagcgccacccccacgtaccttagacacggaggaggtggccatagtccgcggccccgtgtgcatgcgcactccacacttccgcgcgccctggcggaagcagaggcgac

SEQ ID NO: 34549 - DNA, 316 bp, Mus musculus
  source 1..316: mol_type = other DNA
atatgctgccttttaaaagccagagaattgatatttatatttgaattttgggctcattgaaaaaaatcagaatgtctgataagactggctggcattccagcttgagagaattagctcatttacatttgatggccgattgggttattttctaataacacctctagtcacaaaccattagagcggttgaagtgcctcctgaagttaccaagttaagctagacagcgagcagtatgtaatatatactaaatttatgcccatcctctcggaggggctggcgccccccctcggtcgaccggaagctgcggttttccgagcc

SEQ ID NO: 34550 - DNA, 374 bp, Mus musculus
  source 1..374: mol_type = other DNA
cagtatggaagtgtttcctccccacttgcttcttggtcatgatgtttgtgcaggaagcatggtggcgtgaattcaagatcagcctggtctacatgttcatactatacagtgtagggtgtcttaaaactcaaaaaacttcctaaatgaaaagttttactatggccttttggaacattaaagacttcctttcagaaacagaacatgaaagcattcttttgataaaactataaactttgaattccaagaactcaaaagatatattttccatgttttcacactatcacatgaacaacgtctgcacatcaaacctttgttttagaattcatgtatcattgagccagaccccgccccaagcctctggcgtcgcgttccgt

SEQ ID NO: 34551 - DNA, 388 bp, Mus musculus
  source 1..388: mol_type = other DNA
aaatctaaaaccatagagaacagagtctaacctcctgtcagaaggcctttctgcgctccagccatggactgaaccagcatctgggatgccgttgtctctggcctccccgaggcccatagtcctcagaccccagtgggctggtgtccgtggcttcccacagccagacaccgacctggtgcggcagaagtgtgcagcagtcctcctgagtgcaactgcccagagcaccggaactctgccccctaaaatcattttggactctggcttcccaaaattcaattggatagattgtgttgttcacttgaacagcagctatttctgctcttgtcttacctagcaacagttgttaagtaagttgacaacttaatgctagacactgggagggagaaac

SEQ ID NO: 34552 - DNA, 403 bp, Mus musculus
  source 1..403: mol_type = other DNA
aataatttaaacttaaaatatacctttagttttgaaaattaccacaaacaatgttcacatttgtcaactgataatccattaattatatcatatactttggcttgatgtcctcgtaaaataaggctaggacttatattacttaaaaaaaaaaaacccgtgtttgagaaaatactgataatgtatgatttttgaaattaaatataagcgaactattaatatctatgtgaaactctgattagtaatctctaaggatttttccaattctggatatctctttatataaatatacatgaaacgggctcctgcagttccaatgccagggctcggcccggacccctgctctacggcctccggagcagccccggcgggaacgcgcactggttgggcgcgcaccgggcgaacc

SEQ ID NO: 34553 - DNA, 466 bp, Mus musculus
  source 1..466: mol_type = other DNA
tgggtttgttattagtttgattatgaaatttatggttaagcacattgaatttgtaagaactcatctcgtctccgagtgctgagattacaatgccaaatactgttttcgtcttgcaaataaaatacggcttagtaatggattcttgtaacgcgtaacggtaaccagattttagaaaagcttttgtgccttttcccagaatgagaattgaacctctcattttcgacccaattgttgtgtgtgtgtgccctccaacacctagagcgcgcgttctcgggttggcccagaaccagggcaatcacctggtccgcagaccttgccctcgccctggccctggccctagccgccgccgcagcagcagaggcctcagcttcagctcgctgcagcactgccccggcggtcgccagccggcctttgtacgtgcgcccaggcgtgccagcgcaccgggcacgtgaccccgccgaacgtt

SEQ ID NO: 34554 - DNA, 453 bp, Mus musculus
  source 1..453: mol_type = other DNA
ttacacgtatgtgtacataattatgtatatgtacacatctgtgggtatgcatacacgaggacaggtttagtcctctggaagagcagttcatacagagtttctctgtatagccctggctgtcctggaactcactttgtagaccaggctggccgtaattcttaggctgctgtatgggactatatagaacacacaccatatatctttattaaatccagatgcctgttaatttaagaaattggagcaattgttttatttttctgtttcctgttgaaataatgtaatcctgaaaatgtttttttttatcctgctttatgaaaatatcaggtacttagctaattaaatgtgctactcttagagtcctgtttattttaaaagtgtcaattaatgtgatatgatcaattgatgtcatggtaattataccaagtgccatccaatcactgggtagaaaaagac

SEQ ID NO: 34555 - DNA, 287 bp, Mus musculus
  source 1..287: mol_type = other DNA
ctctaagttgacaaactaggcttatcatcatcttctttgagatccagaaaaattaagaaaactacagaagcttaatttgtcaagattggagaaaactaaattatgttattgctagtgacctagtcatcagtaatcacagtcatttggttaatgactaattcaattacaatagaaatttgactataggaaacatatatcccagaagaatcattatgtctttgatatgaggggccttgcatgtttttgacaaactaagccacacccccagtccctgtgtgtcaggttta

SEQ ID NO: 34556 - DNA, 418 bp, Mus musculus
  source 1..418: mol_type = other DNA
agatgtataggagaataaaagcaggttgacacatccacctcaagaactaagagtacgtctcataattggttcataatcacccggcgaggtagttacgacttcctacctggaatccagacgccatggaggaatgctgctcgctggcttagcttctgggacaggagataaagagtaagctcctccagccggagcagcgatgcttgtagatccacgcgttatgaggggttttttttttaagtcaaaattccctcctaaatatatcaaggtttagttgacaaagaccaagcagcggaccaaagttgagagacttagactgctcattgtctcaggctcttgtggagattagaggatcctaagggcaacaggactcctcttgcccccgcgtagctgcctttccagagaaggccaccaggggact

SEQ ID NO: 34557 - DNA, 405 bp, Mus musculus
  source 1..405: mol_type = other DNA
gataggtattctgttattaatgcctttcttttccctataaatgatgaaaagttgctggaaaataatcccaaaggttaaaaaacaaagtgcactgtgctatttggcaaaaatgacgtgcttgttgcggagtgaacacgtacagtgtgcacgcagactcgcttcgtaacctagatagataacgcaggtgacactatctatctaggttgagctcagctctgcccatgcttttcctgagcggctcttggaagaaaagcccgcctggccagctgccactggcatctcaaggctgccctggaaagtggtgtctagagatccgcaccggggagccctgcagattctgggcgggcctgggggcgtgtccggggcggggcggtcccggggcggggcccggagcgggctgcggtt

SEQ ID NO: 34558 - DNA, 444 bp, Mus musculus
  source 1..444: mol_type = other DNA
tttttaaatggaagaaagttcagctcaatactgtggcagagttagaatgtatattttaatatgaccgcccaggcttttcaaataaggcagagtatcatgtggtgagtaacactaatcaatattgctagctccatcatatactggatgctttccatgggcaatataaattaagaaagcctactggttaccagtaaacagtgcaaataagaacgcgaactctgttttgacttgtcatctgaacagatggtaaccttaggaggtcaccgcgtattttgtttgctctgaggtaaaagaattatattcacaaagaaaatattgcattgctattgttgctcattaaacttaactagattctttagtcctgtgactactgaaaaatcaggactttaggtaagaaagagttcagaaaaataccttgaattatcttctattactttttaaaag

SEQ ID NO: 34559 - DNA, 537 bp, Mus musculus
  source 1..537: mol_type = other DNA
cttttgggcccttaatataaagtaaaagtactactgagacagactgtgtacccgtttttctcaactggtgactggccagacagaccctgtgtggacagacttaatcagtgcacccacttctcctcccgggcggggaccctcgggagacctgactgggtcgcaggacccaccagctgtcgccgggccaggcccctggggcccaggcttgtggcggtgggggccgcgctcgccgtactcccggagggttccctcaagggcccgggagacgctccgggtcgggatcggggagcgcgggcgagatgaggcccatcccctcccgccgcggtgcaaggccaagggctctttcgcccgggggacagggaggagttcacctcccgctggtacccggagccggccggcccgcgagccgaccgtggcagcagcccccctccgccccgccgctgctgcgccttcaccgccggcgcagggaccgcaaccgcagcccgctccgggccccgccccgggaccgccccgccccggacacgcccccaggcccgc

SEQ ID NO: 34560 - DNA, 377 bp, Mus musculus
  source 1..377: mol_type = other DNA
catcgtagcaaaagtttccgtttttttccggaatgagcaagacaaacttccagaggtggacctgccttaagtactgagtaagtgcagtattccacaacctcttgccaaaattttggaaaggggtttttaataaaagcaccctgagcagttctttgcaagagcatgtaagtgaacttcaggagctctttgagaaaggatcaaggagcccctttctccttaggaaggtgtagcacactccaccgcctgctctctccacgttcagggtacctggtcctttactgtagaggagggacgatgtcgccagcctaccctctcgcctgtggcctggggccgcgatcgcgaggctgggcgtgcgtgttggtgcgcgcgcgcgggta

SEQ ID NO: 34561 - DNA, 366 bp, Mus musculus
  source 1..366: mol_type = other DNA
gacattttgcttaaatgaagcagtggcgaagcgtttcgggaaaatttacatttgagtaaaaccaagcttcagctttttaaaacaagtattaaataaattggttttgcacgatttttcctgcagttacatttccgaagaagtaccttgaagctcctgcagcgcaacttccccagaatgggattttgtggatccatctaatacacaccgtagaatgcctgaaaatgtctagacataatatagacataagtatatcttcatattaaaaggcacagattcatctgtgaaaaatgctttccatttcactatctcctctgtagattatgatgtcatcagggaagaatgtaaaagcatctaacactctgtttc

SEQ ID NO: 34562 - DNA, 556 bp, Mus musculus
  source 1..556: mol_type = other DNA
tctcaatgggagagggcccagcccatggtgagtggtctcacctagggttacatgtcacactctgcccctcgtgagggacagtcagcctgggactgagccactagcaaagctagatgcagcctcggggcccagtttctcccgcctgggaggagccacgaagatcaatagccttcagcttcgggccttcgggcctaggaggtacagaggggtggagcaggtcctaggctccgcccccgtccgtggccacgagtctcttgttctaggggtgggacggtgcccagcccctaaacctggccatgtaggggcctgggactcgtcggccgcaacctcaagtcagatctgggccttggggcggaataggccctagactccgcccatctgccaagatcggaaactgcaagcttcagccatcgcttgcagcttctagagggaggaggtgcccaggctccgcccctcggggggcggagtgaggcccgggccccgcccctctcccgcagcagctggttccggcccgctctccaccggtcccgcctcgctgccggagcgtccggaggac

SEQ ID NO: 34563 - DNA, 244 bp, Mus musculus
  source 1..244: mol_type = other DNA
gggaggtaccgtagttacccacttctttctgagagtcccccgtggagagtgtgaagaaggtgcctccccacccacgcccaagactgctcccaggtttgaaatgtaaataacgaaaatatctttaagaacctgccttctgtgcagcttgtcagctctctgtcactgaaacaggacatgtgacaggcagttctttttctgccaaaagtacaggctgcccagttccgaggtcagaggcttctgaccg

SEQ ID NO: 34564 - DNA, 179 bp, Mus musculus
  source 1..179: mol_type = other DNA
agtctctgttaggctgtctctgagagccctaaggatcaaagtagcctggtctatagatctagttccaaaccctgccccgagggggggggggctcattgaacaatgcacttcaattgtgcgcactttagaaatataagtccttgcggttcagtggctgtctaggttcagaaacgaaactg

SEQ ID NO: 34565 - DNA, 496 bp, Mus musculus
  source 1..496: mol_type = other DNA
tcccccgagctctgggcgcatgcgccaaaccgctgccgcacgcaggaggcgggacgttacggcacagaccccggaccctgccctgcccccaccgcgggggggcacagagtggaacctcacaaacttcaacaagttgttaggattctgactgagctcccagagcaccctggtccttaagccgagcggcccagcctctgccggccaggctcagcatcctgatagttggcctgccaagacttgttggccggcagatcgctacctgtacaacatatttgaaaagatttccagccatcagcgataatattctgtttgttcttggtgaacggctcaactaacagtaacgatgtttttgttacgtaaaagatgtttaagtcaagcataaacatcaataaacttttatatgcactatcttgtattaataccgcactgcaaaaaaggcgcgatcttcacattttcgggctaggcccggatcacgtgatgtgttccaactccgggc

SEQ ID NO: 34566 - DNA, 589 bp, Mus musculus
  source 1..589: mol_type = other DNA
ccaatgagagattttcctgatcaacatcattgaagagtccttaaaaacttaacagacttgtgtaacagcacaagtatgttcctaaagtgctgtatttactgaatctgtttcctggaaaagtaattaataaagcttattctcagagtgttatcactgtccgtgttatctatgatttgagactaacagtaaaaagacaaatactaaacagagctattagctacttttttctgtccattttgataaacaggatgcaaaacacattttagtcacagtgttgtttacatactgatttgacatgaggatgtgggcgtgggggcgcacgcctttactcccagcactcggggggcggatttctgagttcaaggtcagcctggtctacaaagtgttccaggacagccagggctatacagagaaaaaaaattggcatgttaacttatcacaaaaggccacacgcaaatttgtattgtgaattttactttgagtctacataggtgccatctgaagaaaagaagtgtttgctaagaattacaaaagttcgttcagaagaacttgtctggaaactccttctgaagcaggcctgcaacccctg

SEQ ID NO: 34567 - DNA, 446 bp, Mus musculus
  source 1..446: mol_type = other DNA
aaaccaaatacaaataacaaaattattttcatttattactctaaaattttcagagcatgtatatatatttagtatcactactactctccctgcttttggataaaaggtagcatatatttacttatttatttttttaacttatcaatagattgtagaagttactccagttatgaatagaattatggcagtagcataccaatgctttacagtagctctttatttctgcagtacagagccaaattcggacgcaagtgtctaactcagggaccttcctgagctcatacttaacccaggttgttaaaacccagggtccaagagagggctgcatgagcagagcctgctttccgcgaaggagtcggcccgcccccagaggcggggctggtgtggcgtcatcactccgcgccgcttccaggcgcctcaaggtcgctttgcggagcgggaggggc

SEQ ID NO: 34568 - DNA, 353 bp, Mus musculus
  source 1..353: mol_type = other DNA
gtgctacgtgtacctttctgtgcatcagacatctgttgttaatagtctcctgatgactgtggaagtggttgtcaacattctttccaccaagtcaagacttggcatgaaagaacgtaattttttgccttcctaattagcaagacagaagagtcttgtctcttgtcaccggttccctccaaaccctggctccagtgtggttggaaccacgtctgtctaagcacaggcaggacccggaggcctgaccttcgtgctcctaccgcctgggtgctctcccgggacgctcaggtcaggcagaagcagcctgcgacccagcttcttcgagctgcctgggagagtcagtctccaacatcctc

SEQ ID NO: 34569 - DNA, 518 bp, Mus musculus
  source 1..518: mol_type = other DNA
ttacaaatacattaatttcacaaatatatgcaatcttcctatacctttaaaagggacatctcagtaactttggagtgttatcctgaattgtattactcaatctcttcaagctcagggaaaataaccctgacaaagtttacaagatttcccttcattgaacttgtcaggctagccaggctcacactggagagcggtcctggaagggcagccctcacaactctcctgaataataatgatgtttactttgaaagtcatgattatctaagagaccatgaatttcatgtggtccatgatgaattcttgaaatcatttgtaagacaggaggaatgcatgcattccctgaggcaggagaatgtggctcagtttcatagtgtcccactgtcacaggaaattatttccttctggtcaagagaatggaatttacctttaagagaccactccttaggaaagcagatttacctaacatactaaagaggtagaaggataattatccccttaatgaggtgatatattttccc

SEQ ID NO: 34570 - DNA, 345 bp, Mus musculus
  source 1..345: mol_type = other DNA
ggaattctttcatctgccaagaagtctttagtgatttacaatacaagactttcagggaacgtcctggaattgctataaaaatagttcatttagagaagacatataaaaaaaaaattctgtctctctcttcagtcttttttctccttatagagagaaagaaaagtggcctgtagtttaaacgatggcttcaaagctgtgtttggtagctcacatctgtcccaatttgggctacagaacgaatttctctccacagaagactgctgtctgaaatctctccggattcagacaaccgggaggctgcgaggctatcctcacgggggacaactaggcaggggcaggcccggg

SEQ ID NO: 34571 - DNA, 351 bp, Mus musculus
  source 1..351: mol_type = other DNA
tgctttttcaagaaaacattttaggaattctttcatctgccaagaagtctttagtgatttacaatacaagactttcagggaacgtcctggaattgctataaaaatagttcatttagagaagacatataaaaaaaaaattctgtctctctcttcagtcttttttctccttatagagagaaagaaaagtggcctgtagtttaaacgatggcttcaaagctgtgtttggtagctcacatctgtcccaatttgggctacagaacgaatttctctccacagaagactgctgtctgaaatctctccggattcagacaaccgggaggctgcgaggctatcctcacgggggacaactag

SEQ ID NO: 34572 - DNA, 469 bp, Mus musculus
  source 1..469: mol_type = other DNA
tgaagccagacttaagactccatgcattcaaaataaatctttaaaatatgtgaactctttcaagcttaatgtatctattgtgttagtgaataagaaaaacattcactctcctttgaaagcttaagattcaactttgccaactatagatttttgagtcaccaacattaaaacaataagctaaagcaattaattttgcttttggccgctcctctccaagtgcgcttgggtgaaaccaaagcctgcgaggctggtttagggagtaggcccgccttgctcagcatttcttgcccgcaaggctcagagctaaggaggcagccagggctgggttcaggctgggcttgagtccacccccacaaggcccttgggcgcagccacttcccgcccccgcgccgttgcccaggtaaccgaggggcggtggcagcggcgaggggcgggacttccggcaagtgacgcgccggggctcggcagg

SEQ ID NO: 34573 - DNA, 739 bp, Mus musculus
  source 1..739: mol_type = other DNA
gcgacactggactcccgggggtggagggcttaggagaccggctccagggagcaggtgcccgggccccgtcgccatcctgctcctcgcaggcctggaagctggctcgccctctgggtttcccgggccccccggcgcctttctccctcccaccctgatcgaaaaggcggaggggggggggaggaagcgcaagccgcagcctccgcccggctcctcccgcagcctgccttgctccgcgcgtgcgcagcgctgcccacccggcccgggcggcggagcgcgggggtacgcagaggcgggaggccaattggcttgggccttggacctcctcgaggcgtgcgggcgggcagggcgccgggcattcccggcagccttccgaagcccgaggccggctcaaggaacccgcagtccccgcccacgcgggaccaaccgcctccggctgcgccttccccggctgtctggggtccagaccgcacgccgcgaccgagggaggccggagactcaccggtgagcgggccggcgccggagagcggaaaggagcggagcacagcgcagctcagccacacgctgctcctggaaagttccgcccggcccgccgcagccgacctgccgagccccggcgcgtcacttgccggaagtcccgcccctcgccgctgccaccgcccctcggttacctgggcaacggcgcgggggcgggaagtggctgcgcccaagggccttgtgggggtggactcaagcccagcct

SEQ ID NO: 34574 - DNA, 586 bp, Mus musculus
  source 1..586: mol_type = other DNA
aagtgcgcttgggtgaaaccaaagcctgcgaggctggtttagggagtaggcccgccttgctcagcatttcttgcccgcaaggctcagagctaaggaggcagccagggctgggttcaggctgggcttgagtccacccccacaaggcccttgggcgcagccacttcccgcccccgcgccgttgcccaggtaaccgaggggcggtggcagcggcgaggggcgggacttccggcaagtgacgcgccggggctcggcaggtcggctgcggcgggccgggcggaactttccaggagcagcgtgtggctgagctgcgctgtgctccgctcctttccgctctccggcgccggcccgctcaccggtgagtctccggcctccctcggtcgcggcgtgcggtctggaccccagacagccggggaaggcgcagccggaggcggttggtcccgcgtgggcggggactgcgggttccttgagccggcctcgggcttcggaaggctgccgggaatgcccggcgccctgcccgcccgcacgcctcgaggaggtccaaggcccaagccaattggcctcccgcctctgcgtacccccgcgctcc

SEQ ID NO: 34575 - DNA, 618 bp, Mus musculus
  source 1..618: mol_type = other DNA
aagtgcgcttgggtgaaaccaaagcctgcgaggctggtttagggagtaggcccgccttgctcagcatttcttgcccgcaaggctcagagctaaggaggcagccagggctgggttcaggctgggcttgagtccacccccacaaggcccttgggcgcagccacttcccgcccccgcgccgttgcccaggtaaccgaggggcggtggcagcggcgaggggcgggacttccggcaagtgacgcgccggggctcggcaggtcggctgcggcgggccgggcggaactttccaggagcagcgtgtggctgagctgcgctgtgctccgctcctttccgctctccggcgccggcccgctcaccggtgagtctccggcctccctcggtcgcggcgtgcggtctggaccccagacagccggggaaggcgcagccggaggcggttggtcccgcgtgggcggggactgcgggttccttgagccggcctcgggcttcggaaggctgccgggaatgcccggcgccctgcccgcccgcacgcctcgaggaggtccaaggcccaagccaattggcctcccgcctctgcgtacccccgcgctccgccgcccgggccgggtgggcagcgctgcgcac

SEQ ID NO: 34576 - DNA, 412 bp, Mus musculus
  source 1..412: mol_type = other DNA
cctaaactatctcaatatgtaatttcacaagatagacatgccactgtgttgtgtgtgtgtatatatatgtatatgtatatgtatgaatatgtatatatatataagtgtatacatatatatgtactttgtcaatagaattttaaaatagctcttattggagataacaactatataattagtttgaagccagctataagctgttatttataaaattcatcaatatttatgtatggttttttattaggtctgacttgctaggtaaacactctgatcactgagctatgtcctcagctctgtcatgccataccagtaaggtatgatttaaactctatattgaaagggtctcagatctgttataacttgagcgcgatagcgccggcgaggccgtaacggagcggaagtgtcgcagcgc

SEQ ID NO: 34577 - DNA, 332 bp, Mus musculus
  source 1..332: mol_type = other DNA
gcgcctagattccagtattctgtgtgttccagcgctgtgtacaacgggctgttctgtacgcatcatctccatgtggcatgcactagaggccatgttgcactcccaatcctgcgcgggacgtcgaagccggtcccgagtcactgggagcagctcgttgaacaagaagctggttcgctgggtatgggatgcccgctcaacccaaggctgcggtggggctggcggagcgccacgtttagtccccaagtgtcgcgacgcgggcccgccccttagtgcctgcccccgcgaacagccttccgaaacccggttgaggccccgccctaggtcgagaccac

SEQ ID NO: 34578 - DNA, 332 bp, Mus musculus
  source 1..332: mol_type = other DNA
tcctggaactcactctgtagaacaggctggtttaatgattgcaaccatcgatgaatcggagacagtctattacatggcatatattggttgtctgaggcctcggggtcaagacttcaagtgcttaaccacagcttatcagctgtgagattttacagaactctggctcttcctgtctccgcaaccagagtctgggattacagggcgcctagattccagtattctgtgtgttccagcgctgtgtacaacgggctgttctgtacgcatcatctccatgtggcatgcactagaggccatgttgcactcccaatcctgcgcgggacgtcgaagccggt

SEQ ID NO: 34579 - DNA, 352 bp, Mus musculus
  source 1..352: mol_type = other DNA
ctgtcctggactcactttgtagaccaggctggcctcgaactcagaaacccggcaaaataaatcttaaaaaatccttttaaaaagcttttcggggaagcattgactgctcttctgaaggttctgcacatggtggcacaaccatctgtaataagatctgacaccgtcttctggtgtgtctgaagcctaccatgtacttatatataatagtaaataaatctaaaaaaaaaagaatttaaaaaaaagtttttcaaattagttccctttatgtccccaggggagccctaggataggagctgagcaggtccaaagtggccgaggcatccatgactctctaggtagctgccaactggtc

SEQ ID NO: 34580 - DNA, 387 bp, Mus musculus
  source 1..387: mol_type = other DNA
tggcgctcactgtgggtgacgatcacgctgagtcctctgagaagagcggggccggttcacccgcggcttgcaggcgccggcggcggcgcccctggtggatcggtcatgcccgctggctgcactgcgcacagaggaacgctgagagggaggcaagccccgctcggcccgggactccgactggcgcggctcccgggcaggccgaggggcgcgcagcctgggtcccagcggctcccggtcgcctcgcggtcgccgcgcggcgctgcgacccgccaggccgcgtttgttcacagcgcagcggtggctaccgggcgcgcagccttgcaaccccgccgagctccgcgctccttctccggaaggaggagctgagcactctgcgcctgcgcatgg

SEQ ID NO: 34581 - DNA, 220 bp, Mus musculus
  source 1..220: mol_type = other DNA
tctccgctggctgagatttcccaagtaggagaataaacgtgcgtggtaagatgagatctaaaaccatttccgagatcaggtttaatctggacagaattctagacccaggactaaggtacagatatgttaaccctgtttttaaaactgtagaatcggttcatcttccatgcgcaggcgcagagtgctcagctcctccttccggagaaggagcgcggagctc

SEQ ID NO: 34582 - DNA, 208 bp, Mus musculus
  source 1..208: mol_type = other DNA
tcctgggggcaggccagcagaaaactgtctacctcagttaagtcgtgggctacctaacccgagccgctccaggccgccttgaagccgggcgcggtccgggtgggtctcctccagccactccccccccgcaaaccccgcttgcacccgggccggcgcatttgtctccccgggcgcgtaggagcgactagtctctcggcgccggaaatcc

SEQ ID NO: 34583 - DNA, 306 bp, Mus musculus
  source 1..306: mol_type = other DNA
ccccttctcctcggctcagccagaagtcaagggcattttttcatctgtctatccatcaaacaaagcttttattgaacaaaagtttatcaagtgtcagactccttaggaagagaaatagattgcccagttcttgggggaggtgagaccctgtctctacctttgcaaagtggccacattggtacacccctcctgcctgttcagtctgggacagaaggaagaagaggcctagatgggtcatcttacctttctctactgccccgggcaggagaaggtactcgcctgggttacccattaactcagccatga

SEQ ID NO: 34584 - DNA, 328 bp, Mus musculus
  source 1..328: mol_type = other DNA
cctgctgacacgtgcatgcctgcctgttcttcctggccccaccgggcccctgaacccagacaaaccaacagccccgtgcctgggggccgcaggaaaccaggtctggcttttttcctcttctcccagatggggacccctgaggagagggcctaactctcctccctctgcttcaggtggagggctctatgtacatctccatctacacagctttctctatagggctacctctggcgagataagctttcctctgggactatgaggcccagaattcacacctggaactccacctctaagtggcatgggccaaaccccctggggagggcccaga

SEQ ID NO: 34585 - DNA, 291 bp, Mus musculus
  source 1..291: mol_type = other DNA
cctgctgacacgtgcatgcctgcctgttcttcctggccccaccgggcccctgaacccagacaaaccaacagccccgtgcctgggggccgcaggaaaccaggtctggcttttttcctcttctcccagatggggacccctgaggagagggcctaactctcctccctctgcttcaggtggagggctctatgtacatctccatctacacagctttctctatagggctacctctggcgagataagctttcctctgggactatgaggcccagaattcacacctggaactccacctct

SEQ ID NO: 34586 - DNA, 283 bp, Mus musculus
  source 1..283: mol_type = other DNA
caaaattcacatgatgtagcatgtgacatgtcaagacacccggcccgcacgtggcgcgtccagacggtgtgaccaggtcacaggacatataccatgctaatcaacacatgcaacatgtgacatgttcccagggcacacgaagcgctggtgaattctgagacgacccacaaaggctctctgcgcgtccccaccagcgcctccaggctaggtggaggggtggtggccgcactccgcccccgcggggttccgagggtggggctcagcaggctgagcgtataaaggg

SEQ ID NO: 34587 - DNA, 297 bp, Mus musculus
  source 1..297: mol_type = other DNA
gctgagccatctcagatgctaaagtgtcatttgagagtgtccctcatagttcaggttcagcgaatattactgggttccaagtagttttctaaaataatatgtaaataaaagtaaattggcaaagtacttagaacttcgctataataggttatcttatattttaagaacttgaactttctgtttgtggaaacagaaaaaaaaacaaattcaaacagacagacagacagacagacagtcccttcccgaaagggaagtccggtttagtgcggcgtcgagcccaatggaactgcagtgggt

SEQ ID NO: 34588 - DNA, 451 bp, Mus musculus
  source 1..451: mol_type = other DNA
acaacaaaactccattacttttgcttaatctaggttaacatctttactaagaggtggatccttctcaacaaggaaaacctgatttaggtttcttatgccagaaaataacttttcctttcttttgcaaaaccggtccgatactagtagccttttgggctagaacacctctaacatcccgggaatgcagaaagcagtccacatttgactacattgaagtctcgtggcctcccgcgcagagggcagggcggagcgccagcctcgcaacgtgggagctagacaaccacgctggttcgcttggcaggtggcaccttggttctagaagccaggcttgctttgagtggcgcgaccgcacgctttaatagtgggttctctattcagctcccagagctgtgttagccagccgggtaaccgacgtagggatcacgtgacgggcagggccgcctctgccgcc

SEQ ID NO: 34589 - DNA, 597 bp, Mus musculus
  source 1..597: mol_type = other DNA
agagccttaggagctgaggttccttccgggacacgcctctggaaccgcggcgtccagccggcccaagggacacgcgcaagcgtcacaaagcgcagccaccgtggggcctggccggggttggggagggagggaggggcgcgcgcacgcgcaccgggccgctgtcgccgcgagccgcccccctcccggcgcgcgccccgcggcgcgaggcgctctccccccgcgcagccgccgccgccgccgtcccgagaccccagcgcacggcgcgccctccctcgtgcgcccctccggcccccgcggagaacgagagggcgagcgagcacggcgatcccgggccgcctcggcccccccaccccccccccccataagtagaggccccctccgggggggggaggcccggagcccggagcggattcccccaactcccttaggcccgcccccgcccggcccgagtgtgaggagggcccgggccggcccgagtcgtgagtgaggaggaccccgggcgggcccgcgggccgtctggggcctggtccggccccgccaggcgtgtgaggacagacaggggcccggcccggcccgagggcgagcggaggggagggg

SEQ ID NO: 34590 - DNA, 306 bp, Mus musculus
  source 1..306: mol_type = other DNA
acgtgtttaggcttaaaggcaacagctatgcttaagtaaggcccagtttctgggaaggtagtctgccaggaaaactgcaatttcttagagtccagtgttttaatagtctgattgcaatctggcaatcagggtgtttaatcctaccatgatggttacaggttcaagattggctctgcttacttccgcatgccagaggatgaaatgtcccgacagaaggctggattcctttggccacagctcgccgcaagcggaagttctccgaggacatcaattctcctgctgagtcccgccctgctggtctgggcg

SEQ ID NO: 34591 - DNA, 425 bp, Mus musculus
  source 1..425: mol_type = other DNA
tttccacagatctgttaactaaatacagataaccaaaaattgacagtttgctgttccttccatcttgtctgctacataaaatctgcagggcagtgcattgtgttttctccaaagcacagtttatttcttccattgatcatgaaattttagagaaaaatattaatttaatcaaattataaattctccattgtgtttcgactttgaatgcactggatattaaaattgaagagacatttatagttactgtttaaccaatttatttataaacttgggtctaggatatatgagacctgttctgagactggtctaattcgcggctaaggctttgggcgtgtcctcttagggtccgcagggatccttcagtaaggaagctcccggttgcaggaacccttctgtcggctcctcccattggtcggggcgggggg

SEQ ID NO: 34592 - DNA, 314 bp, Mus musculus
  source 1..314: mol_type = other DNA
cattaagcttaattgccactggacattagagattggggttcggttccccggaacctataccaggtgctcctgggatccgacgccttctggattctgagagcatctgcacgcacgtggcgcgcatagttaagatcttttgtctctggtgcacagagatcgaggtcccgcgagtggatggggcctggcctacacgcgcctcactgccagctccgtccccgcaggagcccggctgcacttcagacgagcccacccgcccctgaggcgggtggtgctgcgggaccgcgggcgggcgggcgtcggcgcgcgcgttcgaa

SEQ ID NO: 34593 - DNA, 298 bp, Mus musculus
  source 1..298: mol_type = other DNA
ttgtcttatctcagaggtcaaactctgaagagcgtgtctcaaaggcaagaggcctttggggtactcagaaaagccggtctcggctcgcgccgctcgcagacaggagcacccgctcccgcgcaggcgcagagcctgggctcaagctaaagccctcagttaaggccgggctagcagagcgtccggtcaacccgccttcaagcgccagttcgaacgcgcgcgccgacgcccgcccgcccgcggtcccgcagcaccacccgcctcaggggcgggtgggctcgtctgaagtgcagccgggctc

SEQ ID NO: 34594 - DNA, 384 bp, Mus musculus
  source 1..384: mol_type = other DNA
tggcatggtgaagagacgccatgaccatggcattctctgtatagccctggctgtctagaccaggctagccttgaatgctgggattaaaggcgtgcgccatcacgcccggccatgaccatggcaattcttataaaataatttaattggggtgagttgagagtcctcccttctgatctataggcagaggactctgagcctggaataggcttttaaaaagtcaaaactatccttgtaatcctttcaaagagtgtcatgcccaggccctaagcattcaaatatatgagtctgtggatacacatagcaatcctagcatggcgttggctggggctggagtcccaggcctgaaaccacgggcgcaggaggggctccacggtgcccagccag

SEQ ID NO: 34595 - DNA, 299 bp, Mus musculus
  source 1..299: mol_type = other DNA
catctagaagttcccacactcttatgctgaagaggacggaagacgagtccttgcagcaactactggaacaagtatctactgtgcctgtagcaactgtctgaggtctcggacacgtgcacgcgtgcacgagtgtgcacacacacacacacacacacacgtaaactatggttttctattttatagctgacaatggaggccagttgggctatgatagacccctaggttccatcccttagagacgtgacaaatgacatataggtaaatgtcaccttgcccgcgtaggcggagtaaatgtgttg

SEQ ID NO: 34596 - DNA, 426 bp, Mus musculus
  source 1..426: mol_type = other DNA
gagacaggcagatccctgcagctttctgagtaatcagactagagtgagcactgggtccatccattgagagaccctgtctcaaaagattgactgaccttgggtctttacacaaatgtccataaatgtgcagttacacacattctcccaaacagatatgaattacatatattaattaaagttataaaaagtcacaaatatatatgcaaaaaatggttgttagtaagaaaactagttcttcatatggacagaaataaaattaatctggcagattaaatatggaaagtaataccatatcgttttcagaagaaaatacaggatgttgttcccttaaccatcaaacattaataattcaactggtttaaattaagaacttctgttcatcaaagaatgtggctggtcacattaaccagatacttgagatctgga

SEQ ID NO: 34597 - DNA, 297 bp, Mus musculus
  source 1..297: mol_type = other DNA
gtgggattgagagccaagggccagtgcccttgtgagcgcactagttccgaaggggtaggggtaggaagctggcagcctgcagcttccaagtccaagttccctccttccctgcctggaagttgaaggggaagagccagggcctcagcttgacggctgcggctaatttatttccaagaattgtgtatcgtgtaacacaaaataatgagctccttacctggggtgtgggccacgcaagcactgatgtgtagccctaggtgagtcacaacctcggactgtgaatcagaacctctgcctctc

SEQ ID NO: 34598 - DNA, 109 bp, Mus musculus
  source 1..109: mol_type = other DNA
tttaaaaatcatatccctgtctggctttagaccaggctgcacaaacttgttgagacctccttgatggaggaaggtgcccctagatgctgtgaccccttcctttggggga

SEQ ID NO: 34599 - DNA, 575 bp, Mus musculus
  source 1..575: mol_type = other DNA
actagaggtgtgcactagagtggtcccggccctggcgcccgccccctcaccagcggctgcatctccgagtgcgcggtgggcacctggaaccggtcgatctcctccatcatggtgccggcgggcgagcgggccaggggccgggcgcggccagggacgccgatgggaccgcgcggggcggcggccccagaagcccggcagattatgcagactaggccgccctggaccggtcgggcggtggggttgcctagagctaccgcggcagtagccccgcggagccgcaggtcttgcctcgcctcctcctccgccgccgcctcctgtcagcagctcagccactgcggtgactctgcaactccacttccgggtccgggacaccgcccggatcctgcattattcatgagaaggcggtgtctgggtgccccagcccttcccacttgcgggagctccttgcgcggagggtgcggaggcggggcttagcggggccagaggatccctgcgcgcccaagttccgcctcctccccgtgtccggagggggcgctaggtgcgcctgcgcacccggtgcctgtcggttgctgggt

SEQ ID NO: 34600 - DNA, 322 bp, Mus musculus
  source 1..322: mol_type = other DNA
ggttagaaaaagggtctttttttcttcataactggcggttaaggtcagaggtcttcagaagatttcgagggcagtagttttagaacagcatcagctcctccctgacgcggttacccagcaaccgacaggcaccgggtgcgcaggcgcacctagcgccccctccggacacggggaggaggcggaacttgggcgcgcagggatcctctggccccgctaagccccgcctccgcaccctccgcgcaaggagctcccgcaagtgggaagggctggggcacccagacaccgccttctcatgaataatgcaggatccgggcggtgtccc

SEQ ID NO: 34601 - DNA, 245 bp, Mus musculus
  source 1..245: mol_type = other DNA
gctattactatgacagttttattgactccagtatgcattttgctgtgagtatagtattcggaaggccttgtccctgttaggatggagagtcaggccatccatgccgtctggatctagtgtaaagtggacatgaggtactctacactcttttctcagataatctcagataaaaaggtgggctgacccttcaccttttcaagggatgcaggatggtcctcccccaaagggccgcaggccgctggcca

SEQ ID NO: 34602 - DNA, 480 bp, Mus musculus
  source 1..480: mol_type = other DNA
tgtaaagtggacatgaggtactctacactcttttctcagataatctcagataaaaaggtgggctgacccttcaccttttcaagggatgcaggatggtcctcccccaaagggccgcaggccgctggccactcacgaggcgggccgctgttttttgctgcccgccgagctcagccgagctcagccgactccctcccagccgagcccagccgaacgcagccgagcccagccgaactcctcgacgctcctgccgccgccgcccgagtgctgccgagcgagagagcgagcgagcgagcgagctagcggccccggccgcggaggaggcgccgccccagggggaggaggtgcccgctctccgcagaccgcccgcggcagaggccggcccggtcgcgccccggcgggagcggccggcggaggctgcgcggcccagggggagggcccggggagtggacgtcgcccctgcccgcctctcgccgccccccg

SEQ ID NO: 34603 - DNA, 225 bp, Mus musculus
  source 1..225: mol_type = other DNA
ttactgcaacattgttggtgcaattgtatcatttcctctgactcattgtgtggtagtgtctttgtgtcacagtgggacagtgtcactcaagtcttgtgttataaagcacgtggtccataaaggagcctaggctggggtacaagtcctaaagtaaggatgcaaggggggggtgaggctttattccccccctgtttccggctctgtgtgcccagaccctgcagtgtc

SEQ ID NO: 34604 - DNA, 487 bp, Mus musculus
  source 1..487: mol_type = other DNA
gccaagctcagctttatgccctgccctaggcccaggcccggtggcctagggaatgagtagtaatggcaagggcctgggtatccactcctctcgaggatgctagaaggaccccaggtgtgccagagtgtccgtgtgagacactgagggacaggatgagcgatcactcgcgggtgggtgcgctcccggccgccctaggagagcgggcggagtgcgcgcgcgtttgcaagacccgcggcccgagcgcgcgtgaagcacggggtccatagccgtcccacgcgtgccagtgcgggcgagcgtgccagcggggggtagggctcctgcctgcgcggggcgagtgggagtgggggctcacaggccggcgcgggcgagcgtgcccccgagagcgtgccgcgcgtgccaggcgcgggaacgtgccaaagcggaggcgcgcgggggagcaagggcgcgcgcggccgagcgggcgcccgcggtcacatgggcgagggaa

SEQ ID NO: 34605 - DNA, 317 bp, Mus musculus
  source 1..317: mol_type = other DNA
tggcgccttcaagtgcctgatggcaccctagactattctaccggaagagtcgcccggggtttctctgtgtagccctggctgtcctggaactcactctgtagaccaggctggcctcgatcggacaaatatattgggcacgcccccgtggccgaagcgctacggtgaccccttccagggtcaccagtagctgttgccttcctgggccctctgcaggtagcggggtgctccgggatcaacgcgccgaccgctggaggccggccagatgccacagcagcccgggtttctctcaggccccgccccctgcgtgcgcggccccg

SEQ ID NO: 34606 - DNA, 332 bp, Mus musculus
  source 1..332: mol_type = other DNA
atccaggttgagacagctccttttcaggaagcaggtgaaaatctctgagagaatagaagagcacttttttttgaagggaagcaagctttctctatgtgtagagcaggctggcctctcagactgtttgggtgtacgtcctgacaacaacgtacaaatcacttgatctttaaaagattccaaaaatgtatgatctatgggtataaacctatcttggaataataggtatatttatactggatttagagcactaaaagtcttcaagccagaacgttacctaggtaaccagattgctttgacatcggttagtgacgtcacttcctacaaggcgtgac

SEQ ID NO: 34607 - DNA, 161 bp, Mus musculus
  source 1..161: mol_type = other DNA
atgggggccactggcatgtgcatacctgtgcctacctttaaacggaatgtgtaaaattgggcccgaatttgtgacaaggcctcgaatctggctggtgggagactcacccgcccagcagggctcgggtcccgcccccgggaccgcaggcagccaagcgaccg

SEQ ID NO: 34608 - DNA, 496 bp, Mus musculus
  source 1..496: mol_type = other DNA
attacaagcaatacatgtcttacattgtctttttcggcactaattactttaaaaaattaattcatttaatgttaatcataatgaaggtatgagcagatactttttaatttagtctatgttacagataaagctatcaatgcaaatgcttttgtgcttcagaacatagaatgaatcataggataggcatcgatcgaggctatcctagtctataggctagctaaagttgtctaaaatattacaaatatatgtacacatacatatatacataaatgcatgtatgctgagcagacctagaaagctctacttctgggctcgctagctcaggtgggccaatccattctgggtctccccgcttggggacaccaagattgaacccaacagggtggcagccaggaggcgaggccccgcctctcacctctcccggacgttccgattggccccggcgagccgtaccacggtggcgggggcgaccgtaggcagcggcttttgagtcgtg

SEQ ID NO: 34609 - DNA, 405 bp, Mus musculus
  source 1..405: mol_type = other DNA
tattggccaggatggtctagaacttgtgggctcaattgatcttctgcttcagcttctagagtagctgagactataggcaaatctggtatgtatgcacaaacgcatacacgcgcgcacacacacacacacggtttctctgtgtagccctggctgtcctaccaggctggcctcgaactcagaaatagattgggccttgttatgtataactgcgcaggctgaacttgaacttgtaagttttatttctgctcctgaggctagaggcatagtttacctgaagggccaggctgcaggcgtgacccaggtcatgagttcagaatgctgctggtctttgcacagggcgtctctatgctccacacagaacctaggtgcctggcgatgtcttctgaacaggacagggcctgatgt

SEQ ID NO: 34610 - DNA, 316 bp, Mus musculus
  source 1..316: mol_type = other DNA
atagattgggccttgttatgtataactgcgcaggctgaacttgaacttgtaagttttatttctgctcctgaggctagaggcatagtttacctgaagggccaggctgcaggcgtgacccaggtcatgagttcagaatgctgctggtctttgcacagggcgtctctatgctccacacagaacctaggtgcctggcgatgtcttctgaacaggacagggcctgatgtgtgagcgtggcggtcccgagccccgccctcaagtggcaggctgtgcccccaccgtcacgtgttggcgactagccaatcatccagggtgggct

SEQ ID NO: 34611 - DNA, 308 bp, Mus musculus
  source 1..308: mol_type = other DNA
aagggcagggcccaagctcaggtcttcgtcttcagacctgggctggaggtttctggcggcctctgctcggaagaggtagcacaggtacccgggtcagacccaggatccggagcatcgggctgcacactgctcccccttgtgcccattagctcgtgtggccccgggacacagagggttgaggggcactgtcttcagaagctggggctccacttgtccttgccagggacaaggatcagtcagcaaaactccctgcagtgtttcttaaagggttaaacgctttccgtgccacacgcccgccaccctggcct

SEQ ID NO: 34612 - DNA, 434 bp, Mus musculus
  source 1..434: mol_type = other DNA
gtgagcgtggcggtcccgagccccgccctcaagtggcaggctgtgcccccaccgtcacgtgttggcgactagccaatcatccagggtgggctcaccttgtgtaccttagcggagccgatcctgagcagcgccagcaggcttcagaggcggacgccatggcagcgaccttccgggcgagcggtaattgctgggcggcctggacccgctacggtgcggagccgagccttcctttggtcggcactcctacccgaggccagggtggcgggcgtgtggcacggaaagcgtttaaccctttaagaaacactgcagggagttttgctgactgatccttgtccctggcaaggacaagtggagccccagcttctgaagacagtgcccctcaaccctctgtgtcccggggccacacgagctaatgggcacaagggggagcagtg

SEQ ID NO: 34613 - DNA, 272 bp, Mus musculus
  source 1..272: mol_type = other DNA
ttatcttcctggagagattttgacttgtctaagagctcctatgagctcctcatggtgaggagttgcttaacacacacacatacacacatgcttcgtgtgtctctgtgtcatgaaacctgttttcccctggaaacacagccatctgtgccccaaggaaacttctttttatatgtccacatgtgttcaagtgaatatctcaactacctagtgattccctgagtaagtaggctttaggcctctttccttcccaggccctgtggtgggagggaatt

SEQ ID NO: 34614 - DNA, 447 bp, Mus musculus
  source 1..447: mol_type = other DNA
gcttcagtactgtacctatgctacaagaattgcacgggcatttggtgtttgagaccagataccacttggtggtctccaaatgtcacactaagtgtggacaagtgactgggcctgactgagacaaagcaggcacttcccttgcttgctaggtaggtggttggtttcttagggcatacataaacacacaccccctaaccttgcctaaggtttggaaatgcctggaaagttttaaaaaacactgcgggaatctagaagagtttaaatctaagtcaggggcacagtcagctgcccagtggctcactagggaacctgaggctgtgtggacgccagggacaagggcctggacactttcaggcctgaagtccctgggaggacaggccttcaggctcctctaagttccagacgggacaggaaggcagttggaggctccaatgggccgagaaccgg

SEQ ID NO: 34615 - DNA, 238 bp, Mus musculus
  source 1..238: mol_type = other DNA
agcctccccaggctggcctgtgtagaccaggctagtctcacccaagaagagtctgtttaaggcaggtcagtgctggcctgccttctgtctacccactcacaaactcccatcagaagtgtgtatgtgtactaatcatgcaaatggattccagtggagagcacatgaccaacatatgaagggcttagaagcccatgggggctcagcttcacctgtgtctgactcacctagtgcccgaggc

SEQ ID NO: 34616 - DNA, 282 bp, Mus musculus
  source 1..282: mol_type = other DNA
agtgccactttttaacgttacaggggagtttaggctgtgccgacccctgagcccccctatgtgacaattggcttccgggggtgggggccacctgcctcagtgtacctgaggactattcagactcgtccgttccacaggaaccgttcggagccccggacatacgtcccggggcgggcagagcgggccctcgaggggcgtgggctgctgctgtccagcccttgggggcggggctttctggagggctcggttccagaggtgaggtctgtgggtcagccccgcccc

SEQ ID NO: 34617 - DNA, 258 bp, Mus musculus
  source 1..258: mol_type = other DNA
tgggtgctgggaaccaaagttgtcagaactggaattaatgctgctactgttaagagcattgactgctcttcacatggtggttcacaaccatttgtaatgggatctgatgcccttttctgtgatgaataatcttgttaaccagcttactgcatgttccactctagatgtccgtacatggtgtgaaaaaaaaattagatgatttggccaaggccactgagctaagacatttccataccagtgccactttttaacgttaca

SEQ ID NO: 34618 - DNA, 407 bp, Mus musculus
  source 1..407: mol_type = other DNA
tgagaccctgtctccagagctaaggtgtagagtcatggacgaggtccctgatatcaacctcaggcctctgcgtggcgtgcacacgaatgtggatgccatctgacacacacatacagaggaccccaagtgtgggtgaaggatgggaaatcatcctccctgatctttcaattccttgaaatttagggatttgtctcagaaggagctggctagcccctctcctccctggttcccaggactgagagaagggaaagatggagggggctgttccagcctggatccaggtagctgattcacagggacctgtaggaggcctgggccctctccttaggaacccaagagagggatgacatggagctggcttcaaaacactgggctctacccagacttttgcagttctcagagctaaa

SEQ ID NO: 34619 - DNA, 247 bp, Mus musculus
  source 1..247: mol_type = other DNA
tgcccttggcagccagaggtgggtgtcagctcctcttggagcagcaaccaatgtgggtgctgggaaccaaattcgttgtcagaactgaagcaattaatgcgttaagagcattgactgctcttacatggtggttcacaaccatttgtaatgggatcctgagctaagacatttccataccttagtcattcaatctggtctgaggtcacttttactgaaaaaatacagtgccactttttaacgttacatt

SEQ ID NO: 34620 - DNA, 261 bp, Mus musculus
  source 1..261: mol_type = other DNA
aaatttgttctattcttaaatggggacaaataaatgataaatatcttttctaacacgatacacaattaatacagagctgcagatccttctataactggctataactggctatgctcagtacagacacgcctttcgccccacgatgcgtggaactatgtgctcaaacgagcatcttcttcctagttattttgtcacaacttcctcttctcaaaaaagtgcctgtcaccgagtctgtgattcctgtaggatgcgcatgtcaag

SEQ ID NO: 34621 - DNA, 367 bp, Mus musculus
  source 1..367: mol_type = other DNA
atgtgacattgtgttatattatttaatccagtaggtataagacttatactgtgaaaaatacaaaacattctaattaaaggaggcctaaatgaataaaaagctatcccttattcttggattgaattctaattttacagtgataacgatgtaagtggtcctcagattcagtacaatatctattagagtgtaattatattataatcccaaaagctaaaagaaatctcttgcagaggacctgagttcatacacattgttttaaaaagcagaggaaagtttcatacaaaacttttaaatttttatatcatatgtctaaaataaggcctattgtcagggatctcctagtcattagcagctaggagctgaccgc

SEQ ID NO: 34622 - DNA, 186 bp, Mus musculus
  source 1..186: mol_type = other DNA
gttgtcagaactgaagcaattaatgcgttaagagcattgactgctcttacatggtggttcacaaccatttgtaatgggatcctgagctaagacatttccataccttagtcattcaatctggtctgaggtcacttttactgaaaaaatacagtgccactttttaacgttacattcacatagtcccgg

SEQ ID NO: 34623 - DNA, 171 bp, Mus musculus
  source 1..171: mol_type = other DNA
aactcactgtgtagaccaggctagtctcacccaagaagagtctgttaaggcaggtcagtgctggcctgccttcaaacttccatcagacgtgtgtatgtgtactagagcacatgagcttcccgagggcttagaagcccatggggtgtgtctgactcacctagtgcccgaggc

SEQ ID NO: 34624 - DNA, 435 bp, Mus musculus
  source 1..435: mol_type = other DNA
tgagaccctgtctccagagctaaggtgtagagtcatggacgaggtccctgatatcaacctcaggcctctgcgtggcgtgcacacgaatgtggatgccatctgacacacacatacagaggaccccaagtgtgggtgaaggatgggaaatcatcctccctgatctttcaattccttgaaatttagggatttgtctcagaaggagctggctagcccctctcctccctggttcccaggactgagagaagggaaagatggagggggctgttccagcctggatccaggtagctgattcacagggacctgagcgggctaggaggcctgggccctctccttaggaacccaagagagggatgacatggagctggcttcaaaaccggtatagagaagcccactgggctctaactaccccagacttttgcagttctcagagctaaa

SEQ ID NO: 34625 - DNA, 220 bp, Mus musculus
  source 1..220: mol_type = other DNA
gagtctgaatagtcctcaggtacactgaggcaggtggcccccacccccggaagccaattgtcacataggggggctcaggggtcggcacagcctaaactccccgccctccctgggcccgggactatgtgaatgtaacgttaaaaagtggcactgtattttttcagtaaaagtgacctcagaccagattgaatgactaaggtatggaaatgtcttagctcag

SEQ ID NO: 34626 - DNA, 336 bp, Mus musculus
  source 1..336: mol_type = other DNA
atgtgacattgtgttatattatttaatccagtaggtataagacttatactgtgaaaaatacaaaacattctaattaaaggaggcctaaatgaataaaaagctatcccttattcttggattgaattctaatttcattctattcgtgtaattatattataatcccaaaagctaaaagaaatctcttgcagaggacctgagttcatacacattgttttaaaaagcagaggaaagtttcatcaaaactttaaaattttgttatatatcatatgtctaaaataaggcctattgtcagggatcctagtcattagctaggagctgactgtatgctcacactaa

SEQ ID NO: 34627 - DNA, 308 bp, Mus musculus
  source 1..308: mol_type = other DNA
gcaaagacaaagagtctttattcaagctctagcttggaccctcaggcccctctgatgagcattggttaacaattatttcagttggcttaaagaatctatatctatctataacgtctggaacattaggtatttgtcttgtcaacataaaaggaaatgagacagtccttggggacctttagtcagtggcccacggtcactattggatacaattttgtactttgcaaatctgtatctgatcatttcaatgctgtgaggtcctgcttgtgaatgtgacattcatgacctttaaagagcacatgtcaaggctt

SEQ ID NO: 34628 - DNA, 285 bp, Mus musculus
  source 1..285: mol_type = other DNA
ataaaggactgggtaagagcagtcagtgctcttttctgagttcgaaaaccacatggtggctcacaaccaccacgccctcttctggtgtgtctgaagacagccacagtgtacttatgtataataataaataaatctttagatacataagaataaataaataaatctttttaaaaaagatttaacagtgtaatgcctaaccctgtcttggcagttgccagattggccctatgccgatgccatcgacgacggcagcagctttcatcacaggcgctgcagcccctgtgt

SEQ ID NO: 34629 - DNA, 503 bp, Mus musculus
  source 1..503: mol_type = other DNA
cctctataggggatattatagccttcagtctgctcttcaatattagtctcacaagggggaaaatatggttctgatatcagagcacctggatttcaatctcatctccatgacataggagcttctactttaggcaagctgtttcccactgtggtagctcaggcctggaatgccagccctctgggaggccaaggcaggagggctgcctggagttggaggccaacctgagctccccagtcaactactgaccagctgcagctgcacagtgagtgacatttaaggtctttaaaatagtacctttacacttggcatttttaatattaatttgatggtgataataatatatagttccaaatttatgtaaattctacttagaggacaaattatctcctataccacctggaaagggggtgatgtgacatgtgtttgatagacacaaaatagatgtaattacaactagttctagatattttaacactggccgcctgacaagctggctgtttggc

SEQ ID NO: 34630 - DNA, 660 bp, Mus musculus
  source 1..660: mol_type = other DNA
tctttaaaatagtacctttacacttggcatttttaatattaatttgatggtgataataatatatagttccaaatttatgtaaattctacttagaggacaaattatctcctataccacctggaaagggggtgatgtgacatgtgtttgatagacacaaaatagatgtaattacaactagttctagatattttaacactggccgcctgacaagctggctgtttggctgctgctgctgtcctggccactcccgagctcagtgggaacctgaagaaggtaagtgccctcgggacagagtcgcctggctgagttcttctcaccccgggcagctgctggtggcagcatccacacagaccctactctgctctgggtgtgtgcgagtgggagagtccccgcagcccctgcagcgccgacccggggccagctcccggggcgggctgaccttgccgcgggcggccgggctggcgcagtccccgcgccgcattgccggctgctcgtgcgggcgccccctggcacccggaccgcgcgcccgcgctcccaccgcgccccacgcccgcggccgagccggctgcgcggaccgcgcctgaggctccggagggtggggcggcgcgcgcccacgggccggccgagggcgcctcgcgcgggtgcacgcgcagcgggtgg

SEQ ID NO: 34631 - DNA, 496 bp, Mus musculus
  source 1..496: mol_type = other DNA
accaacaactgatgagtgcagctttcctaataataaaatcaaagggcgcctggagttgcctccctatgttcttttcattgattgatcccagagggcaccaatcacacccacaccaatcactgcccggaatgtgtgcgcgtgtggccgggtgcaaagcgcggaggcggagccgtgggggcgggctcccggtcccgctgtctgcggccggcgggcaggcgactcctgtcccgagtggaggcggcggagccggagccgggggagggggcagcggctgatagaaggaccgcggcggcgcccgcagctcctcaccggtgagggcgctgagcgaggactcgggggtcccgggcaccgtgggcccatagtctcctccgccgggcggaggcgtttctgagcaggccagccagccagctggggtgacatcattgtccgggccaggctcggctctgccccgcccctccccgcccatctgcgggggaggagactccccgtcagtgac

SEQ ID NO: 34632 - DNA, 284 bp, Mus musculus
  source 1..284: mol_type = other DNA
tggactccaagtggctgagaagccactgctcctaacgctttggatactgatccagagcctttgcctctctgcctggtgtcaccaacaactgatgagtgcagctttcctaataataaaatcaaagggcgcctggagttgcctccctatgttcttttcattgattgatcccagagggcaccaatcacacccacaccaatcactgcccggaatgtgtgcgcgtgtggccgggtgcaaagcgcggaggcggagccgtgggggcgggctcccggtcccgctgtctgcgg

SEQ ID NO: 34633 - DNA, 401 bp, Mus musculus
  source 1..401: mol_type = other DNA
tctctttgtcagagtgaggtggctttcaggagtcaacctagccacctgcagcaggcaggagctaaggtgtacactttactacttcagctctggctgccaggttagtgtccatggtctcctggcactttggtgcttaggcagcgcagacaagcagtcacacttcagtgtgtaaatactgttaccctggctgggggagagagtgtccccctgctaacgagggtgttagaaacagcagtttccaaaggtgtgagtcactctgtgatctgagtcacatgtgaggcttagctggctggagactggagcctgttccccatcctaggctcctgacccagctgtcctcagcccgggcatcatgcctgaggtgtggtcaggtgacctcactcagtgcactgaccttcgcc

SEQ ID NO: 34634 - DNA, 289 bp, Mus musculus
  source 1..289: mol_type = other DNA
attagtattatgaaaatgccatgaaaaacaattgtgctaaaaatgaagatattgttctaagtacatatatgcatttaatcctaaggtgtggtggtgcacacctttaattccaacacaacaaacgaacaaaatctgagtttctacgatatttgattgaaccgaggccagcctggtctacagagtgagttccaggacagccagggctacacagagaaaccctgtggcctaaacattcatagttctggtctttcagatttcaccatctgggatgagctgtctgatagagaca

SEQ ID NO: 34635 - DNA, 223 bp, Mus musculus
  source 1..223: mol_type = other DNA
aaatccagggcattgggcatcttgttaaacctgtgaaagtgatttcttagggtttctctgtatagcctccccagtgctgggattaaaggcgttgtttttttgtttttctcaaagagaaaggatgagattagcggtccgtcttccagccacggagcggggaactgcagaagaccaaccgcggccgagagtgttgcagcttggccaaccacaggcgcggtgggtg

SEQ ID NO: 34636 - DNA, 250 bp, Mus musculus
  source 1..250: mol_type = other DNA
ttgagctgaactcatcgggctgtacagacggctcgtcttaagagtacttagtgctcgtgcaggccctcaggcctaaggactaaaattcaaatccagggcattgggcaatcttgttaaacctgtgaaagtgatttcttagggtttctctgtatagcctccccagtgctgggattaaaggcgttgtttttttgtttttctcaaagagaaaggatgagattagcggtccgtcttccagccacggagcggggaa

SEQ ID NO: 34637 - DNA, 301 bp, Mus musculus
  source 1..301: mol_type = other DNA
gttatgcagcattatctggcttcaaactttcacagctaattttaccttttaaaaaattttatctaattagttttgagacgaagcatggactaccacattgcttttaaaatttattgaaatactgtttgggactagaattaaagatatcaaccacgcccttggttagaggcctcctccgagggataaagaggatatggcctattgcctttgtcgattggtcaagactccctatccgtcgaggaagcgtagtgctgcggccaattgacgtggcgttagccttgaggcggggccaggccacaaa

SEQ ID NO: 34638 - DNA, 389 bp, Mus musculus
  source 1..389: mol_type = other DNA
gttttctagaatgctaactaaaaatcaggctgggttagcccaggtttttgcgaatgctaagcaaactctgtgttttgtataagtttttatttagatgtatttttaaagacaggtttctctgtagagccctggctgtcctggaattcactttgtagaccaggctgacctggaactcagaaatccgcctgcttgttactgtgaaaaagtgctcttgacaagaacatctaaaggagctagttaccagctcttgctgaagaccaaagtttagttcccagcactcagaccttgtgttacaaagtgcattgtacaaacatacatataataaaatgctcggtggtccctgggggtgccggcaggcgtctgtcaggcttgcacacctctgtggtgcc

SEQ ID NO: 34639 - DNA, 296 bp, Mus musculus
  source 1..296: mol_type = other DNA
aagctcaaacccatgagatcttaggctgggatgagctgagtcttggatgaagctacagaggctaaactctgagaatctggattcttacactgattctgtagtttcagaacctcagtgtctgtttggagtgtcagagacctgagcgatgtgtttcagacaaaaatgaaaggctgaggctctttgtttctccgcccagtcctaagcggacggaatattgcctcaatttctaccacaatgcccaggagcttcgtagtttttgagaaccagacgtttcccagggaacgtcacaagaggcc

SEQ ID NO: 34640 - DNA, 395 bp, Mus musculus
  source 1..395: mol_type = other DNA
tctgggctgggcccggggccctgtgactcagggggagcacttggtctccatctgactttgggcagaaggccttctaactcacttcttaggatgctctgtttcctcggagcagaggcctgtcagcaaagagtgctccaaagcctggtctcggaagggttttgagagtccctgaaatgtcagcctcctggggtctctatagaaataaggtacgactgtagtaggtctttaatggtaggcctgcccttacgtgcgctccttgagggcgtgactcactgggcgctgggcggggcgggcggccccatcagctgtgagtcagaggggcagctgagtctgcggcgcggagccggggcggccccggggagggaccgtcgcagggagggagcagctagaggggc

SEQ ID NO: 34641 - DNA, 13 bp, Mus musculus
  source 1..13: mol_type = other DNA
gctatttgttttg

SEQ ID NO: 34642 - DNA, 155 bp, Mus musculus
  source 1..155: mol_type = other DNA
agagagagagctagcttttgcctggagctctagcttgccatcacagaagccgcacgtggccggggtgggacctcagacgacccgtcatctgctggggccgccggcgccaatcacagccagccgaccggggccaaggagcgtgtgcgccctggtgc

SEQ ID NO: 34643 - DNA, 159 bp, Mus musculus
  source 1..159: mol_type = other DNA
ctttctgctagaaaaatctattgcaatttttttcacacattactattgagtagtccgttccttaagtaagtagcttgctcacaccatacagtagaaagggaccctagagagagagctagcttttgcctggagctctagcttgccatcacagaagccgca

SEQ ID NO: 34644 - DNA, 417 bp, Mus musculus
  source 1..417: mol_type = other DNA
ggggttatttagttcatgccaatagacaacatactggctgtatctacttaggtctaaaatgtgtgcacctcacaattttattagattgtttcccactgttttatactattggccagttctgtttgttctttctaaattcagtactagaattcagaagttcaactctgagatctcgttctaacatttggaaagacagtagcataggctagccttagatttaccatgtagccaaggaaactgcaattgccaagtcttcaatgaactccacgcacgtgggaggagcaaaaggtttcaactctcgcctcacacaggtgagggccagccccgcccatccttgagggggacctcgaagtctacgtgctcccgggggggcggggtcggcagactggggttccgcccagtctctcgcagggatcc

SEQ ID NO: 34645 - DNA, 380 bp, Mus musculus
  source 1..380: mol_type = other DNA
ggccatggagggatgttccttgccttttgagaaacagcctgtgtcaagttgacacataaaatctccaacaaagcctgcttgaatggtatttagattctagaaattgttctagatcattgacacgagtgctattgctttttgtctctttgaatagatagagtgaggaaatgtgtgaatcttacttctctctcagtgagaagccctgatcttaaggccataaaatgtaataacaggcttactcagtaaagtttaagattgttttattttgtccttaagaaaaaactcaaaataatattacaaaaataacaaaatttcacatttcaatgtcctgtatcactgagtcaggccaatgagtctcatcgctagcctaagataaagtt

SEQ ID NO: 34646 - DNA, 337 bp, Mus musculus
  source 1..337: mol_type = other DNA
tttttaaaaagtactttaaagttttatttacatttatgtgagtgttttgcctgcatgtatgcatgcaccacctgggtgcctggtacccacagaggtgtgaaacaccatatggatgttctctgcaagaacaggtcttgcgaagattatatgccccagtacagggatcatttgaaatgtaaatgaagaaaatctaatttaaaaaaaaaaagctactcagtggtcacagtggcttctaagctaaatctcaggttcaaagccagactttccagcttcagtatctgcagaaagggcgggagacgagctcgcggcagcgcgtgggcgggcgggtccagctctg

SEQ ID NO: 34647 - DNA, 410 bp, Mus musculus
  source 1..410: mol_type = other DNA
gatggtgtccatacacatctgcgaggcagtgtgaggctgtgatagcaccgcacgcgctgccctcctaggcagcaggagtatgggtgcctgtgcatggggtattgaaaataccaacgctgagtccactggtctcaaggtccacagtgaggctcgctgcctcgggcgaagctgggggccacacgcacctgctccggaggctcccctggtctgcgcacccggctcctccagctcaagcgcagggcggcgccgcactccgcccgctggctcctggcaaagctgtgcgcgtgactcgcgctgtgcgcagcgccgcagccgggaaggtgggcgcgcccgcgggcttggcgggccgaaccaacgcgcctcgcggaggggccgcgcgagggctgcccagagcggaccatcggcaccac

SEQ ID NO: 34648 - DNA, 247 bp, Mus musculus
  source 1..247: mol_type = other DNA
ggaccggctcgtgccagccatcgctgaacccacatctgagtcctcacggtgggagcacagctgcctgtcatctcgggcagtgacctcagtgggtcctctgagccctctaactgtggattcccaaggtggccctgcagataccaagagggtacaaaatcttacccagataatcttgagctttgtcagggttacccaattctagagccagccctagccctaaagtctgactctgtagctggtgcttcag

SEQ ID NO: 34649 - DNA, 329 bp, Mus musculus
  source 1..329: mol_type = other DNA
accagcgtgcatcaccctgccagcttatgcctttggaagacttgcccacaagtgccttagacctaaaggcttcagatttttctggaaacctgccacaggcggaagagcacgtacgtcaggtacgacgtcctctgagggagtgctttgacaagccatgtgtcagatggtcttgtaactaaagtaaataccattgcagtgtctttgctgatactacaaatccccaaactcagagagctggactctgggagcctggaacctggttcccttggtccgtcccacacatggtgtgtgtaaggatgtggcttctcagagcctgggatccaggaggc

SEQ ID NO: 34650 - DNA, 327 bp, Mus musculus
  source 1..327: mol_type = other DNA
gaatcgactccctttcagctccgcttaaactgttagaccctctgaagagccgggagaccagctgaaccctgggttagggaggtggcctgcagccacccagacttggagcatcagagccacctgctcagagaagccccctgtggcccaggggcttccttcagaagcgaaacacgcagtcattcactgcctgagtggggaaggaagcgcccaggctctgcccagacttcttccgacccaggagaagctaggctcggctctccctgggccgaagggaccgacctggaacagcccagccgccgtggcagcagcagcagcaagaagacaggc

SEQ ID NO: 34651 - DNA, 294 bp, Mus musculus
  source 1..294: mol_type = other DNA
ctgaccctcagagtgttaaggtacctacctcctccaagaggatgaggccctcagatccgcagctgcacatgaggccagcggctcagtcttagccagaggcttcatggagtatagcagctatccagtaaataatccttgcattaatgcaattgacagggtttctctgtgtagccctggctgtcctggaaccaggctggtgcccttttccaagtgacagagcggcacccagcaatccccactccagggagtggggggtgggccttcattcgccaactctcggccccgcatagccct

SEQ ID NO: 34652 - DNA, 305 bp, Mus musculus
  source 1..305: mol_type = other DNA
attgctggctgatgataatctaccctgaacttttaaaaactggtgataccagttttaaaccttgatagtagcttactacagtgacctgccaggaggggtagcatatgtttgtaatcccagcacaaagtatggtgtggtatgaatccaaaggttctcagaattaactctaatttaaaaagaacacttctagaacaacctcactccattccgccgcgaggtggcaggacgctcacggatgccaggagacctctgccgggatccagtgacgtcacgcaaccctagcgacgattggctaccttcccgaa

SEQ ID NO: 34653 - DNA, 565 bp, Mus musculus
  source 1..565: mol_type = other DNA
cgcgaggtggcaggacgctcacggatgccaggagacctctgccgggatccagtgacgtcacgcaaccctagcgacgattggctaccttcccgaacgtcccgagaccgggcgtgcgcactccgaggatccctgcacctcctcctgctaccgacgtggggcgcaacctgccgaaaggggtcacaccgctgggcgctagcgaggggaggagtcacctttcacaatgactagccgagtcactctgccaggtctctttcacggatgtagcagtgtcatccgcccccgaaggagagcgggctccgaggggcagcggcctttgagggggcgggatcctgccgagggcggggcctccttgcaggtgcaggcgtctccaggccagaggctccctacagccctagagtgtcggggtcagaaacccggacagtcggagtcggacgcagaccgggcaggcagcgtggtcgacgtcctgtgattcacgccccggcctacgcgcgggggacgcacctgagggggcgtggccgggccgcagcccgggctccaaggagttaaccgcagaccgggccgggcc

SEQ ID NO: 34654 - DNA, 227 bp, Mus musculus
  source 1..227: mol_type = other DNA
agagccgcctctggaagggtgtatgagaactactattgctccaggctagacctttagctcagcccagagctgctccaagtggtaggctctgatgtgggaacacagctgtcaattcccagcaggctgacagcccagagtcccaactatgcattgatgggtctcagtgagggggctctggctggacacaggtccaggctagcttctttggctccaaaacttggcgtcac

SEQ ID NO: 34655 - DNA, 336 bp, Mus musculus
  source 1..336: mol_type = other DNA
aacagggagctagactggctggccagtgagctcacctgtgtcccctcgccacagaaggttacgagacagagtttcacacctagtctctctagcaagtgactaactgcaaaaacaggcccagtttgcctgagttagcctgggtcagagattcttttaatgcaattaatgtagtgacagggtctcacatcttcctatccccaattataatacttgtatcaaaaacaatagttacacagttcataatgagtttgaagccagcctgggctacagaagaatgatattccaccggtgtctccgtggactcagctgctcagagacacggggatttcagagagc

SEQ ID NO: 34656 - DNA, 531 bp, Mus musculus
  source 1..531: mol_type = other DNA
ggtactggagagaggagtaaaagtaacggtttctacaatttctcagtagcggccccaggagattaaggcccagggctgcggagacagcgatccggcccgggctcgctcgcgctgatccttgggtggcggctgccgccgaggttcggtggttcccggactgacctgggagccccgttgcagctctcgcaggtacctgggtgtgcccccagatcggcgctggggcgctccccaaggagaatcgcacgccgggtaccccgcgttccagcgctgggcctccggccgtagtgcgcacgcgcaggagaccacgcctacatcgggggggctgagtcccttaaggcggccacgcccatctcaggatgggtttaagcaatatttgcataaaccactacattaattaatgacctatctatttatagctttcttaaacaattatgtctccagaatctttcaggataaagtatcatgcctaaaacaatggctcattgtttttctacctagagagaccaattttctcaccataaccaaaaaatt

SEQ ID NO: 34657 - DNA, 347 bp, Mus musculus
  source 1..347: mol_type = other DNA
aaaggacgacgaccacgaccatgacgacgtcgtggtgggggggccacatcactgacagctcactggaagctagttgatggttaagcttagatcagtatgaaattttaaaaaataaaataaaaatcaagcacttcataaacgggatatgatggtgcgagactaatcacaaacattaacctaactcttttgtccaaagttcaagacactgaagccctgacaatgtctgcattctggagtctcggttcgcctagctggtggggcggacacaggcagacgagcccggccgctagcggctgcccgcgcatgctctatgctgcgcgctcggctcctgaaccgcagctcccgcg

SEQ ID NO: 34658 - DNA, 611 bp, Mus musculus
  source 1..611: mol_type = other DNA
ttgctctctttggaattacagctattaaagaataaattaggaattcagatttgtctccgttttctttcttcttttcttaggaaagggtgaccttgatttcctaattagtacattcacatctggctctgaaggttgtatagaaataagccgggccgcccgaggccagcctggtctacaaagcaggacagccagggctgccaggtcgcactgccgagctgacggatgacgccccgctgcacgccgctcagctcgccccggaggggtcgcttcttggcgggctaagcgggggaagtctacgcgcgtgtgcacgcggcacgtccggggactttcccctaggcgaaaggataaggaacatgtccctcgtatgtagcctaggaaattttttggttatggtgagaaaattggtctctctaggtagaaaaacaatgagccattgttttaggcatgatactttatcctgaaagattctggagacataattgtttaagaaagctataaatagataggtcattaattaatgtagtggtttatgcaaatattgcttaaacccatcctgagatgggcgtggccgccttaagggactcagcccccccgatgtaggcgtggtctcc

SEQ ID NO: 34659 - DNA, 326 bp, Mus musculus
  source 1..326: mol_type = other DNA
ccgtaggtaagctctgggagcaaagctcaatgaaagagtgcttgcatggcacccatggccccctggagtcagcatgcgcgcagttagagtctcatatgtagattcaaataatcatcctgactgggccaggatacatgcatggattcttctttcccctgccctgccagggccgggaagcaggccaggcctagcagaggccaggagctgggtggtgccagggagaacctggttccaagctgagctggtgatcctgaaccgcaccaatgtccaggctttgatatcggggagggggcatagggccagacagaacctgtgggactttggct

SEQ ID NO: 34660 - DNA, 437 bp, Mus musculus
  source 1..437: mol_type = other DNA
tcggctctcggtggcccggccccgcccccccacggggatggggagagcacccttgccagccgagcctcagccttgccgggcacgggaccccgggtaaactgaggcactcgaggcgtggctagccgaggggagggcacgcggtctctgtgcccaggcagctgccgtgagctcacgccctgaaatagccccgggggccccagccacagctgctgctgggcccgcctgtcactcagaggaagcgctgagcccccggcccaagggtcttgtggcctctgctgatacagccgcagtgggacccgagggggcggacccgaggggtgggcgcaaagggcggccgcgccccgagaccgggcagtgcttctgcccctacaaggtttgggccttggtgggggagggtcctggtcccccggctccgcccggctcctccccgcctaggc

SEQ ID NO: 34661 - DNA, 293 bp, Mus musculus
  source 1..293: mol_type = other DNA
tggcagtggagtctttcgaaagggaaagtagaaccagctagcccagtgagctctctcgcagagagctctcaaattcaaaggccttgatttaaaggtgcaggaagccagcaggtcctgatcaccgggatccaaagctagcagatcctgaccaccaggatccatttgggatatctatggatagaactgtccagtcggctcgttggagttctccaactcggaagtggctcctgggctgcgccacgtcccgggggctaaagcttcccacgccccagggcggggattctgaggatcaa

SEQ ID NO: 34662 - DNA, 273 bp, Mus musculus
  source 1..273: mol_type = other DNA
tgagaggaagggttgagggcagagtgagcccctccttctatggagctctcagagcagtatgggggatcttggcttggcagtggagtctttcgaaagggaaagtagaaccagctagcccagtgagctctctcgcagagagctctcaaattcaaaggccttgatttaaaggtgcaggaagccagcaggtcctgatcaccgggatccaaagctagcagatcctgaccaccaggatccatttgggatatctatggatagaactgtccagtcggctcg

SEQ ID NO: 34663 - DNA, 437 bp, Mus musculus
  source 1..437: mol_type = other DNA
cacatatgcgaaacagacttgactcgtgcagcaaatgtttagaatgtagttcaccttcttaactttgcaggaggattgggggccccgcccgccgcttcccgggctggcccgatcccgcagccccacctagaagctcggcccagcccgtccggcctacctgcgctgcccggctctgcgccccgccctgggcccgcgtcccccacccgccggcggcgccctgggcccgcgctctatggtagcggagactgcaggaagcttcgatgctcgggcgcccgcgaagcctggccgcccctccccagcaggaagcgagcgtgcagagctctggagagaacgcccgaactaattgatcctcagaatccccgccctggggcgtgggaagctttagcccccgggacgtggcgcagcccaggagccacttccgagttggagaactccaa

SEQ ID NO: 34664 - DNA, 459 bp, Mus musculus
  source 1..459: mol_type = other DNA
accagcatccccacctggatgcagaagtggcggtcgggaagacctaggcttaagtctagacctgagtctgcctgcgggagggcgcccaggaggcccctgcgagaccggctcggagctcggtggcatccgcggagtctgtcgcgcggcagaggcgggacttccgccccttccggtccgacttgcggggtgcttccggccggaaagggatccggtggtcccgggtctgcgggtcaccttcccagcggtggcacctgagcgtgggcgcgggggatcctggctgcagggacccggtacccagccctggagccgctggagccgcagcccggggcggggccgaaggtcgccgggagctcctgggcgggtcccagaggcggtgctttgcgggcaggtaccgcggcaccgcccccgtccgtggagctggtcggccctcggccgggcgtgctaatcaccgcggcccaa

SEQ ID NO: 34665 - DNA, 246 bp, Mus musculus
  source 1..246: mol_type = other DNA
aaaactgtctgaccaagatcaccaaggttagatgactatcttagtgacccaacaatatgctagtgtagttactgaacaaccaaagaccagcatccccacctggatgcagaagtggcggtcgggaagacctaggcttaagtctagacctgagtctgcctgcgggagggcgcccaggaggcccctgcgagaccggctcggagctcggtggcatccgcggagtctgtcgcgcggcagaggcgggacttc

SEQ ID NO: 34666 - DNA, 585 bp, Mus musculus
  source 1..585: mol_type = other DNA
atgttgttagcttgaaaaggtctcctcttctctgcaaaagcagaaaaaggaggcacctggtagcccctagctttaccctcggggtccactatcctcggggctcccgcagtcggcacagccgacctgctctgaggccgggacgcaggttaccatgttcactggatcctgggtcctcacgaccccggtggcctcggttccctctgacaggtttctgacgtttcaaaaccagagagctcctgctgctgcagcagcggctacagcaacaaagtcgccacggcctctccctgttgggccgcggtgattagcacgcccggccgagggccgaccagctccacggacgggggcggtgccgcggtacctgcccgcaaagcaccgcctctgggacccgcccaggagctcccggcgaccttcggccccgccccgggctgcggctccagcggctccagggctgggtaccgggtccctgcagccaggatcccccgcgcccacgctcaggtgccaccgctgggaaggtgacccgcagacccgggaccaccggatccctttccggccggaagcaccccgcaagtcggaccggaaggggcg

SEQ ID NO: 34667 - DNA, 467 bp, Mus musculus
  source 1..467: mol_type = other DNA
cagtttcctggagactggagcatctgcggaaatctgatcttacaacgcccatgaacctcgctggcctagaggcccggggtgctgagcccctggggcgctcaccgggtggtttggggactgggaggtccctgggcgccagggggtcgggcggcctgccggggaagtcacactcggccgccgccgcgggcgcagcgagcggagacgcgccgggccgaggcgacctgacctggacgagcgagcggcgcgcgcgggggcccaggcggggggcgggaggcagcggcgggcagcgcaggccgccgggcccgggagaagcgagcgggggacacgggcggggccgccgcagctccggatgggaccagcgcccgggcccgttagtccaggcaggagcttcgggagaagccgtcactgggagagtcaccccccttccgcggcgggcgccctcccacctcagcccgggggtgggctgg

SEQ ID NO: 34668 - DNA, 312 bp, Mus musculus
  source 1..312: mol_type = other DNA
ctgtttcagtggtcgacagctgcagtggccacctggctaaacctgccagctggccaaggaccacaggcctgtgtatccctgtcttaaatatgtaacaaatttataccaaaataagtgaatgtctaatggtccactctaggacaaactactagaaaaaaaaatagtagaaagttgtctggatgactagacagagacatgtctattgtaccatattagaatccaggaccttgtatttcatatatttttatccttaaactttaaaaaacaaacaaacaaaaaacggagcaccaagtcgcccagctccggttgtgc

SEQ ID NO: 34669 - DNA, 297 bp, Mus musculus
  source 1..297: mol_type = other DNA
acacacacacaatttttgtatttaaaaaaagtgtatacaatgaaattgatctcgattttaaaaagatattttcatacgatatgttttaaatctttgcagtggtccaaaggctgaaattgttaagaaattttatcccgcccatgttcttcgtcctgaccaatgcggagatgggtgtacagcaggtggcgaggccccgccctcttcaccccccttacccctcaagaggggccagagctaaatccttccaatggaatgggcgcagagggggacccgccccccagcaggccacggccaatg

SEQ ID NO: 34670 - DNA, 402 bp, Mus musculus
  source 1..402: mol_type = other DNA
cagggaccggggcggggacctggacctggacgctgggacaccggccggggcctggacaggtttgggccgggacaagggctgggccatggcccggggcgggggcggggccggccaggccagcacgggacgctcgtagagctgacccgcggctccgctccccacccccggggggtggcctctggcgtcctcgcgggctcggggctggggccggggccggggccggggccgggacctggggaggagttcaggcctgggcgactccgggctgcgctgaaccggcgttaaccaggccccgcggcggccgcggcgtgacgctcgcctgacgctccgccccgcgccccatgcgattggccgcgagatgacgagaagacttctgttgccctggcctgggttctagagcgc

SEQ ID NO: 34671 - DNA, 296 bp, Mus musculus
  source 1..296: mol_type = other DNA
ccttggtattttgagacagggtctcactataggcctggctggcctagaatttggaccaagcccaggtactgaaattacaggcgatcgtgtctcagagacagtattagctaccttgagatattgcatcttaagctcattagagcgctcagcagaagacccatacacataaaataaaattaaaggtttgttttttaaaaaagtaattactttccctggggctgtttgaaaaactacctacctctggtgatcccaagtccttaggtcaggccttagcaaagggcgctctagaacccagg

SEQ ID NO: 34672 - DNA, 222 bp, Mus musculus
  source 1..222: mol_type = other DNA
cccatacacataaaataaaattaaaggtttgttttttaaaaaagtaattactttccctggggctgtttgaaaaactacctacctctggtgatcccaagtccttaggtcaggccttagcaaagggcgctctagaacccaggccagggcaacagaagtcttctcgtcatctcgcggccaatcgcatggggcgcggggcggagcgtcaggcgagcgtcacgccgc

SEQ ID NO: 34673 - DNA, 352 bp, Mus musculus
  source 1..352: mol_type = other DNA
accatccactgtggtgcatgatgcccctgataaaattccagaagatatcttatggcatagtctgaaacattataaattctactgtcttgtttatagttgtattttgtattatatttatccaaattgtaaatagtatctttaaaaaattggggggtgggggagtctcatactccacccagtaagtaggcttcctcaaagttgggttccaggcctacctcctgggacaggacatggaatctggagcgtcccaggagtcctcgcaaacctgaaagtttgtgagtttgtagaggtggtccctggaaagggagaaggcaggctgtgtgacaggggacctggacactgttatgagctc

SEQ ID NO: 34674 - DNA, 297 bp, Mus musculus
  source 1..297: mol_type = other DNA
ccaaaggtgatgtacaaccctttgagctgctgtggcagcttttcagtaaagatgtcagagaaagctgtgggatctccagagaggacacggtgctagagtggagctactgcagagctgaaggacccctgaggaccctggccacagagcttgggctttggggagcccagcagagatgctggggacaccctgaatcccagcctcatccacaggagaagcatccctggatgatgaacggcttgtggcccctgatcctcagcagcagagaggagggccctccttctgccaggaggcaggaat

SEQ ID NO: 34675 - DNA, 300 bp, Mus musculus
  source 1..300: mol_type = other DNA
gacaagcttcctgcattcctgttaatgctggcctgttctccccagcacgccaccaggcgatgttggggattgtcagagcatcttagaagggcagtatattgtttactctcctgtgccatccctgtgactcactagaagcagatctggtcaggcatatctgctctgagagacagtgcctggctatgttcagtacccagaagtactatttcttcaggctgataatagggtgtgagtgggctcgggccgggctcccttccctgatactctcaagtgggtcataggcccccaatagctgctcta

SEQ ID NO: 34676 - DNA, 425 bp, Mus musculus
  source 1..425: mol_type = other DNA
ctagtcgggagtagtgtacaatctggactctaccatctgtcgcaggagaaagctgctggagctatctgttcaagtggaacattctccggagtagctgctcaaagagtctagtcatacaggaataggtattcccttgcaaatcagacggacctgcagagtgatctcggcaggccagtcgcccctgagctgcgggctccccacatgtgccccgacacgggacagaggcattccacaggggtctccagcctctgacttcccgtttgaagaccgcagcccgggagcccgagagccagggtccagggcgcgctgccgccccccgggaggttttgaaaactctgagcggccggggcggggcttcagcgagccgcagccaatcaccagagagccaaggcgccgggggcggggcctggtgccaggggttgcta

SEQ ID NO: 34677 - DNA, 445 bp, Mus musculus
  source 1..445: mol_type = other DNA
ctaaaagtaaaatacatttaaattcatagaaatagaccaggccaatcttaactcacagagatctgcgtgcgcccaaataaatgtatcttttaaatatatatgtatcctgaatcattaactttttatggtgctggatccaaactcagcggcaccaccctggggcggttgggggaggttaccgacccctggtggcgccggagggaaccgtacctcaccaggccttctccaggcgtcggtcgcgcgggaaccgtgggcgtggacgcccctaggtcttgcgcgcgcacttgctaaggcacgctcagaatccattcgtatccacagcggcggaatcccacccggccaaatgaattctaggggtggccccctgcgcctccgcctgcagctgcctttgccttataaggcggggccgggcggcgccgggggagtggctgtggccgcccctgcc

SEQ ID NO: 34678 - DNA, 582 bp, Mus musculus
  source 1..582: mol_type = other DNA
cttctggccaggaggtgaccctgcagcgccaccgtgcggccgaagcaggctcctataacccgtcgagggcttcggggatgcccacagctgtggttatactgctgcactttgaagcgagtattctcatctcacagaagaggaatctgaggcctgagtgaactggcatttccccagcattttactagatacttggaaacctggtatgggaagtttccaaacctggtatgggaggttggaaacctggtactggcgtttccaagtcttctccatgaaaactgtattctgactacagagatcagaagccagagggtttgtcttctcagacgtccaggaaccttggtagaaaaaagggccttcagggcccacttcctgaaggggtgaaagggttgtaccacactgtgggagttccagttgctctgcctctaactgcctctgtgacagggggagtccttcctcagcaggacttcagccttctggttaaaagggaggcttctaggaggactgtgacttgaaaggcccagggggacaccgtggccccattccagagcttcctctgaagctccattatgatgacctcatcca

SEQ ID NO: 34679 - DNA, 303 bp, Mus musculus
  source 1..303: mol_type = other DNA
tacccgactgctcttccgaatggctcacaaccatccgtgagatctgactccctcttctggagggtctgagtgtacttacatgtaataaataaataaataaatcttaaaaaggtgccgtcaccatgcctggttcacatggtagaactgcaactaaaagaaaaaatagaactcacatttttcctgtcctttctatttgtgatttgacccaaactggcctcaaactactaggttcaagtagtaaagtgacctttgttaacattaaatacactgaggttcagaaacacccagtggttgtgtgtggat

SEQ ID NO: 34680 - DNA, 220 bp, Mus musculus
  source 1..220: mol_type = other DNA
tggatggcatagagccactagtgagtccacaggctttctcatatgccgaagctttgacagttggtctcagactggagtcgacctcgaggcccagcatgctggtacaggtggggtcttgtgagtatactaagtattttttttaaatttctagcacacagttttaagctaataatcaaagagctgatatttatttatcctttgaaagatggaatttcatcat

SEQ ID NO: 34681 - DNA, 293 bp, Mus musculus
  source 1..293: mol_type = other DNA
tgaaactatggcctctttgtgactgccacttctcttagatgtgcacatctcgaactctatatattttaacctaaaatctgaggtcccaaaatggatccatttggatatcttattctcattaacttatagaattgcttcaaggggaaaaactgtgaggcccaaatttggttcagagctgacacgctgcactcgcactctaggcttaactgtgggctctgccagaggagagaacaccggtgcaggcggagccggagcgatcgaccgttcggcgctccgcgggagccgggcgccga

SEQ ID NO: 34682 - DNA, 595 bp, Mus musculus
  source 1..595: mol_type = other DNA
aagcctgcttgttttgttttgaaaccacgtgtctacaaggtcatgtaaatacatactatattgtgagggagcgagagctgccgccgggctaggcactccctgcgttgggagacgctgccccacctccccaccttcgccgcccgagcaagccgagcgagtgagcttgggcggggctgcgcaggggcgctgcgcaccggctctgttgccggaactggcccgagcggcctggacgtgcgcggccccgcccccgcgggtggaaacaaagggggctcggcgcggggagctacccggcgatcctgcgcttggctggctaggtttgtggcggttcgaagcgtagcgcttggggtatcgcctgcgcgcgcagcgcaattcactgcgccggcgcggcccgcgcgggtccgcgagcgctgacaagggggcggggcccctcgtgcggctggcgggcgtgcctccggaggccggggcggttggggctccttcggcgcagggcgtggaacagcgcctcagtcggcccgcccgatcggggacggcggccctggcgagctggccgccggcggggcgagcagtcacaataggaggcggcggcccggccggg

SEQ ID NO: 34683 - DNA, 599 bp, Mus musculus
  source 1..599: mol_type = other DNA
acataattatcatatggtgttgttcctaaacaatgtatatgatccaagaagatcctgaaacattttagtgttttttctttgagactcagttaagccctctagagaccaggcggacctaaagctcctacagctcagtctgagttttctgttcaccgatcctttaacttttaataaacttttaaagaaacttctaatttctacttaaaaagcctacttttccataatttccaatggtattgaacaattctttgagccaatatagggtttatgttctctattggatcttcaccccaatagtgagctgaggcttcatttagtattcgaacttaaaagcctgcttgttttgttttgaaaccacgtgtctacaaggtcatgtaaatacatactatattgtgagggagcgagagctgccgccgggctaggcactccctgcgttgggagacgctgccccacctccccaccttcgccgcccgagcaagccgagcgagtgagcttgggcggggctgcgcaggggcgctgcgcaccggctctgttgccggaactggcccgagcggcctggacgtgcgcggccccgcccccgcgggtggaaacaaaggggg

SEQ ID NO: 34684 - DNA, 619 bp, Mus musculus
  source 1..619: mol_type = other DNA
cagctcagtctgagttttctgttcaccgatcctttaacttttaataaacttttaaagaaacttctaatttctacttaaaaagcctacttttccataatttccaatggtattgaacaattctttgagccaatatagggtttatgttctctattggatcttcaccccaatagtgagctgaggcttcatttagtattcgaacttaaaagcctgcttgttttgttttgaaaccacgtgtctacaaggtcatgtaaatacatactatattgtgagggagcgagagctgccgccgggctaggcactccctgcgttgggagacgctgccccacctccccaccttcgccgcccgagcaagccgagcgagtgagcttgggcggggctgcgcaggggcgctgcgcaccggctctgttgccggaactggcccgagcggcctggacgtgcgcggccccgcccccgcgggtggaaacaaagggggctcggcgcggggagctacccggcgatcctgcgcttggctggctaggtttgtggcggttcgaagcgtagcgcttggggtatcgcctgcgcgcgcagcgcaattcactgcgccggcgcggcccgcgcgggtccgcgagcgctgacaagg

SEQ ID NO: 34685 - DNA, 418 bp, Mus musculus
  source 1..418: mol_type = other DNA
taccaagttgaaccaactcttgaaagttctaactgccacaggtgtgaagtgacacgtgccccatgtaatgaaaaattaagaacataaaaaacttaattatatgaaaactttttttttttgttttgtttttactaggctggcctcgaactcagaaatcttgaaaacttagcaagtcaatgtcttctggaaaaaatttccttgtccctatgagatatgcacactgcagttagtaatgatcaacatacattgtatacgtgtatggtgtcgaagaataatggtatttttaaaaaaataaaaatattcttaaaaaaaaagaaagaaggaggcaaggccttaagtcttcagtcagtatcaattattaaagtcttcaccatcaccgatcctgagcatttgacatcctacacattggactggggcg

SEQ ID NO: 34686 - DNA, 235 bp, Mus musculus
  source 1..235: mol_type = other DNA
taaggatgaacttgaattcctaacctcataattaaagtttttttgtttgctcttcaccgagtgcactttacaacctaaggtgagaaatttggggagtaagtgaactcgcacttactttcttctatttagtataactcataagataaaaatatgcaccataattttttcagccgagatttcttttcgaaaggaaggatgaaaaggacagctcccaagagctctacgcgcggacgcg

SEQ ID NO: 34687 - DNA, 305 bp, Mus musculus
  source 1..305: mol_type = other DNA
agccacgtttaagcatagtagatgtgtgcctttttataagttgccaactggttactgagtacctacctaaaatatggacagattttgtttatacaaacgtatatatgtatgtgggagaattctctcactggaaatataagcagtgatttttgtgttgctgacttctcaaatatcagaccttaggacaatgtctgacatggattctgcagttactatttgtaatgaattgctgaaaatgtatgcatgcactcatgccatatggctgtctttgtacttaagataaactcacagccaatgagcttaag

SEQ ID NO: 34688 - DNA, 428 bp, Mus musculus
  source 1..428: mol_type = other DNA
agctgagctgcacaggctctgtcctctgcagaaatgagagtgcaccaggttgcccttctgccaaatttgccattcctttggagaaagactgactggagaaatatcctacatcttgatctgtggatcaaagatcccgagctctcctagctacatctcaagatgctggccatttgtctacctccgggttacctacatgcaggtacctccccatgaacattggatatgcaaatatggaaatactctattcatcgtatgtttattttaataaccattttaaccagcaatgtatcactgcaatctgactgcagttagcacaggatgtgactttttgtcccagtgccacctgaactgggtctggagttgttggtctgcagaacaactggcctgggttattgattaacacaaaggagggtcaagctccctgctgt

SEQ ID NO: 34689 - DNA, 133 bp, Mus musculus
  source 1..133: mol_type = other DNA
tgcttgagccgaatcattctaagtattaaagctataatgtctggactcagaagactccgacagcatagtcagagaggtctctctcacaggtaggtcccgggctcggccccgcccccagcgccggccccgcccc

SEQ ID NO: 34690 - DNA, 259 bp, Mus musculus
  source 1..259: mol_type = other DNA
ctgctttgttcagttttatcaaagtaacaggacaagaggccaaggcggcagccgggccttcctctttccccgtcggactgagttccgatttctcaaacctacaagttagaagtaatctccagctcacagcgagtgggcgtgacataaaatagcttttctacaggccatcaaagatctttgagaacagttttacgggccgctcacagaacgtcactcctacgccctaggcctccgccgggtcctcaaagaaccgcgcggg

SEQ ID NO: 34691 - DNA, 506 bp, Mus musculus
  source 1..506: mol_type = other DNA
tcaaagatctttgagaacagttttacgggccgctcacagaacgtcactcctacgccctaggcctccgccgggtcctcaaagaaccgcgcgggaagtcacagccggggaagccagtctggaccttcccgcctccttcctcagggtcggtccgagcggaggagggccaccgcctcctcctgcgaggagaaggggggcggagcccggctcaggtgaggcgaccctatcagctagagtggcctgggcgcgcgcgcgcggggcgcgctcacgtgcaggcggttgtgcaccgggagcgcgccgaggcatcggggagcgcgcagccgttccggggccgcctgttacccttcgcctcccctgtgtcccgacgcccggctgtcggtgcggggtgggcagggactagtgccctgcagatctgctgctggacatggagcctctcgggatgctgtgggaacccgcgctcgggatctgcatcctagcggggagccgaggagcggctgccctgcgggtgt

SEQ ID NO: 34692 - DNA, 435 bp, Mus musculus
  source 1..435: mol_type = other DNA
gacccaaataaattaataatttaaaaagtgaaatgtttctaatataccattcattactaacctcaaataaactgagtatggggatgactaattagttaactaagtccttttatattcttttttcctttctggaaagaatcaatagaaaatcatgtgtgacagttctcacttgaacttgcctcaaattcatggcagccctgctcttaaatgctgggattacaaggtaaggtttctgacaggctcttttagctgaaaaggggtggctgcattgaaattactcagggagaaaccctacattagtcagtttttttctattaccttaacaaaatatgtgagacaaacgtgaatttgaggccattatgctcataaagaggaacggtttcttttattgctgctctcctggagggagttactgcatcctcctgcaagggggag

SEQ ID NO: 34693 - DNA, 371 bp, Mus musculus
  source 1..371: mol_type = other DNA
agggccccctgtgtgcacataaatgtaaaaaaaatctacaaaaaaaatattttttcttaggagtcgtcttgaggagctcttttcatgtacttcatataattttaaatacatatggacttaaagttctcttgggcccataactagtagttggtgcaacaggtactacacacatcatttgcgttgtgccaaacgttttctctagctgggctcagggtgactccagctcctatgtgctcatatgcaccgcccgcttccaggcccctaggagcctccggcagggaggctctcacggccgcgcgcgctcgcaggccagccctacacccgcgtcacgtgacagccaccgggggcggggctcgcggcgaagtcggacc

SEQ ID NO: 34694 - DNA, 505 bp, Mus musculus
  source 1..505: mol_type = other DNA
ccagcagcccagtgctgggaacacaggtgtgtgcagcactgtgctggctagtttttgtcaacttgacacctaggaagcgaaaacctcaattgaggaattgcctccaccagattgtcctattgtagcccactgtgggcaatgccacccggcaggtggtcctaaccaatattagctggttgaggccagctacttgaactccagtgctggcggataacgttaacaggttaggtgaaacaccctaagttattttggtggtgtttatcacaacagcaacactatcgatttggcaaacgaacttcattcccaactaagttgttttaaatttcaaacctaggaaggacagactaaaatgtgcatttcacgaagtttagattcttcataaatgttattattatttataatgatatttttgagacttaaggcggcggccgcccccttcaggtctctttgcttcagacacaagaagacaggattcccctcacaggttcccgtcacaggacagaaa

SEQ ID NO: 34695 - DNA, 410 bp, Mus musculus
  source 1..410: mol_type = other DNA
ttggccaactccaattgggggactagcccactctcttccactgccctcagcaggagagactcaagggaagtataaagatcctctgtgttccccagggtctcctaccgcggggtaagaaagctgggaagccgtcattccgagttctcccgtggggacgctgcgtatcccccggcgggtggccagccgaggcagggcctgggtgggagcaggaccgcccactgcgacggcccaggacctcaggagcccgcgtgggcggtgcgtggggctcctcccccggggcgggggtcgcggcgccggcagctggtggccccgcagctgcagcctcagcacctgccgccgccagacggcgcgggcgcagccgggcccggcctctcccccctcgggctgcagccgcggcgcgggaggcggag

SEQ ID NO: 34696 - DNA, 312 bp, Mus musculus
  source 1..312: mol_type = other DNA
cccaccacacctttaaccagattaaaggtgtgttccttaaactcggagattcaatcttctggaatccatagccactatggctcaagatctcagataagggtcactggtgagccttccaattccggattgtagttcattccaaatttcaagttgacaaccaggaatagccactacagttgctcttgcagagaacctaggtttggttcgtgggattccaatacaagcatgcatgaaatgcacatgtgtatgcaggcaaaacacccatacacaagacttggactagtcgcttcacgcatctgagcctatttcaac

SEQ ID NO: 34697 - DNA, 307 bp, Mus musculus
  source 1..307: mol_type = other DNA
caagtgaatagctgtcaatttcttccattgaagaaaaagatctgcatgtttaacaaaagcctacacagcctttttttgaggctggaagttagccaacttgacaattcatccactaattacttgtatttcagttgtcccttatatccagggattaaatggcttgccagcattttaccaaatttgcaggaattgtgatgaaggccttcagtgctgttggagaactgaatcaattactcattgaaaactgtaagttcttaagttcttgcacattgttagtgtgctcccaaagaagtagctgggagaattc

SEQ ID NO: 34698 - DNA, 284 bp, Mus musculus
  source 1..284: mol_type = other DNA
atggagtcagcagccaaggcccgggcagtgctctttttgcggggaagagaagaagtatgtatgacatcaatagattcctcctgtacagtccaatgctttttaaattcgactgctcttgaatctttatagagttctaggctgaacagtctggtaggactggtccggcacacagccagccagtgctccctgacagctgagggccgactctctctgtgtgccctacattgcacacacagggctcgtgggtccccggcagagggcagcctagcggcggcgcgggtttc

SEQ ID NO: 34699 - DNA, 368 bp, Mus musculus
  source 1..368: mol_type = other DNA
cacatgtgctaacagtagaataaatctattttcttttaaaaaagaaatgttttgtaattttttttcctcttaggatctctaggcaaacttccttaaaggaggctttgaaggtttccgacagcttcttcaggagtctgctgaagagcctgcccacgaaggcttgcaaatcagaaccattgttcaacaaactgtgtgtgcaaagagctctccaccaagctttgagatcgcctcatcatgacgcgcttgctgttttgtggtcaggggggcggggagactagcggcacccccacagcctagcgctacccagaccctgagcgaggcagggccctggtcacgtggctcgacgacgtcccgccccgccccgcccc

SEQ ID NO: 34700 - DNA, 239 bp, Mus musculus
  source 1..239: mol_type = other DNA
tggaatggccattgtgtccttaaggtacttcctaaggagctgcttagcaacagatctgaccagcagaaattgaaattttttaatatgattctttttttttttttttaaagcaaactaatagttacaaagcatcggaactcaaggacccgtaatttacagagtcctgtttagtgctctacgccctccctttctttgtgtgtgaaaaaggaaagcgtggagccactttaccgaagtgtggg

SEQ ID NO: 34701 - DNA, 476 bp, Mus musculus
  source 1..476: mol_type = other DNA
cttccaaacatatctaacatctagaaggcagatatcttatttaaccttaagcgttaaatgtttacatagctggttccactaggttggcagtgttaactagccttgctcagggattggtgccccgcctggtcccagccgcctatcccgtccggatccttagcataaagagtttttccgaagacccggcgccggaaaagctgaaccggagtctctgtccctttaaagagaagagggacagccactctctcatttgtcaactagaggtcgtgcgccattcctagagtgcacggcgcgtgggcccccagggactgtgctgactgcttaaagagccgcagtccctgctggagggaggcacggcctgccaagccgcaggacgcgggcgccctagggcaggaccccggagctggcgcccaggcggccgcaggaggtggctcgtgcagtcgctgcgggaaggggcggggccgcggcgctgggcg

SEQ ID NO: 34702 - DNA, 335 bp, Mus musculus
  source 1..335: mol_type = other DNA
aggccttcagccggggactgaacattgggctgtcatcacaagttcatgtgtggagaaagtgcattcttcctatccgaaggcagggctgggacgcccaggcctccccttctgctgacttccggacaatagcagccagcacctccggaagcccagacagatccaaatgaactgttaacagtggagtccatgccagcagctggcaggcgtggcacccactgccttgtgagctattgtggatgggtcatgactcagggccctgctctacaaataactccttgttttgaaaacaaagaaagtattttatcctgtaatttctctttaaagatggtgattta

SEQ ID NO: 34703 - DNA, 259 bp, Mus musculus
  source 1..259: mol_type = other DNA
gttcccaggtaatgtccacactgggctggaagtgataaagtcaaggttgttttaatgcgtctttcactcttgattaaagaaaaacagaaaagaaagtggaggaaaacacctccttccttgatcgtgctcacgggattacaggtgtgatccaccacacccagatgtcaccatgcccctaggtagccaccgctgaggaccaaggaatggcactgggcattgacttacttcaagcaggagagactatcgcttttacaggcgt

SEQ ID NO: 34704 - DNA, 326 bp, Mus musculus
  source 1..326: mol_type = other DNA
taaagtaaggaagaatggttgtcttgtttttttttaccagaaagggttgtttagatagttatctattaatgacaccagattcaatcctataagccattggttatgagagtggtgtcacaggctgtttttttaaaatgcatgttattttaaaaatcttcagtggtcaatgtagactttataaacaacatagcccatttaagaattttcagtactgtcttagtaaaacaggcttgtcaaaggagtgtccttaggctctcagacttgagaagaagccaaatcagactggctagcggctgagcgaggcgggtccgcacggctgctgaact

SEQ ID NO: 34705 - DNA, 416 bp, Mus musculus
  source 1..416: mol_type = other DNA
agtggttaatttccatttgtgtatctaaataatatgcagagtgtaacaatcgatgcatggatttatgcagcattaagaaatgtgcagtgcttaagagcaccggattcctcttccaggggacctgggttaccagtgcacttaaattaaatgaaaaaaaattttaaaatcatacgtgcactcgggggctatgtgctcacacatgcttgtacaggcagagaagattataaaatctggcatcttaaactagagattgtctcccccagcgctcaatcggaggtggcagagctgttctggagacttctctgcagttcagtgagccagtagggccgcgcagcgctggtcccgggccgaggggcgccccgcggtgcgggccgggccaatcagcgggcgcggggcgggcgcggtggctttgcacg

SEQ ID NO: 34706 - DNA, 332 bp, Mus musculus
  source 1..332: mol_type = other DNA
taggctctaagctcaggtaccaaagcatggactcctagcatttaggacttgacggcttacaagtaagtcagctaagcatggtgactcaaggtcttgtgttccccagttcttgtgattcccctcccgtgggaaagaggaccttaagcacactgtgcagagggcccacaggaatccttccttactctccgcgcagagaatgtgaagctcatggaacctctaagccagccgtcctggtttacggcttggagtttattacctgtaataattttttatagctgccaggcaaagccggcagacagctgggggtgggtgagaggagcctccgcttgtgg

SEQ ID NO: 34707 - DNA, 593 bp, Mus musculus
  source 1..593: mol_type = other DNA
aaaaaaaaagattcctgttttgaaaaacaaaacaaaacaaaacatatttttttcagctaaaatgaatcgagtctaaaagggttttgtattcatctctttgtcattcgcctctgtcaaagaatgagagtagcgttttcagtcgctgcagccagcttcagaagaccactcactctcagatgtcagtgtgggaagggcttgccagcaggtctgttccccgactgctgccactgcaggccttctctggaaaggagaagggtgatgcagttcctcacattgtggtgattcacaaccatcaaactatttttttgctactgttgtgaatcagaacgaaaacatttttgagtacaggtttgtcaaagggttacgatccatgggccgaaaaccactgctcggcaggtcttaagccttgaattctgagccttccaacttactttaaagtgggaaagatcttatttctttcagtgtctttcagattcttacaggcaagggtgctgcctgcctgcacaggttgattttaaccttttgggaacttttaaagggcgctccaaggacccgctgagtgacctggctccctgagaaggaagtgtgctcag

SEQ ID NO: 34708 - DNA, 318 bp, Mus musculus
  source 1..318: mol_type = other DNA
gggtctccacgtctgactcagtatggggtcagaattgccatgttcaaataaactgggtggaggcatgctccaaacactaagtgagctccctcctcaaagggagagttctatttctccaagtagaggtgctctgtgcactggtcagtgtattggccacaggccagaaagacttcctggttgactcggttgacaactgaggcatctagagtggtcacattcctcagtgataagtagtggcgatatggacagagtgcctgtcagcagactttcagagtcaggggaatcccacccctcagtgtgatcatcctttataaaaag

SEQ ID NO: 34709 - DNA, 474 bp, Mus musculus
  source 1..474: mol_type = other DNA
ttctaatgacaatacatatgaaataattatatttatataaaactccagttctctgttgtatgcataccaaacacatgaaagtgtacatttgaatctgttaaaaaaaattgctgattgagtaagcagttaaagcaatccagcattaaataaatgttagttattcaacgtgttttgaatgaattaaagaatttgataagtatttattttatgcttattatatactgggcagtgcctcaaacagctttagttttagagcagtggatgaaagcagcgttgttacacacgcgtgtatgtggcaaagcatttgtctagcgtcaggacggcgtgcgcacgcgcagaaaccgctaggagtgggcagccgtggccggagcgcctgcgtctgcgcagagctaagccggccggcgaaggggcggggcgtggtgcgacggggcgtggcccagagggcggggctttaggtgattcccaagccacggc

SEQ ID NO: 34710 - DNA, 359 bp, Mus musculus
  source 1..359: mol_type = other DNA
aaaaggaagggttttataatacagtaatgcattaggaaaatacttttctacggtaggataatccagaaacacttaaaggcttaagtggtttgttctggagagaacacattagccttttaagaaggaggaactcgttggaattgcacgtccaagccctgggcccgtgccagtcctggccgaggggacaggttgcctcttcaaaggaagcacacattcccctgcctccggggctggggtggccctagagtgttgctcccaggccggggaccgcgcagcaccctgtcgcccctggtagagcaggagggcgggggcggggcgcggtgacagcagaacagggcccgcccccggcttcccacccg

SEQ ID NO: 34711 - DNA, 410 bp, Mus musculus
  source 1..410: mol_type = other DNA
cttgaagggaccacttaggttcagaaattaactcatttggagtatcttatctggtgacaaaacaattgtctaattttagcttcacccaaatttgtgtgagacaatcatccttatcatttgtcacattctgtcaccatagagggtggcttggtaccattagtccatggcaggccttaggcctgatgtagagtaggtgcgtcacccactaatggttggcgtgggtcacccactatgaatagccatagacattaagtgtcccctgccatgggatagaaggagtaggacatgccatatgacctatacctgcagcagaagtggctcatctgggagagccatctgcccacagtgagcgctgtcagttcccagtgtctctgtggcctctggggaggggcccgccccactattattga

SEQ ID NO: 34712 - DNA, 195 bp, Mus musculus
  source 1..195: mol_type = other DNA
ggagcactgggggactgagccccacggttcctctccttgcaggttccttgcatagaaaagggaagggctccctgcaggcctgaggcagagctctcatggggcatcacacagggccacttgtgtgtcccactctgtgtgatgatctgaggaaaaagacttactcagataatttttcattgaaacctagatactttt

SEQ ID NO: 34713 - DNA, 473 bp, Mus musculus
  source 1..473: mol_type = other DNA
gcagaagacccgggattgagtctgaaactccacttacaaatacataaaatattgctttaagtctgtgaagagttttaagcatagtaaataagtttgactagacttgtgactcctccctaaattcttggatttaagcaaccatttactgtaagtgagggcagaggacgtccacatactgtacacgtgcagggcctggattccctaccgctcccgctcaggtctcccgaggcgtctacagcgcccgccctcgagcccacgccccccggcgcgcgcgtgcgcagagagtccctgagcccctaagtcgtcggcgcaggggccgccgggaaaatcccgccgggcctgtataaagccgaggcgggatcgctgcggcccggcggaggaggcggccgcaattggacttgcagacgccggccttccactgcggagcccatccggtgcccctctgcacgcgcttccggcaggcgtcgtaagcg

SEQ ID NO: 34714 - DNA, 567 bp, Mus musculus
  source 1..567: mol_type = other DNA
ttttttgaagcctaaaagaagggtcctttccaagtacaccctggagggcttatatctcctttcccatgactgaaggagatggggtagcagggaggccgtcgctttcctccctttggggctccccgagccctcccggggagaaaggattcctatccgttcccgggagactgaaggcgagcccggcctcggttctcacccggacgcagtggccaggccgagtcgtagctgtgccgcctccgcgacatgctgcttgctggtgcgcagccgatctgagttgctagccgcctgcaaccccagaaccgtcgggctgccggccggccggtgcgcggtcagcggcgaggcgcgcggactgagcggcgcgcaggcgcactcgcttacgacgcctgccggaagcgcgtgcagaggggcaccggatgggctccgcagtggaaggccggcgtctgcaagtccaattgcggccgcctcctccgccgggccgcagcgatcccgcctcggctttatacaggcccggcgggattttcccggcggcccctgcgccgacgacttaggggctcagggactctctgc

SEQ ID NO: 34715 - DNA, 301 bp, Mus musculus
  source 1..301: mol_type = other DNA
ctgctctggccagaaaaatcaagagtgtctagttctcagaggagcatctcctcctggttactccttagagtttcacataaacatatgcatttgtgaatggctttttcatttttctcatgtttgaagaaaaatagttcattgtatggtaatactatgcattgtttagccattcaaaagttgcttttccaaagccatctttggaaagattccactatgaaaacaagggtttcatttgtagaatggccagtctctctacccatggcccacagggatgactttactcctcggctgcgcaggcgta

SEQ ID NO: 34716 - DNA, 135 bp, Mus musculus
  source 1..135: mol_type = other DNA
ctaggccacagagggcgtaagcaattatattcacctgctctcaacagcagacaagagccccgacctggtgccctacacaggagcctctgcaaggggcaggaaggacatatgcatgtgacagaggtgggtacctag

SEQ ID NO: 34717 - DNA, 578 bp, Mus musculus
  source 1..578: mol_type = other DNA
agcgctgggccgagctcctggagtctcagtctcccgcttggcgcgcagagggggccagcccccgaatctccaggcgccctccccgctgctacctggggaggcccgtcgccgggcagggaagcggctacgccccgcgtttgctggcgcctttgtgcaggagagcgcctcgccggccggactccgtgctggagttcagagccgcagaacggagcacttgctcgccacctggcccggcccgctcgcttccaccgtaggggtgcggcatgggcggcccctgcaggggtgtacggtgcccccactgaaggccctggcacgagaccccagcctgcagccctggcaccagagcgccaaggatcctctggccggtgccccacaggagccgtcggtggactcagcgctccagaccccgaagttccctgccctcagcgctctcggtgcccgtgcaaagccccggcgtcggctcccgtgggatcgtgcggccagagcggtcgtctacagctgaagacgacgggggggggggagggaccgcggcgccatgacggccgagagcgcgccgcctcccccgccgcagcccgaga

SEQ ID NO: 34718 - DNA, 450 bp, Mus musculus
  source 1..450: mol_type = other DNA
aaacagcttttcacggttaagcctttaatccgtggattcgcattttttaatattttatattacaggtaataagattttgaaatccccaaacataatcatgtatgcaaagagtttgggttaaagaatctttagggagagaaaatacggtttttgctggctctttttccgacaaatagttattacttaaaaagtggaggggagtgataaatataacacgtatgcccacgtccaagggaaattttaaacatttaacgtgctagttggctcagtggaaaactccagttcttttgctatgtgcccaccttcggatgcaggctgtcgcgaggccgccatcgccgcgtggtgggtgaatgatgggcctcacggcgtccgggaacccaccctccacgcggcagctcggccgccattgagcgcgttccaacgcgcggaagcggaaatcagcgttgggcg

SEQ ID NO: 34719 - DNA, 328 bp, Mus musculus
  source 1..328: mol_type = other DNA
tattaataataaagatttattgatgttcagtatgttggataccaaaggtaccattgatcacaatgggcccctgatggcgatagagcagttcctttgattcactatttattctgactggtcataacaacaaggcttgctgataacttgcaacagtttatggagattaatcaacagcctacctaggaagagtaatcaatagctaactctataagcttccctttcataagaagtgtatgaaacaggcaagagtggctgttcactcattttgcaaatactgggccactgagttggcagatcatgaaaaagccatcctggcatggtcacacgc

SEQ ID NO: 34720 - DNA, 407 bp, Mus musculus
  source 1..407: mol_type = other DNA
ctcctctatagactgggaatctccagagtaccagccttgaaggatgttatcatgtgtttttatcgtacatgaaaatatagcaaacaaaggctaaataaatattagttgttattattattatctctgtggaaaaatataagatgctattatatcaaacagagttctgttatctggctaaggccaggttcatcataggctgtaacctgccatcaaggccaacctggcagcagaaatttattcagtgtttggtgaatgaatatagcacagcagatgtatttatatatgaaaaataaaaatatgtgctaacaagttaggtgacccagagaaaactgttgtttctcaccagtgagatgggaatcatatctgttggcaaatctgagatatttcctcaccgtgaggtcacagag

SEQ ID NO: 34721 - DNA, 625 bp, Mus musculus
  source 1..625: mol_type = other DNA
ttaatatcagaggtaggctcctcatttaacacaacgccgtgtgctttaaatccagggacccaattagacttgtcattaaaattactaatggtttccttcactagtggctcacatgtttaaaaacagtgtttatgtataggtagtttaagtactgataaagttctaaagtatattaaattttttatttttaaaaacaaacacgtagaggctggagctgcctgcccctgctgatgttttagtacaacacggcggggaaagccacagcctctgagggcgcccgaaggctcaggcgaaacgcgaggctgagcctgcccgtcgacctccaggagagcgcgggtgccggtgggggtgggggcgggggtcccggcaccggaagacatcagccagcccacgtgcgacccgagggccaggaggcgcgcgcgacccgggaggcggcgccgcagtccgggctgagcttaaggcgggtcccgccccgccctccgtgcgcctcccaagtccgcgctgcagcccgggctcccgagccgagcggcgccgcgcagggccgagtggagccgagcagccgccgcgtcgcgtcgccggtttaagcgcagtgcggggccttggccgggggcggcggtagtgaggc

SEQ ID NO: 34722 - DNA, 416 bp, Mus musculus
  source 1..416: mol_type = other DNA
ttaaataccataccaatttttgcaatcaaagatttctttttttgtggtttctctgtatagccctggctgtcctggaactcactttgtagaccaggctggcctcgaactcagtcttacaattctatatgatacttgtcataactgtcttaatgttagccacaaataccattttagtgctctctcttggaaagtgatgatatggcaaaaccaggagccactagggtttccttgatttttcatgagatttctagaaaactgcagactacagttagttgttagcggctgcgtggaaattcctgttagtctgttgacaaaagacatcacgcactggggtagaccctctgctgtcgagcgagacggggcccgcggattggctgcgcgacagccgccggctgacgtggcggggctgagacctg

SEQ ID NO: 34723 - DNA, 214 bp, Mus musculus
  source 1..214: mol_type = other DNA
tcctgcctgtaatcttgggcaaaggagtctaagactctgttttgttaattcgttctacaagtaccaatttagcactggaccaggttggcaaaccacactcagggcctggggcttcttggaagtatgttccaacttcaccccctcctcctcctcaaggtgagaaagaggtttgccactgggagctgggtcgcccgccccgccccgccccgcccct

SEQ ID NO: 34724 - DNA, 287 bp, Mus musculus
  source 1..287: mol_type = other DNA
gagcactttacacccagcttggtgtaacagtgtacagagtaacactgaattgaggagcaggacataaaatggctgctttttttattacgagactccaacatagactcccatgagctgctgatctttgtgctaaatacacacaggaatgtcagacgggtcttgaacttgtacacctgtcacctcagccttttaagtgctaggattagaggcttgaacctctatgtccagccagctctccagccctgggcactacgtaagcccggagccagccctgggtagggactggt

SEQ ID NO: 34725 - DNA, 212 bp, Mus musculus
  source 1..212: mol_type = other DNA
agaacccagggaataaagacgctaagctaactgtattgatttggtttagccactgtatagcccgtgctagccgtggcatgtaagaacagctggtgctcttaaccacttaacatgctagataggggcacccagggagcagttcagactgcccagtggccagggagaatggccagctggctggccacaaccatgacatagtggcttggccattg

SEQ ID NO: 34726 - DNA, 463 bp, Mus musculus
  source 1..463: mol_type = other DNA
cccagggccctgtggttcggaactagagtggtggtgtagtcctacaatcccagctcctagaggctgagggactcttgtttcagaaaaagcaagcataaatttaaatgtaataaattgtgttcttagttaacaatatatacaatacctactttgaagagggagcggcttggacgcagcgccccctaatggcagcagtgggaaggatctcccggatgcgcagccgccctccgctctccagttctcccgccgcctgcagagctgcggtcccggcgctcgctgcgggatccagcttcgagccatctgggaggcaggaaactgaggttcgggacccgagtcccacccaaagcctgcggcgagagcgtgtcggaggcggaaccgagctgcgggcgacgggcggcgcacaggcggggcctctccgtcccgccccgccccgaccccgcccggcccggtcccgcccgccggg

SEQ ID NO: 34727 - DNA, 332 bp, Mus musculus
  source 1..332: mol_type = other DNA
catactgaagggtaggtgtgagccctgcccatccttatctagtggcgaaacacgcctcgctcgcggtgctccgcgttcccgccagtgcaacaaggcgcaaacggagcgctcggccaatggctgcgcgatgcgccgtcccgcggtgactcgcgcggcacccgtagagtggcggctggagaggacgccatgctccagcgcctccacgcgggccacgtagcttggcctggcttccagcctcggagaaagaaaaagccttgtttttaaacagaggcgcccgcacgcgccgcgggcgacgggacccggggcggtcctcgcgtgacaggggcgtggcc

SEQ ID NO: 34728 - DNA, 635 bp, Mus musculus
  source 1..635: mol_type = other DNA
ccagtgtgtttataccacctgggagacagaagagccaagctggcttcttgcaccgggaggtcaaacgcctggaggaggcggtagtataggtctcctatcccagccctgacctgggcttggcaaaggactccagactggatcaagggtcccaggttccctggtagctggcacaggagagcgcaggctgctggtgccctcgcccaggtgctacaggaagcgcaaggcgaggcgcccgcgtcccccgcgcatagcagcttcgattcccccgaacgtggggctctggagctcagtccccggcggcggggtcagccggccgcagcagccggcgcggcgcagcgcccggggcgcgagtgtgcgtgtgccgggagcacggccctccccgcggcagccgcagcgccggcgcctccccctcccccggcgcgcacggcccgtccctgtccccggaggcggcccgagccgccgctcagcagcctcccctggccgggctccagggtccgacgtcccgcggctccgagcagcgcgcacggaaggaggcggccgggtgcggggcggccgcgctggagagaggcgcgcggagactcggccccctcggcgctcgctcgcgattgatccgtcacgggcgccgccgccgccgc

SEQ ID NO: 34729 - DNA, 583 bp, Mus musculus
  source 1..583: mol_type = other DNA
ctactgtagattggaataatctgccctggggaccagtcggtggttcctactggggaccagaacagttgctggtcccacactgagtttccgacagtgaatgtaagttactgcggtagtggtgacccccccccccccctgtcaaaactcagcactgcagggctgctgaagcctgccagtcacaggcccaccctccaaggcgggaggcgggccctgcgcgcgcgtacccatcaggcgcgaccccggaggcgcgcgcgcacccagggggcgggcctgcggacggcgggcacgcgcgcggccccggggtgggagcgggcggcggcgcggagcgggcggtcagcgatgggcgagggcgcgctggcccccggcctgcagctgctgctccgcgcctgcgagcagggtgacaccgacacggcgcggcgcctgctggagccaggcgcggacccggtcgcggggcccgaggcgggagcggagccggcagggcccgaggcggtccgggcagcggaggccggggcgccggtgccggtggactgttccgatgaggcgggcaactcggcgctgcagctggcggcggccggtggccacg

SEQ ID NO: 34730 - DNA, 311 bp, Mus musculus
  source 1..311: mol_type = other DNA
aaacaattcgggcacgaaagctgtgcctggcactaacaggcatccactactgtagattggaataatctgccctggggaccagtcggtggttcctactggggaccagaacagttgctggtcccacactgagtttccgacagtgaatgtaagttactgcggtagtggtgacccccccccccccctgtcaaaactcagcactgcagggctgctgaagcctgccagtcacaggcccaccctccaaggcgggaggcgggccctgcgcgcgcgtacccatcaggcgcgaccccggaggcgcgcgcgcacccaggggg

SEQ ID NO: 34731 - DNA, 448 bp, Mus musculus
  source 1..448: mol_type = other DNA
tttgcaaaggcaccagcctagcttggctcccctaaaagttaacagcctgggctatgtagaaagtttagagtcaaccaggactacagagtaattctaggactcaggaaaggaggccagcctgggttacttgaacagcaacacatttttgatttaaactttaaatttaaaacttttatctgtatgcatgtatgtatacacaagtgtctatatcagagggagtcctcctttcaccatgtggggatggatggaactctgtccttcaagcttcgaagcaagggccccgtggctccccccaaacctgatacattacagttattctaggcgccactgagtaccgcacagagccgcctgcagcatagcgcccagagcgctgtgctcagcccacactccctctcatgtgggcacaggcaggtgcaggtggggcgggccgggggcggggcgaccgcgg

SEQ ID NO: 34732 - DNA, 397 bp, Mus musculus
  source 1..397: mol_type = other DNA
aaaatatggatcttaataaacagttcataattataaaatgttgttattattaactttttaatttggaagctattgtttatagccactggctctaactgtgacaatttccttaggtaaatctatctaggaagtcagtacagatctggctggtgcattttacaagtaatagcccatggttaatcatttgtaacaagtgttatacccttaagtgggcagtatccttagaattaaaagccaatggcttgcagtgcactagttagtaactgcaagagctcctaaggatagcgtttttcaagagctaaggtcttgttcccagcgggcaggtaacacatgggattccaaagtccttcaaagtcctcgctcctggcctgctgggtgtggcacagcaaccaggagc

SEQ ID NO: 34733 - DNA, 325 bp, Mus musculus
  source 1..325: mol_type = other DNA
ctggtgcattttacaagtaatagcccatggttaatcatttgtaacaagtgttatacccttaagtgggcagtatccttagaattaaaagccaatggcttgcagtgcactagttagtaactgcaagagctcctaaggatagcgtttttcaagagctaaggtcttgttcccagcgggcaggtaacacatgggattccaaagtccttcaaagtcctcgctcctggcctgctgggtgtggcacagcaaccaggagcagccggccctgggttgtggagctcgcagcggggaccggcggcgaggtggggcaccgcgcgtgggggagcgcagg

SEQ ID NO: 34734 - DNA, 509 bp, Mus musculus
  source 1..509: mol_type = other DNA
tcagaatgagaaattatgtcggagacgcttcgccccggggcgggatgcttcttcgtagggcctccctccgaaggcctctccgcttccacgcggggacaggtgccgagacacagaggccactcgggggtgtgtctgagctccaccttgggattccgaaactgggctccgactttgagactaacggtcacagtctttccctgagcaactctcacaggcacaccctgcgctcagtcgggaccgtgggctccctcgggcgcgcagactgggaccctgcccccacccgccgcgggagcgcgagctgcccgctgtggctggaggcggacccacggccgctcattggtagcccagggccccgcgggcggggctctcggctaggtcccgctagggcgctcgcgggcggcgggggaggcggggtcggcgggagccgggcagccaatgggcgtacgcccctcgagcagaaagggccggagcgaggccgcggcggcggcggggaggtgaggagaagctgc

SEQ ID NO: 34735 - DNA, 257 bp, Mus musculus
  source 1..257: mol_type = other DNA
aatttacctttaactaagcatgcatcccgcagcccgtgcggccaccgctttgctgggagagcggccagaggatgccactggtggcggggaccgcgcaccatgctgatgcctaactggcaccgccccccggccggctggcagggccttcgcagactcttggatgactaatttatttagcgtgcttaatatggtcaaacatcaccaaattgcaagctttggacaggtccgccccaaattgcaggagcttgcagaagctc

SEQ ID NO: 34736 - DNA, 415 bp, Mus musculus
  source 1..415: mol_type = other DNA
ctaaacatttaaaatgcagagatctgccattttaaagggtctagccaagaattggtggcggcctcactggtccaccacgtcgtaggagcagatggcggcgccgcggccgccccagcccaggctgcgaggcagccagtcccctgcgcattgcaccgagagctcgcgggtctcgaagcgccagcgccgcgtccagcactaggcgctcggctccgcctatacccatgtctgggtgcagaacccgggaacgggctcggtacaggttttcgggcttgcgctctccgcgcgagcttctgcaagctcctgcaatttggggcggacctgtccaaagcttgcaatttggtgatgtttgaccatattaagcacgctaaataaattagtcatccaagagtctgcgaaggccctgccagccggccgg

SEQ ID NO: 34737 - DNA, 454 bp, Mus musculus
  source 1..454: mol_type = other DNA
gaaaatgaccaaaatttcattacatactcatatgaaattttcaaaaaataaaaaataaaaacaaaagaacctttgagacaaggttttgcaggccctaaatctagggctggaattacaggcccagacacacaaatagtcacatgttgttcggtggattaaaacaacagaaatatactgttttacagttcctgagactggaagttcaaactcaatctacaaagactctttcaacaaggtcatatttacaggtttcaagaataaggatttcaacatctgtggttgagaccatttgactcttctccctgagagatctacagtaggttcagtagattttaccagtagacctcaaaaaactttctgataaaaacagagtggatatccacctatatattacattttttttacctattgttaatcaatttttttaaaaggttacaaactctttagttccatg

SEQ ID NO: 34738 - DNA, 471 bp, Mus musculus
  source 1..471: mol_type = other DNA
agactcactcagctgttcaacactcgtgcagcgcgcgcgtggctggatgtgcacgcacagctgcacctctgggagtctgctgcgactgccaggtcactcggagaagctggctggcgtagccttgacctggctagatgcctcggggcagcctcggaggcgagccagcagcactcctcccggagcctgacagctgggcggtcccgcctgacccgcgggcgggctgcggcaccctctggtagaccggcgccctggcaagcggctcccgtgcagaggggagcctcagggctggggtccgcagctcctgcggccgtgagaatggccggaggacgcgcgcacgcgcgcgcgcacacacacacacacctcgcacacgcggaaccggctgggccaggggagggactgcattccaggcactctatggagaggctgctgagcgaacgcgcagccgggagagccgagtctcctgcctcccgc

SEQ ID NO: 34739 - DNA, 481 bp, Mus musculus
  source 1..481: mol_type = other DNA
aatacctttatttttctccttgggatgaaaatttgatagatatgcctcaatctatgaactaaaaaattcaaatagcttaattaataatgagctttattttaaaaattgcctttcaagactttcttaagagatcctaagaactgagtttccttacagctaacaggaaatgttcttaagactgttgaaaacttcatcatcagaagatccagcaaagacctgaatagtcatatatatattttagttggtgacctgcacacacttcaaagcttgttctagcagcagctggtccaactggaactacttgtgagtgagtcacttcctatactcctagccagtcactcaggggctctgggagggtaacatgtagaaggttatccaagtgtaaattgtcttagatacagtacacaagacgaatccagtgtacctccacgcccactggccgggtagggggcggggccacatatcccgcccctggagacgc

SEQ ID NO: 34740 - DNA, 421 bp, Mus musculus
  source 1..421: mol_type = other DNA
ctcgcgccccgacacgcgtggggaccaggtccttctccaggccttgagctttcggagaagttgctccgagtgttttcttcttagtagaaaggaaagttcactggctttcaaaggcacctctcgaacctgttggaggcttccggcagtcatgcgggagctcatgaggcttctcccgagggaagagccgcggggacaatgtttcttatagaaccaagttgaacacaatgaatgaaattactttattggagttgttttaactgccgggggtgggggtggcaccactccctccctccacaggccccgattggaaactccgcggaggagcccaggtcacaatggtgtcggtttcctccacacacttcaccacggggagaggaacacgggggtgttcccttcgtctgccccggagaaagaaaggggc

SEQ ID NO: 34741 - DNA, 429 bp, Mus musculus
  source 1..429: mol_type = other DNA
caggggaatcaaatgtcagaagtggtgacacttgaagaatgcctcctaagtagtgatgatctttccaggcacgtggatctagctggatgttcacagaagattctggccatacaccaagttaaaatcctttattacttggttacttcgtaatgaagtggtgattgaccgaagccccagtggtgattctccttaggatggaggctcaggccacacctcagagcagcagcccggggcggtgctctccactccaagaatggcgtcccggggccgccccaggaggcacaaccctcacggggccgcccctcaggacactagagcccgggagctctgaagaagtagcctggggctccaggctgcacagccctctgggaattgtagttcccgtcccggaggtcccgaagagccccgcgcacagatggcttggccgtc

SEQ ID NO: 34742 - DNA, 240 bp, Mus musculus
  source 1..240: mol_type = other DNA
tgctttcgcaggccttgtggaccgcgggtgcacgcctcgccagcggaggagagtcgaggcaagcagggggctgcaccgttccccctcgcggagggcgggaggcgttcagggacacagtcggagggtttgtcaccccgacatacatgggctccggggccggcggcagcggcacctcgtcctctcgacccggagctccagcggcgggacggccaagccatctgtgcgcggggctcttcggga

SEQ ID NO: 34743 - DNA, 423 bp, Mus musculus
  source 1..423: mol_type = other DNA
taattttttttttattttatagttttacatataatgtcatcaactcccaacattaacacagacttcgtatattgaacctcaatataaggtattaggcttttctagttcttatatgtaggaagctgcaaagacaaatttaagtcaatctttagatttaatgtctcaaatttctctaaatccacttactttgattagtagaagttaattatatgctgaaaatgttgaagggaaaaccctgtcctaggtttccgggactctgccacaaactatcttacatcctccaagccaaggatgctggaagacctgactcggcttgcttccggcgcagcccctcttagagggggcgtggcgtgcaaatctggacccgccctccggctgcgcgcgattgcgacctgcggtcacgtgagcgcggcgagggagggc

SEQ ID NO: 34744 - DNA, 566 bp, Mus musculus
  source 1..566: mol_type = other DNA
atatatatgtacaaacagctaagctcatattatatgtgagtaaattggttatgatcaattaatgattgctattaagtagcgattttttttctgttatcttcggtcattaataagaataggaaggccagcttctgttccaggcactcacacaaggccgctgacagcagcggtcactcaagctccaggagaataaaatgaatcttttagaaaataatgcattaataatgacttcataatataataaatacctgtgaataccacaatgttagtctttcaaacctgtcagtaaattgtccaattttagactgggtgcaagaggcatgttcatggcagtggcaaaagtggcagcaactttactgccttcaaacttttacttcagataaaatgcaggtttagttttaaaagtatccatcagtagctagatttagctattagtatgtaaacttattcttaaatttaaatttgatatgctaaaggatttaacatcaaaatttaaatctttctgtcaaattctaagattctaattcaaatcggtgattgcagcacttgatgaccaagacccgtgg

SEQ ID NO: 34745 - DNA, 260 bp, Mus musculus
  source 1..260: mol_type = other DNA
aagtttgaggctagcctgggctagacaaagaattggaaacaggttctttagacaaatgcatgtagaacacagatatgcaaactgtagaatacacaattgtttggattctttgacctggccagagtgaccaggcccaatgaagctggcctgtgatatcatacacttcggatggaacccttaagaatagattatcgttggctattctataaaaagaaaaagtttgagaaccttctctttaggggtgaaggccttgtcggcag

SEQ ID NO: 34746 - DNA, 295 bp, Mus musculus
  source 1..295: mol_type = other DNA
tatgcaaactgtagaatacacaattgtttggattctttgacctggccagagtgaccaggcccaatgaagctggcctgtgatatcatacacttcggatggaacccttaagaatagattatcgttggctattctataaaaagaaaaagtttgagaaccttctctttaggggtgaaggccttgtcggcagaaggacccctgcccccagcgcgccttgggtcccactgggtaggcacacagggtctgagcccacccttggggggagggggagcgcacaccccatctctgggggagtccc

SEQ ID NO: 34747 - DNA, 473 bp, Mus musculus
  source 1..473: mol_type = other DNA
tgtgtatgtgttagatgtcacatatttataagctgtacaaactctccttgaagaaataatcctaatcattttaaaaactactttaatacacattcatttttaaacattgtatttgttttaatataaatgtacaaattatatcagtgtttgtgaatacaatgcagaaataattgttaatgattggtgctctgaaagagtagctctattaattgtagtttagccagtcaaaagtatgcatgtagagtttaaagactatgtttaaacttaaatattaattttaataatttgatttggaaaagcatgttataatataatgttttcactatacggatttgatattggtctgttagtactaataataggaacaattcataggacaagaagattgcagttcagaattctctttccttcagtgtttgaagcatttggaaccggccccggtgctttgcaagacttttcaaccctttaaagca

SEQ ID NO: 34748 - DNA, 434 bp, Mus musculus
  source 1..434: mol_type = other DNA
ttttgcaattttcttaattttacaatgaaattctagaattccttctgaagtaaagcggaaaatttccaaaaatttggcctatggttgagggctgcagaggactgtactgggctccagacagctggaagacgtcccaacttcctgatttggggaatagcaaagccttttccccggagaagtgcacagtgggaaaggctcacaaagggcttctgagacaccgtcccgaagctctctccagtatcctcggcgccgtccggccagccggagggatcggcgaccccggcccgcgcccccgcccgcctcaggaacaatggctccccgggaggggcggagctcggcgccgggggtgtgcgcggggcggggtcgccgctccctccccgcccgcggctccgtcacgcgcccctcaccgggcgggccggggtctttgtgacgcg

SEQ ID NO: 34749 - DNA, 427 bp, Mus musculus
  source 1..427: mol_type = other DNA
tccagatgaatttgcaaattgctccttctaattcgttgaagaattgagattgcttttggcaagatagccatttttacaatgttgattccatgagcatgggagatctttccatcttctgagatcttcagagatttgaagttttttctgtgaacccaatttggaaattagataataatggtaatatggaaagttagatttgcaaaattcactggacttgcaactctcgacatttagataatcattagtctgtgaaacttgtttaaataaagaggtggattgtgagtcagtgccacagaagccactctggttgggggaaggggggcacacacacaccttcctccttgaaagccttgaggacatcacagggaggaagcgcccctcaacaccttgatgatgatccagttgatagccacaccttcaaatgccc

SEQ ID NO: 34750 - DNA, 332 bp, Mus musculus
  source 1..332: mol_type = other DNA
tttaattaatttgtaggaatatggtctacataattcagagtcattaaaatgtcttctttttacatatttaaaaattaaattgtgtacataagatagtcagtttatttttctatttatatataatatgaagtttgtgttagtactaattcagaatcaaaggtgcatcagaatcccctgggaatatttttcaacttgtttccatttctgaactaaaatctcttgggagaggagtccaggtatcaatcatctcttgtcctcatgagtagaaaacatccatacgaggaaaccaattgcttcatttctaacttattcctttggagaactatctcttc

SEQ ID NO: 34751 - DNA, 395 bp, Mus musculus
  source 1..395: mol_type = other DNA
agcggggcaatggctgcattgttctttttgccctcgaacaaggctgaatccagggtccttggtaaagctgtttggactggagccacctgcagctatcatgctttggcctcagagattgcttgagaaagcactaagaagcggctcctaggtgggggatcctgccactggcttccagagcgcgggagccctggcgtctctgctcagggagcacctaggtagcgggattcccgggctgccttccaggaaccccgcagagtctccggtactccctggggcacaaccctgcaagcttcatgcttcagctcttgagagagagcaagctcggtgcccctctctgagtccctttcattaaacaaacgggaggggaatctgtgatcccgcggcccgtgccgcgc

SEQ ID NO: 34752 - DNA, 477 bp, Mus musculus
  source 1..477: mol_type = other DNA
cattggtcatgttacagtgatcaaatgagctcaaaattgggaattctaactagatttcccagctactataaaactgtagttttgtggttttgaataaattgagcattaatgctatggacattataccccaacatgaatttctgtgaagttttaagagaggtatcacatggatccaaaagattaccctcgattagataataataggtaatctatggcacagggtgcctttttttcaagttcacatggaaagttagatttgcaaaattcttgtgactggacttgcaactctagacatgtaaagttagataatcattagtctgtgaaacttgtttaaataaagaggcctcttcaagatcctggttgggggaaggggggcacacacacaccttccacccttgaaagccttgaggaccagggaggaagcgccccttaacaccttgatgatgatcaagttgatagccacaccttcaaatgccc

SEQ ID NO: 34753 - DNA, 238 bp, Mus musculus
  source 1..238: mol_type = other DNA
atcagattatctgataatgcaatcaaatataattatgttgaaatttcccatcagagaatagtgcatgcgtatacatcttcacaaatataaaatggctaagactatagatttcagctgtcttaacttttgcccttccagctgtgacgtgaaaaacccaatctggatcatctccatgtgaaataacacacactgtgtcacagagacagcctcttttgggtagctgttattcaaagtccaa

SEQ ID NO: 34754 - DNA, 184 bp, Mus musculus
  source 1..184: mol_type = other DNA
gggacccgagtagaaactcataaatgagatctaactttttatcaagttactcttgaaaagcaccttgcagcaaggggtatgtctttcttaagagtgggcttggggacgccatcgcctcgcacacgacattggggccccggagccttcgcggaaccgctcaactacatttcccggaatgcattct

SEQ ID NO: 34755 - DNA, 329 bp, Mus musculus
  source 1..329: mol_type = other DNA
catttacctgaaaaatgaacagtttggacaaagatttggtctaattaaccactttatctttaatatttatcatatagtaaacactaaaatatctgttgagtgaaaaatagaggattcaaacttctaacttaatacgttggttaaattttcaggccctaaatattatctaagtaatatacatagatcccaacggggcttagttccctcccgtgtggaactaaagcgtgggaaagcagaaacgaagcttttagcccaagggaagcttccacagccagcctcttcttgctaaccgagacacgatcagagaatgcattccgggaaatgtagtt

SEQ ID NO: 34756 - DNA, 332 bp, Mus musculus
  source 1..332: mol_type = other DNA
aatcatttctttttaaatagaataataaataaacgaataaataaattgataattatatacatcaaaataaaatgaaagatcatctctattaactataaagtttagaggacatgataaatatcacatcactgggttaatttgaaattaataattctgcactgtcttgagtttgtagagctcttgtgagggtgagtctcactctccaaaggaagaaagattaaacaaaatacataaatgtaatttccttgaggagtggatttgtttctcagccaacacccttccagagtagctctaacattctatgagtgtaaggagtgtgccagttattgaat

SEQ ID NO: 34757 - DNA, 302 bp, Mus musculus
  source 1..302: mol_type = other DNA
cggcgaaggtgactgagactaaagttctccagctgagtgtcatttgcaggtagttctatgcatagtatgtatgtatttagctttgtagaccaggctagccttgaactcagaggaatcagcccgcttctacctcctgagtgctgggattaaaggcgagtgctaccatcgccgtgctggaatcccctaactagaaatcggtcaaattccttgagttttaacctcaggtaagggcgcttgccctttgggagatggacaccaccggtcactttgggactggagtctgaaacagtcaagttgaagca

SEQ ID NO: 34758 - DNA, 384 bp, Mus musculus
  source 1..384: mol_type = other DNA
tccttcaaggctgagctcagaacatctggaaacaagatgatgatctcattttttgcatcaaataatttacttatggaatttcctctttttaaccctgtaaactcgtatgtaccctgttacagaaagggttgagtatttaagtgataatgatcagacaatacaacattatgatcaccaaaaaaaaaattcctattatatgtacatccaaaatactcatcagggtactttgcatttaaacagaaggcgtttagaagattactaagggcgagatgctttattaaaatacatctttcttcttgatggaataaaacctaggcttgcattcactccccacccccaagccagctttgggggctgcagttgctccgcagctctcaggtcacg

SEQ ID NO: 34759 - DNA, 441 bp, Mus musculus
  source 1..441: mol_type = other DNA
ttcttctaaactaaagaacatacgacatgaaatgcctttttttttttttttatacatttttgagaattggagttgctactccaaagaaaagaaagattaatttacacacagaccttcctgggatactctacagaagatctctctatgtgctctgtgggacagccagccccaggcaccagacagaagaccatgttctaggaaactctgattatttttttaagtgttctgaattaataaggttcttttttaatttctcaagagtacattgatgtctgtatacctgagtaagaaattctgttttcttaagaatcttctgaacctcggggccctgaaaaaggtccaggaggatgccaatctggcttcccctggggagaattatgggtaatacacctattctgacgagctatgtgaattatctagatatgtttctaattccctcaa

SEQ ID NO: 34760 - DNA, 274 bp, Mus musculus
  source 1..274: mol_type = other DNA
tggactcagtattgctgatcaccaatcattaaatgggagctttttaagctctgaaagtacttttattgcattttcgttttttatcccgagaatcaaaaagaaatcagatgtgtaaataattcttgctttggatactccttaaagtcacagtggcttttaaccggtccctgtgacccattaggcttcagatctctcagtaccgactccgaattcagaaattagcgcagccaagcgacaggctggcgccagggctctgctactgggaggcgccggc

SEQ ID NO: 34761 - DNA, 358 bp, Mus musculus
  source 1..358: mol_type = other DNA
cctaattgcaagatatgcttgactggtccaacttgagactcaagtccagaggccttagagataatataacttgaactgatccctaaagatattctgctgtatttgtagagcaatagtgtctcatagagactgaacctactacagtcagggacattgtacgggtctgacctaggtcctctgcatatatgctaaaggagatatccttgggagccaagcctttttataaatacatgtttctatctaaaactcttagaaaacaagtatttattaaaatataactaatttttaggcttactcagtaatcatgactgatactaaagtttattcttagaattttagatgacagaaaatccaagca

SEQ ID NO: 34762 - DNA, 203 bp, Mus musculus
  source 1..203: mol_type = other DNA
ttacaggagtccttcatggacagtaaaagatgactcatctcccgcctggacaccaggccgggccaagatgccggaaccaaaggaccccaactccgaggcgtctgcgctctgttggttcctcttttgccctaaggaaaaaacaataaataatagttttaatattggaacgccaggtctgggcctcgcgcgttgccggccccgcc

SEQ ID NO: 34763 - DNA, 436 bp, Mus musculus
  source 1..436: mol_type = other DNA
aaaactaactctttcagaaagctcttgatacagtgtattgcatgaaaccctctctgcacttaaaatgactgttctattaaataactattagatgccatctgggtaaccgaacctactatttagacatgaatgagtaaaaaaaatgtgaaaaaaatgtttaaactcattttgcttccaaaatggtagttcacagccaagacgtgagtaactccatcttgtgtacatattaaactgtttattcataagcattgtttaaagagaaagtgacaagtttgtgattaaataatttaaatccaaacatttgcatattttattcatcaagaaagactgcattccatttagtttagatatactagaagatgaaagattcctctaaatcatttcattgcatcttaacatgacttgctcaccctgagttctgaattctgtctctagg

SEQ ID NO: 34764 - DNA, 530 bp, Mus musculus
  source 1..530: mol_type = other DNA
aatataaataatcccaacaccattttttttttaaattacatagttgatggggatcagctctaactagcaatgtaaaattagcagttgtagatagtgattctctgtacaaaaggaaacactagggttccacgtttgttgaggatgacctacagaactctgtaaatacaaactgttattaagaagcttcagcaacatttcgtgaaggaaactggaactggttttggtttgtgttttcaaagccagtgcctttctcttcaattagtagaaaatgaagcctcagaggaccgaagggtcccgggacccccggcccgcccccgccccggcccgccccggccgcgccccgcagcaaagagcgtagaccgggagggggcggagcctgcggacagaagccaaggctccgaccgggcggggccggcaacgcgcgaggcccagacctggcgttccaatattaaaactattatttattgttttttccttagggcaaaagaggaaccaacagagcgcagacgcctcggagttggggtcctttg

SEQ ID NO: 34765 - DNA, 423 bp, Mus musculus
  source 1..423: mol_type = other DNA
tcagaaatgttagcctagtacttttctacaaatgtgggggcttttaagttttaaaattcttacagtaaatgcacaccgcattctgtttttgaagagttcataatctgaagttgaagatatgcaaacaactcttgtcacagtgtcacctgccagtgtggcatctggtcactgccactcactgtcccaggcactgtacagttcatggagaccctcctctctgcatgcagatgagtgtgcagaccttgaaattcaaatccagggcttttgggcaacagacacctctgatttttatgtcataaatatgtccccttcattcaaagaaacaattccagacatattagttactataaattattttgttttccttttttaagggaagattccttcttctccatctgctgttagaatgcagttagcagttaa

SEQ ID NO: 34766 - DNA, 281 bp, Mus musculus
  source 1..281: mol_type = other DNA
ctgaaaaatgaaattttctcatctgggctgacaataatattcctaaattgtctgaaagacccccaaacattaactcccagaggtggaaagaaatttccaattgctggaaactctcctccctgaagagtagcttccaagggagagaagcaaacatcagttctacttacctatgatataagcctaagggtgcaatagaggctcgaagtatcagtctttgcacctacagacaagtgagtcctcattccaatatcaaagagacttctcttgggaatggattatga

SEQ ID NO: 34767 - DNA, 477 bp, Mus musculus
  source 1..477: mol_type = other DNA
tagttaataaaaggcatagatgtcatattctagttaagttgttaatacattaaattgccatttaatacctaaagaagcacgcctgtttttcaataacttacctctatagttgctaagcataaaatcgttaggagtttaaaggctaacaggatttccaagtttatgacgctaaaacggttttaatctctgatgaccagtaaataatatagcttagtgtacattagtaaattggcgattttcagaaatcattgcgattatttagctatttaatgtttgtgaacgtatttaaaaatggtttctaaatcttagttggaaagtcatgaaactagaaaaatataaattgtaattgaagtttttctgacctgtcactcttctgggttccaggaaaatttccctcggagactcccaggccatgctggggatcttgcgcctgcggggaagggcggagccacgccgccgagccacgcccagtcctgg

SEQ ID NO: 34768 - DNA, 425 bp, Mus musculus
  source 1..425: mol_type = other DNA
agcattaattgaataagcaaatgaactgttatctaagtgacagattttaatcaagtagattacataaatgatgcttcatttgcatttgctggtttagagagggaaaaaaaggctaaattctttcagaattactaattttttaaaaccatgaaggaatgttacttcagtgtacgcagtattagcaagaagtcataaattacaatgtaatttaatgcagtaattattttaaactctaaagagtctcatctttctagtaaatggacattatttgtaaatagaatagatgaagttcttctgacttcagtagtggatttacttttgatgtgattcttggcaccagaaaaattaatctatctttattccgagcctggtaaactatgctgggatcctgcaccaagctcaaggttctctgacatcagggccag

SEQ ID NO: 34769 - DNA, 437 bp, Mus musculus
  source 1..437: mol_type = other DNA
ttgtgactagcaaccatctgaagtctttctcagcattgaatatgtgaaaatctctcagatggtgaacggtccccccagggagacctttgatccagaagtgtgctccatatgtcccaactgtaggagcctcctgcgttcacagatgccctgctgggatcaggccttggcaggctctctctttccacagagacacaacacaagccgtttatcacgcgtagcgaaatgttagagaatatcactagtcactccagggatcagggagaatttatcaggctggccggaaagttactttctcattcttaaaataatctcagtggtgctcatatgatgagaaccatcgattgcgtctgaccagctgccagcctatagccagcaagcctgccccggaagctctgtctgctggagatggggttggcagtccaggactcatgaccttt

SEQ ID NO: 34770 - DNA, 220 bp, Mus musculus
  source 1..220: mol_type = other DNA
agactctgtctcaattaaaacaaataaaatagaggcagaaaaactttatctaactttggtcaggtagagatcttctctttttaaatagagaacgagcttttcccctttcctcctctgccgggaatgtggagtccctggctcagcgcaagtccggagtttcccgtttccgggtctcaccatgcgcccccagtgcccgctgcggcggcgcactgtcgccggt

SEQ ID NO: 34771 - DNA, 261 bp, Mus musculus
  source 1..261: mol_type = other DNA
gacctaggactccaagctcacatgtagcagatgtgcagcttgaccttcacgtgccggagggcacccaaagggggtgcccagccacatggaaaaaataaaagaatcttaagtttttttccaaagcatttaaaccatccgttcactttgcaaaaattgtggccactgctatttttagaagatagcaataatgtctaacattcagtggaatgtaggggacacacagagatacagcctttgtctgactgacactgtggaagaaac

SEQ ID NO: 34772 - DNA, 356 bp, Mus musculus
  source 1..356: mol_type = other DNA
ccagacacagtgacagcttctctttgagacgcctggggttgaaaaaaactctagctgttcttttatgagctcactccaataaacagcaaatttatttctgtcaatgaacggggtagcaggtaccttcatcacttctctctaaatttaaaaaaccatattaaatagtatgccataatccacagaagtaagtgcttgcttaaagaagggcacaggacaggtcctgcagcaggcctgcctgggccttggcccagcggtgcttctgcagcggggtcagacttggatctctgcgcgcctgcgcagagctggctgccggctgcagctaagcaaaagtgggcacggtcccaggccggagaggg

SEQ ID NO: 34773 - DNA, 551 bp, Mus musculus
  source 1..551: mol_type = other DNA
gggtgggccctacaatgttgtcattggtaggaggcagagtcagctttcttgttctcatgccctcgggctagctcaccctcacccaggactcgagaggcagctccactgtgctgtgcagtcaagctacagggcccactcttccaagtgtgcagccgagaggctgagaaagctctcccaatctcacaccctcagggccagctccactggatctgcccggagaggttcagggcctgctctctcatgaccttagtgacagctctctcaactctcacaggtggtgaggggtgaggcaagggaggtcatcaccccgtacccacgccactagtcacggggccagctcgcctgcactcgtgcccacggccgactcacctgtgcactgtgctgcccaggcaagatatggggcccactttcccaagtgctgcaggtagcaaggtgcagggccgactgttcacttctgttggaatcctaaagtttagaagattggggcttgagctcaaaacgtgtcttcccagcacatgcgcatagcgttgaggtcattaactatacactgg

SEQ ID NO: 34774 - DNA, 319 bp, Mus musculus
  source 1..319: mol_type = other DNA
gataattataatcttaaaaagtttaaagctcttctcaaagaatgtcagcactttgagggcagccattctctgaacagggcctgccacttcctgtgctgacgtgattcacagcagagcaatgtgtgtgtgtgtgtgtgtgcgcgcgcgcgcgcgcgcgctctcgagcaccagcgaaagaagtgacagaagtctgacttgggttttctcaggtcatagaacagagtccatccatccctctagcttgccaaagaggggtgagggactggcgggagtcctcggcgggaagcccccctcctgccgccagacaaagggcggtgtt

SEQ ID NO: 34775 - DNA, 229 bp, Mus musculus
  source 1..229: mol_type = other DNA
tgggtatacagactcaacacccagaagaatttttcttgagtcacctagcagatgtcctattctatttcattgatgacaatcactgggcctggcctaccaagagctagctcccaggctctccgcacgacctggctgctgggtcttgaggcggccaggcagcgctccatcctctccgccggtgcgggtgtcggcgcacgcatgcgcatgcgtggcgcgctcgcaccccacc

SEQ ID NO: 34776 - DNA, 536 bp, Mus musculus
  source 1..536: mol_type = other DNA
acttccctaacattggaaatttcttaaaggttgtgcattaatacaggtttcgttttttttaataagagagtagcaactcataaatttctagactgtaatatagtgagtgcctcggtaaatattttaaacaggagcaacagatgatatttttcaggcgctcccacccgggagaaggagcgacccccggtgacctccccgtgcctcgcgaagtcggccgccttccctctgcgagcccgccgggtccacgggcgcctcggcctcagacgccctctcgccgccccgaggcagagctcggcctcggtgccaccgcgaaatgggcccggcgccgcgcagactcctgcgcgcgcccaagggcccggcctcgttctgggctgccgtcgtccccgccgtccgcgccgcgcggcgctgcactgggggcggggagtctgatgggagacgcgcgcggcgccgaggaggaggcggctgcagcccggggaggcgggggccagggggaggggctgccgccgccgcccgcccctttccgctggggagcagct

SEQ ID NO: 34777 - DNA, 496 bp, Mus musculus
  source 1..496: mol_type = other DNA
taataagcattcctaatatcttttaaaatatcacctcttagtactccaataggcgtgcgtgcatgtgcgtttgcatgtgtttaaagacaagagctcactcatgtcagacaatagaaatttttgatacagccacattccatcacaactttttgaaaaattctgttttaagacaagcatggcgatgcacacttgttatctggtaaattatttcatttttttctatacgccgttagtaattttcgtagaaagaacgtaaaattacaataatttctttagtgctttttaattttcaaaaattcctatcaaaatcctgccaataaatggctctgctaaaagcaaagatgctggccaggcccagaagcatctatatatcgcatcttctagacctggatgtcaagtaggtccccattctgtccccaatagcagaatgtagagaggagaaaaagaatcgttatccaccccctcagggcactgccgcagcgtacgccgctgcgcg

SEQ ID NO: 34778 - DNA, 399 bp, Mus musculus
  source 1..399: mol_type = other DNA
acaacatgatctgttgacatgtcaaataaaaatgtgccaaatttaccttttttttcttaaaaatagcttaaaccacctggtcatttttcaggttgtagtctagccaaaataacttctaatatttacagacttgctgagtccttaaaatttttttttccctctgggaaaattcaagtttcatggggatatggataaaacattaccgttttattatctttcatatcttcactaagtaataaatgagttacacatcccccgttgccccttgggtcagctggcactgactgcaggagaaccagggccagggccccgcccctcgttccggctccggccccgcccccgttccggaccccgcccccctaggctccagggcgcacgcgcagggctgaagctggcgcg

SEQ ID NO: 34779 - DNA, 322 bp, Mus musculus
  source 1..322: mol_type = other DNA
aactaggcctccttcttaaatccgcctttctttagaggtgggaggtcccaaggctggtgactggcgatgtgcgcccctcctgggccggccctcaaggttccgcgctcgctgagccgcagccactgagccgggactccacgtagccgttccccggctacgggttgcgcaactcgcgccgctgggcggagcctggcggagccactgcaggaccgcggagcggaccaggcctccgcgagcgcctctgcttgcgaagtgcgcctgcgcacgccggtgccgcgccgcacgacgcctgcgcactgcgtcgccgcaccctgcgcctgca

SEQ ID NO: 34780 - DNA, 269 bp, Mus musculus
  source 1..269: mol_type = other DNA
cttcagttctttgcaaagattggcctctagatggatacatttgaggctctggccagggaggccgggcgcctcctggacgcgagagcgcacgcctgggacccggcggtcgcgctggctctgtgttgttcagagtgacaaagacaatgtcccagctccttctggggttcagcgcgggaggggggcgggcaacagacgcagcttcagcatctcctccagcttctccctctctccctctggttgctcattattcagagagagacatagatctc

SEQ ID NO: 34781 - DNA, 505 bp, Mus musculus
  source 1..505: mol_type = other DNA
ctaagttgatgggagcgagttgtcctcatcttcaaaatgaagaggatccctggtgaaaggtatctccaggccccactggcacccgcgccaggccaggccctgcgccgacacggcccggcgtctgcgtgcgtatgcgataatcgcgctctcgagtgcgcagacgacaggacaagcgcgtacgcgagcaggggtaggggcgcgccgcctcttcccccccacacgtcccccgccagggttcccgtggcaggactttcgagcccagggaaccgaccgtggccgcccagaggaccccgagtagcgcggccacgggagccacgccgtactcccagcgccggagccgccgtcgccgccaccgccgccggcgtcagcacggctccagcccgccagctgcctggctggcgtcacggcctggccccgccccgcccgcgcccctccctccaacgcgcagggggcggggcctggcggcggagccccgcgcgccgccacagggaggaggcggggagca

SEQ ID NO: 34782 - DNA, 262 bp, Mus musculus
  source 1..262: mol_type = other DNA
tccacatgtctatgagcaattgtgaaattattgatttgagaacaaacaggtgtgttactatcatcagtggtgatgggaaactagaataagcaggaacctgattagctcaagcttctagactgagttcttgaactgaccacgtcaggaactgttactctttggcaaagagaggatcttggcagagtcacccacccctgctttgtctggggcaggagagggtgcctgaagcttcatgcccgctggggacaattgagttctctgc

SEQ ID NO: 34783 - DNA, 263 bp, Mus musculus
  source 1..263: mol_type = other DNA
gctccggtgttcaacatgtgttgcacacacgtattgacgtgttggatgaacttcagttaaagaactgtcaccttcctttcaggaagtggcaggtcctctgagctttatgactaaatgaacttgagttaaagttatcactcttaaaaaaacggtttgctctgaacctttttaaggctctgcccaaaaaataacaccagaagtacctagtgctctacttgattttgtataaccgaggcccggtgtgtttgggttcacaacaagtg

SEQ ID NO: 34784 - DNA, 265 bp, Mus musculus
  source 1..265: mol_type = other DNA
aaaaaaactcagatagtgtcaacctgttctaatttccttataagagcccacagcctgatgggacctgttgttctctcagagacaaccagcacaggctggagctggctgtgtcctgctagcccctgcacggggcttagtccctcagggaggctagcctacgccacgtcagcctggccaaatactatttttttgttgttgttcaacaaatatgtacaattattgaaagatagaatctctaatgtacccaactctagtctccaatcag

SEQ ID NO: 34785 - DNA, 394 bp, Mus musculus
  source 1..394: mol_type = other DNA
ttaggatgcttatcctaaatattatatgtacgtccagtggacaatatgcacagtttcttcttaacactagatactcccacgaaggaaagcgcctatttgcgtggcagtgcctgcacccgtgcggcctacctctggtggcgccagcttggcttcggggcagcggagctcttccatcccccggcgcgtgggagccggttggtgtcgtgcgcacgcgcgcgactccccggctggcgggtgatcctgggccaaagcccaagacagcaaggtcctgcctctgccgggtgagggctccccgatcccctggaccctctgagcaccctcgagctcctgaggaggcgcgtctggccacacccacccggtgacgtcactcagcgcgcctcgcgggtgacgccac

SEQ ID NO: 34786 - DNA, 355 bp, Mus musculus
  source 1..355: mol_type = other DNA
aacattaaactcacattaaaatcaatcctgatattatcataagctgaaacctgctgatctcttatcaaataatagctacaaactaaaatttgtctttacatcgagatatttgctggttatatatcatggttctcagcaaacgaacgacaagctggtagaggttttatctaccctcatccctcgcccaagacggccccgtccacgcccggcccgccggcgcgcgcaggcagaagcgcgtgcgaccaggccgcacacagcggctcggactgggtacgacgccctcgaggcggctccgagccctcacggcggaaaggcggcgcggacgtggcgtcacccgcgaggcgcgctgagtgac

SEQ ID NO: 34787 - DNA, 396 bp, Mus musculus
  source 1..396: mol_type = other DNA
agtcattgtaatgaacatgtcaaaaggatgtcctgtgggacacactgggacacactacagcttccacagcaactctgttgtaggggcagttgagcttaaaaagaattttcgaggccagcctggtctacagagaattttcatactggaggattatgttcaagtagaaatatgattctttgtggatgaagattaatcaacaaacaattacaaagattgtagttgattctctgtaagtgctcagtgacagcagttttataaatatgtcatcagtatatggtcaaatgaaaaatcatgaagttgatttcatataatatttgaaattttgaaccttattttaattttaagttcctgttattggcatgcatcctggatccccagcatagcatgctatgcaat

SEQ ID NO: 34788 - DNA, 471 bp, Mus musculus
  source 1..471: mol_type = other DNA
tcttagccttaagtgacttcagtcagacacattcaaggagcagttaacatgctgctagttcttggctaatattagaaacaatgttacaagtttttaaaaggtattatttagccagacccaaacttttgtttttgattctcttgaaggtgaattctaaaggtaactgcaagatacactgttcttgctgagtatcaagatatgtgaatatattatcaaatgtttcaactctgtaagagatgtctttcctcggaagccattgaaagagaaatatttacgaaatcagaattgacttttgaggcaaaaagaggccacataaacttgtggaggctctcgggggcgccgcccagggcggagctggtggggcgtgccaccctatggcctcgaaggcggggcccgcgcggtggtacaggcctgggggcggggatacgggcccagggtcgcctcggtgcggcgaggcggcgggcaacccgg

SEQ ID NO: 34789 - DNA, 318 bp, Mus musculus
  source 1..318: mol_type = other DNA
gaagctcggtatatatacaccgttttaatatcgttctacccgtgttgaattaaatgggacaatcacacagtagatactatcaaagggctcctaacaggatcccctgtttttctacaaaacaagactagtagcagtcatatacataagagaacactttaaaacgtgtttaagagtgtgtattattgacctgaggggctgttgttacatacacacgattaaaaataagtatttattaaataaatcagttaaactaagtctgtgcatcagtgtttttatgttacctggtccctgtgggaccattgggcccaagggcggagg

SEQ ID NO: 34790 - DNA, 393 bp, Mus musculus
  source 1..393: mol_type = other DNA
taatatgcactacatcctgggaattagtgatcactggtcattattgataacccaggcagtctgacttttccttactttatgcatttttttaaaaaaaagaaccagaagaaagagatagtgtcactatttcttgcagaagacaacgtcatttaaagacaaacctgggatctgtgtatataattgagcccttctggggaaattgggtaaaccatttgcctagtttgaaacagcacttgtggcttttgccaaggtcttaagttacactttccacactgtctctgatatctgcttgactacgtagataggaaatttatgagtctagtaagttttttctccggacgaaaagttgcaggagcgttgtagatcagcgaggcagggaggcggcgggtgcgg

SEQ ID NO: 34791 - DNA, 413 bp, Mus musculus
  source 1..413: mol_type = other DNA
cactatcaattgatgtaataaaaaaaattaagatcttctgagaaaaaagaaacaagcttgtctctgctactccctgacagtctgtgactggttgcaaaaagctggcatgccctacaggctaccaggaaagtcaagttcctgagtttctgtcccacagttagaaggaacagaaagattattcatttcattgctaagtaaaaagcacataaggatgcagagaatcttttaggatgctaaaaacagtccttaaattgatcatatagatgatataaagatagaagatacataagtaaaatgcatgtataaatgggtgtgctttcatacatgttatacttcacatatttatcacagaagcatgtctatagggatttctagtgaaaaaaaaaatggcatcaccagtgatgtcagagtag

SEQ ID NO: 34792 - DNA, 242 bp, Mus musculus
  source 1..242: mol_type = other DNA
gtctctcctacaagaggcacctgaggcggaagaggccggctggaacgcccgccactaggggccctataggcgcctggtgtcctaggaccagcaaaggagccctgcgagccgctggagtcggtggtctgcggaggccagtggcagcgtcccacgagtttgccccgggcccgcccctgtcccgggtcccccgccccgcgcgcgggcccgtcgcggccacagccgggccggcgggagccgcccgc

SEQ ID NO: 34793 - DNA, 381 bp, Mus musculus
  source 1..381: mol_type = other DNA
ggggggtgtctcccctagcttgctccactcactgatcattgcagtgggtgagggaccaagaatatcttcctggcgcagaacttgccgcagcgccgctggagtttctctggtacctcccgcagataccggtttcacagtctcagacaagcccagaggccagaagcctcctgcaacttctaggtggcgacagctgccaccttgccgttcttccggagctccgcccggcgccgccgtgggtcccaggggagtcgcgggcgcacctggagcctcaggcgcccgggggactagggtgcgaggtggccgcctccccggtcgtacagctggtggcacgctccctttaggatccccttaagaggcataacgttatccgacggcttggct

SEQ ID NO: 34794 - DNA, 890 bp, Mus musculus
  source 1..890: mol_type = other DNA
gttaaagctccagccagttgagattttaacattaagtggcagggaccttctaggtcgcctactccacttctgcagaaggagaaactgagtattgccctaggggtaagacttccctggaaggagacagtcttattttcttcatctggtcaagcaggaggaactcttggacttctagggggtcctgcgcgcccggaaacacgtgtgtgctcacctacgtgtacgcacgtgagcgcacctacagcagcagggggcgctcgggccggcagggggcagcacaagcccggcgcagccccgggggaggagggcgtgctgcagtgccggcggcggcggctggaggtgcagccctcccaggtgggaggcgggggctgcgggcgcaggaaaaggcgccccgggagcgggcgctcggcgggggcctcctcgggccgggcgcggcgcgagtgggagcgagcgcgccgggagcacgcaggcgctttgctccggctggccctcggccggcgcgcggcgcgggagcagcccgcagccgggtccccccgcggcgctcttcgcggggcagcggccacgcagcagccggcaccgaccgaccgccccaagcgcgcggcagcgacagcggcgacagcagcgggacggtcccccgggccgcctgtgcgcgttctctcccgcgcggctactctcggcgggcgctggcccggccgacgcgtcccgcgggcggccggagcgcggcggcggcctcggctggggcgggagcgagccccgggccgcagcccgcgggaggcggcgcggcgcggcgggcactgacggcggcgccgggcgctcccgggcggcggcgcggcggcagcgcagggggcggaggcagggggcgcccccggccaggatgctgcggttcctgcgcc

SEQ ID NO: 34795 - DNA, 584 bp, Mus musculus
  source 1..584: mol_type = other DNA
atacatagctatatgggaaaggactaggtcatcagagggcctgacctgaagcttgtgggcttccctcatattacaggggccttctctttttttcagataagaaaactggggctcagaagttgtccaggaagacacccagggcttcaaactctgagctgtttctgttggtgtgtcaccagaagggtgacctatctggtgatacgcccctgcccttgagggtactactatctaacatctggagccagacagccaaaggccccttctgctggcatctttgctcagagcagaggcgccgcctggtcttgtctagacccagagcgtagcgcgcgcggccaccaaggcgcaccagctgtgcgcgccccaggtgccccactcgcgagcgacggcggcagccacgggtcccccacaccccaggggcggagcgaggcgcggagacgtcagggcggggacctagtgctgcggagcgcgctctcccggaggctcccggcggcccacgttcccggctggcgcggccggtggtggcggtggcggttcgcggcggcgctggggcgcagccaggcggccgcgccggtggagacggaggc

SEQ ID NO: 34796 - DNA, 420 bp, Mus musculus
  source 1..420: mol_type = other DNA
ttgacaccaaacttatgtgagtgcactgtcactcccctcagacacaccgttgggtcccaatgggccacctctccagtccagagatggagttttgagtattcattgcatatacatacactgtctgggctcagattaaatcatgtttagctttaggtggcacatatctttaacttcaacctgactgattcgaaaccattacccagtgagatcttgtgtaaaagaataaaaaaggcagtcatttgtttagaatccttgaggtttttacagactcaggccctggagcctgaccaaggccgctgcattgcctcaggcaggaaagcaactgccctcccatcctgggccgactagggaggggccaggctcctctgaaggggactagagggagggcccgcggtgacatcacagtctccagtcccgaga

SEQ ID NO: 34797 - DNA, 360 bp, Mus musculus
  source 1..360: mol_type = other DNA
agtaggtttattgccaatttaattagttaaattaagatgaggttatcaggctaagcactaatccagtgactggtgtccttataaaaggggaaaatttcaattccttcataatgacaggatcggactctgatcacacgtgatcttggatttatagtctctgaaacaaatagaacaatgtctgatgtttaaaccacccagtttgcaagagtggccagtggtaagagtgtctgccattgcaaaataaacacccgcgggaagccagggctaccctggactctgtctctatggcagagccccagcttttgaagttgattaagccagcaggttttgatgacctgctaagtcaagttcaaaatctgt

SEQ ID NO: 34798 - DNA, 310 bp, Mus musculus
  source 1..310: mol_type = other DNA
attgctaataaagactttttaaagaattttttaaagatttatttatttactttatgtatgctggcccaaagatttatttattattataaataagtacactgtagttgacttcatgtgagccaccatttttttttttttttacagattttaagagctgtaaacacaaagatatgcccctaacaggagagtttgtgtcatgatacgcatttacagaaatccttaattagaggattaaggtgttaatacttccctagatcaaattagctttgagccacttaatcacctggtcacgaaggttctccaatgatgt

SEQ ID NO: 34799 - DNA, 418 bp, Mus musculus
  source 1..418: mol_type = other DNA
aggaccttaaaagccatagtaaggaaatcttaacaaagccttgtctaacagcctgtgtccaagttttagagtcctagacctgtgtttgaacctggacttgactatgctctggggcaaattctggggcaatgtcagtcacattgagtaggtctcattctttggctggagcatcctagctttggccacgatcttcatgtctcctctctgattagctatcatctcttggtggagagacagttatacaaagctagcatctttttagctggcacataatgagcagctctcatggtgcggaacgaggcctgatcatctctttccattggaagaaaaaagaaaaggctgtggtttttctgtttgtttttccaaacagacataaactaattaatatgagcaaatagcctgtgattgtttcgaataa

SEQ ID NO: 34800 - DNA, 508 bp, Mus musculus
  source 1..508: mol_type = other DNA
tcattgtagcttaattagcgctcgcgatgactataattagaataattcattgacagttttcaagcccttaaatccttggggcacagaacagggctctaaacggctctgtgcctctcccagtatcacctgcagcatggccgccctagtctaaggatacacctctgcctgggcagtcctagggactgtccccagcccctgatctagcagctggaagttggctcttaggggtagctgccgcgcggcgtctggagcctggaaaaacccgaagctgctccaggagcctgtgctagctccgccccttataaactaaggtgaggccagcgctaggacagtccccaggctgcactagtagccgaccccctggaaaaccgccccacctcttgggggcgtggtctaggcgcggcctgcccaggcgccttggcggacgcgggaggcgggaagcgcgtccccgccgcgcgtgcccgtccgccccgccctgctgcgctccgccctatttctataaagagaa

SEQ ID NO: 34801 - DNA, 381 bp, Mus musculus
  source 1..381: mol_type = other DNA
cctggccttggctaaagtcaagtttgcctttgaaagcaagacaaacttctgtttagttgtaattttgtgtgtgtgtatacatatatatatgtatatatacatacacacatatatacatatatatatatacatatgtgatacacataaacatgtgtaatcatacatattcgtttcacgtatgaatatcaagttgatggtgacatcacttttacctgctatgtgatgcgcacgggtgggccccacccacttcaacgatctgaacaggttctcaaagcagttttcaaagcatgctttcgtgtcatggaatctccaagagtctttagagaaggagggaagcgactctgacttcactgcccccttccttcaaacattttataggct

SEQ ID NO: 34802 - DNA, 441 bp, Mus musculus
  source 1..441: mol_type = other DNA
tttgcaattgcaaagccaactattgcttttctatagtttagaaactcggaggaggccatacaccaagtgcagggcgtccaccaaagctctgcaagaggcctggcgctggggccccgacctgcagcagcgcgggaagttcagtgccgcggagaggtaaggaggctggcacccgtgcctcttctgctgcctcccgggaagttggaactgggcggcagaaagcacagtgctgccctccgtagggcgtgaactgcggagctggacctagcaggtaaagacacggcggccgggtgtcccttggcgcggcgcgggtggcgaccgccccgcctcccatcggcgcgatcggctcgcttgtagccgtgcgcgtgagcgcctgagtgcgcgcgcccgcgggcccggagtgggtgggtgtgcgcgcgtgtgtgaggccgcctgcaggaggcg

SEQ ID NO: 34803 - DNA, 571 bp, Mus musculus
  source 1..571: mol_type = other DNA
ttcttatagtaaccatataacagctcgctcgggaggctaacgttaggggagcatcccccagggtgagccctcggtgcaggtccctctgggctcttcggggctgctcggaggcccggcctgagtcagcgcggcggccgagaagttgggcgcgaggcgcagggcggggcttcctcctcttcctcctcctggcgcgtgttcctccagctccgaccaggcggacgtgacacgccacagcccggggcggggaagctctccgcggcagccaggacagcccggctccgctcggccgcacgcaggctcctccggagcggccgcgcgtctcctcgggcccggcccgtcctccacctcgctgggtcgccgcagcatcccgggctatggagaccggctccgactcaggtcagaggccgcgtgcttgcgtgcggctgagggaatgaggctcaggtccaggggttggcccgccgcgtctgcgtctcccgctccgcgccggggaagcttggcggcggcaggtgggcaggacgcggcgcgagcgaggcagcgagggcgggcgagcgggcgcgcgaggggccggagc

SEQ ID NO: 34804 - DNA, 838 bp, Mus musculus
  source 1..838: mol_type = other DNA
gctaacgttaggggagcatcccccagggtgagccctcggtgcaggtccctctgggctcttcggggctgctcggaggcccggcctgagtcagcgcggcggccgagaagttgggcgcgaggcgcagggcggggcttcctcctcttcctcctcctggcgcgtgttcctccagctccgaccaggcggacgtgacacgccacagcccggggcggggaagctctccgcggcagccaggacagcccggctccgctcggccgcacgcaggctcctccggagcggccgcgcgtctcctcgggcccggcccgtcctccacctcgctgggtcgccgcagcatcccgggctatggagaccggctccgactcaggtcagaggccgcgtgcttgcgtgcggctgagggaatgaggctcaggtccaggggttggcccgccgcgtctgcgtctcccgctccgcgccggggaagcttggcggcggcaggtgggcaggacgcggcgcgagcgaggcagcgagggcgggcgagcgggcgcgcgaggggccggagccggcgtgaggctagcaagccgggcgccgagccgaagagccgccgcgcggtcactcggccgcacgggcggcagcggctcctccgaggcgcgaggctgagagggagctcccgagtcgcgagctcgcgaggcgcggcgagagcgacgctcgcagcgcagaggacgcaggcagcgggcgggcctcgagggcgcagcgcggcccgcgtgagagacccgaggcggctccgggcccctgcggcacggcgcggcgcggcgcggcaccgcacggcacggcacggcgacggccgcgagcccccctcgccggc

SEQ ID NO: 34805 - DNA, 340 bp, Mus musculus
  source 1..340: mol_type = other DNA
ccagtactactatcatctctgggatactgggatgcccatgcctatgggcatgccttcccgggcagagcatccacagctcatgcctgcctcaggctcctgacgccttgacttcccttatcacagtaaaagagcaagtaactaagatactagaagccttatggtttacattaaaggcatccctatagatctaaaaacctaagtgtgttctaggcctctaagcctctggcgcagcaataatttagcagctgagccttttctgtcaacaggccagataatagcctaaatccaggctttgcgcaggcgcagtgggtcccgaagtcttgcgcgcgcagctgctgcg

SEQ ID NO: 34806 - DNA, 407 bp, Mus musculus
  source 1..407: mol_type = other DNA
cagactctcaggatctaattattgtctgtgtgtgtgtgtgtgtgagagagagagagagagatcactgtgtgcagaactaggtcttgaagcatcaacaaattctacatttaataatttttctcttatttttatgataatgacaaagataatgtaactttctttgtaaatgtaaaattaatacaggaagtaacatggttaaggcattattagggccctagggttcttatagtaaccatataacagctcgctcgggaggctaacgttaggggagcatcccccagggtgagccctcggtgcaggtccctctgggctcttcggggctgctcggaggcccggcctgagtcagcgcggcggccgagaagttgggcgcgaggcgcagggcggggcttcctcctcttcctcctcct

SEQ ID NO: 34807 - DNA, 198 bp, Mus musculus
  source 1..198: mol_type = other DNA
tggggggggggggggttctgagcccatcacctcaagcatgagcaacggtcctcaggaagcctccctaacgtttcctttacagaagggcggtctttaggatcgaaagcaagttttacgaaatatatttttagcagcagcagctggcttactaatgcttttctttgcttctgatgcaaacataaattgtgaacttaagca

SEQ ID NO: 34808 - DNA, 369 bp, Mus musculus
  source 1..369: mol_type = other DNA
taaaaaggagaaaataaatttggcacccttttcattcctttattctaatttcagataatgtgtaactagcttgatgttgctgcttgcaggtatttggtcacagcaacaaataaattacacatttaaaaactgtggtttatctgaaatttaaactttttgattgtcacaattagggataatttttacatcctccgggcaaataattgtttgctctaaaatataaatgtctttcacctggatgtgccgcactaggcggctaggagcgcttcgcccgaggctaaggcgtccttctctcctagcaacgcgcggggacggaagtggctgcggcgccacgccccctgcgcctgcgcacaggcgcggcctgctgac

SEQ ID NO: 34809 - DNA, 337 bp, Mus musculus
  source 1..337: mol_type = other DNA
gtagggccacacttaaacgttggtccacttggaatctgggctttgaccctaaagtccactagaggacgtcgggaagacttccttcagtcagcctctgtataggaaggtttcccaggacacagtggtcagtgcaaggcctgctagctccccaggtgacaggcctgcctctgactgggaactgactctagagccacaaaggctgcagactaggggtagtatgataccaacctcattgagggatcttccaagacgtggcatgccaggcctcagtccctcgggggcagccacacaagccccactgggggctgtgggtctcatcaattctagtcagatgtga

SEQ ID NO: 34810 - DNA, 279 bp, Mus musculus
  source 1..279: mol_type = other DNA
ccaagtcttggatatcatgtttttttttaaagtatatatacatatttattttgcagaagggcatgagaagtagagataaaggttgttttaaaaatgtcttgaacagtggaaagcaggcttctttctttgttggacagaaataatcttcaagaaaacttgttacaagagactaggaagtttattttaacggagttcagccatgggtgtatttgcctgccttaagggcaagtggggagtgccccctgcacttgggcgggccccactcagaggcagagagaa

SEQ ID NO: 34811 - DNA, 646 bp, Mus musculus
  source 1..646: mol_type = other DNA
ttctcctgcttcagtcccagaagtaactgggctacattgcataattaaacgttttagtaatagcaacatttaacagctttttaaaaatggagtaacgtaatttaacccagtcatcccagcaaataatacaagatttatgaatgagatggtttgtcagcggtgtactggcaacacttaacagcccttagcaattctgagtttggggagggaccgcgggcgcgggcggcggcagcggttggtagctgccgggcggcgagcacgcgggggcagctccacccgtgggcgcgcgggccggcaccgaggcgcgagggcgccgccccgggggcgggggcacgggcaccgggctccagagggcggggcagggcggaccgcatcgtgccgggattcggacgccggcagcgcggcgagcgaaagggacgacggcgacggcggcggcggcggcggcggcggcggcggcggcagcggcagcccaagggtctggaccacgggagcccgagcgcgcggcaacggccgcctagagcgcgcagcgcggtcagcctgcgctcgcagcacaccagcgcgcgcacgctaaggggtgcgcggtgccgagcgcgcgccgagtggccgggggcgcgcaggccctgcccgccccttccgtcctcacgcc

SEQ ID NO: 34812 - DNA, 541 bp, Mus musculus
  source 1..541: mol_type = other DNA
gaaactattcctaatttttaaaaattattattctttaattttttttttttactccctggggcctcaaggctctcaagggttaggcgcgtccactgaggtcagaccaggcagtgctctgctatacctggagagagatctcgcctccccaattcaaccgggacgcccgtggttggattgggcttttttaaagtaattaaaccaatgctttaaagtctttgggctttgaagtttagcaagctcatccatattgcctttatgcactacatatagttattacatagtaagtgtaaaaaaactaaaaaacctcaagttttaacgtaatggtctcagttttgtaaaaccaatgtgagaccaacgagcaggatatccttgaaggtttgactagctcttcttcgcagcgcaggcgccacctaggtttgttccgaggcaccggcgaccggggccgggcagctcgcgaccccagcgcggggacagcggggcgggcgcggcggctaccccgccccggggcggcaccccgctcggcggtcgttcctcccagccg

SEQ ID NO: 34813 - DNA, 626 bp, Mus musculus
  source 1..626: mol_type = other DNA
agaagtagatgtgctttgaaagagggggaacgtgtgttctcactagttatacacattatatgtactaaatagctgttttacgttttacgtgtaagggttttggtgcaaacaaaacattttctggctgtgaaaatactggcattgtaatggccattaaatagctatgcaatgaaagtttcttttagtatttgattttaaaacacacctatccgtccagtgcaggtctcggaggtcagggtctggcggacgctctcaggtccggaaagaccactgtccacccctgccccgtggacgtcgcgcgggtcccctgccgtgctgccagcagtgtcgcccgccactggggtccccaggcttttctagccagcaccgttcagggccctaagcctgagtcccgggagccggaaggcccgcgggcttgtaggagggcgaacaaggcgcgcgttcccgcgaacgcaggcgcgacgctgggcggggggcgcgcacgcgcgcggaggcatgggcgagggcgccctggagtccagccgagccccgggagggcgtcgacgccgagggggcggggccaggcgaggcgggaacgcgctcgcgggccgggagggcgggggcgcggcgctggcgagagcgtgccc

SEQ ID NO: 34814 - DNA, 381 bp, Mus musculus
  source 1..381: mol_type = other DNA
taagagatattgcctttccccaccccccgcgggggtgggggtatcgtcaggcactggctgctcttccaaaagatccagcaattaggagagtatatacctacctgtcttaagttgttttctgaactaagctttagataacaacctcgttaagaacgaaactgaatcccagactcgacctcattccggcattcattccaggactgaggatggagacctttgcaaagatctcttccagaaactcctgtctccagacactggaggtcaggctaaatttagattcagtggcagcgaaaagcaaaaagcatttttcagatgtctacgagcgcccctcaatccgccatctggctggctgggagccgtcgatgcgccgaccgagaaact

SEQ ID NO: 34815 - DNA, 442 bp, Mus musculus
  source 1..442: mol_type = other DNA
cctttccccaccccccgcgggggtgggggtatcgtgcactggctgctcttccaaaagatccagcaattaggagagtatatacctacctgtcttaagttgttttctgaactaagctttagataacaacctcgttaagaacgaaactgaatcccagactcgacctcattccggcattcattccaggactgaggatggagacctttgcaaagatctcttccagaaactcctgtctccagacactggaggtcaggctaaatttagattcagtggcagcgaaaagcaaaaagcatttttcagatgtctacgagcgcccctcaatccgccatctggctggctgggagccgtcgatgcgccgaccgagaaactgtgtactccaaagcgcctgcgcatgggagggccggtccccgagcgggtctcggggcggggcccggggcgcggctaa

SEQ ID NO: 34816 - DNA, 351 bp, Mus musculus
  source 1..351: mol_type = other DNA
tcacagaacaaatacaccttaaaacatatttatgtcttttgcatttctgtagccctggctgtcctagagatccgagatccgtcttttcatttttaaaattcagattatgcacactagtgaaaaccttgtgtataattattgactcagacggtaaacaacaaaaatattctgatggttgttactcaacctccctctgaagctctactgaagtggattaacatcagggttaatcctgacagacagacagacagacagacagacagacagacagacagacagcttcggaagggaaaccctttccggccgaagaaacgcgtccagtcgataggcgggacttccgcttccaggggg

SEQ ID NO: 34817 - DNA, 369 bp, Mus musculus
  source 1..369: mol_type = other DNA
ggctcaactctttggactacgtcagaagggggccactgaagttatgtgaatcccaatgttaaaacctgtcaccattttttaacaggaaaaaaaaatgtcgggcagatgaccctctaacttgaccttcgagactgaagcgccagtgacagaacaactaggacctcacggttcttgcagacctggttggctaagtgtggcttagctgcagaagccagtcggtatggggacttcagtgtagcccccagcgaagctgccagtgggcgcacttcctgccgggaggtgggcggggcgggccgcctcctccttcaagctccgccccaccctgcgtcccgccctccctcccggcgggcagaggctccgcgggggcgg

SEQ ID NO: 34818 - DNA, 262 bp, Mus musculus
  source 1..262: mol_type = other DNA
ctgcatttaaaattgctgtttagtgcggctcaactctttggactacgtcagaagggggccactgaagttatgtgaatcccaatgttaaaacctgtcaccattttttaacaggaaaaaaaaatgtcgggcagatgaccctctaacttgaccttcgagactgaagcgccagtgacagaacaactaggacctcacggttcttgcagacctggttggctaagtgtggcttagctgcagaagccagtcggtatggggacttcagtgt

SEQ ID NO: 34819 - DNA, 197 bp, Mus musculus
  source 1..197: mol_type = other DNA
ctgacttcagtaagctccaccaggtcctgctagagtccactgctctgagaggcctggcctgaaggagccacaaaagcaaactttctatgtatcggaggatgacttgaacttctgaccctcaacgcggagacttctgtcctcagctgtcagggaaagcagctcagccagacccgggccgcagcaggcaagttccttgg

SEQ ID NO: 34820 - DNA, 664 bp, Mus musculus
  source 1..664: mol_type = other DNA
tagttacattagcttttattattattattattattatttacagaaaaaaggaagtcataaaaaccaaatggcaaggcctgcaggttggtggattacaagtgggccaaatttacaagtttcaggtactgatgagatttgtagctctttttactattactactactattattattagtggtcgttttgaccgcggggactgaactccagactgccgggaatcaacttggtgttctggaagagcagccagtgctcttaaccacttttttagccactgctaaaaaagacatattaaagagtttcctaaggtcatgagggtattaaataaattattaaggcgtgtagaatctttaacaccttgcactattgtctgaggtgtcacacaccctgaagtgcgcggaggccagcggacacgcgtggaaagtggcacagaccgtgcgtgggttctgtacctgtcggagcgacgggggccgagctcggccggctccgggctgctcgcgtcgctgacaggagcttggcccgcgccccctcagggcagcgagcgccgcgggtcgagcgccttccgcgggcgtcgctacacacgtcccgccgcctgaggagcgcttccggtgccggctgaagctggggtccgagcccccgccccgcccctctccggccccgccccgcg

SEQ ID NO: 34821 - DNA, 397 bp, Mus musculus
  source 1..397: mol_type = other DNA
gctatacaaagttgaaataaagtatattgagtacttgtaaacagttgatacaacctggtcactgacaacagtttggattgaagccataagcttagccttggaagacttttcttggaagacttttttaaattaagatttactatttttcaaaagaaagtatatggtttcctgttactcctcagcaaaaacaagttttaaaaaatctgactgcaccaggcctgtgcatggtacttaggtacactcatacacatgaaatataaatgaatcttttgcaaaaattgagtaactcaacagtgcatctagttccattttcttgagaatatgttttgagaaatgtaagactactaaatcaatccataggtgatgagattaccaagtttgaaaaggtcaggactct

SEQ ID NO: 34822 - DNA, 502 bp, Mus musculus
  source 1..502: mol_type = other DNA
acatcaaacactagtttatgtttctagttccagtgtaaatgaaatgtctactgatacaaaatatgttccctttgtaactgtatgtctttggaaacatgatttttagcatgatttctacttggacatccatcaccaaatatgactttgaacaacacttgtatttttcattaatgatgagattatagtaaacagttgaaaacctggctactgacaccactttggttctgaggtcagtgtggaagacttttcttgataattttttaaattaagatttactattttatttgcatgtctgggttctcagtaaaaacaagtttcaaagaatctgactccttcttacacatgaaatataaatgaatcttttgcaaaaattgggtaactcaagttcttcctgattccaaaccagatccaaagttgcatctgattccagttggcagagaagcataagattactaaatcaatccataggttatgaaattgccaagtttcaatttttggcctc

SEQ ID NO: 34823 - DNA, 482 bp, Mus musculus
  source 1..482: mol_type = other DNA
tctactgatacaaaatatgttcccattgtaactgtatgtctttggaaacatgatttttggtatgatttctacagcaaatatgactttgaacaatacttttatttttcattaatgatgagatcatgtcttgtcagttgaaactgaaaacagtttggattctcaaaggttgaagcctttttggaggctatcaccttagccttaaaagatttttcctgataattgttgtttaaattatgatttactatttttataaagaaagtatatggtttcctgttactagtttcggcctgtgtatggtactcaggtacacatgcaaaaccaatgctcatacacatgaaatatgaatgaatcttttgcaaaaattgaataactcaacatcttccatactcaaagtaaagattctttccaagccaaatccagatgtgcatctagttccagattgaagttgagaaatgtaagactactaaatcaatccctctaat

SEQ ID NO: 34824 - DNA, 382 bp, Mus musculus
  source 1..382: mol_type = other DNA
tggtacgaagaataaaatagtattcttgaaagtaaacaacctggctactgacaccactttggattcttgaagccttggaagacttttcttgataattttttaaattaagatttactattttatttgcatgtcctgggttctcagtaaaaacaagtttcaaagaatcaggcctggacatggttcaggtacatacacatgaaatataaatgaatcttttgcaaaaattgggtaactcaagttcttccattccaaaccagatcgaaagttgcatctggttccagttggcgaatatgttttgagaaacataagattactaaatcaatccataggttatgaaattgccaagtttgcaaagaacaattcttggcctctaatcaataaa

SEQ ID NO: 34825 - DNA, 506 bp, Mus musculus
  source 1..506: mol_type = other DNA
cttgcaaacactagtttatgtttctagttccagggtaaatgaaatgtcgactgatacaaaatatgttccctttgtaaatgcatgtctttggaaacatgatttttagcatgatttctacttggacatccatcagcaaatatgactttgaacaatacttgtatttttcattaatgatgagattatgtcaacctggctactgacaccactttggattctgaggtcagtgaagcctttcattggaagacttttcttgataattttttaaattaagatttactattttatttgcatgtctgggttctcagtaaaaacaagtttcaaagaatctgactccttcttacacatgaaatataaatgaatcttttgcaaaaattgggtaactcaagttcttccattccaaaccagatccaaagttgcatctggttccagttggcaggaatatgttttgagaaacataagattactaaatcaatccataggttatgaaattgcctatttttcgcctc

SEQ ID NO: 34826 - DNA, 466 bp, Mus musculus
  source 1..466: mol_type = other DNA
gaaacatgatttttagtatgatttctacttggacatccatcagcaaatatgactttgaacaatacttgtatttttcattaatgatgagattatgtcttgtcagttgaagtccaatgttctcaaaagtaaacagttgatgaaacctggctactgacaccactttggattctgaggtcagtgaagcctttcattggaagacttttcttgataattttttaaattaagatttactattttatttgcatgtcctgggttctcagtaaatacaagtttcaaagaatctgtacacatgaaatataaatgaatcttttgcaaaaattgggtaactcaagttcttccccaaaccagatggaaagttgcatctggttccagttggcaggaatatgttttgagaaacataagattactaaatcaatccataggttatgaaattgcctatttttcgcctctaatcaataaatgagaa

SEQ ID NO: 34827 - DNA, 468 bp, Mus musculus
  source 1..468: mol_type = other DNA
gaaacatgatttttagtatgatttctacttggacatccatcagcaaatatgactttgaacaatacttgtatttttcattaatgatgagattatgtcttgtcagttgaagtccaatgttctcaaaagtaaacagttgatgaaacctggctactgacaccactttggattctgaggtcagtgaagcctttcattggaagacttttcttgataattttttaaattaagatttactattttatttgcatgtcctgggttctcagtaaatacaagtttcaaagaatctgtacacatgaaatataaatgaatcttttgcaaaaattgggtaactcaagttcttccattccaaaccagatcgaaagttgcatctggttccagttggcgaatatgttttgagaaacataagattactaaatcaatccataggttatgaaattgcctatttttcgcctctaatcaataaatgagaaa

SEQ ID NO: 34828 - DNA, 498 bp, Mus musculus
  source 1..498: mol_type = other DNA
ataaatctaagttctcacgttgattgactaaatgacattatacggttacatcatctttgtgagtcttaactaatactatggtacgaagaataaaatagtacatatcaaaagtaaacagttgatgaaacctggctactgacaccactttggattctgaagccttggaagacttttcttgataattttttaaattaagatttactattttatttgcatgtcctgggttctcagtaaaaacaagtttcaaagaaaccaggtctggacatggtactcaggtacacatgaaaaacatacacatgaaatataaatgaatcttttgcaaaaattgggtaactcaagttcttcctgattccaaaccagatccaaagttgcatctgattccagttggcaaggaatatgttttgagaaacataagattactaaatcaatccataggttatgaaattgccaagtttgcaaaggcaaggaagaattcttggcctctaatcaataaatgag

SEQ ID NO: 34829 - DNA, 516 bp, Mus musculus
  source 1..516: mol_type = other DNA
aaacactagtttatgtttctagttccagggtaaatgaaatgtcgactgatacaaaatatgttccctttgtaaatgcatgtctttggaaacatgatttttagcatgatttctacttggacatccatcagcaaatatgactttgaacaatacttgtatttttcattaatgatgagattatgtcaacctggctactgacaccactttggattctgaggtcagtgaagcctttcattggaagacttttcttgataattttttaaattaagatttactattttatttgcatgtctgggttctcagtaaaaacaagtttcaaagaatctgactccttcttacacatgaaatataaatgaatcttttgcaaaaattgggtaactcaagttcttccgattccaaacccgatcgaaagttgcatctggttccagttgggaatatgttttgagaaacataagattactaaatcaatccataggttatgaaattgcctatttttcgcctctaatcaataaatgagaa

SEQ ID NO: 34830 - DNA, 379 bp, Mus musculus
  source 1..379: mol_type = other DNA
tgaaacctggctactgacaccactttggattcaaaggttgaagcctttcaattggaagacttttcttgataattttttaaattaagatttactattttatttgcatgtacctgggttctcagtaaaaacaagtttcaaagaatcaccaggcctggactacacatgaaatataaatgaatcttttgcaaaaattgggtaacacaagttcttccatactcatattaaagcaaagattctatgattccaaaccagatccaaagttgcatctggttccagttggcaggaatatgttttgagaaacataagattactaaatcaatccataggttatgaaattgccaagtttgcaaagaacaattcttggcctctaatcaataaa

SEQ ID NO: 34831 - DNA, 491 bp, Mus musculus
  source 1..491: mol_type = other DNA
tccctttgtaaatgcatgtctttggaaacatgatttttagcatgatttctacttggacatccatcagcaaatatgactttgaacaatacttgtatttttcattaatgatgagattatgtctccaatgttctcaaaagtaaacagttgatgaaacctggctactgacaccactttggattctgaggtcagtgaagcctttcattggaagacttttcttgataattttttaaattaagatttactattttatttgcatgtggttctcagtaaaaacaagtttcaaagaatctgactccttcttacacatgaaatataaatgaatcttttgcaaaaattgggtaactcaagttcttcctgattccaaaccagatccaaagttgcatctgattccagttggcagaatatgttttgagaaacataagattactaaatcaatccataggttatgaaattgccaagtttgcaaagacaattcttggcctctaatcaat

SEQ ID NO: 34832 - DNA, 376 bp, Mus musculus
  source 1..376: mol_type = other DNA
actatggtacgaagaataaaatagtacagcatatcacatacttgccttgaaacctggctactgacaccactttggattcttgaagccttggaagacttttcttgataattttttaaattaagatttactattttatttgcatgtggttctcagtaaaaacaagtttcaaagaatctgatacacatgaaatatgaatgaatcttttgcaaaaattgggtaactcaagttcttccatattccaaaccagatccaaagttgcatctggttccagttggcaggggaatatgttttgagtaacataagattactaaatcaatccataggttatgaaattgccaagtttgcaaagaacaattcttggcctctaatcaataaa

SEQ ID NO: 34833 - DNA, 328 bp, Mus musculus
  source 1..328: mol_type = other DNA
tactatggtacgaagaataaaatagtacatttggaagacttttcttgataattttttaaattaagatttactattttatttgcatgtggttctcagtaaaaacaagtttcaaagaatctgatacacatgaaatataaatgaatcttttgcaaaaattgggtaactcaagttcttccattccaaaccagatcgaaagttgcatctggttccagttggcacactgttttattgaaaatatgttttgagaaacataagattactaaatcaatccataggttatgaaattgccaagtttgcaaagaacaattcttggcctctaatcaataaa

SEQ ID NO: 34834 - DNA, 519 bp, Mus musculus
  source 1..519: mol_type = other DNA
gtgagatttctacttggatctcgattagaaaatatgactttgaacaatacttgtatttttcattaatgatgagattattttgttgcaacctggctactgacaacagtctggtttctgaggtcaggccttgaaagacttttcttgataattttttaaaattaagatttactatttttatgtgtataatgagttcatatgcacgaaagtgtgtagtttccttttactaaaacaagtttcaaagaatctgactcctaccaggcctgtgcatggtactcaggtacacatgtaaaaccaatgctcatacacatgatttataaatgaatttttgctaaaattgagtaattcaacttcttttaaactcaagccttaaagaaaagattctctactgattccaagccagatccaaatttatatctagttccagatggcatgagaaatgtaagactactaaattaatccataggtgatgaaattgccaagtttgaaaagggcaggaacaatccttggcctctcatcaat

SEQ ID NO: 34835 - DNA, 405 bp, Mus musculus
  source 1..405: mol_type = other DNA
ggaagcatgatttttggcatgatttctacttaaaatatgactttcaacaatacatatatttttcattaatgatgagataatgttcattagccttggaagacttttcttgataactttttttaaattataatttactatttttataaagaaagtatgtggtttcctgtatacaattttaaagaatcctgtgcatggtactcaggtacacatgtaaaaccaatactcatacacatataatataaatgaatcttttgcaaaaattgagtaactcatgttcttccatactcatattaaagcaaagtttctatgcatccaagccagatccaaagttgcatctagttccagattgcagctttgggattatgttttaagaaatgtaagactataaaaatcaatcaataattg

SEQ ID NO: 34836 - DNA, 386 bp, Mus musculus
  source 1..386: mol_type = other DNA
ttttgacatgatttctacagcaaatatgaatttcaacaatacttgtatttttcattaatgattagattatttagccttggaagacttttcttgataactttttttaaattataatttactatttttataaagaaagtatgtggtttcctgtatacaattttaaagaatcctgtgcatggtactcaggtacacatgtaaaaccaatactcatacacatataatataaatgaatcttttgcaaaaattgagtaactcatgttcttccatactcatattaaagcaaagtttctatgcatccaagccagatccaaagttgcatctagttccagattgcagctgggattatgttttaagaaatgtaagactataaaatcaatcaataggtt

SEQ ID NO: 34837 - DNA, 476 bp, Mus musculus
  source 1..476: mol_type = other DNA
tgatacaaaatatgttccaattgtaactgtataaattgttgcaacctggctactgacaacagttaggattctagcttagccatggaagacttttcttgataatccttttttttttaatttaagatttattatttttatgtatatgtgcctaaaagtgtttatatgtactatatgtgatttcctgtaactgaagttagagtcttgaacctgggttctcagcaagaacacgtttcaaagaatcggactcctgcaccaggcctgtgcatggtactcaggtataaatgaatcttttgcaaaaattgagtgactcaactcacagtcaagtcttaaagcaaagaatctctacatctttgactagcaagatccaaagttgcatctagttccagatggctaaaacattcactgttctcatgggaatatgttttgtgaaatgtaaaagtttgaaaagggcaggaataatccttggcctatcatca

SEQ ID NO: 34838 - DNA, 578 bp, Mus musculus
  source 1..578: mol_type = other DNA
ttttggagagtttggaaaatttacgtatttgtactataccatagatacatagtcaagatttcaaagttctgaaaaggatgaatagcttcagagtttcattccatcatcgggagcatggcaggatccaaggctgctacgagaagactcaacatttaacaggttttttgtttttctttttaatttaagattcattatttttatgtttatatgcaccacatgtgcacatgtgatttcatgttactgaatttagagtcagttgtgggataattgaacctgggtcctcagcaagaacaagtttcaaagaatatgaatcctttttctgacttcctgcaccaggcctgtgcatggtactcaggtacacatgcaaccaatgctcattaacatgaaaaaaataaatgaatcttttgcaaaaattgagtaactcaactcaagtcataaaacaaagattctttacatctttgaccaagcaagatccaaagttgcatctagttccagatggcaaaacattctgggaatatgtattgtgaaatgtaagattacgaaatcaatttgaaaagggcaggaacagtccttggcct

SEQ ID NO: 34839 - DNA, 664 bp, Mus musculus
  source 1..664: mol_type = other DNA
ctgtacattgaataaagctataaaaacccttattttattttgcccttttgaacaaggctagtcttgaaaacattgcaggcagtctcctcactggatccattttgttgagtcaatggagggggatgagattgtacatatttacatatcaaaaattctacataaaaactgttgagtaaacgcaatgagcttgttaagtagtgcactgagaagtcattttaacagctgtgcagttctgaggaaatgtcttcaccagtgctgggctctcaccaggagtacagtaatccaaagaatttttgctatgtcttagcgataaatgtcttctctctgtaagtcaacgttactagtctagaccagcttttttcccgggtttccccggcaaccgcaactggaaaaccctttggaaaagtaattccgaattctgtaacagaacccccgaggcgaggcctccccgcgcctcccgaatttaggtctggggtgcgtgtcccgcgcagcagctcctctgagcacttcctgcctgggacacgtcgcagctccgggaaccaggactcacgaatcgccagccctgccggcacagtgatcccagaggcgcccgcgcctccgttgtacggcggggtccatgccaagatggccgcgcccgccatcgaagcccccggaccctctgaag

SEQ ID NO: 34840 - DNA, 481 bp, Mus musculus
  source 1..481: mol_type = other DNA
atgaaagattcttgatgttagggaaagaattaatgttaaaagtttgatatatattcctgataaaattaaatcagtgtttatcatggtttataagcccgcagtctattatagtttgttaatgtagcccaaataaactaagattttttaaattacctacaaggaagatgaaaaccttgtgcaatatagaaacgtaatcattgtgagaatgtacacagaaagaaaattacaactgtgcactgctgtgtgctcatcagattgtagtgcactcaacatgtgttaagcttaacgagatatctgatcaaaaagtaataaacattttcatgctaattgccaaggcaaggtcaattacagatttcggagatgtcgcacaactcaggggttgtgcgcgtgggtccccggtggcgcgcgagtgaggaccacaactcccaggcgcccgcgcgccacctcaccgggccacgtgactcgcgtggccagggcgcgg

SEQ ID NO: 34841 - DNA, 261 bp, Mus musculus
  source 1..261: mol_type = other DNA
tcgatgatttcagagatttaaaaccttgaaaaagcgcataggtcataacagcaatgtcgctgtaagatccctgcggctcagatccggaggggagtgaccttaccttcacagggtaagccccgcgaccgcagtaaaggccgcggattcccgccctggacccgccccctgggactccacctcctcggagggctggtgaggccttgtcctgccggaaagcagctcgccgccacggcgttttacgttaccggcggtgacaggccc

SEQ ID NO: 34842 - DNA, 384 bp, Mus musculus
  source 1..384: mol_type = other DNA
cacttcgtgagcaatcaatgtgcaccaggagttaacctctgaagtaggctttggtatatttattataggagctgactcctatataaactctccatttcactggagaaagtaaggctgagcggtgcccgaccgcagccaccgcggctcccgccgcttggcgagaggaagtcggtgtcatcctcgtctccggcaccgaacatcacgtcggctttcgcccagctgaagggaggaggaagttggatgttcccagggcctgtcaccgccggtaacgtaaaacgccgtggcggcgagctgctttccggcaggacaaggcctcaccagccctccgaggaggtggagtcccagggggcgggtccagggcgggaatccgcggcctttactgcg

SEQ ID NO: 34843 - DNA, 405 bp, Mus musculus
  source 1..405: mol_type = other DNA
ctaaatcgtcaggcgctttggttttggttgtctgttaaatcaaagacccggactaaggtttagttcgaatgaagctaacgctgcactttcatcttctttcctctcaaaactagaggagaaagtcgaaactgactttgtagggtggctctaggtgcaccaagtcacgatgtgactggaatacacatttcaaatactttcagagcaagcaccgtgttttggagcagcgtggtctctgctcaggacttaagtaagagcagacccgtaaggtaacggccctttcccacgggaacccccggcctctctagggcaggcctgagcttagatccagagctccgtaccgtggaggaggctcggccgggcggcggagacgcgaacgtatcagaaacgtactacgtgcgaagtatc

SEQ ID NO: 34844 - DNA, 322 bp, Mus musculus
  source 1..322: mol_type = other DNA
cgcggctcggcggctcgcgacctgccacgttactgtccgtgactgagatgactaaaattgcgcgtaactcggcttagtaagtcctcgaaaaggaagtgctcttctttcatgtaaggattttttttttaaaaaaaaccttatctctgatttagaaggtcttagagtttaatatcttcttgaagcagttacgaggggcccccgaaggacttccgtcgtggacaacagtcctctttcccagccagaagtctagggagagatttccatggcaacacaggcctcagcttcgactcccaagatacttcgcacgtagtacgtttctgat

SEQ ID NO: 34845 - DNA, 331 bp, Mus musculus
  source 1..331: mol_type = other DNA
tacctggtcacgctatagtgataataataataatatagttctaactctgagtaggtaagtgtgtgtgtgaactcacacatgggcatgcgtggcttgctgcttgggctaggctggctggcaggctcccaggacctgccagtcctgaagctacaggcatgcatgcccagcatagcaagtacttcaaggcttggagaagtgaagtcctgactacctgtattgattcagaagccactgactctggatacctatcggggcatctggtttcagggatctccaaaggctagggcccctccctttctagaacagaagcttgcaaggtcctcctgccagc

SEQ ID NO: 34846 - DNA, 464 bp, Mus musculus
  source 1..464: mol_type = other DNA
ttaaccgctaagtcatctctcgagaaatctgaagaaggtactgacagtttgatgaaaaacaaagtgaagcacacaaattatatatatatatatatatatatatatatatatatatatatatatatatgtatatgcagataaagcactcacacttataaaataagttattttcaaaccgttttttaaaaagtggattgacatccatatatttgaaactcattactttatctatttagaaaaattagtaaaaataaacacacggagaaaatctctgtctatattcagggacatttaaaataaattttctgggcgaataataattacaaagtgacacttattaatcgcttactcgctggatacaggtgcttcatgttcatgtagcgtggttggcacgtggaacctgggttccggggctgccgtggacgcccggagcgtttagaactcccgccctagcgacgcgcgcc

SEQ ID NO: 34847 - DNA, 367 bp, Mus musculus
  source 1..367: mol_type = other DNA
gagcagagggaagccctcctgcccctgccccggcaggaaaacctcacgaatcaactaggttgagaggaaagctttgcttttttgctttcaacggtacttttgaatataaacgtgtatttcagttatgaaaaccgcatttaaagggaaactcttctttcctttaatgttttttgtttttttacagagagaaactagaaaaccaagtgtctaggttattgcagtcaacaaactgtgtgtgtgagacaagaagttcccttctagaaccaactggggtctctcagaacagaaagggacagagccttgctggagctcactgcgtttggggagccggcctgagccctaaccccacatcccacggaggcggggg

SEQ ID NO: 34848 - DNA, 451 bp, Mus musculus
  source 1..451: mol_type = other DNA
cggaagagcagtcagtgctcttaaccgctgagccatctctccagtgcttggattaaaggcacatgccaccactcacatgtctttgagacaaagtcttaaaccttatatgtttgaggatgaccttagtgttgggattacagatttgtgtcaccataactgactttaacagtcaagcacagctgagaaatgagcctgtatttaagacacatgcctaatttttgttttttgttttttttaaatcaaacacatcacgtatcttgaggtatttcttttctttttaagatttatccatttatttaatgtatgtaaatacactgtagctatcttcagacacaggctgcaggcggaaccagtgtggtgtgggtcagcgcgcgggcgcagcctgggaggggcgaagccagagagggcggggcctggaagggccacgccctcggtacctgcgacaggtgga

SEQ ID NO: 34849 - DNA, 468 bp, Mus musculus
  source 1..468: mol_type = other DNA
ggcattgcaaatatgtgatacatatgcatgcatgcaagcaacaggggttccccacctgctgaggtgcgcctctcctgaagtaaaatctgggcagcgcagctcctccgtggccctccaagttttacttatgggcagatggcctatcagcgttgctcccttaagctcttaaaggagatgagtgactccgattctggggcagaatatgcacctggttccaaaacctgactccaatccagaatggcattgagcgagttcataattgctaagagttatgttgatttcgcaatgtaacttcaatgagacaccttgcacctaggttttgagcaaatagttgtacatctgcacaaagagtctatatagataaactctaaggaggcttggcctctcttggctggcccacccaggttcctgataacctcaaccccagcaaggagggaaaggggataaggtgggcccctgagctgcttg

SEQ ID NO: 34850 - DNA, 485 bp, Mus musculus
  source 1..485: mol_type = other DNA
tagtgctaagattaaaagcatttatactccaaattttaatgtatccattgtagataaacctgatctcctagcatacttggatctcaacccatgagataggggctggataatcaattacatagaataaataaatctagacagtcagtctgtttgctccgggctgagaatagaccgtcaagtgaactctgggatgagttcggattgcaagccagggcacctcccagaggctccgaatgcccacgtggaccccctcgggccttcccacctcaagtgagacccgagctggggggcggggagacgggcgggctctcgggcaactctggattggccaagattccagccccgctcagcgtggatctggccgcgcgagctgaccagtgatcactgccccgaagggagcgtaagctgcattcccggaggggcgggcggtacgggagccgcttccgggtgagccgccccgcccccacgtgggcttgcgcttttag

SEQ ID NO: 34851 - DNA, 408 bp, Mus musculus
  source 1..408: mol_type = other DNA
ttttctgacaagcctttaagttcaatttttctagtgaattattgaaaaccaagatgagttcacagatcttaaacatttttaaaatgaagatctggtagtgctaagattaaaagcatttatactccaaattttaatgtatccattgtagataaacctgatctcctagcatacttggatctcaacccatgagataggggctggataatcaattacatagaataaataaatctagacagtcagtctgtttgctccgggctgagaatagaccgtcaagtgaactctgggatgagttcggattgcaagccagggcacctcccagaggctccgaatgcccacgtggaccccctcgggccttcccacctcaagtgagacccgagctggggggcggggagacgggcgggctctcgg

SEQ ID NO: 34852 - DNA, 372 bp, Mus musculus
  source 1..372: mol_type = other DNA
tttttttcagtacttaattatacaacttaaagcaacattgaaaatgtaaaatcaagtgatgatttttgataagaaaaatatacaatgaatcacttaatgatttaaaaaatacaactttaacttgggtttttgaatgagaatacaatgcattattcttacaatcaaatgattctttgagctccgaagtctcatcaggcgtctttttaaagtaatggcatttttttaaacgaaattttagattaacacttatccttaatataattatcacaaagttgtgaagggactgcatcaatcggtgcaatagaattgaatgaaaattctgagcctcggcaccaggccacacggttgcctagcagcaatttcaatggtcct

SEQ ID NO: 34853 - DNA, 187 bp, Mus musculus
  source 1..187: mol_type = other DNA
ccttcccatacaaagccgcttgtttaggcagggaactggggcctgtaggttccaggccacgaacgcggggtcaggatcccgctgcacctctcaccgcctccttgatgatcctggtgatgacggcggtctccagacagttctggaggaccattgaaattgctgctaggcaaccgtgtggcctggtgcc

SEQ ID NO: 34854 - DNA, 240 bp, Mus musculus
  source 1..240: mol_type = other DNA
catttgaaagaccttgaggtgtaggtcacctgcccaggggcctgccccgtggctgggagcccatttgcacattgaattcagaagctgactcttaagtagctcctgagtgtccaactgacagaacagctccagcaggcagtcagggctgtttgtgagaacactgctctcacagagcgcaggaattttaatataaaactctccgaagcccagggcggtcatgccaggctgacctcccgggag

SEQ ID NO: 34855 - DNA, 406 bp, Mus musculus
  source 1..406: mol_type = other DNA
aatattatgtatggatgtttgcctgcatgtacatatgtatattatagacatccctggtacccatggaagccagagtgagtttttttttttttccaaaaactgacatcatatttgtatataacacactgtgacaaacttatctttgaagaaatacttttcctcttcaattattttgttatcctacatatactttaattggaagggcagattaaaatctgccgtctcccattgtgccccatgcaggcatcacagctgccctgtgctcatgcaggagggcagtggcccctccctgggacttggagcaagtgtcatagatgtcccatctgggattctttgaccaaggaacttcactcgtctaagagtcacagtgcctgtgagtgctctctggctctttaaagtaaactga

SEQ ID NO: 34856 - DNA, 236 bp, Mus musculus
  source 1..236: mol_type = other DNA
agataagaatggcttaagacttacaggtagctgtccacatagatgctgtccacatcgatgctgtccacacagggctcagcctgggacctgagcagggtctcttggcatagggccctcaagatgcctcgtgggcctgactctgaggtgaacttcctgtagaggagcagctcttttgatcaggcctggctgggccgagctagagcaggaggagggcaggcagtcttgtcttctcctct

SEQ ID NO: 34857 - DNA, 104 bp, Mus musculus
  source 1..104: mol_type = other DNA
atttccactttcaagccacgctccaactagcctctcttccttgccacatccttggggcgggggtgggcacagactcatgtgggaggtggaacctcataaatagc

SEQ ID NO: 34858 - DNA, 377 bp, Mus musculus
  source 1..377: mol_type = other DNA
ctccacaacgtgccatgggacacaatggagtggaccagttacctggtgggaaccgtcctcaacccattggctgggagtcagttgacagtactgccagttccagcaggttgaactatggagaatctgctctcatcctcggagccacatcagatcacatgagcttccttctactgggtcctggaagcactcagtactgtgcccagtctagcctctctcttcctgcccgggtagcctgagtaacagcagactgtttgtgcccatagattgctttggctacaattagctggttccatcagtaactgggtgactaaatcacttacctacccccggtgatgtctggggcacaactcagattatttgctgagtcaggggaatgg

SEQ ID NO: 34859 - DNA, 467 bp, Mus musculus
  source 1..467: mol_type = other DNA
tgtgacagcagcttcttaggtcccaacacctttgtgcctggcagcctgccacaggagtatcatccttgttagacaagcaagaaacttgacttccactgagctgccagctgctaccaggtatcagcacaaactatctagaaagtttaagtttccttggctttgtgagaattgcagagaccaaaaacatttacacgttaggttattcaagcttagaactactaaaacttttggggtcttgtataataatgggctgcccagtcagaacaaggggtctttaacccttttttcaccagtagcttcctgaaggctaaaatctgcctctgggggctaaaaatggtttttggctaaaaatagctagtcctgccaccctggtgggcagagttgttgccatggtaacaagggtctgccgggggctggccccaggggctgtcctttgcaacagcacgcctgtctgagtcccagccggg

SEQ ID NO: 34860 - DNA, 398 bp, Mus musculus
  source 1..398: mol_type = other DNA
gttataaaaaaccctaaatcattaggaatgatacaaagtgtgtcaaaagtatcatcctgttgatggttctggagcaactggagcgacaggaacatggtatgagcacagagggctcagccacaggaagctgcctgtggtttcactgtgggaaaccagtgtggctcggtgaagggatagcatctctccctgtcctgattatcttaggaaggatgctttgctctatagccaacttccctgggccttagttttgttatatgagaaagaagccagaaccaggctacctgtatcttctgaggaagaactggagggacaggccagacactgcctgactgccccatgaaagtaaccatgagagctggcccaagaccctgattggccttggctgagcaaagcaaaca

SEQ ID NO: 34861 - DNA, 581 bp, Mus musculus
  source 1..581: mol_type = other DNA
ttaagtcttcctaagtcataaagaggaagctctcatataagaaacattttgtatttttatagtttaggacttttgaaagagcaggcctctttaacctttcagttcaagtaagagggataagtcaaaattttcctttaggggctgacccttgttcaaccttcaacatctggtaaaaaagtgaccctcaaatagtaaatttatattcagagccctcagttccaaggaagctttccagtttcgttcctcaaaacttttatttaaaaaaaaaatcgatctgtggggaggggagaggcgttcccattaaccccttcctccgccccacgcgagcaaatgccccgcgcgcgaggctggcgcgggaaagtttggggggccgccggcggcgcgggggaccggcggctttgggcgtggggcgtcgcggaggcccgcggcggaggccgaggagaggccgggggcccgcagcggctcggaggccggcgggggcggtgcggggcgcggtgcagcgcggcgggcgcgggccggcggggcgatctgcggtccccgcggcggtcccccccggcgcccccggcccccgccccccggcc

SEQ ID NO: 34862 - DNA, 277 bp, Mus musculus
  source 1..277: mol_type = other DNA
ctctgaggaggccagcagcctgagcgtgctcacagacatctctgtgagccaggccaatggagttaaacaccacactggctgtggattagcattagcttgccagaggcaggtgcaccaatattctgatgtcagctcagcccagaggccaaccaggcagctaggtagggtatgtgccagaagagcctcgttatgtctttgagacacaagaagctctagaggaaaggatccttagactctccctggcatggaacttcccacctcacaggtggggtgggta

SEQ ID NO: 34863 - DNA, 250 bp, Mus musculus
  source 1..250: mol_type = other DNA
atgcacgcctttgccattcgcagagggtcgtgtgcaagcggcactcgtgcatggactgtgcgaagctagagatttagtctcagggctgagccgtgcgattccggggagtctctggtgctctagggtagatgccaagtcaaggtgtccccctcaggatggataggtggacggtcgcgcgaggcaaccgatgctgcatcccttgctgcgtccggcagggggcagcagttggcagcagagggcggcccggcgc

SEQ ID NO: 34864 - DNA, 344 bp, Mus musculus
  source 1..344: mol_type = other DNA
ggagcttctcccagcagctggcacagggccctccaggatctcgaggcctgccaggcatgaggggagaccggccagagtccgatgctagaggctgagccatcttcccagcctgtgtctgagcatcacgcttggccattcccactgtgtgagccaccattggaggcggacaacagggcaggcctaagccctgcctggccttgtcacctgggcataggtcacatacatagaattttaagacaagttctcttctgagtacagtaaatctgtctgtctgtcacagacatgccagggactcaggctgcacagctgcacagcgatgcagttacaaggagtaaggcctccgg

SEQ ID NO: 34865 - DNA, 251 bp, Mus musculus
  source 1..251: mol_type = other DNA
caatatgttgctctgacacatatcagaattagaacacagtaagtgaatgacaagttatgtatcattaaagtgagcgtgttctaacatgtttgcctatgagacaaagatctttatctcagattcacacttggctgccttcagggctgggaagaagtccccagttcactatgaaccaggctagcgatgtacataccttggctgcataaagctggcttgagggaacattttgcgcaagacatttcccaagtgct

SEQ ID NO: 34866 - DNA, 305 bp, Mus musculus
  source 1..305: mol_type = other DNA
tgtttttcttcatttggctgtataacaaaaagagatttttaaatttgcttctgtatgtgtgtgtgtgtgtgagagagagagagagatgttcctgtgcctctctagagagtgttcattatgtagacagagatcaggctatatctactggattgggcacacactgtccggctgggaaggggtcctcagggcaggagcctgtgtcacagccagctggctgagagagctgcacaaagctggcttgagggaacattttgcacaagacattcaagtgctggtgagtttgtggcactcactgctctacagcc

SEQ ID NO: 34867 - DNA, 419 bp, Mus musculus
  source 1..419: mol_type = other DNA
caatatgttgctctaatcatgaaattagaacacagtaagtgaatgacaagttacttatcagaaatagtagattactcaactgtgagtgtgtgttcattatgtagacaaagatcaggctatatctatcaagcaggaactagaaccagatatttactggatcctgtgcacagaccctgcctctaggctgtataggggtccccaggaacactatgaaccctgaccagggaccccttcatagcccccttggaggggtgataatcctaagacaggttgggacccatgactgggatagtctgtgtcagggccggctggccgagggagctgcacaaagctggcttgagagaacattttgcgcaagacatttcccaagtgctggggagaatgtgccagggctctagaggccctggctgcagtcccat

SEQ ID NO: 34868 - DNA, 487 bp, Mus musculus
  source 1..487: mol_type = other DNA
attaatctcctgccattcactcatgtgtgtgagaccctgtgaagactaaagggtcctggtgcctgccagggatacacaaaatttcacatggaaattgaggctcaaggcagtctgcttgccagagttgcctgtgtttccctgtagcctggacacccaggcttcctgtcagtacaggaaatctgggcagggctcagggtgaatccctagccctcagggcctgctcagcagcagcaggcaagtccccatgggccaagggcaggagcttagggaacagaagtgccaccactgccatacgtgtgagcacagctcacccacccaagggggagaatggctgtcccttaacagaccatggtgtggagagagggctctgttgaaagcacattccacgcagaggctgtgtctggtgtcttagctttgcaccatacaggctgggggcctgggagccaactgggctgccttcgctctcactctcatccaagtcagatca

SEQ ID NO: 34869 - DNA, 311 bp, Mus musculus
  source 1..311: mol_type = other DNA
aggagtctatacttcctcaaattctactccatctggctaagacacatctggcatggaagggctaaagccatttgttcgcagtggttgaattagaatttttgctattctgcattggcaaataacaaatagaacttgacacgccacaccagaggtggctttggaggaaaactctaagatgttgtagccagaagatcggctgcctatctcctggtaccacataatgagcgcacagtttattactacagttattaagctgtggcgcctagtctaggagacaggacggagctgccagcctctcaacccgcccctct

SEQ ID NO: 34870 - DNA, 432 bp, Mus musculus
  source 1..432: mol_type = other DNA
ctgtcagccagggcaggtccagcatctgagacctgaaacctcgggtgtggatctgcgagtcctcagcctcagagataccaaagcagcaggagacgttggtcaccagcctgttcttacacacttcactatagagtgaagggccaggtgtgatatggctacacctctcacagaggccacgccatgaagataattctgttccttcatctctggggcctctgagggagaagctacaagaggagatgttcacctgatcctctactgaggttcccctttccctcctgtgaggatgggcaatgagctgcaggctcctctcgtacaagcacggttgtggttgcaactgaggtggtctcaaactcaagagggttacaaacacttgtaggaaatcaggctgggcgcttcctgcaaggaggaggaggcaaggcaaggcctcag

SEQ ID NO: 34871 - DNA, 334 bp, Mus musculus
  source 1..334: mol_type = other DNA
atctggttgcaatgtgggttcccagaggaactcgcatttgccattggggtcctgcctgacccctcatggccatgtacacggggagccctggacccatcctgacctctcctgcaggggagggcagtccaggggctggccctagaaggttctcagggaggttgatgacagctaccttctcgtctcctttccaggaaatggaggcagagagataccttgctcaaggctacccaggtgggaagtggttggttagccaacacacacaaacttgggtgtgtgactggagtcccccgacacaatgcttcattgtggcagccccgggcttgagcaactccag

SEQ ID NO: 34872 - DNA, 271 bp, Mus musculus
  source 1..271: mol_type = other DNA
gactaggttccaaactggcccacaagtcacaggggttagtcctaggacttcagacgtctctccagaactggccagaacttcactctgtagaccaggcctgcctcgaatgagagactcaggattaaaggcatgtgctatgccttgcttcagcatcctgacacgggtgtgctgggtttgcagcctgtaccactagggcattctgaacttggagtcaccggactcaaaggcagtcagtcagctgagggcggggctcctgcgcgctgcgcaggcg

SEQ ID NO: 34873 - DNA, 607 bp, Mus musculus
  source 1..607: mol_type = other DNA
gtgtgtacaagaccacttgtagagacaagggcagtggcatgtactgccctagtccttcctgtccaggctgttggtgcagcaaccaagtgcccaccgtctttgttgaaagacaatgtttggtggctgaaaagtacatgtagttagccaggtctgctgttgtcatgcaagtgtgtgtttgaacacctcacacattatttcgtaaagatctctgtctcaactaaagatttttaaagaaaatcaatactgaacaccgtttttcattaaaaacaagcctggtctgtcatgcatctgcagggacgagctcagatctcatgcacgtggcgggcgcagggcccctaccggcgccctgggggagcgtggctgatgaaacgctccgggctcggcccgagagacgctcctgccgtagggcgactcggcggagaccggctggggcgacgcgccccaaaaagggcgcgcggggacggcgggggcggcggcgccgggacgccgcggcgtacaaggggcatggaacctctgaccctgagcggcccgggcggcagcgcggcggtgagtgtgcgcgagccgtgcgcgtgcccgcgcgtccgcgctcccgcgctcgggggttggg

SEQ ID NO: 34874 - DNA, 470 bp, Mus musculus
  source 1..470: mol_type = other DNA
atggcatgtagtggtgactaggtcaagcactatagatcttcttagaacacttctttgactcagatgacagactttagactgtgtattctgacatctttccatataaaatatgttttttttaaagactgtatatagagttgtcatgtaccctcagtgtccccccccccactccggagagcaccagaggaaggggccattcttctcatgtgcagagcaggtgacccacttaaacttgcagtcagcacgtgtgcaagctgcaggaactttagaggccaaaagttggccattttccccaattgtgaattggcaaaccggaagcccccatctttcacccctgggctgaggaagtgggaagacttcgcaggggcccagggctcctcccgtctccaggcaacagccaggcgcgccaggcgggacgtcatttccggggcggggccaagtcccggctggcgacggcggcggcgtcggaa

SEQ ID NO: 34875 - DNA, 378 bp, Mus musculus
  source 1..378: mol_type = other DNA
ggttcaataatagaccctatggtcttgaaaagggtgttttcacaaaataagatatatttaggaagatgatctagttaaccagctatgctgctgagactgcttgtgagcacccaccacgttcctccggattaaactgtgagaaatgaagtctcgggtactgcaggcccatccagtacactctcctaaaatctgtgcacaggcagcatgtgctaaagttttctgtcagctgacctggcaaaatgaatggacatttgttaacctccatcacctgctgctgactgagggaggagcccggagtaccggcttgtcagccttctccagacaggtgacagtgtgaccccactgcttaaacaacaatgggcttctgggagttgaagc

SEQ ID NO: 34876 - DNA, 285 bp, Mus musculus
  source 1..285: mol_type = other DNA
gaaagctttccatactggtacccagtttgagattcttcttcagtgctcctatgaagaagcagtgagtgctacttgccactggtacatgacctctacatgcatccaaacccccaaatgaatccatcaggaatcaattcctctttttctggaagaaatgtcacttgtttgtcatttcatcctggaaatacatggaggcctgaggttacattaggagacagaccctgccccatgcttcacacagacagaagaacttggatttctgttgctctgagggacagcaatggt

SEQ ID NO: 34877 - DNA, 269 bp, Mus musculus
  source 1..269: mol_type = other DNA
gactgcaaagcagactggggtgaaagcaggcaacctgaggttttcagcctaggcttttggagccaggctggtttgcatataccaccaagttttaccattagattaacactggtaggctggtgacgagtgtgaagtcagcctctatttccaaatgtttagagcatgctgtaattgttggacaaccccaacagtcattgtgacccagcaactaatctggaagcttcctgggccaccagcatggatcatgcagtgtgcagggtccccgcggc

SEQ ID NO: 34878 - DNA, 450 bp, Mus musculus
  source 1..450: mol_type = other DNA
tgaaataagtcgataataagtcaattgatatttgcctcccagcattgggttaaaaagcaagtgtttagtgaatgctagcacatatcagctgccatgaaaccactggcattaagttaactttgggacaaaggagtacagaagcctatgtcattatctctctgacagtgataataaataaccttataattgtaacttaaaatctttctgactgtcagtacttccatctatagaatgacagggaccagctcggctggctgcagtccagggcaggagcaggtacattttaatttgccccaccctcctgacttccttctgtaaatgaaggaaagagcacatgagctacataaatatgcttgggaaagcttaagcattccctagccgggcagggcaggctgcagagggacagtcattaactcactcagtgtgacagctgctctcttatttaatggg

SEQ ID NO: 34879 - DNA, 396 bp, Mus musculus
  source 1..396: mol_type = other DNA
tatttaatatgcattaggcttatcttcaagtctatcttagagtagagactgttctgaagtttgagaaaagaggtgacaactatactttagacaaggaaatactttcaggtccttaccctaaacatttttagaatagcagtcacgattctctgttaatgggactgtatcttcctagaggaggaagaagttactgctcaaagaattcaatacgtgttgtgttttctctatttgtatgtttctagagagacaagagagtgatattatttattacttctagataaaatcaatatgcagttaagaattggtttttgttgttcattaaaaataaaatggacaactgaggaaagagttaaaccccgctccaggagtttgcccagatcattggctagccacttg

SEQ ID NO: 34880 - DNA, 414 bp, Mus musculus
  source 1..414: mol_type = other DNA
cgccagtaatggtgagtgaccaagagcagtggcaatagcctgtattaatagcctctggctccctacatatgaagcatattttggttcatagtctccttaaaaaatacattatcttatttaattacaaactaatggatttctatttttgtgaagtatgaaagctacctaccttcatagcatttacttcatagcatatttaatacatagtattagatattatgtcatctatagacgatttgacatatagagaaaagccagatgcaaacaccacatctgtggtggttaggtgggacctcgttggactaggtatgcccttgttcttcttgctgctggcacagccagatgtagaacgctcagctactgctccagcatgtgtgtggtcatggtgtctttccacagcacaaggagttctag

SEQ ID NO: 34881 - DNA, 435 bp, Mus musculus
  source 1..435: mol_type = other DNA
gagctgagcttggccccaggtgccttggggatactttaacatgctaaatgttaccttttgaaatatattagtgcttctctaagaaaaaaaaaaaaagagagctcagagctaagtactacaccctacttagtagaccctactaagtagaaagcacttagtatgtggcataaacaatgtcaaaaagtgactcctggggacattgatctggataaagattcctccaggcagctgggcaccgctgggtcctgctcccacctgctgagaactaatcttgggttatctccaaggctttctccgaggtgccaccccgcagctgctgcccagagcctgagggaacccatagtccaggagcagcaattagaatactcatttgtggagcaatgttgtatgcaaatgttagctggcggcgcgcaggagctccctatataagcctgc

SEQ ID NO: 34882 - DNA, 392 bp, Mus musculus
  source 1..392: mol_type = other DNA
catataccgaacctttgggggaaggggataaatttacttttcccacctttctgagttattagtaactcatcaaaacaatccttaactttattttgagataaagaagtagaaagaaactggttactacacagctaggtggaatttcaaatatgagagcataatatttcagattccttcatgcaggtattacctgtccacaaactaccttcaggaccaggaggtcctggccacattggcaaagaaaacgtctttcctaaggatgtgttcttcaaagaggcgtctgtctgcaaagtgcccgaacttactaaccatgtttagactctgaagggccgcgggcgctgagcccacagacctacaagccccagcatgcctcgggaggcggggcaagttga

SEQ ID NO: 34883 - DNA, 400 bp, Mus musculus
  source 1..400: mol_type = other DNA
cctatgacttgaatttaatgagataattaaagtaaactaatgtcttatgggtctgccttaatacaatataactgattattttaaaaaaagaggctcagttgataaaatgtttcaaattcatgaagacctgcagatcctcagtaacagcatttatatctataatgatctcaaaacttaactgatcagtcagtatactcaaaatggtggagcctcttgagtttccttttaataataaacactatgatcctgtttccaataataaatagtaattaataataaaagaagattgatgatgatatcttcatcctgggttttaatctctagcattgtgagaaaatatgttcctcagcatcctctgtagggaggtcagatgacttcctgggatgaaagccagcttcct

SEQ ID NO: 34884 - DNA, 501 bp, Mus musculus
  source 1..501: mol_type = other DNA
agaggaaacagtgtcttttgtctctctatctctcttctcatgaaacatctgttaaaacaattcttatagtttgtgcttcagagagctactggcttcctcagggaggaattacatatggaagattcatgcctctgggatttgctggtcccagttgaaaggcccttgttaatttatatgagtccataaaaggtcttaagcctaaggatgatttaagatcctgaacttctcttcttagggcacaggaaagaagagatgtcatttagctagtgatacatcactacctaaaggtagctttggatacaaggtggccttttatcctcagaagagcaacactctcatgcgtatcaatggtcatgatcttgctgttggctacaacctttatggcaatctaggttttattattgaaagtggtagcttactttcatattattgtttaaaacgacttgtagttggtagttacctagggtacccaggtctcaaaaattgtaatctcattctaca

SEQ ID NO: 34885 - DNA, 334 bp, Mus musculus
  source 1..334: mol_type = other DNA
atatctataatgatctcaaaacttaactgatcagtcagtatactcaaaatggtggagcctcttgagtttccttttaataataaacactatgatcctgtttccaataataaatagtaattaataataaaagaagattgatgatgatatcttcatcctgggttttaatctctagcattgtgagaaaatatgttcctcagcatcctctgtagggaggtcagatgacttcctgggatgaaagccagcttcctagtgagaatgctaaggttggcactctcacttcctctttacttgcagaggggcacccactgggagggaagaggcaggtgtcccaggg

SEQ ID NO: 34886 - DNA, 334 bp, Mus musculus
  source 1..334: mol_type = other DNA
ttaaactttaggatgccaggaaaggtcccttcctagtgcccttttcaggaatttcttatgagattggagcctgagtgggctgcctggcagggccagcatggaggcagctaaagcccagctggttcaaggctgcaacccagacctggatgtctgggaacttactcccaggaaggcctggccttggtcaaggcttggcgacagtagccgggcggagcctccgaaaagctcagggtccgccagggggggggccggcggcggggcgcggggaggcggcgcgggggggcggtccagggctgatcgggaggcggagccccgagctgggggctgctggcta

SEQ ID NO: 34887 - DNA, 351 bp, Mus musculus
  source 1..351: mol_type = other DNA
ttacatttcaaatggatccaatagatgcttctgtgtttgccaggcactggcatagcctcacaagagacagctatatcagggtcctttcagctctatagatggtccatcctcaccactacatatacttctcagagaatgccatggcaaccttattctcaccaagagatttgagcttcaaattgtaagctataaatgtcagattcttataatattgacatctgagacccatagttgtagaattttagaagctatcaaaacttcaaatcatagaatcttaggataataaaatataaaatccaatctcagaaccatcaaatattaaaagtcctagaattaggacattagaggttt

SEQ ID NO: 34888 - DNA, 322 bp, Mus musculus
  source 1..322: mol_type = other DNA
ggcctttcccagggtaagagctagaggtctgccagcccttctaaaagagaatagaaccatattttgccttttcatcaataatggaccaaaaattgtcatcaaaacagtattactatacaatagtttgttctgaaaaatggtcactgattcacaaagtttagaactatcagttccactgtctagttgggacacagagtattaaatgacgcatgttttatttgctattgtatataacacggccagtttaagttccagtaggagtttcgagagttctccagtttctgctacagtcttcaggaagggaatttgattaatctgagtt

SEQ ID NO: 34889 - DNA, 238 bp, Mus musculus
  source 1..238: mol_type = other DNA
gagattctttaaaagagcaaaatacagagaatccgtacaatgtgtaaatttaatgaaaaaaaggcctttcgttttacttcaggcagaggccctgcctgcacctcaggctgaatccttcccacgtaaggaagcgcgtgcttaattctgggaggttaagtgggctctcagctggaatcacgattcaggatctgcgcgcacatggttcttttgggtgctcctgtaaggagtcttgcagcac

SEQ ID NO: 34890 - DNA, 294 bp, Mus musculus
  source 1..294: mol_type = other DNA
gaattattattgaaagaattcctaaagttatctcaggttattcttacaaaaaataacttgcagatttcagtcaaagggatgtgacagaacaggtttacggtagatttattaaagaaaagtgggaaaagctgaaattccaatttaatctggacctttgtttgggagggagaaatgtctcttcttagatatgcatgtttctaaactcaattatctgagtctcaacttaaggcagagcctttcatgagtctggaacaccaaacagattgatacgcggcttcaccgcgcgtgcctggg

SEQ ID NO: 34891 - DNA, 332 bp, Mus musculus
  source 1..332: mol_type = other DNA
gtagtttaattctgacccctgggtccctggatctaaccagtacagagcagttctatgtaaaactttacatatgtcttaatgatttcttggatgtctttttccaaaagtagtttaagagaacacattctgactcgaggtttgaaaatggctgtcatactgtgcaaggggacatgcacaagccccactcctagagcacggtgtgtggctcacacttccactctgctcggtgggaggcttggagggagtttcatgtatgcactgttacccaaaggaacgtttctttagagaacacttcctgtctgacagtgaagcaagcagctcaggctgctcct

SEQ ID NO: 34892 - DNA, 520 bp, Mus musculus
  source 1..520: mol_type = other DNA
attaatgacggtttacaaccgtgggccaagattgggttaaacccttcaagtacatgatttcaaaattcaacctggtcatattcttgagcataaactgtgcatgccagctcaggatggggctccaggccgtccatctggcttagtgcaggcccatgccatcagcaggtgcttagtgctgaagccaggccaaggccggctgtcttggagctccctcgcccgtcgcggggatgtaacccagcccccgcccgagtccgggtgcggttccggcgcccccattgttcagaagggtggagacgctgtccacaggggactccccgccccgggtccagtggaacagagccgcgcgggccgcgtcccggcggcgttggatgcccaaggcccgcgccccgctctgtgggtagacaaagccggagccgcagcgaacccagccggctttccgattggccaggcttcgctgcctatcgaggagggcgggcagtgcgcgctccgcccagtcgctccctccgcgttgaggcccgcc

SEQ ID NO: 34893 - DNA, 419 bp, Mus musculus
  source 1..419: mol_type = other DNA
agagccgcggctgccgccagagcgatgttcccgcagagccggcacccagtgagtcgccggcgtgggtgggaccttgccccgcgcgggagcccacgaagcccccggccccctcccactggatgtctagacgggcggacgggcgtcgcgcagtcacggcccgcttatggccgaagtggcgcgtagtcagtgcggcccggactgggggccgagagggagttggcatttcatctccaggtcccgggcctccgggccgggtgaccccagagctccgggcacgcgctgtccacactggaggcagacttattcctgagcctcctgagaaattagggccccaggaagctaaagtgaaccgagggttcaggaattccagttcctgcaggcgtcgacctactcagggtggtggtcaccctgccaggctg

SEQ ID NO: 34894 - DNA, 407 bp, Mus musculus
  source 1..407: mol_type = other DNA
cctggagaacagcaggaagttcccaaatgttgcccttctggacttatatcttcaatgagcctataaattcccaatatagagagtttgtatccacaaataattttggggcccatggtaattctcaaggtgacctgttgcttttttagacatgctggaattaccttccttttgttcaaaatgattgatggtaagaatatttgaaagatggttcctcataaacaaatgttaatttgtgtatgctgccacagtctctgtgactatgttcatattcagcatttgctcatgctcaaagatggaatacttctgttattgtttccagatggaagtgaaaccagaaagtactaggtataaggccatcctggctgcagatgagtccattggaagcattgccaagcacctgcagtcca

SEQ ID NO: 34895 - DNA, 451 bp, Mus musculus
  source 1..451: mol_type = other DNA
actgccggcggtcgacctttcaaggttctgttcttgttaccagtctctgctactttcactgagatttccttcaaggaaaagcggccgcgcgcaggtcgctcgggctcgcgcgcactcgcgcgctcccttactcgccaaccttccgaagccgcttgccaatctcggcgtctagccgctccccattggctggcgtgggcgccccgcggctcctcgggcaccgcggcactcagagcgcacaggacgcgctggcggcaggcgagtgggcggggagacgcggcacagaggccgcgcgaggtgggcggagcgaaggccaacacaggctgcggccggcctgcgtcagtgccccacgttggtgcggcgcacgcggttggctgagcggctgcggctccgcccacgtccgtggccgcctgggtgcttgcagcccccgccacacggctcgggcggggtgctg

SEQ ID NO: 34896 - DNA, 352 bp, Mus musculus
  source 1..352: mol_type = other DNA
tcttttaaagactttttatagactccctttgcaattttttccacagcagaaaaaacagtcgccatggcccactttcctttaaatcaaaacgtgttcaggtctatgacatcaagttctgaagttcagccccatatagcatcgggacatggtggtgcagtagtaaatgtgttaatgtctgggccttactttagatcccagcatatgtatcacacaccagagtttggtcttagcactctgtctcataaaatgaacttaaattaattggcctagttgtaacttagtttcttgagccaccctaaacccatggattgggtgggtcagattcaattaaactatagagctttataaagga

SEQ ID NO: 34897 - DNA, 332 bp, Mus musculus
  source 1..332: mol_type = other DNA
tcttttaaagactttttatagactccctttgcaattcttttccacagcagaaaaaacagtctttcctttaaatcaaaacgtgttcaggtctatgacatcaagttctgaagttcagccccatatagcatcaggcagacatggtggtgcatagtaaatgtgttaatgtctgggccttactttagatcctgtatcacacaccagagtttggtcttagcactctgtctcataaaatgaacttaaattaattggcctagttgtaacttagtttattgagccaccctaaacccatgggttgggtgggtcagattcaattaaactgtagagctttataa

SEQ ID NO: 34898 - DNA, 592 bp, Mus musculus
  source 1..592: mol_type = other DNA
agagaatatggacttctggtactttttttttttttttaaaccagaatctttgaataagatggccaataacagccaatttcagcctgtgtctttactgcgctctgtggctcagggcagcagtcgggcggctgcagctggaggcgagcgtctggctctcctgcgccccgcctcacccggacatccccgcccgcggcaggtggcggaaccggccggacctgctccactggccgagccccggagctcggagccccgcggtggccagcggcgccatggaggcggacgcggaccctgaggagctgacccggctgcgctccgtcttcgccgacacgaacggctccgggcgcctggagcgtgcggagttcagcgcgttgtgcgcggagctgcacgtggccgaggccgaagcagaggccgtgttcagggggctcgacacggaccgcgatggcgccatcaccttcccggagttcgcgcgtggcttccgcggagcgctcggtcgggacagtgcggaggcccagggcgcctgggaagtggcagagccggagagcccgagccccgcgtggcgggacttccatgcgcgcctcggagacgaggcccc

SEQ ID NO: 34899 - DNA, 661 bp, Mus musculus
  source 1..661: mol_type = other DNA
ataccaacaaaaccatacaaataaaagtgttttatgtattattattagtcagctaaaatttttagttatatactgtgtactcaaaaatgagaatgtttgtaaccttagcggcatgtttctgtcagatgcacaaacttgactcctgcatttaaaacattacagcttgtaattcaagctacgaacagctgtccaagtgatattatttgaattccaagtttcagcatggattaccacttattaattttatgaatttgtctaggtcaaaacagtccagtccagcatgcttgccccaagttatcagcagtgttgctcgtcccaatcgaaacttttactatcagagccaagatattatattttcaaataaaagatcttatgaaaaataattgtgatttactgcttaaatattttttcatttaaaaagattgtggcttacattatttttaattgggcaaatctgctctagaacataataaagacctattaaacatgtctgaaaagaaataaaaataagctgtttcttccattgtagaattaggatattttctctttttaatatttgtcagagatcactgatctagaaaaactaaaaaaatttattgttcatcagaggaggggtgagaatttataaatagtatcccctccctcgttggctacattaaga

SEQ ID NO: 34900 - DNA, 425 bp, Mus musculus
  source 1..425: mol_type = other DNA
gtaaatctaaatgatgcatgccaacagataaatttggtttataaagtggactaagaaatttgtaagatttgtgacaatctagtaaactggctttaaaagcctgtactaacagttataattatccctgagggtagagactgttcaccccctttcaaggcacaaccccaagggctggcctattagaaatgcatgatgaatccgtcaaggccagcctggtctacagagtccaggacagccagggctacacagagaaaccctgtctctataggctctagaaggttaaatggaacagtgtactacccataccccttgtacccaatactgtgcttagcaacacagtgaatcctaggccagtctggcttacatggataatcaatcctcttatgttaaatatagctaatgaaattaggtcaataggaatagtt

SEQ ID NO: 34901 - DNA, 411 bp, Mus musculus
  source 1..411: mol_type = other DNA
tctggtagcaatcattaaagaaacaacagagcaaagcagctttcatttaattcctatcaggggctcattgggatgacaatgaattcctggagagcaagacttaaaaaaaatattaaaaattaaaaaatcaaactatttaagaaagagatctcagttaatattaactttaaaatcggccagcaggttgctggccgccaggatccgggaattcacaatgcagggcgcctttgggcctagcctgacgcagcagcagccctggaagtggcccccgccagagcttctgagcgtcaggggacagtcggtcctgtgcctcctccaaccgcgagccctaggagggtcctgggctcccaccgccctcagccttcaagcccaagccaagggaggtgccctctgagctagctagggaggaga

SEQ ID NO: 34902 - DNA, 414 bp, Mus musculus
  source 1..414: mol_type = other DNA
ttcattagaaatccttgttttctaacaacaaaacctgtttagcctttgcaaaacgcttagtgtttggaagtcagatttacacagacgtgtaggaaggtaactcaattcaggatccctaatcaagatttctctagtctttaaaaaatcagccagccgttcttgcaccgagggttgccatagactcgcaccgagtccctgcagaagatctgttgtttcctcctttgagaaagaagaggtctcggcttcaagtcgggcacctttaaggtgacccagagagcgcccggcccagcggtcacgtgggggcgcgtgcgccacacgcaggcagaggcagcccgcacagcctgcgcgcccgcgccgcctcccgcccacctccgagccgggagggaggggagcgcggcggagggattccgtggt

SEQ ID NO: 34903 - DNA, 435 bp, Mus musculus
  source 1..435: mol_type = other DNA
ggataccagggattactgtctagagtgtgagacatacccactcaatgtgggttctgatacatttcctgcccgcagagcaaaaaaaaagtcattaacctgagtttgcacctaattttttttatgagaattaaaatcataaatatgacacaattagagtatccaggtaattcaaacacatttttaatatcttgattatatctgtatatttctttcaaagtaagtacaatgtgaaaactttgagcctttactggtatcttgtacatacaattacttagaatataatctctgttgattacagtttttctttaagaagactgaaatctatactttcataaagtagtataaaacagtttctaacactttgaacttctggattacacaagcctctgaggcggctgcagctccgccctgttccgcccggctcctgctgcaact

SEQ ID NO: 34904 - DNA, 354 bp, Mus musculus
  source 1..354: mol_type = other DNA
aaaaatttagagaaatactggctataattctcgactgaacaatgagatccatctttaatggagaccgttaaactgacttgaaatcaaacttctgtttcatgccagttcttttcttgttgccttctctaagatggaaaacaaatgccttgttaagcacatcctcgagcattttaaatgagcttcataactgaaatctacaaacaatttctttggtccacaggtcaataagttttttttttaatgacagatgtttacatactatatattacatgttatatattacatattacatatagtgccacaaggacactgagccttattgctccatggaagtgacttcatatcaggctggat

SEQ ID NO: 34905 - DNA, 440 bp, Mus musculus
  source 1..440: mol_type = other DNA
acagaaacaaaactaaatttgtctcctgtgtatggtggttttcctttaagcatctgaaggaatgtcctagtatgagcacacattaataggttatatgcatcttatatcaagcactgtttaatacaaccccagttctaacagatgatgtggtcagtcaaagcagaagaacatactcttattctttccttaaatacacatttggttattttatataatttttgtatacttctcaacattgatcatgaatgctgacaagctttgtagagtaatcatgtattccaaactcaggcttacatttgaatgttggctacatatgtatgagttttcaacttccaggagaaaacgtctctttccaagaaagcaattcatcttgtttcttcctttgtggtatacagataaagaaaaataaaacttaaccagcccctcccaatttactgtct

SEQ ID NO: 34906 - DNA, 514 bp, Mus musculus
  source 1..514: mol_type = other DNA
ttgtgtgcgcgcgcacgcgctctctctctctctctctctgtgtgtgtgtgtgtgtgtgtgtgtgtgtgtgtgtacacgcgcctccctcagtgagtctgccgtccggattgccgtccggattgaaggttcgccagcgggcgcagcggactggctctctacgcccccccaagcgttgggcacagcgattccgtaaagagagaagcctagaaaattactttcttgagctccctcgccggcaactgtgaccgccaggttcccgccaggttcaaggtgtgggctggccactctgtcctggccctggccggtgcaatcgctgcgagcacccttcgctcgtctgctttaaaagcagcagcggcggcagcagcagcagcggagggaggaggcgagacgcggccggaccccccagcagcgcgccggagcagccgcgcgcgaggaggaggacggcggcgagcggcgggcgccagggccgaggacacggcgctggcaaggaggcggggcgctcggaggcacggcc

SEQ ID NO: 34907 - DNA, 410 bp, Mus musculus
  source 1..410: mol_type = other DNA
ggttcttcctaaatagcagcaaattatatagaaattatcaaagaaaacaagtatgatttcactagttactctcagagtttttcttccataattaaagaggaatgcttcagcaatttctatttaaagccccctcagtatttatatatatatatacaaacacatacatgctcttgtacattttcactgaaccatttttttcttaaaatttttattgtttaaatgcattttttggattaaaggcgtgtgcatgcattttttaacatcaaacacattaataatactgaatattttgcgaatcaaatagtacataaaaatttgttcaacttcactgaactatttatcgtaaaatttagccattcttctaacctaatatgggtctcacagggttgggaagactgcccttcttgtct

SEQ ID NO: 34908 - DNA, 451 bp, Mus musculus
  source 1..451: mol_type = other DNA
agataattaatttgttgccaatagctttgttctgatcaaacataatgttcaaggtggtggtgaaggaccctcttcatcatatgttttcgcttccctccaagaaacctggagcagggcagcagggacacctgcagaagtgcgcacctggccaggcgctgtccagcgcccggtagccggaaggtgctccagctggaggcaaggcctggctgcctgggctcgggtctctgtcgccacggcagccagccgccccccgccggtcctgcccgccgcggccgcgccgccgcagccatcaagtggcgcaggtgagcgcgggcggcgcgcggggccgtgtgcgagcgcctgtgcgcgagcgcgagcgagccagccagcggagtgcgagccccagcatcccgggcgctccctcccgcagcagccgcccgtcccgccccgccccgccccgccccgcccgcgc

SEQ ID NO: 34909 - DNA, 474 bp, Mus musculus
  source 1..474: mol_type = other DNA
tagcaaaaattttcattgaacggtaacactttttaatatttagtaaatgttagagaaacgcaaatcgctttttattagacaaaataaaattacaacgcaattcttgtattttaaagtctgagagttttaaattgttcactctaatattagacttagaaaaaagagcgagcgagctgtattttcacaactctgagcactttcccggaggagtttaggctaagaacgcatcttgatgtgctaagtaacttctcaaaaaaggacttcccttgaccacctcgtttcaagtttttgataaaatatcagcaacactgtaaagggcacttcctttggaagtcaggagcctgcccccgccgccttcgcgcttgtccgtcacccacgcgggcccgggcccgtgcgccggtcgttccatctcggcggcggctgggccgcgcccctgattggccagcgcgccccgccggcgtcacggcttcccgc

SEQ ID NO: 34910 - DNA, 373 bp, Mus musculus
  source 1..373: mol_type = other DNA
aggccctctccctccagccgcctggggtgctagagtcggcgccctagccccggctcggggcggcctggacctctccctgggcggtactgtggcaccggtctgatacctttgtgattgtgtaattaaataataaaacaatccttaagtaatctttcaacttgcaagtttttcaagtccgtgggctgtggccagcggcaccggcagcggagtccacgcgcggcgggtcagacccggggcgaagcgggcgggcggcggtgcggcggggcaggagcgcagcaaaggcttttccgcccgggagctccgcgcctgcgctgcgcgcgccccgccacccgcgcgcactcgcttgcgctccccctcgcgcacacacgtggtc

SEQ ID NO: 34911 - DNA, 287 bp, Mus musculus
  source 1..287: mol_type = other DNA
tattgaatttgatcaccagttccttggaacaaagcggtttgaggggcccattattttgtaaacaattggaagagtttactgatctctggccagttgtgaaataccaacagcttcaatccacaatgtgctttcctaaccaaactcagtgcagatgtgcagcaaatgtgagtcagacaaaaagcacgttgtttcctgggtctcgggctttcactggggccttaaacacacagagcctgggcaaacacttaatgtgtttccatgctaccaggcaggtagcatatatgtga

SEQ ID NO: 34912 - DNA, 543 bp, Mus musculus
  source 1..543: mol_type = other DNA
gccggtcgcctccagggtcccgggaatcaagtctcggcggggggcggggcggggagccggcgggagccgccggggagacccgcagccgcacacgcaccccgcgcgctcccgccccgcagcctcgggcgcgccgcggccccgccctgcccgcacccccgcgggaagggagccgctttccgccggcgccccgggctctgggggtggggagaggaggggcgagcggtggcgcggccttcccgctccgagcgcggccacgtgcaccgggcgccgggggagggcgggccgctgcggcgaggctcgggggaccctggggaccccggcgcccctctccgatcgccagtgcgagctccgggctgggctgcccgccgcgccccgggctccgcgcccgtccgctgcactccaggaggccaagtcctctccctccagccgcctggggtgctagagtcggcgccctagccccggctcggggcggcctggacctctccctgggcggtactgtggcaccggtctgatacctttgtgattgtgtaattaaataataaa

SEQ ID NO: 34913 - DNA, 314 bp, Mus musculus
  source 1..314: mol_type = other DNA
gatctattctgtcataataaacagcgcggttcatgattttccttctggtagaaataaaatagcagtatcttatacagttgttaagcaactagccaaaagaatcattacgggtatctcttgatgcgatgaaatacttcataaatgaagtagagtctagattcattcttgcgtcttttcctttaaagagtatgagaaaagttcaagttgcagcaagagactgcctcagctcagccagtgttaatactgggagctgaggctccccgccagggaggtcgggctccctgcaaacagttgcaggcatccttgccactggg

SEQ ID NO: 34914 - DNA, 460 bp, Mus musculus
  source 1..460: mol_type = other DNA
gtcccaggacctgagtaacaggtaccaccgggaacagtttgttctggaaggctctcaataccattcaacaagaagtacagacttcctgtgcaaaaagctatattattatattatatataatataacatattatattatattattatatttatattatattattgtatctcagacaatttatagagattatctgaaatgcatttaaaaatgatttgaatgcggatttaggttctgaaggccctaaagatgaacactgctgctttggggtgcactcacctccagatcctgaattaaaattcaggtacggaatggggagagaggcctgttccccgacaactgcttaaggctgacacgcgtgtgcggccgcctgggcagggccggccgggcgcagcgctgggctgcgagcgctttcaggtctttcggccctcggcggctcccatcgcagctccggggcgcgaag

SEQ ID NO: 34915 - DNA, 526 bp, Mus musculus
  source 1..526: mol_type = other DNA
gtgtctggggacaccacagaacacatttgttaccaaatttttaaaataaaactgactctcaaccctaaatatttatagttttaacttttttttttcaatttctaaatacagtcaaaaaacattgttctaggttctagggatatagcacaaattatgtctctgagttacaccgtcctatctcttggagaggatcttgacacagacttgggcatgtgatgtgtcagatgcctctaggtgaccagtgacccataggctctggttccagaccaaggaagcgcagccacgaccttgggttgtcagctctgcgcgctccagcggcgccaggctcctgccaatcctctagggaggcagtactctgtgggtgactcctccccacggaacctggttggctgctctctaaggaggccgcgtgccggggcggggctatccggcgagggggcgggcctggcatccgctggggtactgggtgcgcagtggataccgcggcgccgggggcggggacagctcggtccggtcgctcggggcc

SEQ ID NO: 34916 - DNA, 303 bp, Mus musculus
  source 1..303: mol_type = other DNA
ttactaaagcctccttttcacgagtggtgaaaatgttcttgccactaaaggaatagttccaatggctgaattatacaacatgtgtcaccatacaagccagggattgttcagcacaccctgctatgatatttggaacagctgagcgaaagaaagtggtgacttttcaaaatatatacatatggctaagaatgacacgatggggacccaatgattgagtctttaggtaattgtgggtcccaataccagatcagctcgccacagcgaccgagccgcgcccaggcggtagccagcctgctggcctcg

SEQ ID NO: 34917 - DNA, 611 bp, Mus musculus
  source 1..611: mol_type = other DNA
caagtttagcataaaaggctcattttgtatgaaggataaaaacctttcatcaagggaataggctttcaaaagccaaggaacaaaagaggatttgcttttccaatcctctgaagaaggccttatttgccaatgaatccggttctgcattatttgtaatcaaagagcgctgagagtctgccacctgtgccgaagcccaggcactctccctggggaccctggcatcggccgcggtcctagcgggtttctcgggccgagagccagctaagaagacgtttacagagcaggaacaggctgctgcccttttccgaggctgatgccggcgctggagcgcgcatggggtggaacgcggccccgagccacccgtgtgctttgcgcacgcgtaccccacccctggcgcatgcgcaatataccccgcctgccgcgggagcgcgcgcggttgcgggccggcgcttctcttccagcgcgagcccgcgttctctgagtacgcgcgtatcctggagctggggctcgggcggcgggcgggacgctggggacgcggaggcgaggggcgggcctgccggggcggggccagggaggcggagaaagtcgcggctgcccagagcctcgtcgcg

SEQ ID NO: 34918 - DNA, 484 bp, Mus musculus
  source 1..484: mol_type = other DNA
tattacataagttcacctttaaataccctttaagagaattttaaatgatgaaatatttaggtgttagtaactcttctcatatatatcacttttctagggaaatagaattttaagtgcagggctaaaatttagattgggcccaaatcctatcagggaaatgaaatagggctttctcatgtttcagtcccaagaaatacaaggtgcacacgagaacaagcaccttgggctgtgggctacaggcccggatacccgccccagccagcaggggcgggccgggcgcgaccactgtgccagccgtggggggggtggaggagagggacagctcccgcgtgcctctctccgggcctattggtcgcaaccaggggcacctgtgggctctaggggactcaggccctcagctcccgagccacgacgctcggcggctgtagcgccacccgtgcctgcgcgagcacttggtacggcccagcgctagcgggcgccgagc

SEQ ID NO: 34919 - DNA, 751 bp, Mus musculus
  source 1..751: mol_type = other DNA
caccttgggcttgggctacaggcccggatacccgccccagccagcaggggcgggccgggcgcgaccactgtgccagccgtggggggggtggaggagagggacagctcccgcgtgcctctctccgggcctattggtcgcaaccaggggcacctgtgggctctaggggactcaggccctcagctcccgagccacgacgctcggcggctgtagcgccacccgtgcctgcgcgagcacttggtacggcccagcgctagcgggcgccgagcgggagccgcgcgggagcggcgtagcgacatcggcggcggtggcggtggcggtggcggttgcagctcggagccgttgagacgcctctgcggcagctggtggcgcaggtggccggcgtggacgtgggcaggagcggccagcgcgccccgcagccccagcgccgccgcccggcaggtgagagccgccccgcccccgctcggcgcggatgggaagcgggcggccgcgctcgcagcctccctcctctccccgccgcgcccctccctcgtgggctgcggcccgtgggaaaagccctgggagcgccggggtgggaggccggcggccgggtggcgggcagcatccctgcctcaggtggccgcgaccgcaggccccggcgctgctcggggccgaggccgcgctctgtccgaggaggcgcgcaggcggctccccctccccctccgccgcctcctgctgtccctcgcaggcgcgtcgggacaccccgaggcatcct

SEQ ID NO: 34920 - DNA, 584 bp, Mus musculus
  source 1..584: mol_type = other DNA
aaaaaatcaaagaaccatgtttggctttatgtgattatagaagcccattgttctcgttagtaaaaggatgcattatattataatattttattattggctaagctacttatagataactaacttatatgtagttaaatttaagactttggattgaatttgaactttaatcagaattatgttacactttgtgccaaatgattgttagaattaaatatctgttacttgtattgtgtgtgtgtgtgtgtgagagagagagagagagaagagttatttcaccagactggaagattaaaaaaagattatgagtgcatttatttaattatgcctatcaacaagtcccactcttgcgaaagttataataaacagcatgtaaatttgttttctttagcacacttcattcaaaatgggaagatgtgaaaaaaaaaacatgtgatctccagcttattatttactagtgactggattatgtgtataagaaataaaaacatgttgttgattctttaatacagaattataaactgtatttaataaactatgagaccttgcatttgacccccgcctggggctatggaaacggtcagccc

SEQ ID NO: 34921 - DNA, 730 bp, Mus musculus
  source 1..730: mol_type = other DNA
ccacacgtgtgactggtgtccgtcgcgggcgcccgctagggtggcagtctccttcctctcccccgccagctgcagctccaggcccagacctagaaggggaaggtggccgcaagccgccgtctgggccggcaccaaagccgcactttctgccccgggtccccgggcgcgtcacggtccccgggcttcccctgccttcactccggcgccgcccaaggcagaccagagccgggccgccggagcggaggcgctgcgccgcagtcggaaagttcgcgcccggtgctcggcggcggctcgcagccttccctcagctgggcgctggccgccacctccacttccacgcccgcaccccccggggggcgccaaagttgttgtgggggtgggggagggctagacatcctccccgaagccgccgggagcagaaacttgtgccggcgcggccaccggtcccccccgcgccgccgcgcgcaccccgcctcgccagcttttctccctctgcccggggaggagcgggacaactcggagcgccggctcgagggagcgagcgcgaccctgggcgcgggtgtaaatcagtcacctgagcgccgaggggccgcggcgagggcgcgcgcgggcgggtggggagtggcgcgggcggcgagcgcggcccggagcggccgggcgggggagggagcaggccgagcggcgagctgaggcggccgaggggctggtccaggcgcggccgctaagagga

SEQ ID NO: 34922 - DNA, 359 bp, Mus musculus
  source 1..359: mol_type = other DNA
tcttccaagaattctgtaaacttttcctagaaaacaaaaaagtaattctatctttctgtgtcagcgtgcgcgcgttcactaagtgagactaaaaaagtgagtcagtctcatttctttcatcagactccattgctgacgttcggtccaaggacaccaagccgttgggctgaagcctgctcccttgacttcagtcggttagatgtcagccgcacgtaaggcagcgtgaggcgccagcaatgaacttgctggtcgagcctccgccggcccggcgcgcatgcgcagatcagctcagccgcccgcgctcggagctgggcccgcggcaagcccactaggaaccgcgatcgccggaccaggcggct

SEQ ID NO: 34923 - DNA, 475 bp, Mus musculus
  source 1..475: mol_type = other DNA
acacatgcaggtgtggcctgcatctgagactctcccacaaagcactttcctttcctcattatataaaaatgttagaacgaaaaaaaaaataattgtggcattcgttttttttttcttttgaaaatagaagattaaatgttattactcatatcaatatatgctatagctcatatcaatcctctcttcatcttaagtagttaagttgtactagaacaggaaaattccctaaggtgaaacaagcttaagggacaataacttattcatgatccgtgcgcaggcagcaccactgcggctacctgggagctgggtcacctgaggacgacagcccaggcttcggaccgtggagggactttcgcccccgcacagtgcgggggttcctcgcgctcacctgcctcggcttgcgccctgggcggggcttcccgcgtcccctttaagaggccgcatcacccgcccgtccgcacaagcccgcgtcccg

SEQ ID NO: 34924 - DNA, 393 bp, Mus musculus
  source 1..393: mol_type = other DNA
atagcagctctgagaaagcctgagtcactttctttcctgtcattaaatcagataattaaaaaagggcttcttttaaactaggggctctaaatgagtcttattgtacctttaaacttgtaagtattggatgtttcaaattgtcaatccacaaagacctttatttacagaaaataactaaagccgttgttaggtttagttaggacctttccaaaccatctatagtattcttttccaaactaatatgttctatattgacggggattaagtttctctcctgaatggaacaatacagctactgtactactaaccaggtttgttcagagcgcagccctgctgatggctggctgcctgctcacccacccaccctcgctcaggaaatgtgagcggggctga

SEQ ID NO: 34925 - DNA, 441 bp, Mus musculus
  source 1..441: mol_type = other DNA
cagggctgactccccttatcatagaagtggggccagttccccgcctcttccagctttgctgccaaagttggaaaagctattttgtttcagaataagcttgaagtggtcccctgctgtgcgtggcactagctccagctccagctccagttcctcggaacccaactgttgtgggtcccaggttacttctgtcccagtctgtgagatgtcccgggagactctggcgcagccagctggggtccccagatgctagggtccggctctgggcaccgaaggacctttccctctcaggatggccagggtggcattccaaactgcagctgtgaccttcctttaaaaatgaagaaagaggcagaaagcagccctgctcgtttttttgagggtgctggggcggggtcgcccagccaccgggcggggactgccccactcacgcggaacgccccc

SEQ ID NO: 34926 - DNA, 345 bp, Mus musculus
  source 1..345: mol_type = other DNA
gattctcctgcctcttcactatgcctccccatgaaagagcagaaggtaattatcccaaagttctttccccaaattattatactaacttttaagaaaatgctaattgaagttgctgcagcattttcatacattctagagaaagtttgcaggactgcagaacctcttgtttacgagtgtggctttctatgcgatataaaaagattcttggaaactttaaaaagaattgctctttatgcataaaaataagaaaactcttcccaaatatctccaagggcttatttcaatgtcccgctgcctctagggctgcagagcagtgggggccaatgagctcatgcagctctgggc

SEQ ID NO: 34927 - DNA, 523 bp, Mus musculus
  source 1..523: mol_type = other DNA
agacttgcacacccagctcgagagcagaggtattgtcagagtaagctgctatcttgtgaaaacacaattcccagaatagttgttttcactgctttgaaatagagtgaagtctcactttgtagcccaggctggccttgctcagtctgtgccgggatcacaggctgaagccaaaaaacttgtaagagacacgtgttttctggaacccatatttcagaaacaacaaactcagggtgggtgagcaatagagggctggaccgctgctttgttctcaaaagcagaggcctgtggttgaaagcagccaggtatagattttccaggaagatctggagatggaattcagggtcaatattctggaggtccgggcatgcatttcctccagacggacaatgtgtcctagggatggaaagttgggactcggaggcttcctaaagccctccaagcaggtgagatactaggtgaagtctgacctcacaggaggcccttatgatgtcattgccacctcaagatgccctcctctgtgact

SEQ ID NO: 34928 - DNA, 465 bp, Mus musculus
  source 1..465: mol_type = other DNA
aacagttggtgcccgtgcactatggctcccaaagtaccaatttctgtaagtgagaaactcacccacacaaaagaactattgttctaacaattagaccgcccagcctgtccagggtttccatcatgtcttaacagcatgtagacaaggctgggcccagcccacagcgctgattcgacatgtgtgcatcaaatattagtcaacaatgttgcagtttaaacgaatccagtgcgatgctgcctagcgaagcagcgggatgtcttcgttcgggagaaactcttggggctgtaagctgctgccactgcggccagtgggaagcacccacctgccagcacagcctggcccctgcaagccacagggcccaggactgagtcctctatgaccttcaaagtcacagaggagggcatcttgaggtggcaatgacatcataagggcctcctgtgaggtcagacttcacctagtatctca

SEQ ID NO: 34929 - DNA, 444 bp, Mus musculus
  source 1..444: mol_type = other DNA
cgaagcaaacccaggttctctggggcttaaatgataagctatgtctctagccccaacatccaatttttgaatgaataagtgagaaaatgtcttcattggtacagtgtagtatacaacggaaagggctttacaataaggatgcagtgtcctaatttaggaatatgacgtgaggccatgtggcctatgggaaaacagttgttcacacggtgacgaagctacctctactcgagttttggattctaattacacattctcaagctagaactgcctagccctgggcaattagttcagcactattatctctctgaggtgatcacgcgggggcagcattctctttcgctagattgcaatggaagaagcagtttcttagaattccaaggcgatgtcgccaccggaagggcggcaggccctcggagttctcgcgagatgccggcgggaagtgcc

SEQ ID NO: 34930 - DNA, 280 bp, Mus musculus
  source 1..280: mol_type = other DNA
ctgacactcagcagagagacagacttgtttctctgtagaccaggctggcctgcaagcattccagaattaggaattcagggtcatcttcctttgggaagggagccagaggaggctatttgataataaaaattttgcatgcccattaattagagctacatagcaagatcctgcctttttttcttctcctctgagtactgggattaaaggagtacgatgatttgtttaaaacacccggtttccggacctcagggacttcatgtgcccggatcccggaagtcgg

SEQ ID NO: 34931 - DNA, 446 bp, Mus musculus
  source 1..446: mol_type = other DNA
caggtcattaacgtgttggaattccacacatctttgtaactttcttgacttaaagtaaaaggttagaacccgaacttccagttttgaagtggtcttttctgaagactctccaaaaccccaagacgccctgcatctttgcaattcagacagcagaaggcctcgccccggctggctcctgctcttcttgtactgatctgggatctcagggcactgggctcaggaaaccaaggaggcccccgatattgtggcaccaggttggggttcccacgccctcagcccagcacagggttcagcggccccaggcagctgggctatcacgtggctcggaggcttgcagatctggccctcaggccgctgctgctctgcctgcactgggctcaggttttatttaaatggaaacacctcacagaagaactcccactaggcagcactggctgcccgcaggc

SEQ ID NO: 34932 - DNA, 531 bp, Mus musculus
  source 1..531: mol_type = other DNA
ccttgcaaggaactaatctttttccaggaaagaaattccctgattcagaccacttaaaaatattgcataagtcagataaagttggccatcttccttagttgtgcaatttggaattgttttactaaagaaaacacagaagaagctttgcttgtggaaattcagatcaaccttttaattagaagcttttgataagttgtcaggtcattaacgtgttggaattccacacatctttgtaactttcttgacttaaagtaaaaggttagaacccgaacttccagttttgaagtggtcttttctgaagactctccaaaaccccaagacgccctgcatctttgcaattcagacagcagaaggcctcgccccggctggctcctgctcttcttgtactgatctgggatctcagggcactgggctcaggaaaccaaggaggcccccgatattgtggcaccaggttggggttcccacgccctcagcccagcacagggttcagcggccccaggcagctgggctatcacgtggctcggaggcttg

SEQ ID NO: 34933 - DNA, 546 bp, Mus musculus
  source 1..546: mol_type = other DNA
ggccagcctgatttacaaataagacttgcaggaaatgacaaacaaaacaaattaaaatattttgtcaaaatttcattacagtgcttcagtacctgcagaactgaaaattaatcctcagcactctgtcctgaggctcacaaccatcagcttcagaatgtttacctcgagatctaggttaccatctaaactaaagagttactcgtttggcgttatcaaaatctggatagagtagaaaagacaacgctaaggtctctcagaggtctttggatggcttagagaagggcagccctccagtgtcactcagactttggggtcacacaattatgggtggaacttccagcctctactaaagagaaactgcaagtctctctaggcttcactttcaaaactgccactcgggattcaggagcgccccgaggtccgccagaattctgccaggaggagggcgctcgcggcgcagaggcgtggcctgagcctgaggcttggtgggtcaacctctgggtggagcccaaccacaggggcgtggctctagcggggcgggtccga

SEQ ID NO: 34934 - DNA, 458 bp, Mus musculus
  source 1..458: mol_type = other DNA
actagtttagttggcagctatgttatttgagaaatacattattctataacaagtattagacgtgagagtaggctagccgagaacctattagatcgtattgtcatctcaaagcacacactttatacatgtatgcatgcttagtgtttgcatatgaaagtctgtaaacataaggttaagcacacactttatacatgtatgcatgcttagtgtttgcatatgatctgtaaacataaggttaagcgctctaataattaataagagttctttctcatggttatgttttagaacttatattctttgtaagcacatatatgatttttatattttctaataaaacttttaactatgaactgaatagtttctaagcaattccttttcttttatgataagtaaaatctggaatttagtatcacaccctagcctctgggaaaaaagaacagagaatatgttttagtaag

SEQ ID NO: 34935 - DNA, 375 bp, Mus musculus
  source 1..375: mol_type = other DNA
aaaatgtgatcgcgcgcgcgcgcacgcgcgcgcacacacacacacacacacgtaacttccatttgattccatcacatgatggacttactcaaaattttagagacgactttcagaacagccagggttttatacaaagacaatttgtgttttgaaaaaagacaacgacggtgccgctcagtgatgagccccgaggctcgcctctgcggtccggcgactacaccggacctgacagccagggccccattttaggtactactagaaaccagggtcgcaaacggagattcggctcctcagtagaccagtctggggaagtaacgcccctctaaagtcacttccgccggctgttctcgcgagaacttagagcgctatgtgccc

SEQ ID NO: 34936 - DNA, 381 bp, Mus musculus
  source 1..381: mol_type = other DNA
agactggcagcttctgccagccgtggagacaatggctgttgccatcataatactatatgtactatatacaactatgtatgtattaccttatgttacccataaatgactaaacattcagtactacagggtccagagaacctgttgctacagcgaggaacaagaatattccttctaccccggagtccaaagaggtccgggtcccttgggggttccccaagcctgtcaggtcccgccccgggtgggcgtggccgccgtgctccgggactccggggggcggggctggggcgtgagtgtcccggcggtggcaggcgggcacagcccggcttgggagggccgcggggaggcgccgtatccggaggctgtcccgcaccgcataaagcc

SEQ ID NO: 34937 - DNA, 245 bp, Mus musculus
  source 1..245: mol_type = other DNA
caggcagggctggccgccagccactaagaggggagagttctgctctgcttgccaagctgtgtcctcggtactgtagatttggtggccaatccagtggtttcttctttgtgtgcagcacctctgctgctgaagtgtgattctctcaggctggtctggaattcactttttaaagatttatttatttatttacttatttatttatttaatgtatggccacctttacctgtgttaggtaaacatatata

SEQ ID NO: 34938 - DNA, 407 bp, Mus musculus
  source 1..407: mol_type = other DNA
tgtgttttatttcccagaacaaaaagtaaaaggttgtgttctattttttaagttcaatccatgatgttcaaaataaaagtgaaaacgtgaaaatgaaggactctagattccggaggcttcttttatctatcaagtttaaaatatatacatataaaatttgtctttgcaaatacttgggtagtatcatcatactgataataaagttatcctgccagactaaagacccttcagtgtctcatttctggtgaccccaaacttggtagcactttcgggcttcgggaagctggcaggcggcagcggcgggcgtggcccgcgcaggaggcgcgcaaggcgggagggcgccgagctgcggctactcccgcgccgccgagagggaggggcccagcgccgtccgccagcctggctca

SEQ ID NO: 34939 - DNA, 317 bp, Mus musculus
  source 1..317: mol_type = other DNA
acacaactggccaggagtcaataatgttgctgtgttttatttcccagaacaaaaagtaaaaggttgtgttctattttttaagttcaatccatgatgttcaaaataaaagtgaaaacgtgaaaatgaaggactctagattccggaggcttcttttatctatcaagtttaaaatatatacatataaaatttgtctttgcaaatacttgggtagtatcatcatactgataataaagttatcctgccagactaaagacccttcagtgtctcatttctggtgaccccaaacttggtagcactttcgggcttcgggaagctgg

SEQ ID NO: 34940 - DNA, 370 bp, Mus musculus
  source 1..370: mol_type = other DNA
caaaactaagtagcccccttgttttatgaagtttgctacacacttcataggtagtgattttaatacccatcaatcatagatatgccatagctatttatagaagggtcatgtgctaccaatttataccttctaggacaagtttattgttagcattttctgaatgtaaatgttttaaatgattaaatccttctaatgattgaaaagacagcttgtctcattaaacatacattatttccacctgtccaactgaagttaaaatatttggtatatttcctcaccttgagatatttgcactaacagtgacaaaattatagttataatgtagcaatgaaataatcttatggttggggccaccacagcatgagcagca

SEQ ID NO: 34941 - DNA, 428 bp, Mus musculus
  source 1..428: mol_type = other DNA
tctcctgcggctggggggctccaggcagtggggccgggatggctccccagctggccgctctcccagtgcacctgtaagcgaggcgttccagtggcgctgcgggccgccgggtcgctcggcctccccgcgcgctccgccccgcccgcacgccctccctccgcccctagaggctcgaagcccgggtgtcaggcgccacggcgcatgctccggactcatcctctggccccggagctgctgctgctgctgctgctgctgcttttgcttttgggggccaaggcagagcatgtccgccatctaccctgggggcgggggagggggggtaccacacaacaccccggcaaacctctcctccgccccgcgccgccgcagcccagacagcgccagcgctccgcggctcgcggggagctgccgcctctcccgcgcgcgcg

SEQ ID NO: 34942 - DNA, 393 bp, Mus musculus
  source 1..393: mol_type = other DNA
ttataatccaatttatgcacattatagtcagtattaactttatctattttaagccagcaggttgtcacccaactgggaagcgggttccctaaggctgggcactcccaggtgtcccgcctccacctgggcacggttctcagcccgggaacaccgaggcgggaggcgtttcctaggaatgtgcgttcttgcgatttcagcacaaacccgcaaaatctcctgcggctggggggctccaggcagtggggccgggatggctccccagctggccgctctcccagtgcacctgtaagcgaggcgttccagtggcgctgcgggccgccgggtcgctcggcctccccgcgcgctccgccccgcccgcacgccctccctccgcccctagaggctcgaagcccg

SEQ ID NO: 34943 - DNA, 462 bp, Mus musculus
  source 1..462: mol_type = other DNA
tgttcaaaattaatttagataaattcttacagaatgaatgcattataagttatgtataggaaaccaagaatttcctgttagcatattataatgaccttgcaaatttaacttacaaaactgcttgctgcttcttttaaagcgtcctaatgcttctaaaagtgcgggtttcagaaacagtcaggtaatagatttctattccttttaacttatttatttatttataaacgcttcgctaaagaaaatgcttggctataataaatgttatataacaataatagtcgtggtaaagttctttttcctgggccttgacaagctccaggaagcaagctggctctgaaccctagtcagcctggaagtctggctgtggctagggctgggacccagcttcacttcaacatctaactgcagtaaggccttgtcacgcatgcgcgcgagggggcgggcatctccgacaggacccgc

SEQ ID NO: 34944 - DNA, 614 bp, Mus musculus
  source 1..614: mol_type = other DNA
aaaactccctttaacattttcagtatttgtattgagtatttatactagcaactccaaacactgtggacagatcatgtgaaaactatatctttttaagacttaggacattaaaacataagatttgaaatgaaaagaaataaatccttagagatgttttctaggtaaccatttgaaaggtcaatggattatttaaatcagaagagaaaggttaacatttaagatttgcactaagggtatctgacttgttacagatatcattcaacataattttatcaacacatgcatacagagagttagtatattcatatgatgcagcagtccgctaacactgcagcctgattggaactgtgccttagaactctagagtagaaagtcacttgtcgcatttaaagtgctgcagaactttagggtgccttgaaaaagcccaatttttatttgagtgttggaagaaataatctggccatacaaatacatttgtctatcttcatttagtttggcaagaaatagaaattgtgttttcctgatagaatcttatacagtatatttacttttgccaactaaacctagacatcaggaattgtgcatgtgtgtgagtatgcacatgtatgtgtagt

SEQ ID NO: 34945 - DNA, 296 bp, Mus musculus
  source 1..296: mol_type = other DNA
aacttctagtaagatggaagcactaccttccaactccagcaactatatgtaactgttccaacctggtagaacagaataacattaacttaagcgaataacattaacttaatgacattaaacattaaataaatgacattaacttaaatgaacaaaagcatttatgcactgccacccaggtctctaagtgtcagggatttagggcttctaagaaaggccctgtctccagccacagatcagtagcctgatgcctggccagctctcctagggcagcatggcaggaatttgactttcatctc

SEQ ID NO: 34946 - DNA, 449 bp, Mus musculus
  source 1..449: mol_type = other DNA
tggagatttctcccaaagaactcatttttgtgactgtgaataatttaacaaaacctattgttttgttttgttttttaatttactattctaaataattatttaatacgctaagctcttgcatgagagcactgctatatgcacaagatcctggaatattttcattatcctggagacactgtgttactaataatcaaactggacccccactttaagcagtttctccagggagctatggcccattgatgtttatagtacactattgtaagccccctgggagctcacagagagcagctgtgccatcctttcaggatgagcagctactctgcctttgctccagcaattggtgaaactgtacaagattttataaatccttagtttgtatatattttaacccagtacatagcatataaaatagccaggagcttgaatcctctgaggaaaggaccatc

SEQ ID NO: 34947 - DNA, 557 bp, Mus musculus
  source 1..557: mol_type = other DNA
aatgtaagtatattcttagtctgcatacaagtggcaaattatatacttattctcaaatcaaagttaaaatttgccagtagctagagaactgcatgttaataaaaaatacttataaaagtaactattttggaaacattgacttgaatattctaccaaatattatcattatccaaatcaggataacgttttgtgttcaaatcatctattacagagtccataagaaaaaatagtgtttggaaaacaaaaccctgaaaaccgtatttaaaaaatgtatcattaggaccaaaatttagtggcaagttaaatctcatgtgtcttaaatgttaaacaaacaaacaaaaaaccttttacaatcaacatttttaattgagtgtgacgcaaactgtaaaactgttcttgaagaaaataaataaataaaacgatacaatgatttcttatcttgaaaagaacgcgctcttgaaaagcaagcttcaccggcctcgctggccggccggaaccccgcccccagtcccgcccgcccagctcagccgcgcaagcgcactagctgtgcagccgct

SEQ ID NO: 34948 - DNA, 529 bp, Mus musculus
  source 1..529: mol_type = other DNA
ttgtgtgtgtgtgtatgagagagagagaaagagtggcacacagcccatgtgtacgcaggcacaagcttgcctagttacggatgtggtggccgtgttcgcttagatatttgcacacatagtcctcaggatgccatgacaatcataggataaatagctaatatacaatgatggtataactaaccttttatgaaaattaatattagagttagtggaggtaatataagaatacaacttaatttttagcctctaaacaattgaaaaatttgaagtgtatcattacatcagtatgattttaggctgaaacattttgcatcatactttactttttgatacaaatatttatgtaaatggtataaataaaatgaaaaataattgtagaatgaattacagtaacttaaatacaatcatagaggaaattttatgtttgcatagatgtgtaaatttctcacagagactggagtagtagttaatgacaatttaagtctaatttaaagtgaaaccctcttgtgtttgtccctatttaagatag

SEQ ID NO: 34949 - DNA, 341 bp, Mus musculus
  source 1..341: mol_type = other DNA
cactcaataatttctcagaagcctttatgggcactagagctgggcagattcttgactcctgtaggccagcccttctgcccagcgggtggctgtgggcaaatgtttttcattcatatttatttagttatttatttttataaccaagagcggtcacataagacatctttctcaggattccagaagagaatgtgtgggaatttttggcaatagaaaacaaaacctctgcattcgaattcagaatggagaagccctccctgtggggggctgaagaggccatctacccgaaaatgcccttttggtgaggctggccaggaggaggagcgccaacttcctggctgaga

SEQ ID NO: 34950 - DNA, 547 bp, Mus musculus
  source 1..547: mol_type = other DNA
tatgcacagcctgcagtgctgtgacctgtgcatgcactggttctctcctgatggtcctaaaatcatcagataaatagctaacatacattgaggattaaaataaattttatataaatttatattacacttaatgaaggaagaacccaatttgaggactttaatttacagggtttctctgtatagtcatggctgtcctggaacacagtttgtataccaggctggcctcgaactcagaattctgcctgcctcggcctcggtgcaccaccactgcccagtggactttaaatattttaaagtatacctttacttcaatgtttattaattgagagacacttgaaacaatattgcattattatttacatactttgtaaacaatacaaataaaacaaaaattgtcaattcaatatagttaatgtttacaaaatacattacagggaattttgatttacaataaatatgtaaattataaacaaagacagtttattggagctgaaatagttaatgaaatcaaaaccatcagaaagtaaaaactagtgtttgccctatt

SEQ ID NO: 34951 - DNA, 587 bp, Mus musculus
  source 1..587: mol_type = other DNA
gcttctgtgtgtgtgaaagagagagagaacatagacacacacacacacactagagagagagagggtgcatatgcacagcctgcagtgctgtgaatctcctgtgcatgcactggttctctactgcatccgtgggttccaggcctgatggtcctaaaatcatcagataaatagctaacatacattgaggattaaaataaattgtatataaatttatattacacttaatgaaactcgagaaacccaattttagagggtttctctgtatagtccggctgtcctggaacacagtttgtatatcaggctggcctcaaactcagaattctgcctgcggtgcaccaccactgcccagtggactttaaatattttaaagtatacctttacttcaatgtatattaattgagagacacttgcaattgcattattatttacatactttgtaaacaatacaaataaaacaaaaattgtcaattcaatatagttaacgtttacagaatatattacaggaaattttgatttacaataaatatgtaaattacaaacaaagacagtttatttcagaaagtaaaaactagtgtttgccctattta

SEQ ID NO: 34952 - DNA, 552 bp, Mus musculus
  source 1..552: mol_type = other DNA
tgtccatcttaaagcactgcatcatcatcatgaaaaatgactttaaatacatgtattgcttttgagtcagaataactcagagtccagctttctctgtgatcctgtgattgcgggatcctgtgatcctgagattctgggtgtgtcagagttcctgggagtcaagcttcctctgcaaccctgagaagctcctgggatcctaacatcctggaggagactcctctggggacctgggactgtccactattgagcccaaggtagactggtgctgaccagcaaagcttgccgggcaggtttcctgcatccctggaccctttacttttttgacagaaatatttatgtaaatagtataaataaaacaaaaaggttgtaaaataaattacaaaactttaaaatacagtcataattttgtgtttgcagtagatgtgcagttttcacacagagactgtatatctgtggagtagtggttaatgacaatttaagtgtaatttaaagagaaactgaacccacattccccaggggggcgggggcttgtatttgtccctatttaagaga

SEQ ID NO: 34953 - DNA, 372 bp, Mus musculus
  source 1..372: mol_type = other DNA
tagttgcagctagttagaggaccaacacatttatgtatcatgaggctataatcacaatcttttgataagttttacttttatcttattttgtaagctaaaatattagatattaaactgattgggtgaaatataaaatagttcaaggttattggtacatattttcacattaatatgcccaaatacttgtgcacatttacagttgtacatgaagtttcaaagttatcagcctgtggatttcaatgtttacctcagagtgtgctctactaccagatctataataaataatactccatgaaataccactgcttgataaaagtgcattactaagcctgagtaagcatttagaaagtgcattgtgttagttaaggccta

SEQ ID NO: 34954 - DNA, 640 bp, Mus musculus
  source 1..640: mol_type = other DNA
agctctgttgcactgttactcattgcttgtaagtaatagttttacagaaaacaaaagtaatatataattctagttactgtaaaataataaaatcacctaaaacatgaaaaatgttataagcataatcttgttaggtatacattttacacagaaattatcatatataatgccattattgtgccttaatcttctataaggaccaggaaagaatattttataactacatcataattcatttagttggtgtctgtaatagacattcataatctttctagcctttaacaattaagactaatattgtagtgaatatctttgaacgaagaactttttcagttgtatttgtgaaaaatattccactctgagaattcttggcttgaagagatttatgtttaagggctcatggagcaatgacacatccacaccccatgaggtgacagcttaatattattaaggggcatctaaatggctagccaagcagaatattatgctatacacaagactgtacagaggtcactgcactcctatggactatgaaaatggctgtattcacaaatattttgagatccatgttattcaaggaatatttaaaacaagaccacattgttacattaggaaacagcttgtgttttcaaccctcagg

SEQ ID NO: 34955 - DNA, 495 bp, Mus musculus
  source 1..495: mol_type = other DNA
ctgaaagaattcccacatgaggtgcctttgtcacaaatatgcactggttctctaatgcaactgtgggttcacactcagctcattgagtttaatagcaagctttgtgcacactaaaattatcagataaataactaatgtacagtgattattaaatcaagcttcatataaatttatgttacttttaatgaaggtaactcaaaaaaccaattttaggactttaaatattgggaacttttaaagtatccctttgcttcaatgtatattaattgagagaaacatgcaaccataccttgtattatgatttaaatactctgtaagcaatataaataaaataataattaattataaaatcaatttggttaatgtttgtagactattttacagaaaactttgatttatactaaatatgtaaatttcaagtaaggacagtttatcagtactgtaacagttaatgaaaattcaaattcagaaagtaaaaaccagtgtttgccctat

SEQ ID NO: 34956 - DNA, 567 bp, Mus musculus
  source 1..567: mol_type = other DNA
agtattcctatacaatgtcctcagaacttggggtaacttttcaagcttttaaatttgaaatagatcaagatattataccacgtagtgggtaacatttaactaaaattttgcttgacacctaacatgaaacatcagaaattgaaaatgaaatattgttttttttcccctattatgacttgtcattggtgatacttaaacagtgtttaggtaaattatttacatctttaaaaacctctaaatgattcagctagctcctgccaagccgtggggtgaagacaagacttgtttaaaatctacataattagagcacagctacaatctaaccagtgctgtgccaactgtctgtatacagagacgtcaatatttgtgtggaaacttagcaaagaacttaataactctctcttcatccaacaaaagtctcaaattagtcataaattgtgcaggcaaatctaacgtgagtaacagctatgacttactctttctttgcttagtcactcgtgattaaaccttaatcaacttggaacaacgttactgtaaatactagctgcatgattttatcacaaaggc

SEQ ID NO: 34957 - DNA, 405 bp, Mus musculus
  source 1..405: mol_type = other DNA
aaaaagatagctgctgcccagcattttgtttggccctctcagagagaatcacagagacacaggtccttgctagataaacactttagtgctgagctaaataccaagccctctgtttatttttgagatagaaatattgctcaagatggtcttgaactcactctgtaaccaagtatctagccattgtataaaggaattttaaaaatgccccttgctggtagcatcaggctgggtgttggggagggtcctgcctccctccccaaagcccaggaatgcggcaggccctgattttacagccctggccaccggggcagccaagtcgccgcagaactggcagtaatcttgtgaaacagttaaaagacaaagtgacaacttttctatccgcgctccccgggaggaagaggagga

SEQ ID NO: 34958 - DNA, 450 bp, Mus musculus
  source 1..450: mol_type = other DNA
actgacggacatcattaatgtttttccatgaacttttagaacactcctttatcagattgtgaccaattaattcaccgattgatgattaatatatggatcctcacttaaattattcaagtctcaacagaggaccttctcttgtatatttgtaatcagataaagccaggaaccaagcccttgtgtgcaaaatgcagaaacactggtttttgagaatgacaggagcagagaccagacctgctctgagctccaccatttcttagtcatgtagataagcaatacgatgtgaaagagaataaaaggcattccgttgcgtttttataggtgacaaaaaaccaaaataagcccaacttggatttcactgcaataactggagttagtcttcaactctactatcaggcttgcatttgattgccaactgaaagtgatccctgcgcctgggctgggactggg

SEQ ID NO: 34959 - DNA, 337 bp, Mus musculus
  source 1..337: mol_type = other DNA
gttaaccggtaacgtgtacagaaagcactgatacagcaacatcagaaatgtttctgcaaatccttcgcaaagattctttcttctgaataaaagatgacacaattttctgctaagatgttaaataccttaagtttcagtgtagtgatgaaaattaccctccctaatacctcagaagagtccctttcccctcccccatccggaggtggggggaacagcagtgggcaaatagcgccacctatggcgggctgtggagccaggtcaggagcagagtgtggctcccccccccccccacaccatcctcagaggaaggaaggagggaccctgggcgactgatctc

SEQ ID NO: 34960 - DNA, 616 bp, Mus musculus
  source 1..616: mol_type = other DNA
tccgagctccggacccgcgcggagctaggactgaccaagcgcgctccttccccggccggcgacttttcctgtttcgcgggggccggggtggaggcggagggctgcggcctcgtgtctgcccgaccgcgcgggggcctggccgggacacacttaccggtccgccgcggcgtgcaggccctggtcccgggtacacgcagcggctcttctctgcgcgctgttcccaaccggaggagcgcagcgtaccgcttcaaaacgcccgcgcgcgtcctgattggcgggccggcccatggctggcctcgccaaagccgatcggcgcaggagacgttgccggccggctgcgaaagggcgcagctactgctagggggcgggcggtgcgcacgcgtcccgcggcgctggctgtcaccgcgatgggtggcgagcgaagcgagcgggatccggagcgtgccctgcgcgggaggcagcgggaccccggatgcggcagggcccgcgcgcgcctccccctgggcgcctctgggaagctttcccgcgcgactggggaccgcgcgccttgggactcgggggcgcgcctgagcggcgcgtgggtctcgaggtgcctcaacgccgaaggggctggggg

SEQ ID NO: 34961 - DNA, 319 bp, Mus musculus
  source 1..319: mol_type = other DNA
aacatttaaaaactttactgcataaatgctctttattacatatgataactaaaaatcagtgtgatgttacctttctctttaaaaaaaaaaaaaaattaacttgtgttattattcttctggctgactaaataggaagacatgatgttacaactttcagacagcttcagaaagtagaaatttttcactctaaaggctttctttcagtcagtcaattgcaaaagcgcgattaggaagcttaaagttctgcgcaggcgtctaagatcttccgatttgtctcatgacgtcaccaagtgtggggggagggggcggggccggcggc

SEQ ID NO: 34962 - DNA, 306 bp, Mus musculus
  source 1..306: mol_type = other DNA
agatattagtaacagagctgctatgaacatatacacatttgcactcccaccagcagtgtaggagtgagtgttctgtatatattttgtatattaccagatacactaaatctaatagaacccaatgactcagtcactaacgtaaacagcttctgtaaatcaaaggacactgtcattaggacaaaatgaatatccaaaatacataaaagtttcttttttcttaatggacctttcttggccagcctacccagtgggcggggtggccctccagcctggcccttctaggctcaggagactggcagagctcag

SEQ ID NO: 34963 - DNA, 174 bp, Mus musculus
  source 1..174: mol_type = other DNA
ttagggaagttttcttctgtaatttgatctacttttttagcagtaaaaccacatttttctgtccacttgaaaatatctggaaagtacaaatatctaatcaaagaggacacatctttgagatattgtctgattgaattctgttaatgacttctagccaagaatgtgaggctggaa

SEQ ID NO: 34964 - DNA, 454 bp, Mus musculus
  source 1..454: mol_type = other DNA
gggcgccctcatgtccttgaagctgtaacctccatcacgtctagagggaagggttaaaaccaaaaccttttcattaatagaaaaaaggtctctgtctccagatcttgggtctgggtccagagcacactcggacgccccctcggagcagggcctgtgcggggctgaaaaaagcctttacattttcttgaaaaaacaggtattttgtgtgcatatctagacttacactcacgcatatatgtccaaagtgaccccagtttgtgcctgggtcactggtcactgctgccccggccgccccgggaagcccaatggaggagcctggagggagcatgtgcccctgagggtggcggagctgggcactcgcgggccggcgggcggcgtggcgagcactcctgggccccgcctcctggcgcgctgccaggcaagccccgcctccccgccctgctacaaacggcgg

SEQ ID NO: 34965 - DNA, 221 bp, Mus musculus
  source 1..221: mol_type = other DNA
ccagcaaatgcaaaggagtggcttgttttaattttaagctagttcaaactgtacagattcagttgaaaccatttctatttcattcttattctaaaaggagagagagagagagagtgcaatatcgcaaactctcatggactccattgagctctcaagagtggcgcaactcggccgcgcgtgctgcccgggataggactctggcagagcagctgcacacacgg

SEQ ID NO: 34966 - DNA, 378 bp, Mus musculus
  source 1..378: mol_type = other DNA
ttccagttaagtgtgtctatggactgggtccggcgggggcagatggggggctccagaccgccctgccggcgcgtcctcacctggccacagtgcctgcagcacacctgcgggccagggcggtgccccaggacgcactccccagcaggctgcgtgggttccgccgatgcactgcagaagcactctgtaccccaccctctccaggaggcccagggcacctgagtaccgcggcgcgcagccagcgcgggccggcgcctcccggagttgcgcggagtggaccgagcgccgcgaggacagttttttttttttttggaacctaactgcagaaaatgcagtcttctatctccaggacagacagaatgatacatactgtcattaaca

SEQ ID NO: 34967 - DNA, 361 bp, Mus musculus
  source 1..361: mol_type = other DNA
tcagttttctcccatgtgggatcactatctcataagattttggtggaggagccccgggctaccttgccagcagagtgattccccacgggatccgggcctgacctggggcacaagccccttctgctccactcgagccccgggctaccttgccagcggagtcgcctgcacacaggattccacagatcccaggagtctggttcgaacaccagatatctgggtaccttccctgcaagaagagagcttgcctgcagagaatactctgcccacaaactaagagtgctaccctttgatttaaaaacatttctcatgatgatgatagaggacatcaagaaggactttcataagtcacttaaagaattac

SEQ ID NO: 34968 - DNA, 633 bp, Mus musculus
  source 1..633: mol_type = other DNA
atcctcagattcttctctaataaaatgatgatggcagtttctgtatgattatctatcagaaggcctagtttattaattatatacataagtatataattcataatagttcttttaatttttgaggtaacagctatatatataataaaaaaacagccttaattactataaagaactaaggatattttttaattcaagacctcataaagtgaaggaaaagcatttacacttttacacatgaaatattgtagcccagtatttcaggctatatctgctcagttaccctaaatatgattagcttcccaggtccactaaaatatgataaaatgtttttaaaatttctgaaggaataattccacaaaaacaagtattctaaaatttcttatacactataggaaattttgttacagaaattaaattccagaacatttatcaactataactgtttataaatgttcattccttaaattaaaaaccattcaaatattcttggcatatcttacctcctagatgttaagtatgggcttaactctcagtgtctcttaccatgttacaagagtgaacagattggatgagtcttacagacagagagctaaagaaatcttctctagatatctcccagaacagaactctgct

SEQ ID NO: 34969 - DNA, 649 bp, Mus musculus
  source 1..649: mol_type = other DNA
ttacagcctaaaatttacattttaatgtaaattaagaatgacaaccttttcttaaactaaactcacttaaattctgaaatatctttgttactgatttaatgaaatgactgtttagaatttgtggtattttagtattttagctggaaaaattaaagaacaataactgagtgttggtttttctaattaatttgaaccacagtactcctgtggtagttttgtagatcacgtggtacctaaaaattaaacagaaccttgtctgaaacacagattctaactaacatgtattttctggaaaatgtgctataaacgtatgtatccaaccgtctccagattgtttggaaacatctgaatattctgtatctcaaataaataaaactatagtttataaattttaagaactgccctgagatgtgagtttataggtttcaaacaaaactcattttgtttctagactgccatgtaagtcgcaaagggcgggagtgttcccgcagtgcccaggcccgcggggaagcggtgggcacccggcaccccacagggctgagcagcagagcgctccccaggggcgtcgtgtgtgaggcgaccagcgaccgcaggcccagggggcccgctcagccgcgagagacaaggacacgcctcagctcgggcccgc

SEQ ID NO: 34970 - DNA, 565 bp, Mus musculus
  source 1..565: mol_type = other DNA
agatcatggtgtcttttgatgagcagaaaatttaaactttaatcgttttaaaagccttacagctttaaaatttagacatagctcacttatttatttctgccttactgaatttcatgatttttgagaatagattttctaaaatatgtaaaatagcagccagttaaaattacttttatttaggttcaagtatgtttaacaagatcacaaaaatcctattaaatatctcttttgagaaaatgtatgcaggcagaccatcttccaaagtttgttcaataacactaatgatttttctgatccgaaggctaccttgacttcctttaacatagttgcttcaggtagtctcttcccacaggaacctgggaggaaaatgaacaggttacttcctcctcctggtactctttcaggctaagacttgatcttagttgtcaacatgatcgattttaaaatcatctggaatcagacctccagaagtgtctagccggctgttcccggcgaggcttacctgaatggggagacccaccgaaagcaaatcgaatgccagcctttcttgctttcacagctgaga

SEQ ID NO: 34971 - DNA, 381 bp, Mus musculus
  source 1..381: mol_type = other DNA
gagtctgtgtctacagagactgtgaagaggttggaattttgtaagttcaggaacagccagccaaaggctgaacatggccagggctatctggtggccttgaactcagaaatccgcctgctttcctttaaaagtaacatgaaatcatgctacgaaattagttttaatgatacaaaatacggaagcataagactgttatttttgcacaagtccttaaagtgtacaaaaaaaaaaatgaagcaattttttaattctttttattgttatatcgttgaatcaaacgagggaataattgagactcagcaactttaattttaccttccaacgtacttgtaagctgagaaagaattaaatcttcccagaggttggtccagaagctacgcg

SEQ ID NO: 34972 - DNA, 450 bp, Mus musculus
  source 1..450: mol_type = other DNA
tgatttggcaacttaacaaaggtttgttactacaatgtagactgacaatctcaatgcaatgtagtgagactccgtttggctaaaaatatatattctcacctgtaatttcagagttcagagaagctaccgtaagaccttttaaataattaaaggcattttgcacccgatcattctgcaaaatcgaaggcaagttcattaaaagttcccactttggcttcagattcagtcatcttaaatgaaaattgggagactctccaggcctctcgcgagtctctgaaatggaccgggttccgaccggacccagacctcgtcccttcttcggccggcgatccagggcgcagaaggatagagggcccggtccgtgatgctcagcagcccgacgcacacactctgcgtcaccgcgggccgcggcggatgatgaatcaggcggctcggcgcgccccttccccc

SEQ ID NO: 34973 - DNA, 404 bp, Mus musculus
  source 1..404: mol_type = other DNA
aactgttacatctatcagagttcttaaataaaatcagaaaaatcaatgtattaaactttattaagaagctgggtattagctacaagttttttgacaaaaatattgcagcttgctgttgatacaccttcagtcttaaaacctggataaggtaaatagatcccttctgggttcgattggaactagcaagcaatgactagattcgttaaacgtttagttatgaaataaacaaaaaactaaattctgagctactcagtgatttaaaagacagagcgcttgttttaaaacaaattctcttaaggacactagtctttctcacaaactttctcaaatctcgcgagacttcccacccccacgcacgaggagcgttttccgcgcggtgaccgttgatacgcggcgtcgctgcg

SEQ ID NO: 34974 - DNA, 618 bp, Mus musculus
  source 1..618: mol_type = other DNA
tgtagattggtgggagctcgtactgtactgcattctaccctacaggaaggtatgctgccaggtctttaaatggcttgagcactttgcccctgtaataacttggcagtaaagtgactagtggaatataaaatttggtgatatatttttcatttgaatctagcaaaatctaaaatagctttaatattaacctacattactttagaatgtcaacttgacacaagctggagttatcacagagagatgcgcctcccttgaggaaatgcttccatggggtgggagggtccagcccattgtgggtggtgccatccctgggctggtagtcctgggttctataagaaagcaagctgagcaagcggtcatgatgtctgtgcaaggatagaaaccctaacttagacagtaatatcttccaaaaatactctcaatattttacactttaagccacaaaattaaattgttaatattttgataaaattttgaagttaaacacaaaaactaagtaaactatgttatttgttatacttaaaaagtcaaggatgtctttaagaaattaagttctagtcaatcttttgacctttaatcacttgtttacgagttcaaaggttagaacagtgaaatgaa

SEQ ID NO: 34975 - DNA, 291 bp, Mus musculus
  source 1..291: mol_type = other DNA
ctgagcttgctggagaattcatcacttcgtctttatagagatgatttataactttgttgtttatagtttttatgaaacgggctttgaattaaactcagtcttggttatttaaaaatctgagcaagtcactctcttaaaaagtttttgtatataatttgcatctgaaattctgtttgccaataactatgaaattattcacattactaaccgctgagagctgacctcatgatttctcatcacaggatttgttttcctggcctatgactgaccaggaccttacttgtaacaaag

SEQ ID NO: 34976 - DNA, 242 bp, Mus musculus
  source 1..242: mol_type = other DNA
ttatttaaaaatctgagcaagtcactctcttaaaaagtttttgtatataatttgcatctgaaattctgtttgccaataactatgaaattattcacattactaaccgctgagagctgacctcatgatttctcatcacaggatttgttttcctggcctatgactgaccaggaccttacttgtaacaaagatccctctgctggatagggctcgctctgccccaaccctccctgtgagaaatgaga

SEQ ID NO: 34977 - DNA, 577 bp, Mus musculus
  source 1..577: mol_type = other DNA
agaacaaaagtcctataatgttatgctatttttcccaatgcatatgttttaagtatgaataatgcccttagtctatgtctttattgctcattgttagtatgtaagtaatccataactacattgtacttatgttgcattacgtaatacttacactagtattcatgttaaagtcttctttgaaactttctctgttgaaatgtgaagaattgaaaaaaaagtattaaacaaaacatgttatatgttatatcttataatgaatatacatcttaaaattttaaaaaatgtttcataaaagttttattacagaactatagtcaaatagtctataagttgtttttagcagactgcagatatctaaaacaggtcattaaaaacaaaacccccaaattccttaagtttttatgtcattatcaacaagactttttataaatcatgaactaataactaatattatttcatgaaaatacatgtaccatcttccccagaaaaaaaataaagtttatttttaaaaactaaaaacatcataatctctggacatttcccttctgtttccgatgtcataatgtcctattgagac

SEQ ID NO: 34978 - DNA, 467 bp, Mus musculus
  source 1..467: mol_type = other DNA
ttacccctatgattaaatgaaaaaaagaacaagtttattttggccagcctggtcaacagagtgagttccagaacagcaacaaaacaacaacaaatcaggtttattttgctggttccttaaagaagtcacagtctgatcgagaagacaatgagtcatggattctctgatttcttaaccgttaagttctttgcttcacagattcccagcaatgatttgtatgtatatggcaaacactcagggcagagtttaaaagatcaatctatttctgagtctatttacttatccataaaataaaatcacggtggcgggcggggcgggtaggcgcgcgcgcgcgtgtgtgtgtgtctctcgcctctgtgagttagcccacgtaagacgtgcggagttccccggaagtgcgccacgccaaggccccgcctccggccctgggcccgcccccggtcccgccccgccgcatctcgcgggat

SEQ ID NO: 34979 - DNA, 278 bp, Mus musculus
  source 1..278: mol_type = other DNA
cgcaggcgatcgggtccctcggagcgaacaccgccgcagatccttctccgaaactaaacttccaagcatactctgtcccccggaagtgcgggggtgctgtgtgtgtgtgtgcccgcgcgcgggcgcgcgcctgtgtgcaaccttcactgtccagtggtcctgccgaccggcagcacctcatcccgtgagccttcgcgggcccagagaagaatcttctagggtgaggtctccatggcgacgggtgggcccgcccccctgagaacgacgcaagccaatgg

SEQ ID NO: 34980 - DNA, 386 bp, Mus musculus
  source 1..386: mol_type = other DNA
caggaaagttgctggccggtagccgctcgcctatttcctcgcgcggtcgggagccgctctcgatgctgtcagcagcgcccggatccggagtccgcggccgaccgggttggccaagtccgtccgtctgtctgtctgtctgcctgagcgctctcctgccaggctgtctcgccacactcagtgccattggcttgcgtcgttctcaggggggcgggcccacccgtcgccatggagacctcaccctagaagattcttctctgggcccgcgaaggctcacgggatgaggtgctgccggtcggcaggaccactggacagtgaaggttgcacacaggcgcgcgcccgcgcgcgggcacacacacacacagcacccccgcacttccgggggacag

SEQ ID NO: 34981 - DNA, 440 bp, Mus musculus
  source 1..440: mol_type = other DNA
tcaggaaactcgggtcggaactgcctttctaaggcagagactgactcacaagtgtagaggttatactggatatgatatgtcacagacatatatgctggttttagacactgtaaacctactaaatagtatttgtaactcatacccagactctctagcctgagacttctgaggggctaagtctcaatactgaggaataactgaataccagtactcgcttgggttttcccaagaccactgaaacaaagaagcctcggcttccagaaaagtctgctcttctgtggtccagtgataggttgccttggcaagccaatattccctcaaagatttttgtcctggacctaggagctggagtcctagtactccttgggaaccagaacaatcctctggcacattgagcaatctgcttcctttcccagcctggggcaagagtctgcactgcc

SEQ ID NO: 34982 - DNA, 413 bp, Mus musculus
  source 1..413: mol_type = other DNA
aaatgctgagatggattttagccggactacacacttgaaattgttcaagtgcacgtaagacagggaccacctgtgtgccttccatttctgctgcaagcactaggtcctcagagtctgcagctctcctggaaagttgtctgcaggaagtagacagggcttcaacctctctttaagcagccaggggcttgactgtaatgacatggagaaagctgtcatcactgctaccaattactgcctacttactatatactagatactattctaagccttattaaaacacttgttgggactgttactatagaatttcaattctgtgctgagaacactaagacaagttttcccccagcttcaagcaggaagcaggaagctatgctggacccaagcacgggcttgggtgtggctcacaccaactt

SEQ ID NO: 34983 - DNA, 465 bp, Mus musculus
  source 1..465: mol_type = other DNA
tatctggagtcttgtatccattgcaagatgaaagaagacaggaggtcctgcctccctggacttccaacaattattttacatgtttgagcaaacagacttcagcaattttgttcaaatttcttcctatgctatgaataaagaatccttgtctgtctgaaaagaccaggagtatgtacactgagtccaagcacaaagatgtttttgtattaactaaagcattatggcaatgtataaagcatgcagtgcatttagggctgagtgcatggagtcaacagcagtgcttttcaaatgcagagtattcttaaaatcgaccaaaatatattagatttcattatctgcttctgaaaaacaggaacttgtccagagccccggctgagcttcgtagcttagccaaggcagggtcgccccagctgtgctcgaaggagtgggcatgggtgacccatggcatcagcctccggcacaggg

SEQ ID NO: 34984 - DNA, 367 bp, Mus musculus
  source 1..367: mol_type = other DNA
atagtgtagatcttaacagttaggttcttaactgtccggatgctgagaataatagttcctcaggttgttgtgacccaaccataaaattatattttttgttacttcacatatctacttttgctattgttatgaatcataatgtaaatatctgatataactctgtgctggatgacggagagagatcgatcactcgtttactctcaggtcatgtggatactagtcttaacataataaacacactaggtctgactaaagtcgccaaaccggttttggactctcagatatatccaccacatactgtaggttggctaggttagctttaaaatccgagcagggctcacaagtactggccattcacggtgcccgt

SEQ ID NO: 34985 - DNA, 346 bp, Mus musculus
  source 1..346: mol_type = other DNA
tctgtcaatcaccgagagcataatctttgatatatctttccttactgtagcaaagcacaaatgaatcaccctgtgctatttcacagtttctgctaaacagtgctaggagaaagatctacttagtcattgtttaggtcatatatatttgctgtgatatggcatatcatgttccacttctgacttttcacattatgtttaaacatttcattaaactaaataaatcagctgtggataatctatctatcttttccctgactgtcctggaacacactctgtactgtagcaaagcatcattataaacagctaatgccaattgacagtcacaactggtgttaaatgtcagcag

SEQ ID NO: 34986 - DNA, 367 bp, Mus musculus
  source 1..367: mol_type = other DNA
cactaggccaggccttttgctataggtgaggttacttgacaaggggtgagacccccaatcataaaattattttttgttgctattgcataattgtacttttgctactgttaaaaaaatcataatgtaaattgtaaatatctgtattttctgatgctaatgtcatgacctgatagtcactccagacatgctgcctgtaggtttaaatcagaaattccatagacttgggaatctaagaaacacttgaagattttcttttgatagaagacagccttttactttaagaggaaattttctcaccatcttagagcatgtgggagactaagactgaagtgcgatcactgttaaaagaggacactgagttgagttt

SEQ ID NO: 34987 - DNA, 196 bp, Mus musculus
  source 1..196: mol_type = other DNA
ttcagtcacatgactgtttcagtcccatgttactgtcaaccgctggctcagagactcattctctcaccagtagtagaaccagcccttccatggcctgtatcctgcccatcatttcagcctttactgggcccccttacaagttgataggtatggaaacccaaatcccaaggactggggacttcggggagtgaaggta

SEQ ID NO: 34988 - DNA, 574 bp, Mus musculus
  source 1..574: mol_type = other DNA
ggaaattccaacaggttagaaacccgtaaacaaaaaaagccaattcttttttactttaaaaaaagaaaggtattaatctcagctgtgtctacaccgccatgggtgctgtgtgggcccaaaaggacagcaatctgggaaccgaggctgccagcgcctcctggtcacctgtgcgaggcggagctctcgtgtacgtggcagccggaggctccgtgctccgctcgccccgcaggtggcctcgctggcaagcgggctgtcacacagcggcagctcggactgtggcagcggctgcgggtcctccatggtccgagaacctcgacgccgcgctcacagcgacggacgcgcctccgaccgggcccgcgtcaacgacctccgcgcccgccactggagctcggcggccaggcctggcgcccgcgccactcacgcgcgaagcctcacggcgcagacgtcgcggcgcgaccgccccctcgcccaccgcgtctgtcccgcgtcccggcacctgagccggccccgcccgccgatcgcacaccgcacgctgagtgacctctgcgagcacccggaccgccaggcgaagcgg

SEQ ID NO: 34989 - DNA, 416 bp, Mus musculus
  source 1..416: mol_type = other DNA
atttttaaaatgaaactgatttataacagggggtttataatttattgtccaacagttttgctcaacgtttaaatataaatcttaatacagagtatgaattgatggattaatgaaaatattgtagccccttccaataatgacacaatttatcatgttggattgccactttccagattttatggacatcattattattattttttaacatagaaacgatttttgaacactatttaattttgctatctaaaaatttaaaatgaatccttaggaaacacgtttcgcctctgagccctccccgcttcgcctggcggtccgggtgctcgcagaggtcactcagcgtgcggtgtgcgatcggcgggcggggccggctcaggtgccgggacgcgggacagacgcggtgggcgagggggcggtcg

SEQ ID NO: 34990 - DNA, 385 bp, Mus musculus
  source 1..385: mol_type = other DNA
aaggatagataagatttctacatgtttattatactggccaaactagactgcacattttctacatgttctttttctgtccacagaaaaaaagtaagtaacagaacctatgaccacttcaattttttatttatttgcactggatacaaaatcatatgtaattaggtggtatatccaattaaagtatgtgcataagtgcatacttataaatgtgagtgtttgggttattcattaaatagcttgataaatgcatactataaacatgggtagattaaagtttttaaaacctagtaaaatggtattttagaaatccccaagtttccaagtattgatgattctaatctctcgcagagagcactgggctgtctaattctaggtctcagggcct

SEQ ID NO: 34991 - DNA, 273 bp, Mus musculus
  source 1..273: mol_type = other DNA
tgctactgataattttcctggagaaactctagtcggaagaacagtctcaggacacacacacacacacttacttttgttttaatttttgttcttttgttgtttaaacgagaaagcacatgagaaaacattgatcaaaatattttgtttacaattctcaaaaacaagcagaacattttaaatgtttgaaatgttttataaaaaggaaataaaaactttccatggtagtcttacttctcaggaaggttgccttctggcctgtaaatcatgactctg

SEQ ID NO: 34992 - DNA, 217 bp, Mus musculus
  source 1..217: mol_type = other DNA
ttagatattttcttcatttaactttcaaatgctatacttgtagtcagcagtataaaccacagaagtactcatgtcctctggtgtctgcaagtgccagccatcacaagcagggtcgttattgactatgcccttccaggaacagtggtttaatatgaattcaggattcagacagacatcaacatggctggcctctgactgtccaggaactctgtatcat

SEQ ID NO: 34993 - DNA, 422 bp, Mus musculus
  source 1..422: mol_type = other DNA
tcctcagagggaaagacttattgactgaaaaacaatctatcttagactgccttttagtattactgttgttgttgctgctgctgctgctgctgctgctgctgctgctgctgctgctgctgctgctggagttttttgtgacagtgtctcactaagtagttctttgcatccctctgcctacagagtgctgggatttgctcaattattattttaaatttttattacaatataattacacccctctttaattgattatatatacatatatatcacatgaatataaatgtatatgggttcaaaggctcctgtctggggaagactattttaaaactggtccccactagagctctgtgcacgtgatcaggggttctcctgttctcgcagattggaaactactctcagaagctttgtcacttcctgcgaga

SEQ ID NO: 34994 - DNA, 395 bp, Mus musculus
  source 1..395: mol_type = other DNA
ctggggtcctcagagggaaagacttattgactgaaaaacaatctatcttagactgccttttagtattactgttgttgttgctgctgctgctgctgctgctgctgctgctgctgctgctgctgctgctgctggagttttttgtgacagtgtctcactaagtagttctttgcatccctctgcctacagagtgctgggatttgctcaattattattttaaatttttattacaatataattacacccctctttaattgattatatatacatatatatcacatgaatataaatgtatatgggttcaaaggctcctgtctggggaagactattttaaaactggtccccactagagctctgtgcacgtgatcaggggttctcctgttctcgcagattggaaa

SEQ ID NO: 34995 - DNA, 304 bp, Mus musculus
  source 1..304: mol_type = other DNA
gaagacagcttgttttctgcggtactagcctagatccaaatatatgcataaatatttgtgaaaaaacatggacatcaaattcactaaattatatactaaccctaaaagtttctgtgaagaatctgtggattcacttaattcactgtgaatagcactcaaagctggtgagctcttataagctgcccagaaacatgggctgatactgttcctgtttcagaaaattgggttgcatgcaaatcacaagcctagaaccagagaaatactttgtttatgagcaaggttcttaccaaaggctaagacttgg

SEQ ID NO: 34996 - DNA, 461 bp, Mus musculus
  source 1..461: mol_type = other DNA
acaggcacttttaactgctcaagttcctgagtatttgggtgctaaaatctaaatgggatctttatactattccatctaaagctaagagactattattaaatggacagaaaatcttaatagagttggaagactgcatgagaatttcaaaatgctatgttctgaacatgtattgtccatagtaattataaactcatagtatctgtgtgcataggactatacctaacaatgcccagtcatggataggagaagaacatcattactcatgtgagctcattctcagtcataatgtaaaatttatatatgaagaactgccaaaggaaataatttacttagtaaaagaccaccctgaataacttataccaacttcatgatcctaaaatgttgagtatgaaaatcataaacctaggaatctccctgtcatccaaaacagttctttataagtaagcaattatttctggtaa

SEQ ID NO: 34997 - DNA, 517 bp, Mus musculus
  source 1..517: mol_type = other DNA
atacgtatgcgtttgaggcattgaaaaattttgcaagtactctctttagttttctgtcggaaagtttcaactagagatgtcacaacacagtgagatgaagttgatacgcaatatctatttcttgatttacatgattaaagcattagagaagtggctcagatatcaaaagatttctcataacctctcagttgtttacaacttggtggctttgaataaaagttttttttttcaccactttcatataaaaactatcagtgttaacttttaattttaagaagtgatgctggaagtatttttcatcataaaatagctgttttttttttttaaagtggaagtagtcttttaaagacaatgctaaaacttatacccatattttatcctagtgtgtccttattatttagaaaaaaaaaattaaaaagcctggaataggtgatgacctcgcaaactcatttgccatacaaattgtttacgattcattaaaaagcaaaattgcatatcccggagctggcagctgagg

SEQ ID NO: 34998 - DNA, 361 bp, Mus musculus
  source 1..361: mol_type = other DNA
ctccatcaggtctgaaagtgagtcactagatatgcactcactgataagtgggaagaaggaagaccaacgtgtggatacttcattcctccttaaaatagggaagcaagattttgctgaagggaccctgatatagctgtttcatgtgaggctatgccagtgcctggcaaatacagtaacccatgtagcagaagatgacctagtcggccattatatgccccatacagattgcatttaaaatgtaaataaagaaaatatctaataaaaaaaaagattcacatacattatatgttactaatcttacaatgtttatatttatgttatatatttatattatttataaatatatataaacttatacata

SEQ ID NO: 34999 - DNA, 658 bp, Mus musculus
  source 1..658: mol_type = other DNA
aaagacgcacccttgaagagtgtgtctggggaacaggctcagatgttagtcctgggctcccatttggggatacaaacatactctttcctaagggggtttcacagttttccttctcagtatacagaaaaatgtcccagctaaaccactgttgtttctgacgtgacagagtttaaacccaccagctcctgggttctgggagagaagagcgttcgctcatgatattcccatagaaagcttcgcaggagagattacaatgcttttgagctttaccgcatttggaaaagttaccaaggtctgattttttacaagaaatttgcatacatgcaaacttctctggggttcctagggagcccaacccgcggcccacgggggtgcggggcgccccgacaaagttgccccaatcctctcccgacgtccgcggagggctgcggcgcgggtgggggcgcccggaggacacgctgaaaaaaccgctccgcgccgcgttcccggggaccgcgccgagcggggcggggggcggggggccgcgggaggcagcgagcgcggagcgagcggcgggcgggcgggcggccctgcaggctggggaccggtgtcagcgccgcagccgcccctcccccaccccaccccacccccacacccccgcggcggcggcgcgagcggg

SEQ ID NO: 35000 - DNA, 656 bp, Mus musculus
  source 1..656: mol_type = other DNA
gtttaaacccaccagctcctgggctgggagagaagagcgttcgctcatgatattcccatagaaagcttcgcaggagagattacaatgcttttgagctttaccgcatttggaaaagttaccaaggtctgattttttacaagaaatttgcatacatgcaaacttctctggggttcctagggagcccaacccgcggcccacgggggtgcggggcgccccgacaaagttgccccaatcctctcccgacgtccgcggagggctgcggcgcgggtgggggcgcccggaggacacgctgaaaaaaccgctccgcgccgcgttcccggggaccgcgccgagcggggcggggggcggggggccgcgggaggcagcgagcgcggagcgagcggcgggcgggcgggcggccctgcaggctggggaccggtgtcagcgccgcagccgcccctcccccaccccaccccacccccacacccccgcggcggcggcgcgagcgggcggcggccgtgcggtgcggtgcagaacgcggcgcaggcgggcgcgcgggcagctcgcgggcacccggccggccggcgcgggagcgggaaagggtgcgctatgcctttaacgcccgcgtacagtagacagtatagtggagtggttcagcgcgtggagcggcaagagcg

SEQ ID NO: 35001 - DNA, 457 bp, Mus musculus
  source 1..457: mol_type = other DNA
actacccagggattgaattcatttgtcaggcagatccactatataatgtctacgcaatctagaattgcacttgggtcacttctagatagtctaaatctaaagcctccaggatcaacactggtgcccaccaggagctggggctcatcagaaggagcagtttctgtctccttgtgagggttctcagggaagctactagagaagactcccaaacgtgtatttttttatataattattcagttttttaaaaagtgtgtgtgtatgtgaaaattttttgggttccagggattgaatttaaataattttcaggctccggaatgggcatgtttttattattattattattattattattattattattaaagtttccatgcttgctttggcagtacatatactaaaaaaacctcgctgatgtagctgtgccaagttaggcccctttaaggcccttccttctcta

SEQ ID NO: 35002 - DNA, 494 bp, Mus musculus
  source 1..494: mol_type = other DNA
attcacaatactacttgaaaccccaaagggattagaggtgtgcaccaccacccagccaatagtatgttgaacaggacagatgaaaatgcatatcttctctttcttcttacaaggcctaacaaatgttatttccctgaaacataaccagcaaatgccctagtgttgctgttgctatcacagtgcctaatagcacatttattcagtaagatatctgatgattgttgagtagcctatattaaataatgtaaatgcttatcatcaaaattctaaataagaaagacactcataattacccttagtcagcgctggtggcccacaactctgtacctggacgcaaaggcctccggcctcctctccagggctggtcgccctcgtcccccggacccttcacaggcgcgcagacgcccgggggctcgagccccgttcgccccgccccgcccagcctccggcgaggtggagagcggcccaggtgaggaggcggccgcacttccgtc

SEQ ID NO: 35003 - DNA, 414 bp, Mus musculus
  source 1..414: mol_type = other DNA
ggatgtcatcatgatcttcgtggcaccgcccatgcagtgtggccctgggctgacaaggctagcttccagtctgccctagtagtgccaggctgtacctggaccttgtggccccaggtggaccttttacaaaccactcataactctagttttaatctgaaaagtcaaacttgatgtatatacatgcatgaaagcaaaaacacctgtacacattaaaaatgatatattaaaatcttaaaaattcttttcaaatgatgggattaaaaaacaactctcagcctttcttctgttgaattaaaaaaacaactgtgtacttctgttgaattaaaaaacaacttctgttgaattaaaaaacaactcggaatttcacttgcttcagctaaggaaagggggcgggggaaggctctctctgcacct

SEQ ID NO: 35004 - DNA, 502 bp, Mus musculus
  source 1..502: mol_type = other DNA
ccttttacaccactcataactctagttttaatctgaaaagtcaaacttgatgtatatacatgcatgaaagcaaaaacacctgtacacattaaaaatgatatattaaaatcttaaaaattcttttcaaatgatgggattaaaaaacaactctcagcctttcttctgttgaattaaaaaaacaactgtgtacttctgttgaattaaaaaacaacttctgttgaattaaaaaacaactcggaatttcacttgcttcagctaaggaaagggggcgggggaaggctctctctgcacctagaggagttctcccaccccgagctagctaggctgttcacacgggcttgatggtccagcctatttgcatccacatcagcaagaacatacagccttccagttgttgctttcttatttcttttcctttctaaagctatagtaactacctcacagaacactttagtgttggcatctcatgcagcgcagcaggtcctgggagcgatttaagtca

SEQ ID NO: 35005 - DNA, 431 bp, Mus musculus
  source 1..431: mol_type = other DNA
tacatatggacttgtcctatttataattaagtgaaataagtaatgtttataccctagctatatgattagaagctggtaatactggtttcctttgctgtagttcaggtgaatttaacagaagtacacactttacagtggaattgttgagcagctttaagctacatttaaaattgttttacctatagtttatacagaaagtgtaaaggacagacatctttgcacattgccattaagttttcatcccaaagctgaattgtatttaaagtgtcagagacactagtgagtcataactaaggcattatagacaaaataaatagttgtgtttgtattgtgcacagggtggctggtgtcacagcctgcagcatgcagtccctaagtatgcagggtgaccgagcgtcagggccagcagcagcctgcagcatccaaggatc

SEQ ID NO: 35006 - DNA, 346 bp, Mus musculus
  source 1..346: mol_type = other DNA
agttcacttacacgaactttaaatgaggccacttaaagatctttggttttgtttttaaagagaagtctcactacaatgcccaaaggaaccccagttgctatgcacaaaggggtactcctgccttcagggtagctggaggtctatagttggaaaaccttgcaactccactatctagggaggtgaagatttttctcaaaacaagtccctgaagtcaggacaggggtgctggctagcgcgagtatggcttctgggcgtgggccaccacgccttgcgggctcaggcccccactgagtttgcaaacttagggaggagtctgcatgagacccagcgagtctctcctgcggtc

SEQ ID NO: 35007 - DNA, 406 bp, Mus musculus
  source 1..406: mol_type = other DNA
ccaaaccgggtgaggctgtgcggctgcctgtgggtcattcggtaccggctcgcgccagaacccgttgaagctccctgtgcactgtctagctaaggcagtgctcgaccgcggcttcctcggtaaactggacgcccagcgggcgccgagcagctagcaaagcgctccgagcgtctttggtaacccttccggagagggcacgccaggagcgggcctgcaccggggcctcggcccagaagccacaccgcactggagcgccaatgagcttgcaaagagccgctccagggcgccgaaggggcttgtcccagtcacttaatgttttgagcgagcgagtgagcctcctgcgcgccagcccggcctcctgcgcagcgcgcgcctctgcgaggacccgcgcgagctgcccgtgccg

SEQ ID NO: 35008 - DNA, 360 bp, Mus musculus
  source 1..360: mol_type = other DNA
tattgattaagtaagacctatctattccttagcaaataaatttagttatggaccgaaaatgtttatatttgaatagtcacttgatacaagtctataatggaatctaagtctagactccttgttaaaaccaactaattcatttacgttgcctacagaggccagttccgggcccaggccctctggaagagcagccagtgctcttatttcacagacagttacagaaactagccctcaagcctgtggccctaacaattatcattgtaaccatgtacgctatatcacttataatggatacaactagtccttctgagtaattcctttctgaggaaatgccaggcacagcctgcagcactggaattc

SEQ ID NO: 35009 - DNA, 526 bp, Mus musculus
  source 1..526: mol_type = other DNA
actgtctagctaaggcagtgctcgaccgcggcttcctcggtaaactggacgcccagcgggcgccgagcagctagcaaagcgctccgagcgtctttggtaacccttccggagagggcacgccaggagcgggcctgcaccggggcctcggcccagaagccacaccgcactggagcgccaatgagcttgcaaagagccgctccagggcgccgaaggggcttgtcccagtcacttaatgttttgagcgagcgagtgagcctcctgcgcgccagcccggcctcctgcgcagcgcgcgcctctgcgaggacccgcgcgagctgcccgtgccgctgcctgcgctgtttaaactgcagaacccgttaggccccgggaggaactaccgttccagctggttccggagccgagcgtgccgggggcgaggggcggtcgcgcggcggctcgcgcctttcgcgcctctgcaacgtggagaggaggtggacgccacctccagccgcgacgctggcgcgggcgggggttcactcgcgggggt

SEQ ID NO: 35010 - DNA, 635 bp, Mus musculus
  source 1..635: mol_type = other DNA
tcttagtaattatgttaatttccccaaatgtcttgtattaatactaaggataaccacccataatttaagttcttataatttttacttctaatatcaattgtagacaatggaacatttactcttaaacatactattaatctttacttttgttaaatctttttaaattttgtagtaagaaaattgttactaagctcacaaaccctctgctactgggagaattggaatttaattctagtttatactcaaaccttcacatgcatgtgcatctgtctacatatatatacacacacacatacatatatgcatgtctatgacatatatacatgaaaaccatggaaaggtgcagtagtctagtgacaagtgaatacatagcttggggagtggttgctgtttccagataaacaaactacaaacacttaatttttcctcaagctaaggaaactcacacttaagtttaatgacaaacttaatccatcaaaaactaaggtttatttgtaaatctcttatagtaagaaaaaatttaaatgatcttttaaaaacaggtaaatacctttatcctgaaagaataattatcaatacagcaaatttaactattttaacaattttgaaaattacctcctatcaaccatgcagca

SEQ ID NO: 35011 - DNA, 399 bp, Mus musculus
  source 1..399: mol_type = other DNA
tctgtctcattaacatgatcttattcaactttaaatcaggtcatgaacgtgcacttcctatacacttttatgaaatacgaaatgcttaatgaagttcccctctgtaatatctttatatttaacataaataaaaagctatttcctttaaaccctttatacagaatactgtataaacacattgtatattttgcaaacacaagttaataaagttagctaagtttgtaatccatactgttgaaaagagaatatattcaaatatttaagcaaagcacatagccttacttgtgttattcattaaataatgctcttgagtaactgtctcaagaacagaatgtcagtctctcgcagaacggggcgagggctctgcacatgctcagcaagcactgtgcatatacaaca

SEQ ID NO: 35012 - DNA, 220 bp, Mus musculus
  source 1..220: mol_type = other DNA
attgagtgaaagactgtctgtggtgtgtagctattgctgctcataggggatgaggactggccaagggctcgccagtgcgaagagcgcaggagccgcccctcgggctaagcagccgctcaagctttggccgtggtcccgggaaagaggagcaagggggtggcttacgggctcgctcccgtgagcgccgctgggagcgcgcgtgctcctcgggctgtgagtg

SEQ ID NO: 35013 - DNA, 536 bp, Mus musculus
  source 1..536: mol_type = other DNA
tgttctgcatttcaaaatatgaaacaaactataaaggagcagataccttgttatctatgctaataagtgaataaattgctctagtaattaattctaggcaactgttttcatgagactaacatgaaatgatctcttattccaacactaggggactcaattctaatcgtgaaacagttaaaattcaaagaacatattttgtattttactgaaaacaatatattagtagaattacatgttgacatcatttagtatacaggtcctgtactgtaattcttaacatgaatagtagacagactgttagtcttttaatccaagtgggcttggttttaaggacccagagctctgtgcatgcagacgctcaccgtgcgtgtagttacagttacgagggacagctgtaaatctaacttgggcctgctaggctctgagcttgcagcccgggagcttagggtctccgacagggcttcctgcaggaccgcggcctgcggaggcttcggtgtgctgtgctacggtggccgcgcggggccgcgggccgcacg

SEQ ID NO: 35014 - DNA, 571 bp, Mus musculus
  source 1..571: mol_type = other DNA
aactgcaaataaggtatattaaattcttaaaacatttagttttcttagtttttctatttatagaacatcaaaaggatgaacagttcatctgatggatatgcatgtacgcatacatatgaaatgagaataactgtacaagagaattctttacagggataactgttcttggagaaaagggtgaccaagggcaagtcacagcttctctgagacaatttttttctctctaaaatggagctaaatctacttcaaagagctgttcaccacctttgtgggagagttctttctacaaagaagagccattgtttctccagctagacccgcgcgcgttcggcggctacggtcacggccccgtcgtgggtcttcccggtcgtggcggcagggcagcgagggctcgcggcccggttccacacccggcgtcgcatcagctcccgcgggctccggcggccttccagcccggcctccagccgggattggcgcgcgaggcgaagggggcgggggcagagagaggttcctcgtgcgcgcctcctcggcgcattacggtaccctggttccgcgctccagcggccggccc

SEQ ID NO: 35015 - DNA, 281 bp, Mus musculus
  source 1..281: mol_type = other DNA
ctggggcagggatctgatactaccaagccactaaacagcagtggtatttttttaaatgcctgcttgttcttatgactgaataatactctgctgtgtgtagaagaatgagagttttaatattatcactaggtcatattttaggctcccactacaagtattacaagagagttattttcactgtcatagacaataaacaatcactggcacttaagttatgactcagaaagtctggcctttccatgatttcatgtttcttccaaaaccattgaagtcagccagtt

SEQ ID NO: 35016 - DNA, 245 bp, Mus musculus
  source 1..245: mol_type = other DNA
gcaatttaaaaacatttttaaggatcttcaagtgctccttccaaatggggttattctcacatgaaaatccctggacagaaatgttccagaattctcttaaataaatatataattgcacccctagggctcggaaaccaccttttatttaaaattctagcccaagtctagatccgcgaacctatggcattgtagcttatctgttgcgaggctggcatgtccgactccccatacggggtgacacctca

SEQ ID NO: 35017 - DNA, 307 bp, Mus musculus
  source 1..307: mol_type = other DNA
gtccgctgtcacagtaaacagacaggccaaccctggtaagagcctgcctggcttgttcagaacttcctgtgtagccctggctttcctggatagaccaggctggcctcgaaaaaaaaaagtcggaggatggcttttctgtcttttagagtccttgcactatgatcgatagatgaagctctgctctccagttaaagagctagtttctttatatagaccatttgtgtcagtcggggagactccgcccctcccctcttcccaggcagccggactttggcgaagtgggcgggccgtgggcaggccctgggcc

SEQ ID NO: 35018 - DNA, 403 bp, Mus musculus
  source 1..403: mol_type = other DNA
cgctaactgtgctttatatagcctatgtagggtagccgaaatggtcattttcgtaatcacattattggggttggtaacttaaagatgacccaatacactttttacttttttcaagcttatttttataagtaagaaaagtaaatcacttattactgagttgctaagtgataatcttaagaatctttcagtgcctgaaatccattcagtccatgaaatcttaacaagcatttaaaaattctacaaattacagagaaatgtttacttaatatactctttcattcttagtcattaggttgggaataccaagcatcccgacgccctgtatactctttttagagtgaggtgtcaccccgtatggggagtcggacatgccagcctcgcaacagataagctacaatgccat

SEQ ID NO: 35019 - DNA, 537 bp, Mus musculus
  source 1..537: mol_type = other DNA
taggtacacatggcatacacatatacacataaatgaaaataaaaatgtttaaagtgttttcttgagagtaaagtctgtttaaacagacagtgtcatatgcctgagctacatgatcaaggccagtctgggttatatagtaggaccctatccaaaataattaatcatattatcctattatttgtctaattattagcaactgatccaggtttatatacataggaaaatatatctatcaactcctcattgttctgtatttctcaaaaatgtggtgaatccctagagtcatttttctataaatttaagaggagagcgctggagatgcccctgggcattgcccatgctgacaatgagcagatcggttggttccgctagctgatcattcataattctgtgggtctagaggtaactgagatcccgctcccattggctctaaacaactttagctgcagatggccccttggcttccagagcagaggctggcagctctctggtgtctgaaaccaaagtctgttgtaggcagcgctccggggcactctg

SEQ ID NO: 35020 - DNA, 400 bp, Mus musculus
  source 1..400: mol_type = other DNA
ccatggacagattctgagtatctttcttgcatccttggaatccaagtcagtctggcatacagtgggtgctcactttatatgatccagggtgttcttggtactgaactcccaagagcatttatgaattacaaacacttatgtgatataaaaaatattaaaaagacaaactgaaatattactctgttcatgttcagaaagatgaatcttctcttaatgtcctaaaagaagcagatcagatgaagaagacacatgagtcacttgtatttgggctcccccttaagcaacttttgggaaagaagaaattaaatgggctgtacatgttcccgggcttccttccccagcgatagagggcgctgggaccccggcctgggcccgcctctgccattggtccgggctgggg

SEQ ID NO: 35021 - DNA, 325 bp, Mus musculus
  source 1..325: mol_type = other DNA
ggaaatgtaaatgagttaaatacctacagcagtaaaactgtgactccgactaatatagaaattggtaaccggctaaaagattcatgatgtctgtgcaggaatagaaaccccattgggaagcaggaatggttttagctttagaaattggaattccaacttcagaaatttgggaggtcatatatttttgttacctgacagtcaaagagagaagcttatgataccccctaccccactggtgtccgggtgcactgaggggtgggtgatgtcatcctgaatgctgacttcatttctattggctaagaggacctacagtccggtagctgat

SEQ ID NO: 35022 - DNA, 383 bp, Mus musculus
  source 1..383: mol_type = other DNA
gctctcagagaggtgaccttcagctatttgttgcaactccctaatcggagtttgttacctgaaaattcaggatcaagatacaacacactgaatgtagacctcagagtgttactaaaaaaatgaggaaagggagttaaagctctaaagacagttgctcccttcctaggtctgggtcaggcagaaagcccgagtcccgagatctcctgcacgggccgagttgggaaggtctcaaatgatccccttctcaggccagaagggtcctgtgcaagcgaggtcccccagtatcccgggcccccagcgtcccagggcgtcgccccgtgcaaggagggagaggaggggcgagcgcgggactttccccgcctccctcctctttccataaatca

SEQ ID NO: 35023 - DNA, 330 bp, Mus musculus
  source 1..330: mol_type = other DNA
aacacttaagtagaagggtatttattatattttgtagatctcactttaagatttgtgttgcaaatacaactagaggaaaatttgttatgctcaggtcttactaaataatacagaatatttttagataaatctcatatgttatttttcatcgaaaacttaactttgccaaatgcgcacttctactctggcctgcgcagtggcgcctgaggccctcggatttgagaggcgaggccgagcgcggctggatagggcgtgtctccgggctccgcccctcccgcgtcggcggctgcggcgcctcccccgcccgcgcgcccttgctccgcgtccggc

SEQ ID NO: 35024 - DNA, 270 bp, Mus musculus
  source 1..270: mol_type = other DNA
tagtgttctgtgaatctcaggaaagcccggagcagggctgtcttcctctgaactaagagttcttgtctcttttcagacacaaacaattaaggctaaaccttgaccagacttttcagctaagcttgtaaaaattaaccagagtgtacaaacccaagtgactgtgctgttttgagagttgtgtacacaacagaacattacaagaaagttccgaaaggccccttgttttgttttctgaaatgccacttaagaaactactcaggcaaacttcat

SEQ ID NO: 35025 - DNA, 235 bp, Mus musculus
  source 1..235: mol_type = other DNA
tagtctgaggattatctagattagggtaatggagataagatcggactggatcatcacgacttctcatcatgatggtctaaactcttttttccttaaattacttttgtcaaatattttatcgcaacaactgacaaagtgactttcgttcttgctaggcaagtctttccagaaccatcctacgcgagcctgggcaggcggggactccaaggtccggcgccggtgcgtttttagagcg

SEQ ID NO: 35026 - DNA, 474 bp, Mus musculus
  source 1..474: mol_type = other DNA
gcatcagatcctctggatctagaattagaggacccaggttctctataagagcagtctacactcttaactgctaagtgactgtgtgtacatgtgtgtatgcacatgcacatgtacttttgaagttattgttgctgaacctagttcttgagaacaattcattgttaactccgtaggattttataaaaattaaatgaagacagaactcacagagatcagcctgcctttgccttctgagtgctgggataaaggctggcgccaacaagccttaaccagaaagaaagttcacttgtgcttactgtgtgtgtgtgtgtgtgagagagagagagagagagagagagagagagagagatgtgttcacctttcctttactgtccttcactccgaggggcaccttcgaagggggtgacgtcactgacggacacggtgactgacaggctgcccatcacagtgctgatgctgtccattctaaaggta

SEQ ID NO: 35027 - DNA, 338 bp, Mus musculus
  source 1..338: mol_type = other DNA
cacccccgcccggtggctgggcgctggcgcggttccctcgccgtcccgcggccgctggaaagtccgcggagtccccgcggcggcggtggcgggccggggtgcgggcgagcgccgcgcggtccccgaagcctggacacgggagcctagggtaggcaggcgggggcgcttgggagaacctctgtttcccctttattatttgcgaaattattgggaggggacttggcgaagaccccggctcctggccgcagctgaccccggggctcctccccgccttcccggtgaggaatcctttcccttgccccgcgaagccagctgccaccttcctgaactgttgagtt

SEQ ID NO: 35028 - DNA, 565 bp, Mus musculus
  source 1..565: mol_type = other DNA
agaaaatgtctgttatttgaatggaccactgagccactggaaggcagccgggacaaccaggatccgcggaccctgatgatgggaggatgcttggagcaccccagcctccggctcctgggcacggagagaccggcgcgcacgcgcgcacacgcaccacgtccttttagataatcctcatgcaaagggggctcgggacccccgagggcgcaggtgggtgcggggtgcgcgcggccgcgggggcggcgtccgtgtgcgcgctccgggtgctgcgctctcggccccgggctggcggcgcgccctggccggcccgcggggcgcagagagcggctgtgcggcgcgcgcacggcgctcgcacccgggccggccccgtatcccggagcccggagacgacggcgggggcggagctttgggcgctcggcgccagctccggtaggcggcggaccgcgcggggcggcagctcggggccaggcccggagctgtggcgcactcgcttttccccccacccccgcccggtggctgggcgctggcgcggttccctcgccgtcccgcggccgctggaaagtcc

SEQ ID NO: 35029 - DNA, 444 bp, Mus musculus
  source 1..444: mol_type = other DNA
agcaaaggctgaggcatatccttggcaaagaagccctgggatcctcagccagtcaaggttttaaaactttggctgcaagatcatttgttgttgttgtatatcaagcaaaaagaagagcgttgggtatacaatagatctttttttttttttttgagattaggtctcaataagtaagtaataagttcaggcccgcccacaactttctactcttgccagggcctgcagtgaacactggtgtaaaccaccctttgattccctcacagggattaaaacaaagagatatatgaacgaatggtgcgtacatattccaagccttcctccgtacctgtaaaggttgccgcccccgcagcctcagcctggctccggacacgccgggaggggagaggagggggcgcggcggcggtagcgtggagccggctcccggcttacgtaagaagcagcgag

SEQ ID NO: 35030 - DNA, 689 bp, Mus musculus
  source 1..689: mol_type = other DNA
ttgttgttgtatatcaagcaaaaagaagagcgttgggtatacaatagatctttttttttttttttgagattaggtctcaataagtaagtaataagttcaggcccgcccacaactttctactcttgccagggcctgcagtgaacactggtgtaaaccaccctttgattccctcacagggattaaaacaaagagatatatgaacgaatggtgcgtacatattccaagccttcctccgtacctgtaaaggttgccgcccccgcagcctcagcctggctccggacacgccgggaggggagaggagggggcgcggcggcggtagcgtggagccggctcccggcttacgtaagaagcagcgagtcccgcgcggccagcccggcagaggcggcgccgcccagcgggatccgggctaagtctggccgcgctcctcgtctccccggctgctcgggacggaggtgggcccctccagttgcaggcagcggccactgtggggggaagcgacagtcaccgagaagcgcccggagagctgctcccactctgcccacgtgcggggaccggcaggggcttcccggagttgcgcgcctggagtctgactgacctctgaccccagagggccgagcttgcaggccgggctgcgacggttcaccggagcggccggggcccgaggaggggcggggcagtctttaaagcct

SEQ ID NO: 35031 - DNA, 213 bp, Mus musculus
  source 1..213: mol_type = other DNA
cttcctcccagtgagagagtcagtatgtctgggagtgtgtgtgtgtgtgtgtgacttagacccccctactgtctaatatgagtcatgaagaacaatttctttccaagcaaggcacgtgagaatttttagttctcttaaaatacagatttatgagtgtgtgtatttgcattgtatacatgtatacacaaggtctacagagaagctggggctttt

SEQ ID NO: 35032 - DNA, 602 bp, Mus musculus
  source 1..602: mol_type = other DNA
ctgtgagcacagtcgcactctgaacactgcctgttttgactgttctgaaatacttcagtgtacattttctaaaaataagaactttttaaggtaactgtcaacaagcttataactgatagatgatgacctatttttttcatttcatttcatttcattgcatttaatgagttaacccactccaccccagggtgcagaggggcaggatggtgttcagaggctgtgactcttccacctcctctgatcttgaacaccttaggagtgttgttctcattttcggaaaccccaaataaaccccaaatgtggttgtgcttttgttgttgctccaagacaggcaagcctggattcctgagcatgccacggactgtaaaaatggcgattttataatttggcgggcatacaaaaaaatgtatgtttaatttctaacatgtttcagcgagctaagatctctgggcagaggatcgaggcttacccccggttcccggggttccccagggacccgggctactgcggaccgcgcgcagcaaagggcgcgtatccgtgaccgcgcacacctgttcgtgcccggggtcccgcgggtccggccgccacgcgcgggctgtatc

SEQ ID NO: 35033 - DNA, 154 bp, Mus musculus
  source 1..154: mol_type = other DNA
tgctagttagacatctcatttaaaaatggtggtcctggctgagtcactgacacaggctggtgtgcaaagccttgcttatcatgggccacctgtacactgctccatctgcaggatgtagagctgtgcctgacagggttcttccggttccatgctg

SEQ ID NO: 35034 - DNA, 178 bp, Mus musculus
  source 1..178: mol_type = other DNA
tcaaagatcttacatagggatatctctaatcctgattcctggaagaagtttcctaacagccagccagggtgatggtgagcatctagaatctcctgaggcagagcctgggccccaagtcgggatccgtgctggcagggactgagctcagccaactgggggcggagtccgcgcgggcccg

SEQ ID NO: 35035 - DNA, 406 bp, Mus musculus
  source 1..406: mol_type = other DNA
tatgcggtagtaggcaggctttaacatatgagggccaccacttgtcagaacagtgtcactgaaaggccatgcctgctcatctcatgggataggagctatgccaggcaatttggccttcctaggagaacgatggtcaaattaaccttgagactgtacagcgttcaaagagaataatgaaatgtactttgagtttggattctgactctctaaggacagccatccatccatccatctatctatctatctatctatctatctatctatctatctattttttccaggatggaaaacgaagtgttcattaatcaactagatgagctcctgactgtcccctcaaagcttcgcccaagctcctcggccacgcgcgcagcgtccccgccgcgcagtcacctgagtggccagtgcc

SEQ ID NO: 35036 - DNA, 355 bp, Mus musculus
  source 1..355: mol_type = other DNA
aaatgtactttgagtttggattctgactctctaaggacagccatccatccatccatctatctatctatctatctatctatctatctatctatctattttttccaggatggaaaacgaagtgttcattaatcaactagatgagctcctgactgtcccctcaaagcttcgcccaagctcctcggccacgcgcgcagcgtccccgccgcgcagtcacctgagtggccagtgccccgcagcgtcgcgcccgcgcacgagtggtcggcaccttggcatccctgctttaggaccctggctccaggcctctaactgcccggggccaagcggagccccagccggagcactcctttaaaaggat

SEQ ID NO: 35037 - DNA, 345 bp, Mus musculus
  source 1..345: mol_type = other DNA
cataatgcacatatgtaaacacaaatgcacatatgtagagtacattacatatatatcacatacccattgtgttggctagtttttttgtcaatgtgacataagctggagctggtaaggttcctgcctccaggttcctgcagttagtaccttaacttccttgatgatgatggatcaatcatcacatactgcatacatgtatacacactatatacacatataaacatcatacatacatacacatatatacatatcacatatacaaacatataaacaaaccaatataatatatgaaatggttctctgatattgacccaatatatttgaacatggaagtttgaagacgta

SEQ ID NO: 35038 - DNA, 338 bp, Mus musculus
  source 1..338: mol_type = other DNA
accattgcaaagcaacaaactttttttttttttttgtttttagacagggtttctctgtatagcccaggctatcctggaactcactttgtaggccaggctgtcctggaactcagaaatctgcctgcctctgccccaaacttaaaacaggtaaaaatttttattattaaaaagcatcttgacagatagttaaaagtaaatcaccatgacctactactgtttgtcatctacagttctggctggcctagagatcagtgtgtagaacaggcaggtctcatcgcttagatatccataggtgggtctgattaagttgaccaagctctctagctatgaaaaattta

SEQ ID NO: 35039 - DNA, 341 bp, Mus musculus
  source 1..341: mol_type = other DNA
ttagtatgcatagttcaggaaactgtgagtaaagttatccatgaaaagtctttctagtatctaattagtttggtactcacacacagtggcaggactccgcccatctgtttcctgatgtgggaccctctccctgaccctttgggttaggaacacagagctgattcctcagggagtcctttgtgcaacaggagagcactgggctactgtgctctgatgagccaggctccacccgcccaccccccccgggggggcatcccccttttttgtagccaagaggttcccagggccagcgagcgggaacgagcgcggggaggttccacccgggatcgtccgcaccggct

SEQ ID NO: 35040 - DNA, 338 bp, Mus musculus
  source 1..338: mol_type = other DNA
ttagtgtgaaaatgaatgtctgattttcactgaagtcctatgagatcaactgtgaataaatattttacaacattaaatatatgacattccttgactccatggcttctcacaagcacaaagatacacaccttgtgcacctccatgcacagtacctaacttggagtaatgtttattggaataaaaattaggttttgaattccttggggaaatgaaccaaagccaatggattcagaaatggaatctgaaaagctgttttattgaggcttttggcaatccctgacttaatcagttttgactgtgacaaagacgtgtttaaagaatcctgagcaaattctgaa

SEQ ID NO: 35041 - DNA, 444 bp, Mus musculus
  source 1..444: mol_type = other DNA
gcaagcctggcttgaaatgagttttattgaaaacacctaaattcatgtttatgcattcggaggaagccacctccggggttacaaagtgtgtgcatactgcagggataaacaaagtcctgattgtgtcaggtatttgatgccacacacacaaaagtcttcgtctgataagaaaggctgtgtggtttcactgaggcctctctgtaaaagctgctatttttatatatctgaagcttcattaattcacttaaaattataacatgaattcagtgtttattaacctaggtcttaagtcaataccctgaggtatttatatagctttccaatcacagctagatatattttgtatggaacactttgagaatttcccagaaagcaataagttcagagtttccctgtgaccctggagaagggaagtcttggctttgtttattataacaagagcca

SEQ ID NO: 35042 - DNA, 426 bp, Mus musculus
  source 1..426: mol_type = other DNA
ttatatatctgaagcttcattaattcacttaaaattataacatgaattcagtgtttattaacctaggtcttaagtcaataccctgaggtatttatatagctttccaatcacagctagatatattttgtatggaacactttgagaatttcccagaaagcaataagttcagagtttccctgtgaccctggagaagggaagtcttggctttgtttattataacaagagccatctagactggagtcgttaagggagagaacctcgggcttgtccggagttcacagtgacgaatgactgtcctgcaaagcaaagagggggaaagcctccctcatttctccgactactgagaaaactctgctctgccctgagttttagggcattcctctgaggaagtttcacctcatcccggcgagggggtgaaaacttggc

SEQ ID NO: 35043 - DNA, 353 bp, Mus musculus
  source 1..353: mol_type = other DNA
cttcattaaaataattgccaatcaacttgcccttaagacaagggagactttaatgtttaagggaaaacaatgaggcttttaaaaattattattattgctattatcattaattattattataaaactcttgtaagttactaagaagctgagttgctttttgataaatgatcagccctattgttagtttctgacctgatcttcaataaagagattttcatattgttttagcctggttaaacccaggatcacaggacaccaggcctgggagtccctccctttgaaggactccgcaagttgccaaggcccaggctccgcccattctccagcgcaacctgagggcgtcttgcaaaacc

SEQ ID NO: 35044 - DNA, 298 bp, Mus musculus
  source 1..298: mol_type = other DNA
gaggacgcggtgacggagggcccccgcagccccggggtcgcggctgcggagcggagtgcgtgggaggaggcgactcgcgcacgcctgaggcgagagctggagttgccagcccttgggcatgtcatgcgcaattaatttcctgctcctttcaaggcagctgggatgaatatgtgtactaagaagtgttttcttaaaaaaataagtaaaaaatccctgggatcagcctcctgggcttcttgatcatcgggcgccccagagccgaggcagcgcaggcggtgcagctcgccggcttgctgtt

SEQ ID NO: 35045 - DNA, 511 bp, Mus musculus
  source 1..511: mol_type = other DNA
ccaagcgttggggtcgtaattaaaagaaaactaaaacttttttggtaagtagaacatcaacaaaatgaagtattttcacaacgtatataataatatagttagagaactgctagaatatctatccacaggtatagcgttgcatgttaacaataaacacccgtgctgatagcaaaatgctggcagacatgtttagtgcacacatcatctggacattaataatatataaataaataaaataaaaataaaacattaagttctggtccttcatggactattttgatcagagttattattgcattatgtgaattcttaagtaattaagtcttttttgctctaaaataaattctgcttacaagtccattatatagtaagtccggagtgacttgtaagatgaatttacagtacaaagcaagctttattttagctttcttattgaaaaagtccatttgcatctatgaaatatggcagggctggccacacccctcgttaatgacgtcacagtcatgtgaca

SEQ ID NO: 35046 - DNA, 439 bp, Mus musculus
  source 1..439: mol_type = other DNA
aagcacacattaagcttttctactgccagatagatgaaatatttgaaatcaaagatctctctaaaatggagagaatgatgacttctttacagcatcaaaggacgttgaaaagatcaaacagagtcacaagcttctgcacacgtgcataggcagcacaacaaaaactatattttactaaaggacttttaaaaatagaggaatgtgatttttctcaaagtgtcagtcaaacatctgcaaactaaatattttaaacttctggtgtacggtctgtctaactctttcttattaaattagagaaaaaagatagcctttacttagaaatggtcactctgaatacacattcacacacacacacacacagagagagagagagagagattgcctttgaaatggcatctatcttaacctccatcttcacagatggagggaatttggggta

SEQ ID NO: 35047 - DNA, 419 bp, Mus musculus
  source 1..419: mol_type = other DNA
attcccctatcctggggcatagaaccttcacaggaccatgggaagggaagaatttttgcccaccctccacactgaaattttggtgtgttcacactacaatgtcccctgagcctttggaggaagagctatgatatagatgtcccattaatggccaagcacttttacaccttgaccagctgtgggtctccatattaattggcatctaccatgataagtgtgtgtgtgtgcgtgcgcgcacacacacacacacacacacacaaaacaaaaatactaaagttatcttaaaaggttattaaaataatcttccattttcaacttgatgcttatgacaagctgacattattatatagcagcaggcagctgcttgttcagggctgaaacatcccctcttacaggtaagtggcaggaacttataaggc

SEQ ID NO: 35048 - DNA, 310 bp, Mus musculus
  source 1..310: mol_type = other DNA
gattctgagctctgaagaattatctctcctagtctattctgatcataagggaagattaaactattgttgatataaagtaggacaggcattgtctcatcaattctgtgggtagtactattaccagcattaaaaaatagcagacgatggtttgaaatgtaaataaaaaatagagtacttaaacaaattgctttagattctagatcttaatcaaatctgagtccgacagacctcatcactgtgtgaagtttaaacgactcctgagaagatgcagctgtcacctatgtgcttagtaaacactgttaagataaga

SEQ ID NO: 35049 - DNA, 548 bp, Mus musculus
  source 1..548: mol_type = other DNA
cctagctggtcttaaaattgcctaaggtcttctgcaaaattacaaaaattgagggagcggctgatgctctgctaagagagccaacctcaactggctgccacgggggagtggccaggaagccacacccctgccgcggagcgagggccgaccgaaaagggcgggagctggcctgcccgccccgcaaactcactccgcagcgtaatcccggcgcgccgcggaagcggcgaagattgggcgccgccgccgccaccgcgaaggccgaaagaccgggggcggggatgcgcgccagacggcagcgcctccaagccgccggcagccccgccccggaagttaggagtcttccgggcggcgctctcccgtggggggactgcgagcgcccctggggccccggttcccgatcgtctgtggaggctgcacttacagccgccgctgctgccgccgcctccgctgctgccgccgccgcctggagacgccccatccatccgcctgcagccgggagactcgcagcctgggaggggcctagggcctgggccgcccgcctcctccga

SEQ ID NO: 35050 - DNA, 369 bp, Mus musculus
  source 1..369: mol_type = other DNA
ggaaagcgctttttcaactttcagtaagttcaaagggcgagcatgaaagggggaatattttaatgaaaattcaaacagcttagcggcatgaactaagcagttaagtggttgctcagagaccagaggatccggcgctgcctggggggctccgcgggatcgaatgcgttgggaacccctttccaaaccgaagggctggctgtctctccgggatctagaggacttacgcggcgaagctggcctgcttgcgggtgctcgtaccagggctcggcgcccccttccccagcctaggaggaatgtttgccgggcgccatggcgaccgcggagcctggctcaagaagcggccgcgcggttggctggccgcttcggagg

SEQ ID NO: 35051 - DNA, 691 bp, Mus musculus
  source 1..691: mol_type = other DNA
gaggatccggcgctgcctggggggctccgcgggatcgaatgcgttgggaacccctttccaaaccgaagggctggctgtctctccgggatctagaggacttacgcggcgaagctggcctgcttgcgggtgctcgtaccagggctcggcgcccccttccccagcctaggaggaatgtttgccgggcgccatggcgaccgcggagcctggctcaagaagcggccgcgcggttggctggccgcttcggaggaggcgggcggcccaggccctaggcccctcccaggctgcgagtctcccggctgcaggcggatggatggggcgtctccaggcggcggcggcagcagcggaggcggcggcagcagcggcggctgtaagtgcagcctccacagacgatcgggaaccggggccccaggggcgctcgcagtccccccacgggagagcgccgcccggaagactcctaacttccggggcggggctgccggcggcttggaggcgctgccgtctggcgcgcatccccgcccccggtctttcggccttcgcggtggcggcggcggcgcccaatcttcgccgcttccgcggcgcgccgggattacgctgcggagtgagtttgcggggcgggcaggccagctcccgcccttttcggtcggccctcgctccgcggcaggggtgtggcttcctggccactcccccgtgg

SEQ ID NO: 35052 - DNA, 663 bp, Mus musculus
  source 1..663: mol_type = other DNA
gaatctagaattttaaaaatagaaatcatttcagaaatcagcattctcccaagtgcattataagtatgatgtttaagaaagttgtatgtacacatttgtgcaatgatttttttaaccatggtatattcctcagaggtaatgagtatcatttaactgattgatttttggtagtcatttttgaaaaacttaatcatgtcggaaaaaacaaaaaagcttttaaacttactgcccattttaatatctgcctaaattatctactttagggaaccagataaatcattggccctggccattatcagtatggaaactttctacttgcaagtattttaggcattgcaataggcatatccatagaagagcattactttacatttgaaacttttgtatatttgtgcaaaaattcatccgcaaaaagtgaggaaaatgtaatgttctctactcttcatcttaaagcacttcagaagtgaccgaccggtagatgaggggacctctccggacctcgcgcgcggactgccccgggctcgcccgggcccgcccctcgcgcgctcccccgggacggcggccgcgggatcgcgcgctccctgctccgcgcgcgcccgctggcctctcccctcccgtcccgccgagcggggcgccgcgagggggcggagcggggtgtggtgg

SEQ ID NO: 35053 - DNA, 676 bp, Mus musculus
  source 1..676: mol_type = other DNA
cttgccttttctggatataccagctaaaacaaacaagagaggtctcactttgcagaatgaaatctttgtttacccccatgctccccgcagggggacccagcgcgccttcgtgcgcaggcgcaactctgtgctcgccagcccggctcagtggtcccccagcagtgtcccggctgctcccggagcccatgccgggtccccagccccgccgagccagccccggcccttccctgaccccgcgaggcaccatgccagggcaaagtccccgagggtgtgaaccccagtgtcccaacccctgggcggggacgggcggcggcagtgcggggagctgtgggcagcacaacccgcgaagccctgccgcgagccgccgggtccttcccgagcctccgccgccacgctaggcccgcaatcgcggagccccggagctcagggcccgcgccccgcaccgccaggcccgctcccgcagccggggtcccgccacgccaggcccgcgctcctccgcgccccgcaccgccaagcccgctcggcaccgcgctccgcaccgccaggcccagacccccgccgccgcgccgctccgccgccccgctcgctcgcaggcccgttgcggcagccaccgccaccgccgccggcgccaccgccgccatggcggaagtccacagacgtcagcatgctccggtta

SEQ ID NO: 35054 - DNA, 264 bp, Mus musculus
  source 1..264: mol_type = other DNA
ctttaaacactattttaccaagtttaatttggcaaaggctacattttagatagttcattctccagaaagaatcatcatgaagtaacaatgatcatggaagatgcaccaggatgaggctcctgatcagggacccttcactaagaaaggctgctcagatggctttctgaatgatcaacatttaaaggtggggatttgcccctgtgtgaggctggctttgtgacacgtaagaatcctgcattccaattgtcatcatgcccatataag

SEQ ID NO: 35055 - DNA, 315 bp, Mus musculus
  source 1..315: mol_type = other DNA
tctctctctctctctctcacacacacacacacacaattttaaaagaacttacttttatttttattttataattgcagcacaagatcatttcatcttctgctgtcttgtcaagatgcgatcagtcagtgaacaatcagcttctcggccacttagtgttttgggaactgaaagtaaactgacccacagtcccatggtagtattgtggtgtgtactcacttctgaaatctgcagaggtctgtccaaagctctctcttgctcttatatgggcatgatgacaattggaatgcaggattcttacgtgtcacaaagccagcc

SEQ ID NO: 35056 - DNA, 406 bp, Mus musculus
  source 1..406: mol_type = other DNA
ccacagcccatctagcggatgtgatggattgaatacgcctaaaccttcagcagtaaccatatgatattgatcaccaccatgaagtgtctgtcacacattagataaatatttgttgaatacataaatagttgaatacataaatagtatttttatctttaatgtgtgtcttaggtagcctattagaaaaccagaataattcatataatcacaaagcatcttttttttttttgagctgttgtcatgaatactgctgaccgatcagaatgatcagtgcagcttcacatggatccaacacagccatgccaagtaccaaggaggtgtagagttcctggcaggtagcttctccacgggggcgagacggcgccacagtccgtacagccgcagccggccaggactgggacttgcg

SEQ ID NO: 35057 - DNA, 366 bp, Mus musculus
  source 1..366: mol_type = other DNA
tccggactggccactgcctcacagtcagggaaggttttgattctgattctatcagaactgtgcaagggcacatgctcttctgtaataaagaatttagtggttcatttgaaaccgccgcgtccttcgccgatcgcaatggaagatcgccgcactcgtcattgacaatggctccggcatgtgcaaagccggctttgctggcgacgacgcccccagggccgtgttcccttccatcgtagggcgcccccgacaccagggcgtcatggtgggcatgggccacgcaccacaccttctacaatgagctgcgtgtggctcctgaggagcacccggtgcttctgaccgcgcagataatgtttgaaaccttcaata

SEQ ID NO: 35058 - DNA, 608 bp, Mus musculus
  source 1..608: mol_type = other DNA
ctcccagagacaggcagtaggtcccaagctttcaagcctctggagacatgcgtgccacactggcgttgacgaagagccttcttcagcacaacaggttctaatttacaggagggtctactgccctgggcctgcgtgccctcaggggcacaggaggctggctggagccggcctgggcggctgggagaggacgcccccttctgccaaggggctcggggcaagaagctcgcgcggcctccgcttggctctgcgcccgagcagagtcctagagggggctgcagcggctgcctaggagcgtggcgggctcccagcgcaacccccaaccccaccctgcgacgaaccgcagggcggggaccccaagctcttcgctccgatcggtctctactcccgggatggggggcgagcgagggggctggaggagcgcgaccgcgagccgcggcgcccccgctcgcctgctcgttggctcttccccttcgtcggcgccgcggcgactccgctgagctgtcgctcggaacgcgttccggcggcgaacagagcgccctggcgggacggcggggctggcgcggggcgggggccgcgggaggaggcgggtctgcgcaccgcacgggggc

SEQ ID NO: 35059 - DNA, 156 bp, Mus musculus
  source 1..156: mol_type = other DNA
taatacagacgtttgggacagggcatagggcattcctccctccctccttgcttaagaacaaggtccttgacttcatcagagcctcactgagtggtctgttaactaaccatgctagtcgcagggaggtctgatcacttatcaaagtcactagctgtg

SEQ ID NO: 35060 - DNA, 385 bp, Mus musculus
  source 1..385: mol_type = other DNA
caacagtctccagcaaatattagagacaaatgttggattggcctgaagacaccatagaagttgtgtcaatgccccaatacatatttggatgttttcttaaaattacagtttttacaacatctctcgacacttggtcaagaggaaacagagaatgtcagctgtatacagagcatacacggtacctggctgagagttaaatttactgatgtttttatgttttattaacatatactaatcatgataataatggctttcattgtgacatggtagctgggctctggaaccctctaggccttgcagcccctgtactgagaacagaactaaccctgagcatttggggctgttgctgacctgtttgctctatgtcaacagaactgagagcagc

SEQ ID NO: 35061 - DNA, 251 bp, Mus musculus
  source 1..251: mol_type = other DNA
gctgccctgaagccatagctgcccgagactaggagctttaatgaatcacgtgaccacctgtcatcaccgtgttgtgaggccagaagcgcatcaccccccatgtgggaccagcaggctggtctctctgaaaacagcctctggatcaattcattgacaatgggacctccaaggggccttgctttgcccactggggacagtgggcgggcccaggttcttcgctcatgcgcagagtgaccagcacctgcggtttc

SEQ ID NO: 35062 - DNA, 269 bp, Mus musculus
  source 1..269: mol_type = other DNA
ttatggtgttttatcgcaacaataaaagctttaactaaccatggtcagactcagcacagtccccgggctgaaccagcgtcacgtcacctttgctgctagggggagcgtgccaggggctaggggcgggccgccctctccagcgccttgccctctggtcccgaggcatggctcacggcagcctgcgtccacacgcgccgggctgcgctctccccaccgcgccccgggcgtccccgtcccgccccccgggcccgctgcactgtgggtaggcg

SEQ ID NO: 35063 - DNA, 313 bp, Mus musculus
  source 1..313: mol_type = other DNA
gccggaggccagctggactatgttgtgcaagctttgctgcagaagcacatgagaaagaatcaattatatctccaccatgactgcctggggagaaatattttggtgtctgtagtttactcgcggggaaattaaggcacagagtctagaaaacctagctttccttgaaaattgaatttttaggataatccaattcaaggctgaaatttgtaaataaataaacataaaggccagcaagaaaaaaaaattttatttatatgttttttttcctccctgtggccttaattatcctacgttttaggcagcttaaggtttt

SEQ ID NO: 35064 - DNA, 368 bp, Mus musculus
  source 1..368: mol_type = other DNA
caggcatagccaggcagctgtacaccagctagttagctcagcactgatctgagctctctagtatttaacgactgtgttggctatgattggcattataattccagagagagtttctgaagatgtatatttaagacatctggagacataaataggctgaatcttaatgatactcagtgtttgtacacatgcatttccaggctccagatgtttggagagccatactgtcagcatgcctgtaccttttgactgtagaagctcaacaaaactcttcactgaactgattttagttaaacatccttagccatgtggataattttttaaaagggctaaagggcttggggccatccttggttactagttaatcacat

SEQ ID NO: 35065 - DNA, 403 bp, Mus musculus
  source 1..403: mol_type = other DNA
tcttcaccccttagacacccagaatatttccatgtgtctgtgtctgaaggacggtcatacagttctggctgaaatcgcccacccgagcttcagcggcgccctcggaccgcaggacacttcaggagaaccaagcagggttccgcgagtgtcgtcagggcaccgaggcccgggcgcccggggacctcagcgacaccggcagcgagccgctcggcgcctgcccctcccgtcccagagggaacctgttgccgggggaaggggtgggcgggaggcgcaggcggaggactctcgtgctctctctgcgctcgcgcacgcccctccctggccccggcctgggagaaacccacagctccgcgccgcccgagcccggggacggcggcccgagcgccgccggggctgcttccgg

SEQ ID NO: 35066 - DNA, 340 bp, Mus musculus
  source 1..340: mol_type = other DNA
tagtcccctgggccttccttcagcccactctagtgggctgtctggtggctgcctcagacccaggactggagtcagactgccgaacagtgccagactggggtcctgaagctgcttgaaatctggcttctgggcagagcctggcctcatgccggatggagtcccctctgcgcgcgcgcgcgcgcgcgcgcgcacacacacacacacacacaggaacccaaggaaagcagtcttttccaggtaggcgcactccacgcagtgtgtaacaggtcccgtttgcagcccaccggggcccgttggggctcggggtggcgtgatctcccggcccccaggcgtccagtac

SEQ ID NO: 35067 - DNA, 490 bp, Mus musculus
  source 1..490: mol_type = other DNA
aggccctgggaggtttgaaaaatcttcagagcttccgcagcctggcctggttgctccgcaaggccggggccatgccatgccgccttgaaagcctccatttcagcatggataaaattactcgacaggtggaattcaccatcgcgtattttaagagttcaaatgcatttatggtaaacgccctgaaaattgaacccctcctggccatgtgcctacagagtgtcatgacctgccccggtcaaggccagaggctctcctgccagggttgcagggtggttgtctggagcgcctcccaccctggggaggtgtccacgggaggcaccacccaggtcccgctagaagagggtggagcatcccggttcccgcagccaatgaacgcagcggctccctggtccgatccccggcgcggctcaccattggtcgccgcctgggtctcggcccaccgaaccttggcgacccaagccaatcgcgaggcggcgggcccgacttacag

SEQ ID NO: 35068 - DNA, 361 bp, Mus musculus
  source 1..361: mol_type = other DNA
tatacataaaataaataaatcttttttttttaataaaaagttgctaaagtcatagtttcttcaaattcatgctggcctccttccaacgaggttgaggcaagggaggcaagacattccggaaagcctagtctacaggggactctgctttatccggctggacactgatccagatgagtgaagcccaggcatacccagggcaggcattcattggttttacctaggtcacagggaactgcgtcctgtcacccctgctgagcagcaaggcttgctcagctggaagggcctgtcctgacagctcggacttggccggcctgggcaacccgaggctccaggtctccttgagcttgagggcgagcccttg

SEQ ID NO: 35069 - DNA, 434 bp, Mus musculus
  source 1..434: mol_type = other DNA
tctagacagtcattcttatgataaagattagatgtctgtcagtcagtcagccagttggtcagttaagccacacgcacgcacgcacgcacgcacgcacgcacgcacgcacgcacgcactgctgggctgtgtgtgaaagagagagcctagagtgagctctggttctggctactgtccatagaggagcacagtaagccagctgctgagcctgcactacacagatccaagaccatcctgggcttggctgctcgagcctggtagggtcacgctagtgagacacacagcctctctctggtccgaatgtggcacctgtctccttagttgaacagaatggagacatatctaggatggtgaccggctgtggcttctgaaagccaccgtggccccacccatgcctcccagagatgggaggtgcaaagcctgtctggcctccact

SEQ ID NO: 35070 - DNA, 264 bp, Mus musculus
  source 1..264: mol_type = other DNA
gaaggtatcttccatcgacctccagagagacaatctctgctgaaagcccttgcagggctctggggtaatgaaggaagagctggtcacaccaggttgggggcacaccctccccgacccttccccacctgctagcctggccaagctgtggaaggaccacatttggaccccagggggatcctaaggtctgaaggagggcagccagcacgctggagagctcccacgtgtcacgaagcaggtctgtacttgctgccgtggcagcgcgcg

SEQ ID NO: 35071 - DNA, 499 bp, Mus musculus
  source 1..499: mol_type = other DNA
attattcataaactattttgggccttcacacactagttcacacgtgtatatgtgttcctacacacatacaaacatacccacacttatgtaaaccatgtacatatacatcttgtaaatgaagaaaagacccagcctgctgagaaccgaacactggttctctgaagcacagcagtggttgttaaccagcacagcacatcttcaagactcgaaaatgtctttattaaaccccatctctgcttcataaaattttttaaaaagacttccttggctattgtaatacaggtgaccttatgcaagtgtttcatagttttaaactcatttaaattgtggcttgttcaatcatagcgtagatttgaaacatagctattgtcaaatcctttaaagtaaggtttgatcggagagcgaggctctttggtttgctttccggaaaacctctccagcctctctccagagcgtgggaccggagcatcccgccccctcccgtgagtggcgaggctcc

SEQ ID NO: 35072 - DNA, 489 bp, Mus musculus
  source 1..489: mol_type = other DNA
ctgaacaagaacctgttactagtcagtagtggtgaatgtgtcaataatcacagctgtgggcatacatctcggggtaattttcccatgggcctagcaggcaggctgggcacccatccttgtagggtaagcgtgaagaaaaaaaaagtatttgtatgctcaaaagttttgttttgttttagtctagactggttgaaatggttctcctattaaacctaagtgctaggattacatcttttgagaacatttatagaaaagcggagtcaggccacacctccaggcaggccacgcccccaggccggcggaacccgagaggcatagcctcgcgcagcccggactgcaaaaggaagggcatccctgccgccggaaggagcggcgcgtttcttggtcccgggactgaagcgccgaagttgcgagctgcaggacgcttccatggacgcgttcctggaaaagtttcagagccagccttaccgcggcggcttccgcgaggat

SEQ ID NO: 35073 - DNA, 182 bp, Mus musculus
  source 1..182: mol_type = other DNA
tgagtggcccggagcacctcacgtcacctgcgacagtctgaacagatagctattcagcagaaggagtctctgcagaatcattcaggtaccacagggggggtccagctgttcggctaccctactacggtagtctcgcagtagtgtgggaactggcagccccttgtagttacaagtcgtgccag

SEQ ID NO: 35074 - DNA, 443 bp, Mus musculus
  source 1..443: mol_type = other DNA
accacatctggtcatctgtgggtgcaaaggtaccctcaggtacatgggaccctcttcaaagtcccagtgagagggaacctctgaacaagaacctgttactagtcagtagtggtgaatgtgtcaataatcacagctgtgggcatacatctcggggtaattttcccatgggcctagcaggcaggctgggcacccatccttgtagggtaagcgtgaagaaaaaaaaagtatttgtatgctcaaaagttttgttttgttttagtctagactggttgaaatggttctcctattaaacctaagtgctaggattacatcttttgagaacatttatagaaaagcggagtcaggccacacctccaggcaggccacgcccccaggccggcggaacccgagaggcatagcctcgcgcagcccggactgcaaaaggaagggcatccctgccgccg

SEQ ID NO: 35075 - DNA, 317 bp, Mus musculus
  source 1..317: mol_type = other DNA
tcaaggccagcctggtctaagagcaacagccagggctcaaagcaaaaactacatttcatttgttgttattggtaataccaaaaggtgaaataggggaagtccttaacttctttcagctaccatctcagataaaaggaaaatgtcctcaggggggtaaaacaaggcccgggcatccagatgcattgacttgttctaggccatcaggaaacccaggccagctgggtttccttagccaacgttcccaagttcatttgggagggtttctgagctctctccacccaggcagtgggagtggccagacctgagttaaatgttgc

SEQ ID NO: 35076 - DNA, 306 bp, Mus musculus
  source 1..306: mol_type = other DNA
atgggtattataatgtgcatacacacacacatgcacatgatgaggccagtccttggacagcctgtctctgaacaaaggatgtcttacatctaagaagtgtcactctcattttgttaatcatttactgactgctcatcattaaaagaggccagcctggtcttactgtccttaccaagggtatgatattatcagtccttggatgaagcaaaagatcaaggacttgggttcattggtgtcatgttctggggttctttgaaggccccctgagaatcagccttcatttgagtcaggtcgtgccatgtatct

SEQ ID NO: 35077 - DNA, 350 bp, Mus musculus
  source 1..350: mol_type = other DNA
ttggcaggacaagttcccaagggctgggtctctgtctgcaggcccaaacatggaactaatgggcatctgttaggtgacctccagtcctacagcgctctcactgatcctaaggtgtactgggagtagttactgagaagtagctctccagaggtctgctagttctagaatgcttccagtggcgaccaggtgtccacttttacagctctggggctgaagagtttactgccaggcgtctgggagcctgcccttcatctcccacgggggacccggacctctgagatctgctgaacccttggccccgggcagccccacccgttccaggcaagggagggagggcagagattggccca

SEQ ID NO: 35078 - DNA, 277 bp, Mus musculus
  source 1..277: mol_type = other DNA
catctgggaggcacaatggccttggctgaaaggtcatctgagttcacgggccggtcacccgttcacgtcgtgcagaagccagtgcactggacccgcctctcgcgttcggcgccgggcgagccgcagtgccagcagtcggccgccaacaggctctgggaaggccctctcaaggcgtgcaaagtacagatctgaggtccctacgctcctccgcgccggccgcgacttcacgtgtggcacttcagaaagttccaccaataaggatggtgtattcgcaaaa

SEQ ID NO: 35079 - DNA, 461 bp, Mus musculus
  source 1..461: mol_type = other DNA
ctgttgctttctttgaaaacatatcccaggcctattttaacaaaagtctacttccagaggaagaaacttccccaggctcggggtcactgctgagcctgggacaacgctggtggaagatgtagcagggttcttccttgtacagagcggcacggtggaagcgtgggtcattccagccgcgctcccacggcgggaagatcggcctcgccagccacgggacgaagtgcttcttgccccagaccggggatctcgtacaccctgtccagggggcgaggctcgggcttccgcgtggagcgcacgccccactcatacgccctcggagtcccgtaacctccgaggccagcgagtgcccgcagagcgggcccggacgccacgccatctttgcccgtgcagggactgctgggttttgcgaatacaccatccttattggtggaactttctgaagtgccacacgtgaagtcgcg

SEQ ID NO: 35080 - DNA, 632 bp, Mus musculus
  source 1..632: mol_type = other DNA
acctgggtcattgacaatggcattccgagtcgcgaggcgtccaggtgacgtccctcatccaaacggaaccctttcccgtggaaaggcgagaggctaacttgccagggctagcaaacctcagaaatttgagagaaatcaactctctttacgccaagggccattttcgcgcggctccactttggggtttcgctttggcgccagcttcggccgcccagctccgcgtgcagccctggccggggctcgggaggcagggctgggcacaggcagcccggggaggggagcagggccggccggggtcctggcccgctgagggtacgctcagcacggggaggcgggggcgctgggggctaggccgacgcggaaaggggcgcgccgggccagccggggtccgcgcctgctgtcgcagcgcccagtccccgccgcgccggccgggtgctccagtccacgctcgccccccgctcccccggccggggcacgagcgggcagcggctcgcggaggaggcgcagcgggactggcgcggccgtgctgacaggcgtccctctcggcctccaggcccgcccccgcgcgccgattggccgccgcggccgtccgtcgcggggcgtggacgcccgccgcgctcctgccggggcag

SEQ ID NO: 35081 - DNA, 606 bp, Mus musculus
  source 1..606: mol_type = other DNA
agactggaaggcactattttgtgcacgcctgcgtccgcgccatcctagttaggtcaggacctgcaagcgatcgcctccctggcggtcccgcgggctcccaagggctcgccgaacttccggcaatttccgcactgcagctgcaccgagtgggcagcggctgaagcacagcttcaccactagggccccggcgctgaccccgaggtggaacgacgcgagctggatgggccctgcctaccttcggaggggtaggtcagctgacaggcccggtgacaggacgctgtgtctcccaggaccgagtcaaaggcttcggccgctgcagtccccgagcctccggccagcgccatagtcaacagcagcagcggcgggagccccagttgggcctggacccaaagagcatcctcggccccgccccggtccgcccaatcggctgcctcctggccggtctctgggacggaaaacctctcgtgggcgggcttggggacccggccgaccatctcagccttgggctcagagccgcgcctgccccctccgtgccaggccgactggggccagtagttctcgcgcacgcctcgcagtgcgttctgggaagtgtagttcctgcgggtc

SEQ ID NO: 35082 - DNA, 354 bp, Mus musculus
  source 1..354: mol_type = other DNA
ggctccactctctgtgcaagagtcaaggcacccaacctagttcctgtggctgggatcccgggagatgcccatggttttcctgtggcagccaatggaggcagcagcatgcaccaccttttgaggctctcctggagactcaggagacctctgaggttgcagtcacagatggccgaagctgcaacttcgtgtttcgggctgtgccattcagtctcaaatcctcaaatgtgacaagggaccaaacacagagtcatagccctgtgaccttgttctctctgggggtcgtacagatctgtaattttcacgattatccaggctcttcctgagattggggacagcctgtgtcgggaactcacg

SEQ ID NO: 35083 - DNA, 521 bp, Mus musculus
  source 1..521: mol_type = other DNA
aagggcctttcccaagccattggcaaggtccttgtgagagccaatacttagcttgcccagtctgatggcgacctatgtgatgtcctggacacctgcagtgggtactaccctcggggtgggccatttctggaaagcagctaaaaaatatatttctccatgctttcaacaattcaaatatgtctttctctcttttatttattaatatgtatgtagagtgggcgctctccttgtatctgcacaatcctgttggccctcagaagtgcatattcttctggtctagaagaatgaacatgaacagttcgaaccaagactcatggcacttctgcctgtggcttccttcagccagggggccttgccaccctgcagtctgatgagaggagaaaaatgtgttaaagccttggttccatctctcccggtaggagcaggtacccctgtcctttcctccgtgggggaggcagcctgggaacaggagagggcacagccctagcaaagcctgttgctgtcctgccctccaggtggag

SEQ ID NO: 35084 - DNA, 460 bp, Mus musculus
  source 1..460: mol_type = other DNA
cagaagtgacacgactggattttctaaacacgtctgaattatgaaggcttttggatggtatttacaggaaataagacttcttctcgaaagaggaaatctcttctgaaactataattaagtttacttggattccactacccttccactgggctcagtgaacccccaatacagaagctgcttcagaaaccagtgttgtgtgtcagagcaacccttccacgagcaaggccttggccccagcactaggaggcctgacccgcaggaactacacttcccagaacgcactgcgaggcgtgcgcgagaactactggccccagtcggcctggcacggagggggcaggcgcggctctgagcccaaggctgagatggtcggccgggtccccaagcccgcccacgagaggttttccgtcccagagaccggccaggaggcagccgattgggcggaccggggcggggccgagga

SEQ ID NO: 35085 - DNA, 446 bp, Mus musculus
  source 1..446: mol_type = other DNA
tagctctggtgtaaatttaaaaccggtctaatttcaaataacgtaaatgcacccacattgactttaaatattattcctgtttggggcctagagagaggccaggccctaatcactctgttctctcccgcggtcacccgccgcgcgtccgggctcccacctcttcggtgcccgcccaccgtgctgcacggacccgctcgcctgggtgggtagctccgcgaaaggaccgggtccgctcgcgatccccgcccgtcacgccccgcccggccctggccccgccccgccgcctcagaggagttcccaggcgcgcgccctgcgcagccccgccccgccctctcctggcaggggctccgcctagaagcgccagaggtgggggggcctccaagagatctcgggggacatgccctcgcgcgggcacgcacacgcacggccccgccccggccccgcgc

SEQ ID NO: 35086 - DNA, 406 bp, Mus musculus
  source 1..406: mol_type = other DNA
ctccgcccccgcacccacgcgctgcctgaggctcggcgagcggcccggcccgcggccgccacctacctgtgcccctgcccggggcagcgagcggctgcacctcactggcggctccttcctccactgagcggctgaccgggaagcggctcggcgtgagggtgggacacacacaggcgacctggcgccgcgggtaggcgcgcgtgcgcggggccggggcggggccgtgcgtgtgcgtgcccgcgcgagggcatgtcccccgagatctcttggaggcccccccacctctggcgcttctaggcggagcccctgccaggagagggcggggcggggctgcgcagggcgcgcgcctgggaactcctctgaggcggcggggcggggccagggccgggcggggcgtgacgggcgg

SEQ ID NO: 35087 - DNA, 310 bp, Mus musculus
  source 1..310: mol_type = other DNA
tatttgttgttcttgcagggcactttatatttaaaagacatctaaccttaaagtggtgcacacctttaatgccagctaaacaaaaaactgctagtcatttgcaagagatttttttctttgctacagcagctgtataaaataggtccctttcaatgtgatcttttcaaatgtttgtttaaaaaataaaatcagagggaatctgtgccctgggtttggaattttccacccgattgacagcaaggcaaacacctgctgtcctgctgcagtagcctgcagtccagctccacccagtgctgtctggctggggcct

SEQ ID NO: 35088 - DNA, 326 bp, Mus musculus
  source 1..326: mol_type = other DNA
catacataaaataaataagcaactctttttttaaaaagaaaaaaaaacattatcaatcatgactgatattcagagtatggtgctgtttacactgctcacgagactagatgttctcagtgttcacactggcaaccccgactgtcagacacctaggtggtacagctgaggggccgtggttaagttttcatggccagagaaaccaggaactggtgacctattttctttttctttttcatttttctctttgcataagtaaaacgtataaacaatgagtaatcctgagaattcgccccacttcgcctgtctggaggaggcggagaaatcta

SEQ ID NO: 35089 - DNA, 473 bp, Mus musculus
  source 1..473: mol_type = other DNA
gctgcacttaacaagtattaatagctaccaaaacatacctttcttatcaataaaacactttatttttaataaaaggaattcagtgaagttactgagtattaagacggcagcttcagtatcctgtggtttcacagagatggctcaactcttaagagcactgactgcgctcatgcccgtgtgtctgaagacagctacagtgtactcatataaataaaataaatgcatctttaaagaagaaaaagtgatataacaaccttttcactcccagtggttattacagctttagttaaaaaaaagaaagctcctctagtagcctgtactttggaactccaagttccagaaggactttttggactccagaggacgcttcctcgagtcacagcccacctggaggcatgtggtggcggctttgcagaaccctgcccaggcagcgtaccgggcagccccagctgggtcctcccggggccttcctg

SEQ ID NO: 35090 - DNA, 361 bp, Mus musculus
  source 1..361: mol_type = other DNA
tctcatagtatatagtattagctgcacttaacaagtattaatagctaccaaaacatacctttcttatcaataaaacactttatttttaataaaaggaattcagtgaagttactgagtattaagacggcagcttcagtatcctgtggtttcacagagatggctcaactcttaagagcactgactgcgctcatgcccgtgtgtctgaagacagctacagtgtactcatataaataaaataaatgcatctttaaagaagaaaaagtgatataacaaccttttcactcccagtggttattacagctttagttaaaaaaaagaaagctcctctagtagcctgtactttggaactccaagttccaga

SEQ ID NO: 35091 - DNA, 597 bp, Mus musculus
  source 1..597: mol_type = other DNA
caaatcttaactttttgtgactggaaaaaaaaaatctttgttttgttaagattcctgtgtggaaccccagtctgtgaaccaggccggttgcagaaacacacttccacagtttaagactaaggtcctctattctcaaacattttgtgcataattttggggctaccctagatccttcagtagacccatcaagggctcttcccaggagaacgcggagctcctctctcgtctggcagatgacaaaggccatgctatgacttgcagtgaaatcaaaccaaaacaacttgtcaagcacttctgtatttgttacaccgcttcccatttacccgggagaaaacgcgacccggggaggagcagaatcccgccggggagcagaggaagccgggttgtgctggctctgccttcggctggcctcctcctctggcagccgcagagtccggcggcgtcccggcagccggcgtgcagggctccggccgctgtcaaaacctcagcctgggcgcgcgccgccccgcccaggcccccaggcgagcggcacgccctcgagccgccatttccggcagcccccaagagtcgcggcccgagcggctgtgggcagcagcg

SEQ ID NO: 35092 - DNA, 760 bp, Mus musculus
  source 1..760: mol_type = other DNA
tttttcaaaaaaaaaaaaaaaaaaaaaaatctattttccagttacaatttggcgggaacaggaagtttgaaaattcaagtgccgaaaacttcaaataactcgtatgacatacatgtaataagtatttcatttttaatttacaaatgtccccagcaccagggacttatgggggcaccgctggtggctgcgtttggaagcagagcttgcccagctagacgacaagatgcttcgcgcccccaagtgctctaggtgccggaaccatggctatctggtacgacaagtgctacctgatcaccgagcgccagaagatcatggctgcccagaaggttctcagaacccaagctgccgaggagcaggtggcgaccgtgggcacgcagggtccccagctgcctcctagggctccagcagcggcggccaccgccttgagctccagcatttgcccactgcctagggcggttccgggaggcgttgggccaggccccacggccacttgcttcctcgagaggcccccgcaggccccgagcccaggcccgagcaccttccagctgggcccaagtggccgcccgggccccagcaccttccagcctggaccaggggcccccgggggactgcgcgaccgttcctccgcgtggctgccccagctcatgccacaggcgcccaggccggagcttgctacccggatcagcacctgccagtgcggcccgtgccagtgccagggccagtgcggcccgtgccccgactgccgttcgccgactacggt

SEQ ID NO: 35093 - DNA, 540 bp, Mus musculus
  source 1..540: mol_type = other DNA
tgcttcatcaatttttaagtagttgtgtttggcttcataaagacaattaaaagaccaagtaattcaaattagttccgaactatcatgttttgctttagaacattgtttctctgtgtagccctggctgtcctggaactcactctgtagaccaggctggcctcgaacagcatgcatttttcagaccctagtgcttacacaaacaggactcaaaaactcatggtttctgcaatgcctgtaagtattctggaagcagaactgctctttttctctacagatgaagcagaagcagctgcttcacagtgttctctggaactttccaatagtacgggtttactaatctgttcattgggagttttaaaaccctcgccttttttcaaaaaaaaaaaaaaaaaaaaaaatctattttccagttacaatttggcgggaacaggaagtttgaaaattcaagtgccgaaaacttcaaataactcgtatgacatacatgtaataagtatttcatttttaatttacaaatgtccccagcaccagggacttatgggg

SEQ ID NO: 35094 - DNA, 392 bp, Mus musculus
  source 1..392: mol_type = other DNA
tagtcctggcttacctggaacttgctatgtagaccccacatgtggcagtgacctgggatttttaataaacagtccaggtgatcctagaagacattaagtcctcccacatttgaagttctagtttgtatctccttgaatgattcctcaataaacaaattatgtagaacactactattattcaaattgctatgctactctaatattaaggatacagctcagccgtagagtgcttgcccagctctgctgagccaggatccttgtcagatgcgcctggtcccttgcacgggctctggagtcccaagctcttgtgagacttgagctgccagacagtgagacatacccagtgggtgacaataattacacagggatgggccaccagggccttgttccca

SEQ ID NO: 35095 - DNA, 425 bp, Mus musculus
  source 1..425: mol_type = other DNA
gggccttggcaccctcgcgcgggcctggtttacaacccgtgcccaagaatcacactctgagattgttgtgctgctgggccaggctcaccggcagacactagatgtgctgcctctggcggcaaggatgacacatctagtccaacagagaaatatggataacagtctgtgcaccagacactcacctctctcaggatcacacagtgataatcacagatgcaccctcttgccacctccacggggaaaccaggggggccagagcctagccgggctcgtcctagcgtctacagctcttagcacctgcgcgcacacagagcaggatcggaggcggcggcgggagggagcgcgcgcgccggcggcggctgcccagggccggggccgcgcgcccagcctgagcccgccccgccgccgagcgtcaccgaaatgca

SEQ ID NO: 35096 - DNA, 228 bp, Mus musculus
  source 1..228: mol_type = other DNA
tcaggccctctgggtcaggtgccaggagcagtaggcatggccacccctcccccaccgcaggcccggatcccgttcccaccgctgtggccagtctgcgcaggggagacccccgctttgttactccaagcttctcaaaaccctggcaccctaatgatgagggcactcagggagggctgggtgcagaggctgctaggcctccccttggtgtattgcatggatgcatcacct

SEQ ID NO: 35097 - DNA, 224 bp, Mus musculus
  source 1..224: mol_type = other DNA
gccagcctggatatctagacatgttagcttgaaagttcaaagacagctaagtaaagccaacttttggtctcaaactgatctacacactggggagtggagtgtgaatactcaagttctcggatcccaagatcttccagaacgcgtctaggggagggggcgtggtaatctcgttcccgcctccggagagtgagaaactcttagtgtcgcggtggcagacgtcattt

SEQ ID NO: 35098 - DNA, 277 bp, Mus musculus
  source 1..277: mol_type = other DNA
tccggaactgtaaggtggcaggctccaacccccccctatttatggtgccctctggtgggagctgcatgcatgtggagcacatagccaagcatggtgacacacgcctttaatcttttgagttcgaggccagccaggtctacaaagttacacagagaaaccctgtctctaaaaaataaaaatgggaatctgagcctcaggaccacagctggcagaggcccggcccgcccacccgcactgaggctgcgcggcgacgccggccttttacgacgggtcggaa

SEQ ID NO: 35099 - DNA, 507 bp, Mus musculus
  source 1..507: mol_type = other DNA
tcaagaatctttgaattcctgaaaagtttgggacttcaggacccataggacaagggtttcctcttgctgttttgtttttttcctttgaaatattcaatctgaaaaaggatgctcatttccagctatgtagctgaatataggctagaaccagttatacatttttaataatatttttattagatattttctttacatttcaaattagtatgagtaaagtattctgcctaacaaattatattggtgaaataattctctacttagaagacaaaggtttgaaatgttcttggtctctagagaccaagccttgacaatgatttctatccagttctgtgaaaggaaaagagcatgcctgccaccttcgggcaagaagctgggcttactatagagaccgcttccggcccaggtgggcgtggccgcctcttgggcgtggccacgatgtgggcgggctctgggagaggccaagtgtgggcggggccaccgcctatcggtgcccggaagtgcccctgt

SEQ ID NO: 35100 - DNA, 449 bp, Mus musculus
  source 1..449: mol_type = other DNA
tgttcatatgtataaaaaagaataaataagaagggttagagcacccgactgctcttagtgtctgaaacagctacagtgtacttacatataatgaataaataaatcttaaagactccagtgtacttacatataatgaataaataaatcttaaaaaaaaagaatacttttaaaataaaaaatcctgttgtcattaggctgaggtcaggacaactaaccgagggacccaggctcttggggtctcagtggtctcagatctcaatgaggtcactggaacccagacccaaagtgttgaggttgagctcccccccccgctcacagggtaagcctgggcactcctggagactgacgtcagtatgaatcatgctgactacatctttccggaataggtggaggtgaagcacctctgcttcctctcatgaggactggacgccccgaccacgtggcctgct

SEQ ID NO: 35101 - DNA, 429 bp, Mus musculus
  source 1..429: mol_type = other DNA
tgatagtagtaataataataataaatgtgtttaaattttaaaaatctatttatttgtatgtgtacaggtattttgcctacatgaatatctgtgtaccaccaccagatcctctggaactggagctacagtatgggtgtttctcctgcaggaatttctgtgcaacacaaacatgccgagcccctggaactggagttatgagtagccagggctcctaacccctgagtctatcctctagagagactgtcttgggtattgtatgaatgcatcacctgtcataaataaccaggtgttgtgattataaaaagataaaataatattaagatatgttcggggtgtctcagggggcccatgctgaggcacccccccccagcagtgtagtatagaatacagtttggccaggcctacctggctgttgcctggtaactccag

SEQ ID NO: 35102 - DNA, 330 bp, Mus musculus
  source 1..330: mol_type = other DNA
gcagccactccagagccctttaggccaaacagtgggagcaatatggagtgctctgacgcagcattagccatgctccggaccctagggaaggagccctctcggttctcctcaggtgcggggggcctgcctgggtgcggtcccagcccgcaggctggcaggcggaggtggggcgtggtgctgcggccggccggggcggcggcgcgagctcccgggaagtgggccccccgccaagcccggcgccgtgggctcggccctccctctcggcgcccagcgggaccctgcgcctgtgtcgggagaggccggcgtccggcagatgcacgcggggcgggg

SEQ ID NO: 35103 - DNA, 424 bp, Mus musculus
  source 1..424: mol_type = other DNA
atagtaatagagacacagacactcttttttttttttttttttttaggggatagtaatatatacctttttttcctatttatttatttatttatttatttatgactgtagctgtcttcagacaccccagaagagggcatcagatcgcatggttgaaccaccctcagtacctttaagaacagtcagtgctcttaacgtaaggttacctttcctgttgccctgatctgacttaatttttaaaaaacatcttatccgcacctagagaatccccacaggattctgagtttcctctgaggcggccttccctctctcactgtaaaaagaggaagcatgagaaactttgcctgagtctaacacagtggccccgcccctgacgctgcggccccgcccccgacgcctggggttgggataatcggacccgacccgg

SEQ ID NO: 35104 - DNA, 273 bp, Mus musculus
  source 1..273: mol_type = other DNA
ctctgacagcgtctcagtggtagactaggctagctttgaacacagaaatctgcccgagatctgggattaaatcagtggcttccttctttcctctgcaaaggaaggctaggtcgtggaggacagaaactggcagttcataactgtgagccaaagttcttacagcctctaggacagcagaccttgtcagtgggtgcagaccaccccacagttggggtctgcaggctcgcggaccgcaggtggagcccttggcgaggcctcgcccgccccggaact

SEQ ID NO: 35105 - DNA, 357 bp, Mus musculus
  source 1..357: mol_type = other DNA
gctgtctggaacattctgtagaccaggctggcctcgaacgcagaaatccgcgcccggcttggggctgaatagaaggatatttgcctgaatattactctttagaggaaaatggctgcagcttacatgccccctgcctccaggcttcagcagtgacagctagctcactccaggctgcctgtcagtcactcaaggctgcccgtccgcaggaatcactggcccgcaatgcctgggccaggacggatctgatcctatttgcagctgctggaagctctggcccagcttcgggaagaccagcaagtccgggtcctgctcttcagatgccttagggctctggcatagccaagtttgagattcagt

SEQ ID NO: 35106 - DNA, 311 bp, Mus musculus
  source 1..311: mol_type = other DNA
agagattggttagtttcaaactagttttcagaagaaaaccttcaacctcatcaaggagtcaaacaaagcctttgaaaatgctttttaatttgtttaaagcacttaaaaatctggcacgtggtagagccctgaaaaaaaatcaagccctggtgggtggctacttctttaataccagtagtctatgaacttggagttctaggaccagtgcgaacgccctcggcagcgtgggtctcagggcgctcggcctccgggcggggtcgcggcggacctgtgcgcggcgtggggcggccattcaaacgccggccgacctt

SEQ ID NO: 35107 - DNA, 317 bp, Mus musculus
  source 1..317: mol_type = other DNA
aagtcactgtcagtgatggaaacttatatacatttactttgtcagtgatttgaaggcaaaaatggcatagctaaacaccgagatggctcatcggttaagagcaggtggctcatctgtaatgagatctgatgcagctacagtgtacttggatataataataaataaatctttaaaaagtcaaaattgagattgtggcatatgctataaaaaattaatgactatgaatcagaagttaagttttgaacctcgtcagagggcgttggcccctttaaggacctcgtgcgggggggcggggcgcagcaggcgcggcgagcgag

SEQ ID NO: 35108 - DNA, 375 bp, Mus musculus
  source 1..375: mol_type = other DNA
cagttttagccagaggctctggagtaacgatgtgtcatggaactgcttttaaaatgttgcatcatatgtattatagtgaccatgttgtcactataatcccgaccactgatgtgttctaatcataactcgcagtcatattaatatggatgattttgatgtttgggacacacaaggtattcaaaatggtgagctgcagcccaacgctgtaagctttggtaaggctgggacctgagctcccggctgtgtcggctttagaaccggaactaccaccgcaaaggatgatgggaagcggtaatcgtctccttccttccaaccgaggagcgctgacgtcacgcacgccgccggcatgccccgcccctgggctggctcacgtaa

SEQ ID NO: 35109 - DNA, 428 bp, Mus musculus
  source 1..428: mol_type = other DNA
ggtggtactgtaccggccacaactgtagttttggagttaactgtaaaatttttagtgtccctcactgcagtgtgttaactcattgctattgagatctcttgtcactaacttgagattgcagctgcttcttggctcctgctgcacctgactgactagatcagacttgtctcccacacttgtctggggaaacactacattaacctaaagtttgagtccagtactcccaattctacactaggtaatattccctgagcttgagtttgagattttggtctcagcctcaagaaaacaggatcctgcgatctgaagctaatccagagccgggactctgcgcctgcagagacgactgagaagggggcgcgtcctgcccagcgggccgcctcctcccgccccacacggcggggtcccctccgccttgtctttgccct

SEQ ID NO: 35110 - DNA, 581 bp, Mus musculus
  source 1..581: mol_type = other DNA
gaaatggttttcgaactatttctcagggtggggggctccctcctgctagctgctcgacagtgctcagaagtcaggagagcctgcacatctacggcctctccctggggcacagctaggcaacctgccccctttcccgcccgggggcctcaggcaaggcgcccgcagccagggagcctgacgtgtgcacgcgaccctaagctcgccggcgtcctcgcgccgcttcccggcgtcggcgtgctggaccgcctgcaggcccgctccagccagcgagccgcgggtagctccctcgggggcccgcccgcccccagctcgggcgccgatcggagcccgcgcgcgctcgcccgctctccctcctcagcgcgggtgtgtgcgcgccgtcctttccgggcgaccgccacgagccccggaactctaccccctcctccgccgaggtttgacgggtgcttgggggggatccccagaaaagagggagcccctgaacccagctctgggaggctctgctccccgcctccgaggctatctcctcccatcccaatcgggatcccaggctggggagagcctccgactcccctcccccctcg

SEQ ID NO: 35111 - DNA, 441 bp, Mus musculus
  source 1..441: mol_type = other DNA
ttacagtagaaaataattacgattattcgacttctatggctcaaagcttagaactcccaatttttctccagtgatcccagaaagtgacttagagaaagtctgtctctccgcggttcgcggtgcttttcaagcagtgcaagccttaggctccccaccgagggccggcgccacccgcttctccgaggtctccttcagtgcaggaagtgttcctggagctccggggaggcgaggcttgcgagcggtgccggcaccgacggccctaggtgcacgtgtatgcagccgtggacacagtccaggcactggagtagctgggggacgctcgctcgtccaggtctggctcctccgggagacccgcagctctcagctgcccacagtgtgattctgattggcgtttcggacactcgccacgccctcccgggggttccttaaataaatactgaa

SEQ ID NO: 35112 - DNA, 506 bp, Mus musculus
  source 1..506: mol_type = other DNA
tccccaatctaattctgaaaaaacagggtgctagggcctgaggcagaggcagtctctaaattcgagaccagcctggttctgattacagtagaaaataattacgattattcgacttctatggctcaaagcttagaactcccaatttttctccagtgatcccagaaagtgacttagagaaagtctgtctctccgcggttcgcggtgcttttcaagcagtgcaagccttaggctccccaccgagggccggcgccacccgcttctccgaggtctccttcagtgcaggaagtgttcctggagctccggggaggcgaggcttgcgagcggtgccggcaccgacggccctaggtgcacgtgtatgcagccgtggacacagtccaggcactggagtagctgggggacgctcgctcgtccaggtctggctcctccgggagacccgcagctctcagctgcccacagtgtgattctgattggcgtttcggacactcgccacgccctcccgggggttc

SEQ ID NO: 35113 - DNA, 252 bp, Mus musculus
  source 1..252: mol_type = other DNA
aggacagcctggtcagaaaccctggaccggtgagccctgcggtgctggtgtattccttgaattccagcacttacagagaaacccaagagaaaaagatcgtgtcagatttgtctgtgtcgttgacatactcttttcagacagaagaaaccacccggcgggctgcgcggggcatccttcttcagtatttatttaaggaacccccgggagggcgtggcgagtgtccgaaacgccaatcagaatcacactgtgggc

SEQ ID NO: 35114 - DNA, 426 bp, Mus musculus
  source 1..426: mol_type = other DNA
aaggatcatttgctcctaactgacaccagttctgaggtgctttaaggctttaaagacacttgggccctgagcatcttgccgatcccgcgtccggacggcgaggttccctggtgtgagcgcacaggcgtaagccactccaagtgtcacatttcggactgcaagatgctccgctgccgcaggccggtcgcggccctcccgatgccaggctccgcccggcccgacccaagccggtccacacgccgggaagcgggcacgtggcatacctcgcggcggatccgcgggccttctcgagcccggaaccgcctagctttccgcggcccccgggcggccgcggcggagacagccacaggaagctcccgcccaggaggcggtggcaggcgcccggcacgtgacaccacagccggcgggtcgccgtgcgcatgtgcg

SEQ ID NO: 35115 - DNA, 489 bp, Mus musculus
  source 1..489: mol_type = other DNA
caggcctgcacttctggaagttgccttagtaaggcagtttatgagtcagagttcttactatgtagccctggctggcctaaactagaccagctgcaggcaaactaaaggactccctctgcagaactgatctacagaactgaagcctgcagtctctccacgaagtgagactacgcacgtggtgtggggtaggactccttgaggtagaggcgacccttcagcttgcagggatgctctgactagaaaggagctctatttcccagagagctggtcatcctccaggaagcacagggacgcggctcggctgcctattggtagccagtaggagctgccgccagccggtatcgcgttacctgctccaagatgcctgcgcgcagccggccccaccctcggcgtcacctgtgggcgcgccccgcccgcttccccgcgcacatgcgcacggcgacccgccggctgtggtgtcacgtgccgggcgcctgccaccgcctcctg

SEQ ID NO: 35116 - DNA, 286 bp, Mus musculus
  source 1..286: mol_type = other DNA
taaatattcaaaatgcaaattattatctttgagattggaatttccacaacagcatttcattgtttttgggattccaaagagactcggtaagcccgtttcgctgtgcacgcggagaagcccaaagttactacctgaagaaggggaccgccgcctcctccaggaagcagcccggccgccaatcagaggaggcaggcgcgcagttgccgtacccacccccaccccgcctccctcccgcggtcgaggcggggccgtgcgtcacgtgggcctctcccgccgccgccgccgc

SEQ ID NO: 35117 - DNA, 180 bp, Mus musculus
  source 1..180: mol_type = other DNA
attggcggccgggctgcttcctggaggaggcggcggtccccttcttcaggtagtaactttgggcttctccgcgtgcacagcgaaacgggcttaccgagtctctttggaatcccaaaaacaatgaaatgctgttgtggaaattccaatctcaaagataataatttgcattttgaatattta

SEQ ID NO: 35118 - DNA, 340 bp, Mus musculus
  source 1..340: mol_type = other DNA
gctgttggaggattgccaagtttaattaaaaaaagatacccagctaaatttaaatttcacacaaaggaaaattaaatatgcccatgtaacttatgcaactttttaaaaatctcaaaatcagatttaattggaaaatcttcattgtatttggcgactctatccacgatggaaatttcaattattctttcaagttcaaaaagtcttcaaggaggtaaaagtgtttgaaatagttgttatgaataaacatttactaagagctactaggtttgaatgcccattaaatcccatttaataaataccctcagagtgtaagggaacaggaagctcggttttctcttcc

SEQ ID NO: 35119 - DNA, 329 bp, Mus musculus
  source 1..329: mol_type = other DNA
ccagtcgctgcaaaagcattggtgggaaagttacttgaggttagtagcctaacatgttcttgcttttcagtaaaagttggccaaacttaaaggtaggaccaatggtttggcagcctacaggatggaaagcccggtgctctgctcttttaaaaaagagacccgctgagtcactctaagatcagcatccactttttctcagacacggagcgctacgcggttttcctaaaaacaggaggggttcaggcctgtcctccccagcggctggggcagcaacaacgccggccgccgccgtcgcccctgggacgcggaggaggaggagtgtccagcgc

SEQ ID NO: 35120 - DNA, 290 bp, Mus musculus
  source 1..290: mol_type = other DNA
cgcactcacatgacagctcacaattgtctgtgaaatccatataagaatttgaaggtgacctaccactcctggaagatctgaactccatgctagtgaatcatttcaattagaattcttgcattagtcccatgagtcctgaaccaggatactttatagccagcttcctcaccctgtaggtgcaaactatagaatgtgggcagattataaaagtcacccagatatataggggcggggcggatcttacatgggttccgcccaggggcggggcttggacccagcgggaacccaac

SEQ ID NO: 35121 - DNA, 637 bp, Mus musculus
  source 1..637: mol_type = other DNA
acttgtagacaattctaaagttttttttttataggcaaattgggaattaataggattatttctaattgttaatggattaagaaatcacagacatcctaagattgacacaattgtgagctctaccttagctcccaaaatgacagtattattaaatcttagattcttacctctaagtttctaaaaaactgcaagttttctttgataaagcaattaggtgtgaagagaccaaatcatttaaaagattccatgcttttaagagtaagaaatggtttctataatttttatttgagaaatgtgagccttatttaaggtaaataattctcattaagaaatgaaatgggaaaaaaaatgttagcttttggagaagttaattactttcctagaacattttttaaattatgtttctgttctttgaaaagaagtttttcttgatctgaaaagttaataagttaacaagattgaaatttaagtatgatatatttgaattatgatttgttcataattttgagttttataactcagttctcaagtataaaattcttgggtagaaaatcctcaagtatgaatttcttttctagcaatcgcagaacctgtttttgctgtggttgtttaagtcatcttattcaaaaatgtcttc

SEQ ID NO: 35122 - DNA, 765 bp, Mus musculus
  source 1..765: mol_type = other DNA
tagaaaatcctcaagtatgaatttcttttctagcaatcgcagaacctgtttttgctgtggttgtttaagtcatcttattcaaaaatgtcttcacagaacaggttagactgtgcttgaagaagtggctaagtcttcaaaaatgggacttgaagtatcaagtgaggctgtttggctcttttagaaacccaaggtgcatgctatgttataaggacaaccttatcaaacagtgcttcacaaatgcactagttctgaaaattaatacaaagttggaaaagttaatatatactttcctgttttcaaatttactatttcgtttacttaaaaaaaaaaaccccaaaattttaactaatgatgatagtatgtgttagtcattaaaaacagaattttgtgtatatcttggccatctatttttgttaaaaatgaattttcccaaggaatttggcaaatgcacattgataagtaatacatgatttatatgtgtgtgttcaagcaaaaggaagaactaaagagcctcttaaatcctattgctgtagctttttaatagcaagttttctcttttaaccatttacttactattttattaaatattttcctaaatggtttttctgagtagcacactgagaagtcttgagtgtcttgtaactgagttactcagcgtaaacattttaaattgcttatctgcagaattccaaagcctagtaactcacgtggttcagagtcctgaatcagcagcgtgaactgcggcctgccgggaggcccgggagg

SEQ ID NO: 35123 - DNA, 425 bp, Mus musculus
  source 1..425: mol_type = other DNA
actggaattgaaaacacatttttagtttgcattttagaatggatttgaacattttgcaacagttttaaacagtgtacagcagtgtagtttttttcttgaactctgtgtgccacaaaaatgacagcaaacaattggatgcttcgatgagaacaatgccaatcattggtgtctccaggtcctccaaggaaaaaacagacacccaagctcttgtcagcaacgcgggtgggaaccctgagcctccgcggctccttcgcggccctcccatgcaggtgacccgtggccaatcgccagggacctctttgccagggccagccaattggggctgcgtctggaccgcggcgcagggggagggcgggggagggcgggagagggcgtcctccagcggctccagggctggggtgcggggcgcggaggggcatccgggt

SEQ ID NO: 35124 - DNA, 309 bp, Mus musculus
  source 1..309: mol_type = other DNA
gagcagacagatctctgtgagttagaggacagcctggtctacctatatatagacaaaacttatgttacaatttaaaaaaaagttttatgtagttatgtagtcaaggattatcttgaacttacaaaaaaaaaatttagttttagttatatgtactttagtaagtgctggtaccctcagttctatgccactataaataatctaaatatggtccaccagctgcacagaggagccgcacctggccccgccgccctggtcccgcctaggctctcggagaccccgccccctgcatgccgaatgccatataggcga

SEQ ID NO: 35125 - DNA, 440 bp, Mus musculus
  source 1..440: mol_type = other DNA
tttttttttttttttaaattaaacagtctaagcagttccttcttgcaaggatttacatgccttcttaatgtgatagcaggtagaaagatttgtaatccagctttctagttagtaactctcagagattaaaggtatgtgccaccatgcctggaatcccctattcacacaattttttaaaaaagtatttaggcctggagtagtgtacatctccttaatcccagcactcgccagcctgatagcacaatcagaattatttaatgttattactactaaaccgctcctgtcattacttagtatctgtggcgccgccccccagagccctatccgcaccgggttttccagggaggccggggtcagggcctggttccgcggctcagactcccgctccgggctttgcgcgccgccacggcctgtgaggccggcggggcggggcggggcgg

SEQ ID NO: 35126 - DNA, 599 bp, Mus musculus
  source 1..599: mol_type = other DNA
tgcacggcccgcgccccgaggcggcctccgccactcaccccgccggcaggtcgcccgggccgctggccgtggtcatcgctgcgcgcgccggacgccaggcgcagcccaggtgctgcggccggatcccagcgacgcggcggccggggaggggcgcgccggggggcggggaaggcgacggggccgggccggtctcgggctgcccacccgcgcagtgggaccatggccgcgcccgcgcagcgcagcgcccgcccctggcgctggccaggtgggacccgggcgctcaaggtcggcacagcctggccttggagcatcggcgcagagagcgagatctccgggccatgagcggagaaagcctagcagacaggcgtggacattcattctaaccgcttgcccaaacggggccagtgttttggcgggttagcacgcaccgctagcaggctaaaattgccatttttttttttttcagataaactcgagcggttgagttcatgtgacctgtgtagagccactctacagctctcacttccagagtgagtggggcccattaagagttaaccggccactacctctgggccccagatgctctggtgactcatccc

SEQ ID NO: 35127 - DNA, 477 bp, Mus musculus
  source 1..477: mol_type = other DNA
gggatgagtcaccagagcatctggggcccagaggtagtggccggttaactcttaatgggccccactcactctggaagtgagagctgtagagtggctctacacaggtcacatgaactcaaccgctcgagtttatctgaaaaaaaaaaaaatggcaattttagcctgctagcggtgcgtgctaacccgccaaaacactggccccgtttgggcaagcggttagaatgaatgtccacgcctgtctgctaggctttctccgctcatggcccggagatctcgctctctgcgccgatgctccaaggccaggctgtgccgaccttgagcgcccgggtcccacctggccagcgccaggggcgggcgctgcgctgcgcgggcgcggccatggtcccactgcgcgggtgggcagcccgagaccggcccggccccgtcgccttccccgccccccggcgcgcccctccccggccgccgcgtcgctgggat

SEQ ID NO: 35128 - DNA, 472 bp, Mus musculus
  source 1..472: mol_type = other DNA
tgtagaccaggctagcctcgaacctattgggaaggcatatatatatatatgccttcccaatacatatatatatatcctcaatcattcaaaggactttattcttaaaggataaaggagaaggaagctaaacacctcagctatctgcctggtccattcagatcgctggctgcagccgggcccagccacgcagtccaggagtcggacgcgcgcgcccggggcggggccggagcacgcacggcggcatgacgtaggcctggccagcctcgttctggccaccgccgccgcgccgaggcggagtaggatgaggccccgggccgcggctccagcgtcggcaggggcaacagcagctgaggcagcagctgaggcaaccgagacggccgcgcccccccctcctgacctggattaggcccagcagcccgtggccgccgccgccccgcggggggcggggtggggaagcgctcagtcttcccgc

SEQ ID NO: 35129 - DNA, 332 bp, Mus musculus
  source 1..332: mol_type = other DNA
atgtctatataattcatgtgagttcattcacattaaaaacacagacctctgaattctagactaggactacacagaaatgtagactatggaatctagagctatagttcactaatcttttcaagaaatgtataccaatggagacctatgtagacctagttgtcctgggtcttactacatagaccatgcctggcaacaataattttagaaaaatatgcttcgaaagggatcatttccaagtttactacctttgcagtagattgctgctatcaacctgtgacttcttttatggcatcattgctctcagattccattggccagaactctgtcacatg

SEQ ID NO: 35130 - DNA, 256 bp, Mus musculus
  source 1..256: mol_type = other DNA
ttttataaaagtgtagaccaggctagcctcgaacctattgggaaggcatatatatatatatgccttcccaatacatatatatatatcctcaatcattcaaaggactttattcttaaaggataaaggagaaggaagctaaacacctcagctatctgcctggtccattcagatcgctggctgcagccgggcccagccacgcagtccaggagtcggacgcgcgcgcccggggcggggccggagcacgcacggcggcatg

SEQ ID NO: 35131 - DNA, 335 bp, Mus musculus
  source 1..335: mol_type = other DNA
tccaaacttacacctgcaaagggtggtgtgtgtgtgtgtgttaacagggtcgcagcccactctggcactctggtaccagaattactaaccaaggtgcctttcttttaatttctctatgaataatacataaaatatcgtttcctgagaaagcaatctacttggcaatgctatttactttatcttgatcatattaaatatcagaatttaagctttcaccggttccggatgagatggggtaaagttctgtcccttttgtgtcccagacttggactaagtctgggtgcagcagggaagaagctggagccgggcgctccttctgtgcgcgcagaaaagcc

SEQ ID NO: 35132 - DNA, 519 bp, Mus musculus
  source 1..519: mol_type = other DNA
agcggcagaggcgacggccgcccctcagcgagcgcttgcagtgaagagcctgagctagctgcaagagcgatgctgccgcgagctaccccagcggctggagccccttcgccgtgcaccgtcttcaggctgccgggagtcccgggacccggcggggccggcatgacgggcttggcgggggtctgccgcacacccaccagcctccggagacccgcgccctgcccggctcccacggcctctgaggctcggcggggctgcggcagctcggcgggcgggctccggaggctcttctgaagacgccgagcccgcttgagagttgagggcttcagagctgctgctctggtctgccctcagcatccagccagcgcggcgctctgctagcgagcgagcagcactctggacctcacagagctgtaaagcttaggtacgtgtagtaattaatcaagaactgcttcaatccttcttaggggttaagctaaaaagctagagaaggagcccctctccaatgggctcactactagt

SEQ ID NO: 35133 - DNA, 600 bp, Mus musculus
  source 1..600: mol_type = other DNA
aatgcaaccatgctggtgtttttttaaaagcataaaagtatagaaggcaataatctcatatgcctaattgatgaatatgaaatatatataaagacatagcctttttagaaaacctttctaactcactgtaagctttgtttaaagttaattggactagaagttcacatctcataaaactcggtctacaagcctctgcagccctggcaatgacctgacaggtgccaaggcctgtggcagagcaaaggagtccagcagccccgggccaggccactcgaactcggcgagcctggtcggggagcgccgaggagggtggagctgcccggctccagcagaggagatcctacccgtcagctgcagggccgccgagcctctaagggcctccgcccgcacccgcggccttagttaccaccaccggggtcccgcacggtagaggctcgcaggccaggccgggccgaacccaccccgcttcggcagggagcgccagcgaacccaggcccagcgcgggcagagaagggcgcagggccgcgagggcggagcgagcgggctgccggccactgcgccgccagggcgttgggcggggcgtgggcggggcccggcctt

SEQ ID NO: 35134 - DNA, 603 bp, Mus musculus
  source 1..603: mol_type = other DNA
agattgaatatattgtcacggcaattacaaattgtcaaggttgctaatttctgaccattagttgaaatcttcagaaattatgagtaagtgtaccataccgttacttatgaaaatattttaaataaaatatgtgaaagtgtactcaagttttctacatgtaatgctctaaaaatgtagatattgcagtagaaatattttcccgtaaatatcaacttaaaaatgttcagcatccttttgagggtttgtgcctgagattgcagactcagaaataggacatgaggcgccgaatcacagtccggcctcggccagggggaggccgcacctccaggcctaggacccaaaccggaataacctgttgcgggtcctcaggctccggggggtgggggagacgcacaacggcgtccttgccacacaggccggcgaccccgcccgcaagccgagcgccaaagcgcttgacaggagggcagtcacgtgacagccgcaaagcgccgacagcccaggcgccggccaaccaggggcggaggcggcggccgggaggcggaggcggctgtggcgttggcccgcctgctccttcccccgcccccgtcgggtttgccgtggctg

SEQ ID NO: 35135 - DNA, 396 bp, Mus musculus
  source 1..396: mol_type = other DNA
ggctgatgggtctgaccgtctggccggttcctccagcctccagaggatctggggagtcgcaaaggcggctttttactttggctttaaaaaaaaaaagttacaagtaaactttgttaatttcaaaagaagctgcagcgcttggacccacgttcctcccggggctcacgcacgctctcaactacctcggagcccgtcggacgtgggacagcggtaattgaattgtcctgtcccgccccaggcctccggggccacttgggaagctaggccttgccaagcgccccgggccaagggagagtggctcagtggtctaggcgcaaagcagagcgtgcggagtttcggaggggctccccgggcgcgggcccggccaatcagagcgccgactgtctcccctggcca

SEQ ID NO: 35136 - DNA, 381 bp, Mus musculus
  source 1..381: mol_type = other DNA
aatgtagtcaattttgaggggaattgtttcaaggtaaaactccttaaaatatggtataatgtgaaaatactgagaactataaagtaaataagtctttttcccaaaaaaagggttctgtcactaagcttacgttagcatatttttcttcaggaaatagtgggcattctcaataatccatgatcattttaaaataatcaaaaagggtcaaagaagcccctttcacagatttgcagggctagtaatacaacctctgatggtcagaattccaatcttacattccctgttaaagagaaggtctgtcagtcttgctccttgaagggaaccagggtctcaggatgggtcctccgactccacgtcaagcgccccctagaggcggcggcg

SEQ ID NO: 35137 - DNA, 506 bp, Mus musculus
  source 1..506: mol_type = other DNA
gaaagcaaaatttttttaaatgcagagcatgcccctaagttggaaaataaattcatttaaataaatcattcacccttctctgtcgtagaaagcagaaagtttcttaaactcttaggaaatagtttttaaggcaaagttgtgaacccaattcactcaacaagcttaacttttgaaatgttggtcatgttagctgtaaaataataaagttaaaatgtagaattattagcacattaaagtgcttttgttgtatctttaagcctagaggcagatcattaaatatgcatttgccctctatcggagggatgggctcctgtattgcagtcctccaatgacctgcagttgtgacaggacttttaaaaaatacaagcatggctgttgttgcttcagccgggctttaattaccagacacaagaagcagttcagaaatctggtctctgttgttgtagaggtcaccagatcattaaccaatctggcagtagctaatttaaatagcacctgattctggc

SEQ ID NO: 35138 - DNA, 366 bp, Mus musculus
  source 1..366: mol_type = other DNA
catgttgtgaattttaaactgcctaagtgtcaaagacatgtctaaagtagtttctatccatatctatcaatattttttgtgtgttaaaatattcttatggtgccccatcttatgacatctctagcattttacctaaaaataatgtcccagttgcagaggagccaggagccagggtctttagttgctaattattcaattagttctcaatatttgtaaaattaagaaacttatcccaagtacttttagttttgacaataagcaagctcaatccccaggttactgtggcttgggtgcagagtgcacggggaggcggagcttcggctgcacgctctcttctgccccgccccctgctcccagccggccgct

SEQ ID NO: 35139 - DNA, 328 bp, Mus musculus
  source 1..328: mol_type = other DNA
ttactgtgtatgtgaaattctgtttatcctttctgacaaataccctggtattgagctagacaattggaatataaataaggtgtggtttgaccaacctttccaggttctcatctgtgattttggaaacagagaagggaactgactcgaagaggggtgccgctgctcccttaggataaaaacagccctggtctaaccctctggtatcccagcagctggttcaactggaactctagttctggccaaaaactggtttgcaatcgcactccggctgtgaccctcccttttccgcgcccaggcgagagcagccgattggcaagtggggggagcc

SEQ ID NO: 35140 - DNA, 269 bp, Mus musculus
  source 1..269: mol_type = other DNA
caagatacttgggcctaacactagctgctattcttaaaaagcagttcatttctgagcttgagaaaggtaaggagcttgcctttggccaggaccaaatgattcagacactatattgagtcagtacatctaccttcaaagccttctgtataccagcagctgcctctaaacgaaagacccacaaccttcatccactctctggccagtgatggaggcagctaaggcccagctccatttcagagaaccttgccaaggcccatgaactgggagac

SEQ ID NO: 35141 - DNA, 407 bp, Mus musculus
  source 1..407: mol_type = other DNA
cagaatatataagtattaaatctatttaacataaaaaagacaaattgagtacttacagtaatggaggtcattgcagtggtaaggcaatgctcaaggcattttctttttcttaacatcctgtttctcaactgggtgataaaatcacaggtactttcgctctaaagttaatgtattaaaattaactttaacatggactttaactattccagaaggcgtctggtttcttatattggttttgtaaattgtatcataaaatacaaactcaaggaagattactaattataggcagttttgaaacccagggttctcagttctgggttgaggcccacagcacagctagctgttccctttcctatgatagtgtccggccttggcgtggctcttccggccccgcccctccaggctga

SEQ ID NO: 35142 - DNA, 384 bp, Mus musculus
  source 1..384: mol_type = other DNA
cactttatcccctaagttttgaggtaaaacaatctttgttaactcagtggtttaaagtagaggagccacagaatgattccttcagtccagattggctggctaagccagaactatttggttgttttgcccaagtttggcctcagctagggtgatgatcgtaagactaattgtctagcaggctaatcatcgtggcttcttacttgctgtagaaactaacggctttatgacatagtgatctattgatcaaaggcagttttcatagaaactaccatggcattaagaaaatgtacataagtcaaaaaatttagtgatctggctacatgaatgttttaggaagcctcaaagaacctttgtggttctagaatgactcacttatgagagtca

SEQ ID NO: 35143 - DNA, 343 bp, Mus musculus
  source 1..343: mol_type = other DNA
gcagactgcaaggtctaaatgtagctattacagggtgatattaaccttagcactattcttatctccttatttcagtgaggtaaacagggtacacagctgtctaaatcttagaagatgatcttcagtgaagcaagaaaacttaattaagctttccctaggtttctgtttcctccattgtgaagcagggaactggaagtaaaggaataaactgatgactaagaaactggaacttcagcctcagctccacattaagagtgtgtgcatgcaaatacatgtgcatgcaggtctatataatgctgcagtgaaagcaatcatacttggatttgtctaatcattaaaggaa

SEQ ID NO: 35144 - DNA, 307 bp, Mus musculus
  source 1..307: mol_type = other DNA
ctttgatcaaaatacattgaatgaaaaattttattttcaataaaaatcctactatttattataggcctttggtaattattattatcctgtactggggcatataaagtttgcctgcttttataaccttcattaaactgaatattgcaaataatcagaaacatattttgtattaagaagtatcaaagtagttggaaaaaactaaataacattttaaatggtaatttcaaaagtacatgactatcaatacaaacaaatttgcttttagttttctaaaattctcaaggaaaatttaggggaaaatatgtga

SEQ ID NO: 35145 - DNA, 254 bp, Mus musculus
  source 1..254: mol_type = other DNA
cttgagatgtctcagacacttacaaaaagattaaagacattttttaaaggattttccttttaatatttttaaagtcattttgctgtttcaagactccttgcagcaatcatgggagattaggttctaaaatcaaattatcacagcacttgactgcattgctaattacatgacatcatttacatgttgtaatcagttcattggaaatttcccttggaaagtaatgtaaatattagagtcagagaattgtatatcca

SEQ ID NO: 35146 - DNA, 613 bp, Mus musculus
  source 1..613: mol_type = other DNA
agagctatcactttgtgatcatatgttcaacaaatggatatgtgagagacattttaaaagatttgggataatctaataatgcagaatgcatttagtcaagttcttctcagtactaatattcttttgaaagaaaatgtgagttcaaagtctttgctaaagctcaaagctactcttagctgtgattgtgtaatgcagaacacaataaacattctcattctgacctgtagatccatagctggcatctagtgttgttgatgcgattacttaatttcactatatttgccatattatgaggtaacaactaatcaacttgttagctgtgaaagatgactaagttttatgcaaggtggctacatttcacatacttaaatttgtgcctagtacattggtctcatgtatatctaccacaaaaagattatataaaaggtaatacatgtcaaattagcttgattgtggcaattcagattttatatgtcaaaatactatcttgtattagcacaccttcaatagttacttaacaaagtgagaggatttgatagactgactttcataaaggcattttttttcataaaggcatttttctaatttgaattatgcagtgtaaatgagctca

SEQ ID NO: 35147 - DNA, 606 bp, Mus musculus
  source 1..606: mol_type = other DNA
taaattgataaactactttgtaaaactatctcaagaactaataaatatatttataaacatttatatgtgtatatttatcatctcatacatacatataagtgtacacatagatatatgaaatacttgtagagatacaattatacaatcactgaagttaacctttacatatatatacacatgcatatgcaagtatctgcagtattttataaacatatgtatgtactagttaatatatgttttcatgttaaacacatacatatataagtatgtaatctatgttaaacacatatataagtttgtaatctatgttacacattaatatacatctatacattacaagtatgagtgaatatgtgcatgaaattaattattgtatcatataggtttcctaaatttcataattttgaaattactgtcatttattaactatacaaagcttccttgaatatatcatttgaacttaaggacatttacttgtgtttctaaagttatctttactatgtacatgtctagcattcaaaattcatgatacctttttatttggaaacatatcactgctaaacaaagatttcatttatgggttgatataacctgtaaggcttgcag

SEQ ID NO: 35148 - DNA, 287 bp, Mus musculus
  source 1..287: mol_type = other DNA
ataattgatgagtatgtgtcttgatatacatatcacatatgtattttaaagttctcagggctatactaatttcaagattattgccaaatattattaacggtatgaaacttccttaaatgaattatcatcacttaaaatttcttgaactttatatgtataggtctagaatttgaaatgcattcaacacagcttttcattctgtactcagtgtatggaggcaactcctgatagtacttgagtaataccaatggcttgaaaaaagtgttgaagcattattagaaacacag

SEQ ID NO: 35149 - DNA, 628 bp, Mus musculus
  source 1..628: mol_type = other DNA
catgtgtttaaccatgaatatatgagaggcattttatattcaacccctgattcaggatcaaaagaatgcattcttaccagtactaatattctttaaaaaatatgagttcaaagtgtctgttaaggctcaaaactacttttagctgtgattgtctaatacagaacagaataaacattctcattctgagaaaaaaattaaatcctgtagttccatatctggatacttaatttcactcacacaaagaaagtaaaacattcgattatgtaaaatgtatagagtagatcatcagtatttgccatatatcaactaataaacatgttagctatgcaagatgactacgttttatgcaaggtggctatatttcacatacttatgtttgtgcctaataggtagttctcctaagtagataccacatatgcaaattagcttgattgtggcaattcagattttatatgtcaaaatactatcttgtatttacataccttaaatagtcagttttagtttgctaattaaactttgataaagctgaaagaaagaaaaacaaattggttttgtgcagaggggatttcctttattcaggaacaagctgctaatttactaatttgaattatgcagtttaaatgagtag

SEQ ID NO: 35150 - DNA, 551 bp, Mus musculus
  source 1..551: mol_type = other DNA
taatgtgaataaatatataagttaatttaaaaagttttcatgatcatggttcattttcatattaatggaaatcctaattaatataattaatggccaaatatttctttagtatatgccaaatttttggtgtatatacctaaaatttgtatagctgtacctagtggaaaatatatttctagcttaaagttcacattgttttctatgtctacataataaaataattaatgtgtgtgttgatatatatcacatatatattttaaagttctataacctctgttataaattactgggagttttttctttaagatgtaccaggtattctttaagatgtaccaggtattgagactgggccaaattataggccctgtgaagacttgttaccaagttttaggatttcaagattattgtcatatatcactaactatatgaaacttccttgaatgaatgatcatcacttaaagtttcttcctttatatgtataggtctagaattcaaaatgcattcaacacagctaaacaaagattttcctttgagaaaagtgttgaaacctt

SEQ ID NO: 35151 - DNA, 213 bp, Mus musculus
  source 1..213: mol_type = other DNA
gagaaggaagaaggtacttccagctttgatccatccctagatgcacacagtgcaggcacactggcctagagagggacttggcccctggcctcaagaccttgaagtgaagaagctcagagctggagtacagtagcagcgccgtgaatggtgttgcctgacccgctgacaggcctgggccaggcagggtttgaacccgggtcccagaactggcaa

SEQ ID NO: 35152 - DNA, 589 bp, Mus musculus
  source 1..589: mol_type = other DNA
tgtggttatgtgttcaacacatgcatatgtgagagacattttatattcaatctccaaagattcaggattatcccacaatgcagaattcattaatccaagttctagaatctctagaatctccaagttcttaccagtactaatatttttttttaaaatttgagttcaaaaatcttttctaaggcttgtgtacatatagtacagaatagacattgtaattcacatagaaattccaaaataattaatttcactgatcatcagtgtttgccatatttgaagaaattagttgataactaatcaacatgttagctatgactaagttttatgcaagttggctacagttcacataaatttgtcaacttcctaggaggtagttctcatgtgtacctaccacaaaaaatgtcatatgtgaagtgagacatacgcaaattagcttgactgtggcaattcagattttatatgtcaaaatactatcttgtatttgcataccttaaagagacagttttagtttactaattattcttcaataaagctgaaagaaagaaacaaattgattttatgcaatgtggggatttccttcattcaagaacag

SEQ ID NO: 35153 - DNA, 761 bp, Mus musculus
  source 1..761: mol_type = other DNA
ccaaggtccactgagccagacgccctctggcggtagcgctcaggagctacatcccggcgcagagcgcttcgcctccctccgcgcgcgtgcgagggaacgagcgagagagcgagcgcggagccagcgagcgcctgccatgcccggcagaccccgcctcgccgcgcccgggcgccgagctcgctccgactccctgcggcccggcccggcccggcccgccgcggccccggccccccgcctcccgcgccgggtcctcccctcccccgcccggcggccccagccccccgcccggcccggctccgcgccgctctccctctccctccctcccggccgcggagcagcatggcggagcccgggcagcggccgcgcggccgcccgccgcccctctgagccgggctcgggggcagcccggcacctcagagcagacccccgccccgccgcgccctctgccgcacttgtcccactgcgcgccccctggagcgccgcgcacccctgggacccttgcgcgccccgggtgcccagcataacccgagttcccccgctcaccctggaatctcaggactgccccaggagccccgcgtacccctggaccctgacgcggctccgggacccccacgcgctctaggacccctgcgcgctctcagaattccggggctcggccaacccggctgcgcgccctggtgaggggccccgccccagaggatccccccccccaggtccgacagggacatccagccacgccccagcgggctcccagcatctcg

SEQ ID NO: 35154 - DNA, 374 bp, Mus musculus
  source 1..374: mol_type = other DNA
ccagcgcagacatttctcacctatctgagtaggatcttccgcgtcggtctggccatctcggctcactggcgatccatccgcgcttcggcccgggtggcccgggcgccgccttggggagtccagggagccacctccagccaagcgagcctagctcccgccaccgcggcagtttgttcccgccgggcccgggagcagaggacctctgcccgcccccttgagagctccgccccgggcccagttcttcctaggctgccaccaggcgggcttatgtgtctaggggcccagaagcggggcagactgcgccctgcagggtgaaagtcctagagtttcaacaccagggggcgctgaggagctaggggacatcccctccctgt

SEQ ID NO: 35155 - DNA, 704 bp, Mus musculus
  source 1..704: mol_type = other DNA
ggaacttctcccggtagtagagcggcgcagatctcgctcagcgtcaggcgcttcttggggctctgcaggatggccatggtgaagagggctccgtgtcgccgcgccccccgacggcggcccgggtcccggccccggccccgttgcgcctcgggctgcctgcacgccgggccccgggcttcccgctgcggccgccgccccccggggcgctagagcgcggggctcgcagtctccgcctcggcttcctccgggggaggctcgtggccgtgagggagcacgtcccgaggggcgcggggcccggagcgggctgtgagctcccccccaccgctgccgccgcccaccacgtctatgtctgcgtcgggctcagacagcgcggccggggagctctcggaggacatgatctcgcagcagcagctgcccagggtcatggtgccgccgccgccgccgccgcctcctccgccgcctcctccgccgccgctctccggctccgctcggcccgcggctccggctccgccgtgctgcctcgcgcgggcggggagggggcggaggacagggaggggatgtcccctagctcctcagcgccccctggtgttgaaactctaggactttcaccctgcagggcgcagtctgccccgcttctgggcccctagacacataagcccgcctggtggcagcctaggaagaactgggcccggggcggagctctc

SEQ ID NO: 35156 - DNA, 102 bp, Mus musculus
  source 1..102: mol_type = other DNA
tcacaagaccttggcagtaagtgcctctgggacttgtcaccgctcagccctgccttcagtggaagcctgccagcccgggaaagggccctctcctcggggcga

SEQ ID NO: 35157 - DNA, 258 bp, Mus musculus
  source 1..258: mol_type = other DNA
aactgattgtgaaccatccattgagataactcactaccaagttatctgaaaaaaaaattgccatgattcatagctttgttctgttactaacagagctaagcttaaagtctttccctgcggttagaatataacctaagtgcaggcgagcggaagctggcgcagcgcacggaggccccgccccttcctgtcacggcggccggcagctggcggcggggccccggcgcccgctctgcccgccccctccctgccgccccgccc

SEQ ID NO: 35158 - DNA, 336 bp, Mus musculus
  source 1..336: mol_type = other DNA
ccgaagtttgtaaattttaaataactatagtgggttttcatacatgtctatagccctcacattcaggaaaggcaagtgatgtattggtttcagttaaaattcatacactgctttagtacataataaatgtgtacttttaaggaaaataagcctcatattaaataaaaagatgaatggaaagtctttgtttgctttttctttttgaactccgtgtgtggcccagattgactttgaactcaaggcagtcttaactgccctatttcaggttacagacgcattgacagtctttgctaatctaatagaagcaagtcctttgaaagagctgccagtgcactt

SEQ ID NO: 35159 - DNA, 563 bp, Mus musculus
  source 1..563: mol_type = other DNA
tcttgttttgttttaattacaacgaaaaggaatttcccaaaattggtaagatcgatcatattttagaaacaacttatttaaagggcttgaaaactttttttctcctgagacagggtctcatgcagaccaagttggttgcttcgtagcttagaagacctctgcctccacccacctcttcaaagctgggactaaggcggcgcaccaccacactcgactctagtcttttgagacagggtctctaaatagcttgagcacttccagcaaaccagccgggacatgcgtttggccaatgccagccaaaccggaacttagaccaaatgaaggtttaaatcctctgagtagtgacacagagctgcgatggcgccctcggttctttaaagaaccttgggatagggcgagcgctaatcccaggctgggctccgattggtcgtcacagcagtctgcagttgagacgttgcgtgacgaccgtggtaccgcccctgcagcgggactggccgggcttctggccaatcagcaggcgcggcgcgccctttggttctccagcgagcgcttgccgcctcggt

SEQ ID NO: 35160 - DNA, 300 bp, Mus musculus
  source 1..300: mol_type = other DNA
agaaagaaaagagctaatttagaattttctcatttatacacagaattgagtccttggccttgcacaagattggcaagcccacaatctgaaaccaacggtggggaacgggcggaacccgccgggtcccaacgtgagcgctcagccctctcctctgcgcaaattgccaaattaaaatgaatcatttggcccataatggccgaggcgcttatcgggggcgggcgggcccgaggcggctccttatctcggcggcgcacacggccggcgctaacgaggccgcgggcgggagcgggattagagcgc

SEQ ID NO: 35161 - DNA, 305 bp, Mus musculus
  source 1..305: mol_type = other DNA
tttgtttatcgctgcgaaacagtataagaggtgtaagagttaacatcttttgcaaaggtggtggaagaaatggtgaaataccttcctttatatctctgcatccattagaaagaaaacaagggacccagctaaaacagatagagctctctctctctccctttcatccctgcaagggatgtcctgggcaaccagggctcccaggttctgacccagcagccagggcctgaagctaagcctgggctaaacacgttcagtagttattcctgagctccaaacacctgcaagttggaggggtaattcccagt

SEQ ID NO: 35162 - DNA, 274 bp, Mus musculus
  source 1..274: mol_type = other DNA
gcatgaagtaggcatgcacacataccagggatctccatttgataaaatagatgttgagacttctgaccaagtcaaaccagactggtcagggagtggcagctgagctctggctccctgagccagctagagcctgtctcaagccaaggcagggctgaaaatgtcacacctttccctgggagcctagccccattgccaggaaaggcttctgaagtgtcggagaaggcggggactttccccttacttccccagttcgggctgggcataagccaggccc

SEQ ID NO: 35163 - DNA, 239 bp, Mus musculus
  source 1..239: mol_type = other DNA
cctttccttaggaagggtagggtagcctgtgatgtagatttctgagggacgcatgaagtaggcatgcacacataccagggatctccatttgataaaatagatgttgagacttctgaccaagtcaaaccagactggtcagggagtggcagctgagctctggctccctgagccagctagagcctgtctcaagccaaggcagggctgaaaatgtcacacctttccctgggagcctagcccca

SEQ ID NO: 35164 - DNA, 325 bp, Mus musculus
  source 1..325: mol_type = other DNA
tacatggcagagatataatataataatataatatatataatatagtcgagctttccagcccacccattcctggagagtttgtgcagcccccagggatcctaggaggaggcacatctgtaccttacttgggcccgtcagggaaaagactcacttgagcaatggggtgcggcccctcccgcttttacaggaagctttaaaaagacattttttttttcctggcctgaatgaaccaagggttttctacaactaagtatgagttagagcaacacactgagtgttatccgcgggggaatgcgtaccttctggtgtcccaggagccagtggg

SEQ ID NO: 35165 - DNA, 389 bp, Mus musculus
  source 1..389: mol_type = other DNA
atgtcattgtggttactgcttccctgaccaaaaaatattctgtcttcagatactctgtagtggtgcaccactgtaaaggagccacggtggaccttggtgtttggcaggccacactgcacatgtatggtggcttattttcgttcgtgacaaggaagagaaataattacatcagcctgagcattatttcaaagtctaaattcagatcttccgcgattggaaactgtcaaacttaaaataagacactccgcgaacgaagtctgtctgcctgaatcccagcatcttcttcccaggcaggagctgcccctcccccacctcagttacaccagggctcactggggagggggctgggtggttcacgccagctccgggctggagaaagctaagagctt

SEQ ID NO: 35166 - DNA, 518 bp, Mus musculus
  source 1..518: mol_type = other DNA
tgagatctgacagagaatccagaaatccttgattgtctaccatctgggcattgatatatccttcaagcacttgctggaggggttcacagacatcccatggttctaacagccaaggctcgaatcaacaaagctgttgacagccatgatggccatgtctggctgatcagatagaagtacatgatcttctttagttccaggtaagaaagagctcacatccttccccagagttcagtttttaattcaaaaatttctcccttcttattgtatgtgaaatacttggagtcagcatgtaataactcttttactgacgaaaaaaaatccttccagcaaggagatattttaagatagaaccagctatatataataaacttatgataaactagactattaattatataagtccaagatccgtgactaattcttattaaatgtctccgaaaagatagataaagggtatgattagggccattaccattgcctcccagaggtaggtggagcatctttcagatatatctata

SEQ ID NO: 35167 - DNA, 507 bp, Mus musculus
  source 1..507: mol_type = other DNA
agacatgaatctctctggaaccataagtgcaaatgaattctttttctataaattgtcttggtcactatattttatcatagcagcagaaaataactacacgacctaagtaaattttattgcagcaatattgttttctgccattgaagactgtcagttcaataaatatttgtggaatttgtttaacagcagcatatattattagatatctagaaaggaattaagatcttgtgttacaaaagaagacactgaggggtcctagtagagacagcttggacttcctgtaggaaatcctactacatgctttcaattgagtttttgagtttttctcaatttaactatttatcataatttgtcatccctaaaaacttagaaacagtaataaactaaaccatgaactccttgaattcatcctctttttgtaaatatttcaaatatttacacaaatatttttgaactgggtggataaagccctcccccaagtaggtggggcaaccctcctggggtttg

SEQ ID NO: 35168 - DNA, 286 bp, Mus musculus
  source 1..286: mol_type = other DNA
ttcctcaaatttgatctagtattatacacatgagtattcctatattttgtggtggttaagagtcttactgctcttaaagaggacccataagagctagctcagcaatattgacactcacatgagcatgcctatccatacacacacccatggttatacatataaccaataaataaataagtaaataattataggaaaatatgatctgatgagccctgtgatcaaatctaacagcttatcattcacttcttttcccctcccacgggaaggtaggacagactatgccata

SEQ ID NO: 35169 - DNA, 618 bp, Mus musculus
  source 1..618: mol_type = other DNA
atgttaatggatagactgacaaccaaaacattctttctctgcttaaataatatctccataaaatctataaataaatgaggtagttggaaactatctcagcacttttcaattgattggctagtaagtgtacattaatttttttcaggcaaggcataatatatatataattggactgatttctttattgaggtcaagaaatattcttaaattaatgagtgactgaataagtgatgggcaatttaagtatttagaaaagaaaggttttattattccattcagtcaagtgagacagagaaagagtctgtcacaggctgtgtatgtgtgcaactgcactgttccacctgctggcacatccatcctggatcaatctggagtgtgactgtgacaagtctcaactgttgtcatcatttcaaaaatagtacaagcagctacacctattacatgtttggtaaattagaatgtgaatttcttaatatccaggttaatgtctagtccatgactttacctcatcagcaaggatatacatgtatacatatagatgttaccaagactagatactagagatttgtttttatttaccaaagctgatgttgcagattaataaactttggattctga

SEQ ID NO: 35170 - DNA, 499 bp, Mus musculus
  source 1..499: mol_type = other DNA
aaagggcccatttagattcaattgatttggtcctgttgaagacacactatattcttggtataaactctccaagtaacagagttaggttggctaaatagattttttttaaatgaaattcaactgtatgctatctattttaaaacaacatgtccttggcatccccaggcatggactattcaaaaaaaaactattagatacttggtctggccacagacttaagctatggagcttgggaaagagccagtgtgtgaggatggacttcaacaagatatttatttttatatgacaaccttgtttgatatttaataatttagtaaaactttgcaagaaaagattaaaaataagtggaagaatatttaaggatattataattgttctgcttaatttatgcatgccaatgttcttgactcgcacgagaggaaagaaagaaaaaattgtgtctctgattcccaattctgttattaaatgagatcaagacccttctccctcccacaggtag

SEQ ID NO: 35171 - DNA, 544 bp, Mus musculus
  source 1..544: mol_type = other DNA
cggggcgggcggatctctatcctctggccgggaaagtggccagctgtctgtgtgcagaatacactctgcgctcccacgccgggcggacccctttcctctggccgggaaagtggccagatgtctggtgcctgtgcagaatactctcggctgggtcccggaaccaagaaggcaaagcactcccgggctgtgcggacccctctggcccggaaagtcaaagtttatttttcttttaggtatggatttatttttctgtggattgaaataacaatatatatgtattgtaaatgtataggtataggaataggtatacgtatacctatacatatgtatttgtgagtattccatagcttttttcttctgtttaaaagtatattaaattattctaccgtggtactattacactatgacacaatgcacgtacatgtcagatctgagcctgacatagtaaacatcaaatggatattatctcttattactaattgcacaataaaaagtacttggacaggcctaatatggaggtagcctggctgcctcatgatccctc

SEQ ID NO: 35172 - DNA, 434 bp, Mus musculus
  source 1..434: mol_type = other DNA
aacttttctggattaaactctccaagtaaaagagttaagttggctggatagattttttaatgaaattcaactgtaggctatctacaaaaattggcatccccaggcatggactaccatccatttggcatggacaattcaaaagaaactattagatactggatctggtttgtgaggacccccatatcacacgggacttcaacaagatatttatttttatatgacacccttgtttgatgtttaataatttaataaaattttgcaagaaaatatttaaaaaataagtggttgaatatttaagaaaataataactattctgcttagcttatgtgtgcagtaccactgttcttgactcgcaatgttgtctgattcccaaggtaaatcattcctgttatttatatttaaccaactgaactttgagatcaagattggtcacc

SEQ ID NO: 35173 - DNA, 438 bp, Mus musculus
  source 1..438: mol_type = other DNA
tatataagcaaggccttggtagactaacagtagattctacagcagaaacttttcaaacatggattaaactctccaagtaaaagagttaaattggctgaatagatttttttaatgaaattcaactgtaggcttctacagaaaaaccaggcatggactgcccatgtttggcatggacaattcaattagatactggatctttcaacaagatatttatttttatatgacaaccttgtttgatgtttaataatttaataaaactttgcaagaaaagattaaaaataagtggatgaatatttaaggagattataattgttctgcttaattggtgttgaaatatcacactacatcgaaaaatgttgtcactgattttcaaggttaatgattcctgttatttatatttaaccaactgaactatgcccttctccctcccacaggtag

SEQ ID NO: 35174 - DNA, 444 bp, Mus musculus
  source 1..444: mol_type = other DNA
caaccagttgtgggaacacatgccatgccagatcatgtttcatgctttgcgaccccatctacctttctgaaaggaggcttaaatcaaagacctttacccaaacattggtaggcatttcctggcaaggtgggtccttcaacagaaaacccttggctgtggcatttcagagcaatctgatgattaatccttatcatcttgaaagtatattctacattcctgtccagattgtaaaagtaccatttctgtcatgggtccagacacagatgatcttattgagatagtgtgtataaagtcccttgaacatacacgatgttgttattctaatgatcacacagagaactgctccctgttctctgctccaagagaccgaggcagctatctccgccctatggcactcggcccagttggggactggctcagtgcccgtatccagagtataagaca

SEQ ID NO: 35175 - DNA, 246 bp, Mus musculus
  source 1..246: mol_type = other DNA
ctaaatcattaacattgtttctgtctggtatatgggtcacagagatacaaaagtaacataagggtaagatttcaagttatcactggttggtatgtctcccctagagttgactgagacataacatggggggattggttgctggggagacctgcccccttggtcaagatttgtgtgctctccccaggaggcactgggggaggtacccaatggtccttgagaatgccaaggccctgtcctggggctgct

SEQ ID NO: 35176 - DNA, 572 bp, Mus musculus
  source 1..572: mol_type = other DNA
tggaaatttactagtgttcagtattttatttgctaaatctggcaactctatacagaaaggaaaacacattggttattgtgtttatggagctagaatacaccagtaaatatttaattattcaactgggccattaaggtggagcctcgggtgccagtccccgcccctgctcggtcagccgcggtccgacaggggcggggcctactaactgtggctccagacccagcacgagccagagccgcggcccctcctgcgtgacgtcaccaaggggcgcccaatgggggcgcggcttactggcaagccttgcccggggccgctgccaaaggggagactggagctatggcccgggtctggagcctgcggcggccgccaccgccagcacatccaggcgaccgaagcaggggccggagacgcggctggactggccgcggcgcgtgtgaggctggcggagcggtggtcacccctcatcactgcgccccctccaggccctagcagcagggctcccgctcctctcgcgcgggtctccatcccgaatcctggtgggcgtcccggcctgggagttttctaggcgccca

SEQ ID NO: 35177 - DNA, 269 bp, Mus musculus
  source 1..269: mol_type = other DNA
gcctggagagctgaattagatctcacaaaattgtcttctccacacttgaacacaattttttttttgtctctttgaggcgctgagagaatgttcctaagctcaagtttggttcagttgtccaggataattccttatgtctctggcgtttttaaaaagcttagcttttaggtgtgtaaaatgaggttaatatctacttcatagggtatgatttgcagctaaagaaactgttacagcgccagctttccagaagcctggcgcgcagaggctgc

SEQ ID NO: 35178 - DNA, 246 bp, Mus musculus
  source 1..246: mol_type = other DNA
ctggggccaagcaccacctagccctggctagcctggctggctagcagcctggaactcaaaccagcagcagcctccagtggtgggttaggaacttttattgaattcaaagacaagtagcggtttttctttctgcttcaggcggaagctaaagagacagcgagcccgatcggacttcccacttcccggatcctgggacgggggagtccctttccccgcccctccccgccccgtggccgcggcgtggct

SEQ ID NO: 35179 - DNA, 377 bp, Mus musculus
  source 1..377: mol_type = other DNA
tgggatagggaagtttacttcaccacaggcatctgcagcctgtggaagtgaggggtactactctaattagaaagaaatagatctttaagaacatttgttttagctgttgttttatttagaaaaacaacaatttaaaaaatttaattaccggaagtaatgaacttctgtatacgcagacctttatagaaatatcaagtctggagtatacaaaaggccttgtctcaaaaataaactttacttgaactccgttctggctcgcagaagtaactatttgcacctgcagcgtcttccactttccgcttgtcctgcgcagtgaactggccttgcttctcgccacgtgtggccctcggggcgcaggcgtgactcctccccctcac

SEQ ID NO: 35180 - DNA, 206 bp, Mus musculus
  source 1..206: mol_type = other DNA
aagcagttgatggcttagccttctcaggtctcagtaacttcctataacagttacatagtaaataagaaggtaaaattcttgtgtccctaagcctcagtgaaccagctgctggatgtcacctgttgtcacctgaagccactgttagagaagaaccctctttcaagggtggtcattgcactgcatatcacagctggcttgaaggccac

SEQ ID NO: 35181 - DNA, 350 bp, Mus musculus
  source 1..350: mol_type = other DNA
tgtgtgtgtgtgtgtgtgagagagagagagagagactcacagatgattcaaaggtgaagcaactcagggacttgagtttcacagccttaatggttaagcacctctttgactaagactgcagtctgagaagttacctcactagtaaagtgcaaaatgatgagtcgcataaaattctgtgacagcaatcccctaatttacgccgccccctccccccaaatcggggagaggacatctgcacccgatctgtcagcctggcccagtacgaagccagaggccgggtcaaggaaaccggccgccctggtgctttggagggcgcccacgcggagctcgtctgttccgcctgcctcgct

SEQ ID NO: 35182 - DNA, 403 bp, Mus musculus
  source 1..403: mol_type = other DNA
tgggagttctggaggccttcccctaccacgtgccagtggcccctgtgaggcccttctctcatggtccttggttagtacttgagcagcaacagaacgctccagtggtccctgggccataactgagctggtccaccccctggagtcacacccctgaaggctctcatcttagttcaggcctccaggggcagagcaagaagctgggagccttgggcctaacggctgtgccgatcatcactggcccatcctctgtagacacatcaggacagtgggcagagatgtcctccagccatacttccatttagggacacgtggccacgcccctttctagagtgctgggcccatggcactcttttccacgcagggggcggtggggaattagttgctccggtgctcacaacccacg

SEQ ID NO: 35183 - DNA, 305 bp, Mus musculus
  source 1..305: mol_type = other DNA
ctctttctctctccctctcccgcggagacagagacaggtgcaagaagtgagttcggcagactcagcctcccaactctctccaagagtgctgtcggaagtgtgtgtgcgcgcgcgcttgcgcttgcggttgcttaagcatgcagtaagggagaccaggtagacctaggtgaaggttctcctcaactccgtagggattgacctgcggctttaccgcccaagatccagagcccggggtccgggccacaggggccagtagggagcgcgcggccccgcgccttgcgcccgggaaacgcggtttaaaactc

SEQ ID NO: 35184 - DNA, 337 bp, Mus musculus
  source 1..337: mol_type = other DNA
taaaaaaattatactatatggtgggtggcaatacattataagaataaatgtaaggttacagtggcctggaactcacagtttctaaaaatagtgattcaatttgataaaggaagatcttgaaactggctttgagcccagaaggccttccctgcaacttcctaggagctcctttagatgctctagcacagcggtaggcggagccctgggggcgccgcaagcctagccccgccctgtctgccgaacccgcgagagcgcagctgcttcggaagctgctgaagctcgtggacttcacgattcgggacatgaactccagggaccgtaaccgcctgagctggtg

SEQ ID NO: 35185 - DNA, 444 bp, Mus musculus
  source 1..444: mol_type = other DNA
tccaggctagcctggtgtacatagagagttataggccagccacgactaaaggaaaagaaaagagtgtgttatatgtttgtatatgttcatgcatatgtgcatatggtccaggtcaacaccacacgtcttcagatggtctcatggaatctggagcaagacggagtttgacatacttaacatttttaaaaaattacgacttagctgattatactatatggtgggtggcaatacattataagaataaatgtaaggttacagtggcctggaactcacagtttctaaaaatagtgattcaatttgataaaggaagatcttgaaactggctttgagcccagaaggccttccctgcaacttcctaggagctcctttagatgctctagcacagcggtaggcggagccctgggggcgccgcaagcctagccccgccctgtctgccgaacccgc

SEQ ID NO: 35186 - DNA, 638 bp, Mus musculus
  source 1..638: mol_type = other DNA
ggtccctgccccggggcagcccggccatccctgccccgtcggcagttccgagcctgtggctccggcctgctactccagcccccgtcgctagggccctggcagctctgccccgtaccgggccttctggcctcgccccccgcgccccccaggcgagccgcggctcggcttcaccggctcgaactcccggggctcccagctgggcctggccccgggcctctcggcctcgccccccgcgccccctggccgccgggccgcccccgctcgctgccggaggtcgcccctcatatgggcgctcactgcccgcccgcacagctcgaacagggcggggggagcgctggggcccgaggccgagctcttcgctggcgccgcctcccgggacgtggcctccatggtcgttgctgccgctacctcacagaaccagcaactccgggcgcgccaggcctcgggcgccgccatcttggggaggtgcgcgagcccgagaatgacacccgcgggccgccatcttgaagaggtcagcttttaggaccgctccataagttggaaaaatactgtagatcaacacatttgggcaagaagtgaccgaaaggatgtttcttagcaaattctgccgcacttccggccaggtcgccggatatccg

SEQ ID NO: 35187 - DNA, 464 bp, Mus musculus
  source 1..464: mol_type = other DNA
gataaagaaccgctttttgtttgttaatgctaggcaagagctttaccatgaagcgcacttttccgaagactagggtccctaaataaatttgacctaagctacgttaaagactaacgttagttttttgcttcacgcacttatcaagttagaacctcaaaacatcaaattagaacttatcagtgcagcattataaactccagttacactttcacattcctggtttggggaagccaatcccgagaaaagagagccccgggaggtgctttgttgagctaggtcccgggcccgccaacctcgaagccgggtccgggagccggtttgggatccaacaagcgcaaccagagtagtactccacttcgacggatatccggcgacctggccggaagtgcggcagaatttgctaagaaacatcctttcggtcacttcttgcccaaatgtgttgatctacagtatttttccaactt

SEQ ID NO: 35188 - DNA, 264 bp, Mus musculus
  source 1..264: mol_type = other DNA
gatagtaaatgatttataatagctaaggagatccttttaagtatcattatgaagaccaggctagtctcacagagaggagaggtactataataatatcacttaaaggaaaaattggcagtgcagcaccagatttctgctccaggtctggcacaataaagtgaatcaaaaatgtgctgccttttgaaatctatatctatttgtcagctgcttcggccaaactggcacctgcctgttgctgccaccaggataagccacagctgagtg

SEQ ID NO: 35189 - DNA, 110 bp, Mus musculus
  source 1..110: mol_type = other DNA
cctagccaactggctgggagctaagctcctcctctgcaagggagaacagaaagtgagttcctgcaggtgctatatcattgaaaaaactccaagcggagctgggtccactc

SEQ ID NO: 35190 - DNA, 296 bp, Mus musculus
  source 1..296: mol_type = other DNA
ttcagtcctagcacctctagacacctgtactcatgtgtacatatccctacatgaacatacttttaaaatacttgtaattaagatagaaaattatctttaaaattaatctttaaaaaagattttaattcctggtccacacagtgagaccctctctcttgttccaggacagcctgctagggctacatccttcaattttaataatggcacaccctctgcagccgtgttcatccagaaaatatttattagcttcctgctgcgtgtctagttggtgccaacacagggagaaggcactgagc

SEQ ID NO: 35191 - DNA, 524 bp, Mus musculus
  source 1..524: mol_type = other DNA
ctcagttcctaagtgctgggaacccaggagtggcaagcactgctatcatatcgaaagatgccaacacttttggagtcctcaacactcctttaatcctagcatttaggaggcacgggtaagctcctgcttcctcaagcacacctggtgctcttctagaggagcggttgggatcacaatcaaagagcattttttcatggtttatgaaatcgagttaggagcaggtttctaatcctctcctccccggcctggaaacagccttgcggggctgggccaggcctcggagctgcagccctctgatcctggcttgcccagtgagctggcccgaggtcccggaatgccgcttgctccggctccgcggtgcggggagcccgaggtccactcgtgcggaccgtaaccctgccagacaggcagagtacgccggctcccctcgcgctgcagacgcccggccgcggccgccgccctaagcgccgcccgccgccctctcaccccgcggcggcggcggcggcggaagcggcggggcgggc

SEQ ID NO: 35192 - DNA, 488 bp, Mus musculus
  source 1..488: mol_type = other DNA
ggcggcggcggcggcggaagcggcggggcgggccggccgggccggggcggggcgcgagaggcatggaggaggcggaggccgcggaggccgcggcgcgcggggccgagctgtgcgggcccgagcgcggcccgagcggggcccggggcccctgagccgtaagtgcctcccagtgcgggtctcagaggggtgatgcgggctgggtgggtcttctgaaccttccggcgtccctgatcccttctaccccagggctgggaaggaaaggccctccccagggaattttcaggtgattgcctagggcacacagctcagcagtttgctgagagaataatagtccactggccgggacaggggtccagtatggatgactggaagcccccttacctgtcaagaagaggcagcaaattcctggaggggaaacctctgtctgttacagccttctcaggcagtggtttagagccaggattctggaatcagaaccctagtctgac

SEQ ID NO: 35193 - DNA, 354 bp, Mus musculus
  source 1..354: mol_type = other DNA
gttcaagagtaccactctgctggacctggtctccagaaaaaaagagtatcactctatgttatatacgtgactgagtttttttttttaaagatttatttattattatatgtaagtacactgtagcttcagacacacagagcagtcgggtgctcttattttttaagatttatttattatttattatatgtaagtacactgtagctgtcttctgacactctagaagagggagtcagagcgtgcatcatatcacactattgtgagcgatacaccccttttcaggagaggcagagtctatggtgacagccttgggtggggccagcgggcgggcctgcggccaggaggttttaaaacacc

SEQ ID NO: 35194 - DNA, 412 bp, Mus musculus
  source 1..412: mol_type = other DNA
tgcaattacgcacagagcatgtgcacagaggtaaaggatctgagtgcctatattttgctgtgaatattatctaattcacacaagaaagctgtggtatactttagaggaaatgtttgtgttaaataccaggctggcctcgagggattaaaggcctgtgctactacaccttgctttagtatttgttaactcagtgtttagggtgacttagtaaacttcccactactgcgaagactgagtattgacatctataaataagattaacttcaatgaaatctgtgaagtacttagcttagtatctggcacacagcaggtactcagtaaacgttcttagtattgttaatgtgggcgagtttaaacaaaagtaatttgtttccatctgccaaagttcctttcaccaagggatctttcatat

SEQ ID NO: 35195 - DNA, 301 bp, Mus musculus
  source 1..301: mol_type = other DNA
catttttgagaaagggtctctctacatagccccagctgtctctgccttcccagtgctgggatgatagatgtgcaccacaactcctggcaaagagtccacttccctcaaggaggacctggaattcgaggccagcctggtctacagagtgaggtctaggcctattttgattcttgacttcaaagtgcaggggagaggtttttaagaacctgcctccgcggccaggctacccaggtttacccagcgacgccggtggctgtgaggttcccgcatcagcgccgaagctgcgccttcaggccccctc

SEQ ID NO: 35196 - DNA, 384 bp, Mus musculus
  source 1..384: mol_type = other DNA
gtttgagttctcttactgtacaatgaacactgcaatgacctcattatgtgtatgtgaattgaatgcagtgtctgaaatattagtcattattactgccaggcatggctgagctgtctgggcaggtcaggctgcccaggccgcagcaggctggaccacaggactttacacactgtcacactgtgtggaactgtcaaaggcagtgtatcccagtctggacagcgttcagtccggcaggtcctgcagccgacgcgggcgcgccgggagccccgcccccttccgcttcagagcgcgcggcgcggccgcgggcgggtcttcgcgaccgttcgccagcgcgtgcacggctggccgcgctctgtgggcggcaggcgggcttgccgtgcacgc

SEQ ID NO: 35197 - DNA, 452 bp, Mus musculus
  source 1..452: mol_type = other DNA
ttggctccttgtgtaaaaagctgaagacaaaaaggagagtttagtaaaactaactcaagagagtgcttatagactcttttgggggtttcccggcaggtagtgcgcccacaccgccgcgcatgctctagtccggaggggcgggaggctccgctacttgtttgacaattctagtagttggcgaagcaattgccggaggacccggctgggagctaaggggcgtgctgaattcggctggtcctcgccccaagagcggcacaaaccgaccggcgtcgcgccgaagggcgccgggggcggggcgggaagtcgctttccagagcgagccgcgggcgcccgggcggggtcacgaaagctggagctcacgcctgcgcgtgcgccggtgctagtgggcgaagcggcagagggagggcccagccggccgtcgctcctcctccacccgctctgccccctcctgg

SEQ ID NO: 35198 - DNA, 306 bp, Mus musculus
  source 1..306: mol_type = other DNA
agttagttttactaaactctcctttttgtcttcagctttttacacaaggagccaaacactttgattcatagaattctgaatgttgggccccctcaatgtaatttctaggtaatagagaataaggtatttctcgcccgtccagtcgactcaacaacgttgttttgcaagttaagcgttccaggcaatcctgccttttagagatcccataacagagacttgtaaggtatctgaaagctgacttcaattagaatattttagactagtctaactgagtgggcacatgcatgaacatccacattaaaaata

SEQ ID NO: 35199 - DNA, 274 bp, Mus musculus
  source 1..274: mol_type = other DNA
tacttttcaaacttacaaggatttaatttcttgtttagagacagtgaaatctgcctatttatgcctcaggttctaggcttaaaatttctaaaacagttccacgcctcacccaagcgctgggatcacaggcgtgggccaggagtcaggccgtaggcccctactagtagactaggctggcctccaactcagcctgcaagatatttatttttaattatatgtgtggcaccaagactcaggagctcagaccttaccttttgataaggggttagagctg

SEQ ID NO: 35200 - DNA, 290 bp, Mus musculus
  source 1..290: mol_type = other DNA
cctggaggactttctgcttctgcaatgccaggatttcaacctcctcagaggcgacttagtttttctgagatgaattattgtagtaatccaactttaagggtttgcacatctatgatagactgcgaccgctgcaattccagggctgacgcttccacttgcagctgcaattgggtcccggcctccaccgtgcacgtaggcttcacgtaggatcctagcgatcctgtccacccagggccggggtcctcaccggatctctgcagccagcgtttccgggttgaaccgcaggggca

SEQ ID NO: 35201 - DNA, 344 bp, Mus musculus
  source 1..344: mol_type = other DNA
gagtacccgatctgatgtacttacatataataaataaatcttagcttcaattcaatagtctcagagcctgaaaacattttaggcatacagatctgtgtaaaggtgacgattactggaaaggttcagatcattcctgtcccagaatgggaattagaaagactattccacataaatgttccctacagtggagaattctagcttgaaatctgtccattttagagaacagctgtgcaggctaaataggcaatgaagtcaaagccgcagttaattaaatactacccaaaggtggccaggcacattgcccaggcctgcctaagcctgtactcgctgcccagggagctagg

SEQ ID NO: 35202 - DNA, 322 bp, Mus musculus
  source 1..322: mol_type = other DNA
gattactcaggggaatcaggacttttatcctgtgaatcgccagtggtacaaacttcaactttacatgtgtagagatttacatgctggaaatcacccagtacagaaatagcgggtccgagttatttgcaggtgcagttgctgtccctacagaaaataggtccccgagcgactgagggtctcacttcccagactgcagggagccctggggagaggctgcgagtcttgcagggaacccgcgccagacgcaaggtgagaggtaaggactcggccctgtcgctgctccacgggcgggacccgcccattcgacttgggtgcgcatttc

SEQ ID NO: 35203 - DNA, 298 bp, Mus musculus
  source 1..298: mol_type = other DNA
gcaatcacaggcaggcagatgtctgtgggttgtttcaggctagccagggatagactgtaagtccctacctaatatatatgacagctaaaatatttaaagtgttttaagtacaggatttaacttaacaacttggaccagaaggcggtggatagtagttgctgaggcccagagccacgcgtgagaggacatagggaatacctgtcaccttctcgggtatctttgcttctatcacgactagccacagaagcaggaaattttttttctttttttaaggaaaaacgctggtatataagagggc

SEQ ID NO: 35204 - DNA, 326 bp, Mus musculus
  source 1..326: mol_type = other DNA
tcagactcagacctttggaagagcagtcgggtgctcttagaataaatgctttacctacatccatgtctgtgcaccatatgcatgcctggacagccacatttacttttatttaatgtgtatgagtgtatctgcatacataaatgtgtagcaatcacaggcaggcagatgtctgtgggttgtttcaggctagccagggatagactgtaagtccctacctaatatatatgacagctaaaatatttaaagtgttttaagtacaggatttaacttaacaacttggaccagaaggcggtggatagtagttgctgaggcccagagccacgcgt

SEQ ID NO: 35205 - DNA, 391 bp, Mus musculus
  source 1..391: mol_type = other DNA
ctatccctgggaaacacacacaccccacctttatgtgggtaggtggttgagaacctcctaggggcaagaaaaactgaatcttctgattctccttgctcagaactttatgttaagcaagcactgtattaatttagctatagtctttggctaaagtgcaaggtactgagtgaaagatcagtaactttcttatcatagaggatctcttcagaataagaatctgtgcactgtgggccggttgtgggcgcggccagccacccaagactgtccagtgcgcatgcggaggaatgtgcaaagtcccagctttggcaccgtcctgcgcgtagttctgggagccgggccctcgctcctccctggggtggggctgccgcttctccgccggacttaagtcggg

SEQ ID NO: 35206 - DNA, 418 bp, Mus musculus
  source 1..418: mol_type = other DNA
gacacaaaacatattgcacttttgactcagagatcaaattgaccatatattctgaggatgacgatgattatgattggaaatttcccaaatgcagccttataacagggcagcttgaactgttaagttcaaaaggggccgaccgctctatagccctatccctgggaaacacacacaccccacctttatgtgggtaggtggttgagaacctcctaggggcaagaaaaactgaatcttctgattctccttgctcagaactttatgttaagcaagcactgtattaatttagctatagtctttggctaaagtgcaaggtactgagtgaaagatcagtaactttcttatcatagaggatctcttcagaataagaatctgtgcactgtgggccggttgtgggcgcggccagccacccaagactgtc

SEQ ID NO: 35207 - DNA, 317 bp, Mus musculus
  source 1..317: mol_type = other DNA
ccagctcagagccagtttttaaaaccaatggaggctgccctcagacaggagttttgtagccagggcttataacggctgagccagcttttccagccctagaataggtttgtgaggcacggattacccgggtaccccgattaaacgaggaagtgcttttctgggaacagcatcactgaaagtgtgagcgtttccccctggagaccccctccactccaggcgctgagtcatcccccgtaggccggccagggtggggcggggctcagccaggtccccctcttcccgcacccccggcccgtgagaatctcgcgagaacttgc

SEQ ID NO: 35208 - DNA, 234 bp, Mus musculus
  source 1..234: mol_type = other DNA
gctcgccctagcctagcctcccaatgggaggggttagatggggatcccagaggtccccctcttactattttcatcagttgaactgagaaccgcatgaagctgatcagaccagctagggctcctgttcatcgtgcgatagcaatactgtattttggttgagacctccacaatcaaactctgggtaccggtgccgcagcgccacccgggaaactgagtccgcttcgggacacggac

SEQ ID NO: 35209 - DNA, 215 bp, Mus musculus
  source 1..215: mol_type = other DNA
ggattttagtttgtgtcttaaacataattttgttcactcagcaccagagacttctgtaccaggcgaagcaacatgttggctggaagaatcatttgtttgacatcataaagacataaaagggcaaacatgtgtttctctacgttttttaatccattttacaacacgacctggtcatcagatcaagcacgctgaacgctgagcttggtccgtgtccc

SEQ ID NO: 35210 - DNA, 258 bp, Mus musculus
  source 1..258: mol_type = other DNA
caagcacgctgaacgctgagcttggtccgtgtcccgaagcggactcagtttcccgggtggcgctgcggcaccggtacccagagtttgattgtggaggtctcaaccaaaatacagtattgctatcgcacgatgaacaggagccctagctggtctgatcagcttcatgcggttctcagttcaactgatgaaaatagtaagagggggacctctgggatccccatctaacccctcccattgggaggctaggctagggcgagc

SEQ ID NO: 35211 - DNA, 164 bp, Mus musculus
  source 1..164: mol_type = other DNA
gccccaggctggcctcgaactcagaaatccgcctgcctctgacatattttaattatgtctcacatgctaaagatttgagtaagacctatatcccactttgtttaattggcttaattaatttagcctgaggagggggcggagctcacggggccccgcccccagcc

SEQ ID NO: 35212 - DNA, 324 bp, Mus musculus
  source 1..324: mol_type = other DNA
agcctggtctacaaagtgagttccaggacaggcacacctataacccagcactccaggtgtggagatcatacaccaggctggccttgaactcagagatccgcctgccttcctgaaggatgagcctgaatttttaaagataagtttgaagccttttatcttttaagataagcttaactcaagtgcacattaatacttgggtgaattatctttaactgcgctgcccatgccaacccgttccggccgctcccaagaaaccccgaagggggcgtggcttcggtcagtaggaccgtccagacactcagcgcgcgcaaggcccacgctctc

SEQ ID NO: 35213 - DNA, 338 bp, Mus musculus
  source 1..338: mol_type = other DNA
atgtgggcaaaggggtgcccactgacaagctttcacttaaagattttacatctaccagctctaaacacatttcttttttgcatcatgatcaggagaaaagtggactagataacctttgaggattctttatcctccagcctgtaatcccaggactagggagcattaggctgaaggacagttcggcagttcgggttttgcagttctacaggccaccccttaggcttctgtggccatccctggggagccgctcaccgtcagagggtgtccgcggcccgttccagaagcgagagcgtgggccttgcgcgcgctgagtgtctggacggtcctactgaccgaag

SEQ ID NO: 35214 - DNA, 453 bp, Mus musculus
  source 1..453: mol_type = other DNA
cctgacaaatttctgggccttgcttcaaggaccttccagctgaatcattctagtgatctcacgaatcttgagttgatatctttaggaaggtatcaacttctttatatctttaggaagaacaaccctgtcaggataatccctccaaatctcacttagaagtagaattgaagagagagaaatgtaaacgcttgctcttctatcaatttctccgccccatttggggattgaaaatctgtaactgaaaatattttaatattaaaataataagataaattgaaattatgtatcttttctcatcataatgcaataaaacttaaagaaaaataattctgttgtaaaaacttaggctctaaggtcgcgggaagagagccgggccccggtgacctggtccaaggccctgtgaaggaacccctagggagtgtcaaaggcggagtctcaggctccaccctgacc

SEQ ID NO: 35215 - DNA, 432 bp, Mus musculus
  source 1..432: mol_type = other DNA
cctagctatttgtaggcttaggtcaaagcctcgattccagcatatggttttgatggattaactgtcttcaggcacaccagaagaaggcatcggatccctttacagatggttgtgagccacctctgtaagagcattcagtgctcttaactccagcccggtggcttgagtttttatagtcagggctccacaatctataccctccaagcctttgacccagcctcagaagtttgctttcaagggttctaaatacaaaaaccgtgagtataaacaaggccactgcccttagcgaacgccgaggctgcaggtctcgacgctaaacctagcggactgcagtagctcgccggcttgctagttcttccgggctctagctccggccgggtccgacccccgccccgggtccacccagcagcccgctcttctcttccgccggaa

SEQ ID NO: 35216 - DNA, 542 bp, Mus musculus
  source 1..542: mol_type = other DNA
gcattaaattttaggtaaatcccacgagggtgctgctgcctcagcagtgaggtcctggcgccttagccagtttctgagccggcggggacggcgacagctggcggccgggtcttttcatttggccacgcggccatcctcgcccgcccgcaggtgcgccggaggcacctggtgccgggcgctcctcgtccttggcggcccgcggccccgcacgagcgctcggattgtgttccgggctggctgcgcccggagcgcgcccgcagtctgtgctcgcccccgcgtctcctcgcgcccgcggcggccccggacggcgcgcgtcgcctcgcgctggtcctcaggccaaccagcgccggcccgagcggcgcgagcacgggaccggcgccccggcttcccactcgggccggcgggctcgtgggttcgttcgccccgccccctccccacagcgccgccgctgggcgcttgcgcggggcgcgtggccgtggctggggtctccgccgcagcccgagcagccgcctccgcctcaatcagtcagtcagtcaggcgga

SEQ ID NO: 35217 - DNA, 315 bp, Mus musculus
  source 1..315: mol_type = other DNA
atgcacaacctattaccaccatagtgtcaggtgttcctattttcgaatattacatttgaagaaatctttttgttactacagtctgtccgactgctgggataggcttgagaaatcttataaaaattgttcaactatcctagaaaatgtttggtagaatgactcacctgctcagcactcttaccacttctacaaattggttagtagtgtaaatgtagagcctaaaatcttcggtttctatacactaagtcttctataccacagatgagaaaagttttaacatgtactactgcgtcgcaacagcagggagggcagccc

SEQ ID NO: 35218 - DNA, 315 bp, Mus musculus
  source 1..315: mol_type = other DNA
gggctgccctccctgctgttgcgacgcagtagtacatgttaaaacttttctcatctgtggtatagaagacttagtgtatagaaaccgaagattttaggctctacatttacactactaaccaatttgtagaagtggtaagagtgctgagcaggtgagtcattctaccaaacattttctaggatagttgaacaatttttataagatttctcaagcctatcccagcagtcggacagactgtagtaacaaaaagatttcttcaaatgtaatattcgaaaataggaacacctgacactatggtggtaataggttgtgcat

SEQ ID NO: 35219 - DNA, 302 bp, Mus musculus
  source 1..302: mol_type = other DNA
tgagctgggcctcagctcaagtcccgggatgagctgtatcgtaaggtatagaaacaaaaaggctttttgctggctatagagaacaaagagcttctttctagctgtatttttagagaacaggctttacctcccagggagaaacgctctaagtccggttctcacactatcagaaatgaatttattgtttgaatggctaacctaaccaaccgctggcttgcaagcctggtacagagtccaggacagccagggctacacagagaaattcggcgcgtcgtatcgaaccgctcggccaccgcgcgcct

SEQ ID NO: 35220 - DNA, 321 bp, Mus musculus
  source 1..321: mol_type = other DNA
ggcctgccactgcccggctcctttgaccgatcagagtcaggactgttatagtcccttaacttgacagacacaaaataaaaatttaaaaataccaaaagtttaggctgactgattcaagttcaggcttaaaagttatctgaaggtcctctccttagggccccgcgggcgggctggggagcccgggaggcgaggcaaaggggtggccctgcctgggtggtctcctgccccgccccctgcggcgccgttacctagcaacggatccggctgcaaggcagcgggtaatttgccgcccccttagccaatgggagggcgtcaccccgg

SEQ ID NO: 35221 - DNA, 234 bp, Mus musculus
  source 1..234: mol_type = other DNA
gctatcccaggcctggcatggccatgactcagtgattctaagtgacacctcacctcccctgctctgggaggtgtggggctgccccctcccaggcaagctaagaaaagcagagccttggattctgaactcaggagccagccagcactagggccctcagacggcgtatagggagatgggcggggcctcctcaggctcagctccagtaacggcttcccacccagctgctgcctgggc

SEQ ID NO: 35222 - DNA, 153 bp, Mus musculus
  source 1..153: mol_type = other DNA
gagttcagaatccaaggctctgcttttcttagcttgcctgggagggggcagccccacacctcccagagcaggggaggtgaggtgtcacttagaatcactgagtcatggccatgccaggcctgggatagcgaggtgtgcttgccacagccccca

SEQ ID NO: 35223 - DNA, 283 bp, Mus musculus
  source 1..283: mol_type = other DNA
cagcctggttgatttcaaagccagcctggctgggacagccagggccacacagagacaccctgaggtaaatcgggctctgcagcgtgctattccggcagcatgctctgtaccagagcaagagatgcttgcaggaaaccacctgtgttggtgatgtgcactgagcacggagcagggttacacctgccaggcgactagctcaaccggggctcctttaaggccggcctttaagcgtggcctctccaagcctggcagccaggagcaggggttcattgataaaaacgtc

SEQ ID NO: 35224 - DNA, 570 bp, Mus musculus
  source 1..570: mol_type = other DNA
ggatttcaggtttgacccactgggccagaccagattgtcagatactttggaattggaatttcccagaactaaaactgtttttaatttcctttttgattgctatgtaagagatacacatgaattttgtgtgttcatatacaagccctggctgtcctagaactcactttgtagaccaggttgggggattaaaggcgtgcgtcatcgaccgcccaaggtcaagggatttgaggcggggtccgcgtgagttcgcacgccgcaggaccctcccctgtgccagcgtcccaggctcgccgcggccccaggtccttcccggcaaccggattagaaaccggaccgtgaagctttgcgcttcctctttccagccagcgccgagcgatgggtgagtgttgctgcgggccgggtcgggccgcgggggagcgagctccatccgtctccatcctgcctcccgacgcatgctcggcccgaccatgggccacgggcagccgtggcaagggcctgcggtgggctagggctgtggagatcgctgcggccgcctccggggctccgggctgcgagcgggccaacatggct

SEQ ID NO: 35225 - DNA, 421 bp, Mus musculus
  source 1..421: mol_type = other DNA
ccctttaaaagtagacgttcactgacattcaaggcgacgtttaagtttaagaaattgagcagtagctcacttagctcaggctcagtgctggatttcaggtttgacccactgggccagaccagattgtcagatactttggaattggaatttcccagaactaaaactgtttttaatttcctttttgattgctatgtaagagatacacatgaattttgtgtgttcatatacaagccctggctgtcctagaactcactttgtagaccaggttgggggattaaaggcgtgcgtcatcgaccgcccaaggtcaagggatttgaggcggggtccgcgtgagttcgcacgccgcaggaccctcccctgtgccagcgtcccaggctcgccgcggccccaggtccttcccggcaaccggattagaaaccgg

SEQ ID NO: 35226 - DNA, 252 bp, Mus musculus
  source 1..252: mol_type = other DNA
gtttgagacagtttcacacagccactcaggctgtagaccagactgacttcgaagtcaaaaaaaaaaaagtttcacggacaggaaccattcgtcttgtttaattggtgtcttcgaaatattgtatacatttcaaagagaaactgagttcgaggccagcctggtctcagagctcgggagcccggccacgcgccggaagtcggagaccatcccacattgctctgcggtgcgtcgcactggcgcgggatttaaact

SEQ ID NO: 35227 - DNA, 492 bp, Mus musculus
  source 1..492: mol_type = other DNA
acacaaataatctcagttgtgcaaccagcaatttttcctcagctttgctccaggaaaactaaaattcaaagttgaaagtttgcctccaattactaaagggataggtaaccactgccagggtgagctgagaagggcaggactaggcttgctgagtcccttggcttttctgaggaccagaggctcccccaggaagcggggcacggggggcggggctgggagcgccccgcaagctctagccagccctgcgggacccccgaagggggcgggccgagggagggcgggccgcgcagggctgatccgggatctcgatgctgtaatccagctcggccgaggccatggtgaaggtgcgggtcttcagcacaggcctcccgccggaactcccgcagtttcacctcggcggggccgggacgccgccgggccacgcccctccccgcccacgcctgcctagcaaccagggagtcgcttcgcgcctcgggcggcacccactagccc

SEQ ID NO: 35228 - DNA, 249 bp, Mus musculus
  source 1..249: mol_type = other DNA
gcaaaggttgctaacaacttcttatgtatgtatgcatgagttcaactggaattaaatgcaatatttactaactcacacatgaaaggccatgtcttgttggccaggagggtgcggtcgctccgagagcgctgccccactgaccaatacgctagggccgggctagtgggtgccgcccgaggcgcgaagcgactccctggttgctaggcaggcgtgggcggggaggggcgtggcccggcggcgtcccggccc

SEQ ID NO: 35229 - DNA, 203 bp, Mus musculus
  source 1..203: mol_type = other DNA
aatccttgaaagatttaaaggaaactgtataccagctacgctttctcttcggaaaagcatccctttggaggtgctgtcctgggcccgcgcgccaaaagcagaagcccggggcggcccaggctggggcggagagtccttaagggctgtaggaggggccggagggggccggccccagcaggtagttaaccgcctccggcgcgtta

SEQ ID NO: 35230 - DNA, 341 bp, Mus musculus
  source 1..341: mol_type = other DNA
attttttggccagtagaagtaagtcacaaaacccagcctcagtttcttctttttaaaaactagaaatattatctccagaattaaaggtatatctttttatacctcatgaattaacaatttgaagagaaagaactatattataaagggaaatttttattcacaaataaatgtcagttttattcatattcacttacaattttatttttataggcaaagacagccctgacgtcaggcttaccctctagtgagggcagccagggctgctctcccggagtgcccggggctcccagagtcccttagtaccctaatgtattcagtgctgcgcgcgcgcgtgtggcgcc

SEQ ID NO: 35231 - DNA, 300 bp, Mus musculus
  source 1..300: mol_type = other DNA
tctctgatatggggacctgatattagggatctgactgagaggctgtcaaaatcaccagtggccgaagcacaagtcacccatcgctttaggtgaagttctccccagctgcctggagagagagggagaagcttcctcctcagaaaggcccttcagaaaataacgattacttgttgacaatgattttattattatcatttatttattttttaagaaaacccagctcattggccaaaggcgctagcagcgggctcagcggttggctaccacgcccgcccgtccaccgcgtcggtcggggtcaga

SEQ ID NO: 35232 - DNA, 372 bp, Mus musculus
  source 1..372: mol_type = other DNA
tagcttacaagatcatgtctgtgatttctgatcctttagacttggaagtattttgcctgcatgtaagacagctgtgagctgcagtgctctcagtctctgagccatctctccagctgatagtcgaggctcacatattatgaatatttgataattctagaagataaacttccttaacgaggctcacatattatgaatatttggtatttctagaagataaacttccttaaggagaacactatactagaaacatgaagtctataattcatatacaagcttgagcacacatgcatgaatgtaatattagttaatagcatgctaaatcccaaagtttgagtttatgaggagaatttaaatcttgagttgaaatatacc

SEQ ID NO: 35233 - DNA, 477 bp, Mus musculus
  source 1..477: mol_type = other DNA
atgggctgggccacttacagctggatcttaaagggtgtgtgtgtgttgtacattacactgcccccccccccaaaaaaaaaagagtcaagattcacaactcattttaggggaattgtaaattaaataatgtaatcccagcacttagagagagagagagagagagagcttctattttactctcttggcgtttagctctgctttgaaagtttcaatggcaatgcctggtaatatagagaggcactgaatgagcagaggcaattactatcattaatccagttaattaagaaaaaaaataatgttcacaattttcattttgtaaacaaattaagtgttttgaaataggttttgagaaaataagtgactttttcattgcccgggacacaatgtagacctcgcgcggattcctgggagcacagcaggaattccaggcgagcgactcagcctgcccggtagcttgcacactgggttgctagccgg

SEQ ID NO: 35234 - DNA, 356 bp, Mus musculus
  source 1..356: mol_type = other DNA
gattcaaaggtatattatattactaacttaattttaaatttgagatggagtctgcccattcaggaactcaatatatagatcggatttctctccaaaataaatcatttttttttaacatttatttttatagtgtgtgcctacaggcatgcatgttcacctgctgaacttggaggaaggacagaggcgctcctccttagccctgtctacagaggctgtgcacgtttctccactgagatcagagagactggcttgactgaagtctcagttgctcaaaactgtttttgaaatgtcaacttgactccgcccagtgctcagagcaaataaaaactccacgcagccattgtgggattatggcg

SEQ ID NO: 35235 - DNA, 306 bp, Mus musculus
  source 1..306: mol_type = other DNA
caataaacaagcaagtttccttgcctctccagaccagggccttttgcagagcacctgcgaagcaagtcattctcttccccagccttgcaattccaaggagtgggccccacgctactgcagaaggccaggggcctggcgggctaactgcagccccagccccccaaagcgccccaggccttttggcttcgttccaagcctagcccgaaggggaggacatctgcttcctccaagtggagaggcgaaggagaaggggactcctttgccgagccccactcccaggggttcgcagaacttgtaatcttattc

SEQ ID NO: 35236 - DNA, 225 bp, Mus musculus
  source 1..225: mol_type = other DNA
gtgattctcagccatggcctccttgccgggacaccagatgggctgcccctgataaagagccagggtgacctttcctggtgtttcctgaaaggaggtcctcaggtcccttcatgcacttcagggaccagacccagatgtgggcccagtatagttgaagtccttaaggggggattaatgtcctcatgtgcacaagtatactgtgccacgctgagcattgtcagcttt

SEQ ID NO: 35237 - DNA, 546 bp, Mus musculus
  source 1..546: mol_type = other DNA
tggcctgggctaggagtcccctaggggggaattcctcagatctggagacctaaagctttggtgagccacctactgaggagcacccccaggaggggaccagaaggtggggcctggatcagtcaatggatctggcctccctcccttagagaggaggcaggagccccagggcctgctctgtttatatgttgcacagaaacttgtgtgggtgctttagtaaaaaacgttaacggacccggtcttctagtaacttaataaatttcctagccctgccacttccactgttacagggagaaagttttatcttgacactgctttcaaactagtagggataaggaaatagcggaccagtggggccagatttctcagctcttctccctcagaggcagaaaggtgccctgggataagcacagggtgcttagccactgcgggcaggggcagggcctctttcggctgatcccagggcacgggaggggaggggctaagggccgattcccaaagggtctgctccaaaagacagcacaattctggtgtctggtccagagcaac

SEQ ID NO: 35238 - DNA, 383 bp, Mus musculus
  source 1..383: mol_type = other DNA
ccagactgaaccccagtgtggggagcttggtgactgtgtacagctgtgcacctgtgccccccttttgtgaaataaacaaaggaaattgaagagtctgggctctgagatccacctggattttcctggagaacagtgttttacatttgatagtcccctaataagtccttttcagtcaacacctttaggggtttggctgaccttgactcactgaagggccttagccatccggcctgatggattcctgcgtccttcctgggtctcaggccgcacctccccgctggctgggccgcgcagggccaacggcaggggcgggcggcggagcggcgcgcggcgcgtgcgggcgcactggaggcgggggccgcgggggcgcgcgcgcgggcgcg

SEQ ID NO: 35239 - DNA, 227 bp, Mus musculus
  source 1..227: mol_type = other DNA
ttagcaaaagaatcttagagcatccatcatgtattctgtgtgcatgtgctagaaacagccatggtgctaggatcctatggatcattctgtcgcgatggccttataagatatcctgcttcaagcagaaggaactagggcatgacgtctaccagggcccggcctcaggcagccagccactgtgcgcgggggtcacgtggggtcggcgcatcacgtgcgccggtcaggtg

SEQ ID NO: 35240 - DNA, 344 bp, Mus musculus
  source 1..344: mol_type = other DNA
actcctgtaatcccgggagtgctgggattaaagaggtacacatgagctattcttacataatgaaaaccttaacgatttcacacgcgcgcgcgcagaataatatgatttgggtgctgatggtcaccaacacaatggtcctctgccctaagccgagaataggatagggttccataggacggcgggtccttgcttcaggcaggggcccctggcggtgtgccgttccgtcgcctgttcgggggcgcgcgagctagcacgaggacagggtgcttggccgtgccgggccaggacaagcgtacaggcgctcgggacagcccgagtcttgctgaggtccccgccccgtcccg

SEQ ID NO: 35241 - DNA, 357 bp, Mus musculus
  source 1..357: mol_type = other DNA
ccaccatgtgggtggtggtaactgaacccctcagctctcctggaggatgcagagattctcccatccctccttatgataagaagtcgtgtgggataaattcgggctctaaagcccagtttctagaaccaggacatagagacattttacgatgtctggcagtaagtacctgccaaatattcaaacccagatccagctcggtcacacagcaagaccctgtttcagattctggtatgtatatacgtgcacacgcgcgcgcgtttaaatatgatcagcagatagcgcctgctccaccggcaggctggccttagggtatccgggaagccacaacacccacaaggctttgcggcacttccgatt

SEQ ID NO: 35242 - DNA, 362 bp, Mus musculus
  source 1..362: mol_type = other DNA
tttaccacctcactttgtccaaggaatgtaggggattgggtcctggaacccccaactccccacacagactagttggtagaacaattctgatcatctctgaggtcaatcattcactgccttcactggatgtgcgcgagtccctctgagcccaacgagccctgtcgctccgaggcagctgaaccttctgagggtcccggagtctgaggatacagagtagcgtctgcgcagcgcctagccagcggggaccggatccggaggaaggtggggcggggcgggggcgctctgggccccaccccgggatctggtgacgccggggctggaatttgacaccggacggcggcgggcaggaggctgctgaggga

SEQ ID NO: 35243 - DNA, 286 bp, Mus musculus
  source 1..286: mol_type = other DNA
acatgatcagggcacatcgggtccatgataccaagagggaaagccagttcctagaattttaccacctcactttgtccaaggaatgtaggggattgggtcctggaacccccaactccccacacagactagttggtagaacaattctgatcatctctgaggtcaatcattcactgccttcactggatgtgcgcgagtccctctgagcccaacgagccctgtcgctccgaggcagctgaaccttctgagggtcccggagtctgaggatacagagtagcgtctgcgcagc

SEQ ID NO: 35244 - DNA, 400 bp, Mus musculus
  source 1..400: mol_type = other DNA
agggttggttttgaaagcagttcaaactaagggggaatccttaaggctgctcacagcctctcaggaacaatgacttctagggatcctgtaagtgcctttaatgattcttagaatcaccctgcgctccaagagctgctaatccggagccgcttttaaaaagcctcagggcttgccagcaggcggcaaacttggacatgctggtcacgttctctgaaaactccgcctttatatcttaggcaaaggagttactccaagaaaattaggcttataaccggctagcccataactatggagatctgagtcagcctctgataggctaactctggatccagccctgatgctcagtggccccagtccccggaggctcagcgttttctcctggcaacagctcgacgccgag

SEQ ID NO: 35245 - DNA, 444 bp, Mus musculus
  source 1..444: mol_type = other DNA
ttaagtcaaccattcaaaaatatttttggcctattataagaaaattccataaaaagctatgggactttcccaagtctcataaaacgtctagtctgggttcacccaacagccaaagactgcacttcagctttttgccaaagcagaaacttatgtcttgtataccttgtataagattggcataattctgtattaaattctgccttaggataatcagaatgagcgacctcgcatctgaggaaacctgaccgcagccgggcagccccacgcaccgcagctccacgcagcgctcctcccaagccccagctatagcccggggatggggaggggatggaccattgggtctccggggtccgggcccgcccaaccctgcggcgaagcctcgcattggcctgcctggcgccccgccctgatgcccgacccccggcgcggccgccgaggcggacc

SEQ ID NO: 35246 - DNA, 450 bp, Mus musculus
  source 1..450: mol_type = other DNA
tgcacaattattagagttggatcagattattatactaaaagatctccaatttttctattggaattgagagttttcagcaatcaagagcagaggacttgggtctggttcccggcacccacactgggttcggtgaatatgcatatacaaatacatatataaataaaaatcttctttaaaaatcaagaatcccagcagggaaatgttcttgtctgggataagcactgggctccggtgtgaggcagtgctatatttagtgttcctgtaattggagtccatagttcagttaaaaaaaaaattactactttttctgattgctaggactcaacattaggttttaagctcaattttgacagctccactcctctacaagcgagagtgcacgaggggaggggcggcgccggggacgcgcacggcaggggcagggacgcgggcgcgggcgggcgggcgcgc

SEQ ID NO: 35247 - DNA, 442 bp, Mus musculus
  source 1..442: mol_type = other DNA
aggcttacaaacaaccagcaatttctgagtactttaaatgacttacaggtcttgaaatttcacctatctatctatctatctatctatctatctatctatctatctatctatctatctatctgtcgcctgacaaaactaagccaattttgattggccaggttggctgcccttgggtatcctcctatggccccatcactggaggcccccagatgcttgcccacctggtacagcagtttcttttataacaaacatccagaactggtatgggtctcataaaacttttctgaggaaaaaaaaaatgcacgcttagtgtttagtccattctgggccagaatatgtgcgagacttgaattcaaataaagctgtttgtgcacagctttcggcccacctccctttatttgaacagggatggggcggcctggctccgcccctcgccgctgcc

SEQ ID NO: 35248 - DNA, 276 bp, Mus musculus
  source 1..276: mol_type = other DNA
tgtgagtgtagctactgtcaaccacacaccataaacagtgtaggtacattgtttctgagtgttagacaattttaaacgctgaggcgtctccgcccttagcaacgaggtacaagtgagggggttggacaccgggttccacccacagccaggctttagccttctgaagccttatgacgcctgtgtccaacagcctagatcgaggcgtgcggcagcccaagcgggctcgatgcccgcgcctcccgcagctggcctgcattgccgcggcccggcgggcgc

SEQ ID NO: 35249 - DNA, 371 bp, Mus musculus
  source 1..371: mol_type = other DNA
acagtacttgtggctggcatacagtaagaattcgacaagtagccattgctatttgtatcgcaaggagtagtcctaaggtatctttgcatggcatgacacctcacccaaaacatacaataaaggggtctgtcctaagttaagactggccagagcgaaatcaactcatgctattgattgcattccaatagatgagatacctccttgaggctccggagggtgaaggctgccacacgcccgccctcgggcctcggccccgcgcccgcccatccctcacctctggctcggggcgctccgaggccatcacacagccctcccgcgccggcccgggccagggaggttgctccactccggcgttctgtaccgggcaggaa

SEQ ID NO: 35250 - DNA, 341 bp, Mus musculus
  source 1..341: mol_type = other DNA
ggtgggtggtggtactgaattgacatctaactcctcccccacctaattctgcttctagaataagtcaggcagcctcatttggccagtttagacagtgattcacaggactcatccaagtttagtggtggccgactgctgcctcccgcgcagctggccctcctcttccaggaaaagccttgagggaacggttgaaccctggaaatttccccctgccccgggatctggcgacccgcccctgctcccgccctggcggccaggcaggcgctggacggcccctcctgcctcggccagccgcccaatcagcaggcgccccccgcccggcccgccccctccccctctgg

SEQ ID NO: 35251 - DNA, 210 bp, Mus musculus
  source 1..210: mol_type = other DNA
ccaggccagcccggactgggagatctctaggtctctgaagaatcctaagtcccacgggagtcctccagagcctaacctaatcttcacacgaactctctctctctctctctctgtgtgtgtgtgtgtgtgtgagagagagagagagagagaaggactaactgtgcgggacccgcccccgtgttccgattcgggctccgattcgggcaggga

SEQ ID NO: 35252 - DNA, 190 bp, Mus musculus
  source 1..190: mol_type = other DNA
gcacccgggtttccctcaaacttagggagagatcctcagaaggcgccatgcagagcactccgccggagttgggacaaagtcctagggggtctaggctagaggggaccagcccatgaggctccctcccagaagagggaaagattcctgagacctcccccctcacccctccctggtagggaagggtgactga

SEQ ID NO: 35253 - DNA, 353 bp, Mus musculus
  source 1..353: mol_type = other DNA
gtccaggacgccgaaggccgtgcctttcgaacacaccaaggttgctgagaacgcccccggtgatggacagagcgttcctaccaggagcgtgcatctgtttatatccagagccatgacaggtcactccaggagcgtggcatgactgagactactggacaggcgtttatgtgtggttagcactgttccccacagggtgtctccatttgattcacaggcgaatatatacctctgtgtccctgccaacagaagtcctctggcccctggccccagtgtggtctggatgggccccagaggggcagagacagggacagctgtctggccccgggggggattggggcccagcttcctgaagg

SEQ ID NO: 35254 - DNA, 267 bp, Mus musculus
  source 1..267: mol_type = other DNA
gaggacatcacagaacttttctttggcaaccgctgggagcccagagtgcctctgacactgtcttctacccaccatccaggggttggagttcctgacaaaagtgtcccggactctgctggccagggtagaggtgaccctttgaaccccttgagtagatacttcagtgtacacacaggtgcacgcgcaccgtgtgcgcaagcttggtttcctcaggctctgcctgggacgcagctgtgggggagggaacaagcctactgccccctcaat

SEQ ID NO: 35255 - DNA, 443 bp, Mus musculus
  source 1..443: mol_type = other DNA
aaaataatttaacagttagcttggacatcggccaaagtgaatatgaactttggtagatccaatgcctgttctatttatttttccagtgaaaagtattttgatagagcttttcattttgtaaatacactgagttaaccaaaatatcatggatttccgtatgtaaatacagtagaatattacttaggtagaaactcctggtgattttaaaagagtctacagactaggacattttatcgtgtgttgtacattaaaaccttacagagaccgtttcttgtttacttttgaaaaaaaaaagagtcacgtgagcctcattttgtatcccagtgtgtgtgctgggaggaggggagaccccactcctgtctcccgtgctccagcaatgcagatgaggccacacccatcccgggcttgtgggggctggacacgggagcaccgaggtgcactga

SEQ ID NO: 35256 - DNA, 296 bp, Mus musculus
  source 1..296: mol_type = other DNA
aattattctgaaacatcgcagggttctggttaaacggcgaccaagatctgaggttgcagacacacgcactggacccagggtcactgagaaccgcgagtttgactctcagaaacccaaagtaggatgacgaccgcagcgcagggtgcatcttgtctcccaagaggcacagcgcttgtgcgcatcctgttccaaggaccccgaccctcgcaaggcacgcatccgactccgagtccgactctgaaagcggaggggtgtccatctcgcggccttccgccccgcgaggttcggctgccact

SEQ ID NO: 35257 - DNA, 336 bp, Mus musculus
  source 1..336: mol_type = other DNA
ttcaatgaagcaagaaaaacactgtttaaagtaactcttctctggagtcattgtggaaaagtacttttaaaacgtgtgttacgttaatctatgattaagtagtgtaaatggccatttattttgtttacatttataaaaatatgtggataacccagttatcaaaaaaaaatcttcccaatcgttgagattgaatatattgtacttcacacagtgatttcctgaaggaaatataatgatctgttcatcgaagaagaagagggagtgaagccgagcagcgcatctccctttcctgccccgctccttaggaggacctagggatcagtaggtgctcttcct

SEQ ID NO: 35258 - DNA, 294 bp, Mus musculus
  source 1..294: mol_type = other DNA
tgagaacttgagacagaactttctaggtctggctccagattctgtctagggggatcacatcatggggcgagccactgaggacctccttaaaagtttgactcagctatggtcaaattgatcaagcaggctggaaaaggaaatatgacagcttgtcctgctggaggaggctgagatggctgcctttgggcaatgccttcaggggcagtgctggcttgttccatggaggaagtcagagggctcagttcccaaactctcagaaccactaggtacgaggtggcttctcatctttagaca

SEQ ID NO: 35259 - DNA, 262 bp, Mus musculus
  source 1..262: mol_type = other DNA
tgtttgagatagctacagtgtactcatatacaataaattaattaattaataaaaacaaaaggttttccacactgcgggttttggcttgccagccagcctgtgaacaaaagctgttacctggctccattccttaagggaaggaagtacactgccagggaagtacactctgcctacctgggagccttcttgccattcccctcttgctccttagcaacaggagagctgggagaggggaaggtcagttattactgtcatcccacct

SEQ ID NO: 35260 - DNA, 374 bp, Mus musculus
  source 1..374: mol_type = other DNA
gcctagctctctaacagaaagccagatccccccttcaggtgaacctagatgggacattgctcattggctgggagcttgcccaggaccagctagaggcgtctatgtccttaaccattcacacttaggtgtcaccataagtggtctctctaactcgtttaatcttcctaataacccaggaggttgtactattattatgactagtctaccaaagttatccggcagcctagtgaggaagccagagtcctagcgctggcttacagccccgcaccaagcgtgccacacagcgagcgcccccaacgggtgccccgcacaccctgggactgcaggttctagcatccagagccagactgtggtgagtcccgccccggacgtgc

SEQ ID NO: 35261 - DNA, 353 bp, Mus musculus
  source 1..353: mol_type = other DNA
aagttcttaatctttattgttcttcaaaataaaatctgggaaaaacaacataactttgggccactggccgacctggcaagcatgtccttttaattttaaactataaactttaaatgaactgcgaggtttctatagtgatgacagcttcaccgctgagttctgaactgggcaaatgttttcagcaatgtttattggccgtcctactaggtctcgaacgctgtgaaggcggatcctctctgggttccggctccggctccttcccccgcccaccgaggcgccgctgtccctgaccgagccgcgggagtgacgcgaggcacggggcgcttcgagcctggccccttcccgggtaccgt

SEQ ID NO: 35262 - DNA, 327 bp, Mus musculus
  source 1..327: mol_type = other DNA
agagaggtgggattataaaacttgaccctctctttcaggtccctcttaatcaccgggtcatcactagctctaaagctttaagttcttaatctttattgttcttcaaaataaaatctgggaaaaacaacataactttgggccactggccgacctggcaagcatgtccttttaattttaaactataaactttaaatgaactgcgaggtttctatagtgatgacagcttcaccgctgagttctgaactgggcaaatgttttcagcaatgtttattggccgtcctactaggtctcgaacgctgtgaaggcggatcctctctgggttccggc

SEQ ID NO: 35263 - DNA, 251 bp, Mus musculus
  source 1..251: mol_type = other DNA
gattcgaaacccagaagaaaccccggggacttctgagtgaccagtgcatttttataaaagtccacgtgcgtgggtatcttgaaaccaaccttctaatttttaagtcaaaatttaaaagttagtgtacaaagtgtaatatgggagaaaactaattctaatttatgcttattgggaagtacaagagagcaagccttcatttttaaaaaggaacaatggaatcaggttcctttctgaacgctcgcaggccctct

SEQ ID NO: 35264 - DNA, 515 bp, Mus musculus
  source 1..515: mol_type = other DNA
tctggttttggtcccagcacccacaactgccacaaatggcagctcacaactgtctaccatgcctgcctgcacactgccatgcttcctgctatgatcacagcaatggaaaacctaactgatacaatttctgtcccctagcacatgctctgggacagagtctcactattatgtagaccaggctggcctcgccctgtattgatagatagatagatagatagatagatagatagatagatagatagatagatagatagatagatagatagacagatcatttttttcaaagctttcaaagcattgtggtaaacaggattccatttgatcctccttatagatctataaatcaggaaggaagcaatcagcagtcctgactttcttgatttagaacctgatgctcagattcaaagccttgcagttgtcccagaagcccggaacgctccggccacgcccaggtgtgctcgctgcgcgggcgcagtggctcctgcgggaggggcacctcaggccgcggccccgcc

SEQ ID NO: 35265 - DNA, 514 bp, Mus musculus
  source 1..514: mol_type = other DNA
tcacagcaatggaaaacctaactgatacaatttctgtcccctagcacatgctctgggacagagtctcactattatgtagaccaggctggcctcgccctgtattgatagatagatagatagatagatagatagatagatagatagatagatagatagatagatagatagatagacagatcatttttttcaaagctttcaaagcattgtggtaaacaggattccatttgatcctccttatagatctataaatcaggaaggaagcaatcagcagtcctgactttcttgatttagaacctgatgctcagattcaaagccttgcagttgtcccagaagcccggaacgctccggccacgcccaggtgtgctcgctgcgcgggcgcagtggctcctgcgggaggggcacctcaggccgcggccccgccctccccggcgcgccccgcccagtccaagggcagcgggctgggcgctgcggtcccgcggaaggggaccccgcgtgggggcttgtctacgacgag

SEQ ID NO: 35266 - DNA, 404 bp, Mus musculus
  source 1..404: mol_type = other DNA
ttcacacccttcagtacttgggagactgaggatcacatgaattcaaggctagcctcagctacatagtttgtcagcctggtctacagtgcgtgttctagagtttgaggccagtctggtctatcttctatagcatactatccattcaactgctctagaaccttctggaaggctttcattcctttacagtgactttctgaaagaacatgacttaaaaaacatgagaaatattactatatatttataccaccttttaggtacaaaaacccgggcctatataaggccctacctgcttggagctgacactcaggggctcagcagcagacccgcggtgagcccagggtggctctatccaggtccaagtgggtggagaaagcaggcccctaagagccaggttaagaggctgg

SEQ ID NO: 35267 - DNA, 534 bp, Mus musculus
  source 1..534: mol_type = other DNA
gccgcctcggttccctctaggaggccttcccaaaagaaaaaggtcaggtttttcttggcttggctttagggttagcatcttcccggccaccgggctccggaccgttgaactccaggtccagttcttcactcaagggcggcccgaggcagcggcgtaggcaggcggcacggcgcagcacggctccgaagaagcgcaggtcgtgcagggcggcggcgcccgggtcctggctcaggctggggtccggaccgagatccaggtccggtgcccacggcagttcggtggcacagcgtgtgcggcagcgcaggcggagggcacgcagggccgcccgcgagcgcagcgcccgctccatgtcaggaccaccccgggccagtccccgcgcgagtaggccgcggtcccctctgcgtaaagcaggtcaggggctgccacgtcccatcccggctcagactccgccgcaacccgtaaggcggcggcggcggcgaccgctagcatcgctgccagcagcctcctgctcaatggactcacaagctgttgtgc

SEQ ID NO: 35268 - DNA, 337 bp, Mus musculus
  source 1..337: mol_type = other DNA
tgttttattttgttttgtttttttaaaaaggaaagaaagagcatatatttaagttccacaagctcctgggtaacagataaagctatttaagaatttggtatagaagccatacatttaatgcctagtctataatatagagatcaccctcggcgagcgccacgaggtctaaggggtccccgacccggtgggtgtggtaggggctcaccagagccaggccgccgggggtcggggtgagctccaccagggctcctgccaggaaagagccacccggctgcgacctcctaccgtaccggccgggaaccccggggtcgcacaacagcttgtgagtccattgagc

SEQ ID NO: 35269 - DNA, 478 bp, Mus musculus
  source 1..478: mol_type = other DNA
acagaggcccctgcccctgccaggctgttctggagctaggggccagggcctgctgtctcaggtcccagcaggagctgctgaaccagccagcaaagggattaactggctgagcagaggacagatgctggcgcagatctccccagctccccaccacctggctatggtttccaggtacctaggaaggggatctaggtccacacacacacacacacagagagagagagagagaggagagagagagagagagaactctatagttttttcctgctgtaacttcccagagcactggaatcactcctaaaggggtttccctggttaaaagggggaagagtcactcctcctagcccctcccttccttactattgagacagggagggcaggggtaccccagcttggatcctaggttctaccctccactccgtgggcgggttttggccttttccagccccaaggccgccccctgcattctggaatcagc

SEQ ID NO: 35270 - DNA, 367 bp, Mus musculus
  source 1..367: mol_type = other DNA
tgggcgttaaaattcccagtcaatagtagatttacagtgtataaaaacaaggatagcaatccttgtctacagtgcttagtttataaagtcaaaaaccctaacatccaataaatgtgaggcgaaattaaatctgatttgtggccagtatgaaatacatttcctcggacgccgggggaaacgatcacccctgagtcgtggcagctccagcgcctgcgtggtccctccaaggtgactgccagccgtgggaaggagccccttctaggaggccggagtaggcccggcgatcgcggcccacgtgcgcgacgagcgcagccccatctgggaacgttccctctgcgcagggcgggtctatcgcggggcttatccc

SEQ ID NO: 35271 - DNA, 398 bp, Mus musculus
  source 1..398: mol_type = other DNA
tccctgagactgttgtgcttgcagacaggaacctcgcatggctgtcctgagagactccacccaggaggaggactcctgagggcctccgaggggattggaactccacaggaaaaccagacccttggggctctcagcaactggagtaggggctatcccaaaagcgggtctctaccctctcagagaatgtgaattaaaaaataaaaaattttacaatcataagaaaataaataaaattacagctcatgagctgtgacaggggacaccaagtgtgactgctcaggacatgctgtctgcagaagattcatttctattgcactaatacagtagtcagcgcgcgccacacttccggggcggggcgcaatcgcggtccgtttccactgcgtccggatgaagttcgc

SEQ ID NO: 35272 - DNA, 304 bp, Mus musculus
  source 1..304: mol_type = other DNA
gcacacctgcatataatgcacatacttgtgttgggatcataaattcaaggccagtctgggccacataaaaaccaaaaagaggcttgcagtatgtgtgtgtttctctcttatctgacaacgtaggcataagcagtccatgcccaacatggaggtcccctgtgtcaggagctgaggcttctgctgccttgcaggctagcaataatatatttttttaaatacaaagagtataggccaagcatgcctttctacatagaaagctagaaataataattttcatcagtggggcaggattcagaattcctac

SEQ ID NO: 35273 - DNA, 216 bp, Mus musculus
  source 1..216: mol_type = other DNA
atatatacacaaatgtaataaaattttaaaaactaaatggctattaagagcactgggccataaatataaaacaattttaaactgtttttagaaaactagaaaataatgtgggttgagactcaaaagggagtgttttactttaaaaatcctctattttgtttagaatttgaaaggttcactggcctttgcacgccagtgtagagaagcttctgatta

SEQ ID NO: 35274 - DNA, 383 bp, Mus musculus
  source 1..383: mol_type = other DNA
gaacagtcagtgctcttaaaaggaaaaataatacagaaaacttcttccttttatcagacatctagacgtgtggtaatgtatcctcaggacccactgggtggaaggagagaaccatggaacattttcttttggaaaaggagaaatgtgagagtagccatggcaagagcagctctcatgatcgttggggcagacttgacttatctggccctagagttcactttgcaccacagttccaactctggtggagacttacagataattccctataaatatagggaatttatagagaaggtgacatcagagagactgactgtcaatctgtgcccaggaagcacagtcgggagctctgccttccagacagaactctgacagtgtcacgttct

SEQ ID NO: 35275 - DNA, 377 bp, Mus musculus
  source 1..377: mol_type = other DNA
ctctcatgaatattatcataaaggtcacctaaagtcatcttttacagcactggacctaaagttcatgaaaagtccagaagtgtggaaatttaccttaggtactccaggtgtgatgacaaattctggccctaaattgagacctgatattatagcctaggcggcaccgactggaatctactgtataacactagcacatccaagttttgaagtcactaaacagtctgagaattatataacgctgtacactgttgttatggttactgcggtctccggagcttcacaggaagaacggcccgggccacccaaagcgtgcatggtctccatggctcccgccgggtcgcgcctgcgcgtcccccgctgagtggggttgcctgaca

SEQ ID NO: 35276 - DNA, 447 bp, Mus musculus
  source 1..447: mol_type = other DNA
cagagttctccttgagctttgagaggagagatctaaaatccccattttagacacgcgtcttcaagcctgctctggacttgtggggtccctggcaggaaaggccaccatgttccagggtgactgtacaggccgtgcacatccgctcggccggggcttcgcacacctcacaggagagccggcgccccttgggcaccgccagcgggtagatcacgttcatggtgcggccggcggcgtcggtctccaggacggttgcctggctagcatccgcaaggctgaggtgtcacgtgacaaccacgggccagcccggacgtcgggatttcgttttccaaactaggaaatccacaggaagcataatttttctggattttctagatatttgcggctgcgcgcagcccaggtatccggaagggggcgtggcgccagcggcccggcgtgcccgggcgctgt

SEQ ID NO: 35277 - DNA, 496 bp, Mus musculus
  source 1..496: mol_type = other DNA
cccatagttatttagaaatgactagctaggagctgtgagatcaccacatggtgggtttcaggagaaccagatcctgaaagttgtcctctgatcttcacgatcaagctccttgtgcacaataaataaataaataaataaataaataaataaataaatacataaataaataaatacataaatacatacataaataaatgtataattaatttattttcaagaaccccatctcccagccaggctgcaggccaggattggggtccagctgcagagccccgccatgtgaccttgccaggctggggggggagcagcaccgcgcctacccagccagtggcccatcggttcccggggtcgccccagccccgcccggccgccgcaggctgcgcagctccgcaggctccgggccgggtcctccccgggcgtcgcgacgtgctgagcggaggcggcggaggaggcagcggaggcggcggcggcggcgtcggcgcgaggcgatccggag

SEQ ID NO: 35278 - DNA, 483 bp, Mus musculus
  source 1..483: mol_type = other DNA
tactttgtggcaactccatgaaggaatggaaggatggtttcacactgtcttagctcagcaaggttgcccaaatactgagcaactgctcttcacttgctgttcttgaggctgcagggaagttccagaagtctgacctggccagctggcctcgaacccgggttcttgacattccgaaggacgcgtgtccccaagcaaggtccaaagcgccccggtggcggccgggaaaatccgcgctgacggggctcctcaggagttggaatcccgggagtggggccggggccgcctcggccagccgctgtcaagtccgcgctccgcaccgcccaccgccggttcccgctggccgcaagcaggcagagccgcgggagctcagaggcactacttgtccccgcggagggatccctcgcacatcgcgcagcaacgacggggcgggccgtggagccgaggacgccgggccgggagcgctgagacgtcgcgttccgggtg

SEQ ID NO: 35279 - DNA, 387 bp, Mus musculus
  source 1..387: mol_type = other DNA
ctgctttctctaaggtcctggggcttggacactctaggtcctgcagttagagggacccggtccacccatctcagccactcggggcagggcagggcaggacagaggggggctctgactgggctaggcaggtagccatcagtggagaccaggagccgctgctgctgttcaggcacagcaacttcttcatctgtgtgccaggaactgcatggaacacttaggtgctcatagtctccttagcacgaaggcatctgccaaccagggagggtgggaggttgccactgtagtcacagtcactcctggacccagcccagctgtgagtcacagtagtgcccagggagaggccagggctctgccaggctgatggggctcaacaggcagcagatgagg

SEQ ID NO: 35280 - DNA, 298 bp, Mus musculus
  source 1..298: mol_type = other DNA
ggccagctgtcccagcccacagctacctctgtgggtggcttccgatagaagacttgatgtgacaccccaggctcacacagcagctgccacagctctggcactgaacccttgtcatctcctaggagatctgagcaaaactgaagagtctgtttggcctgaggcaaatcactttacctgatcacctttcccctcctcctggtgtggaggagagagtgagaacatgccaggcccttggcagaccagaatctgtcaaagagccaggaagtgaccagagctctggaccctggcctataagggg

SEQ ID NO: 35281 - DNA, 487 bp, Mus musculus
  source 1..487: mol_type = other DNA
acagggtatgtttaagatccaaaccataatgagaaaacagtaaagtcttttgtggttcatctgtgttataccatgtatcagaatgaccattcctttttattaccaaacactagtccattggcatgaattaatgtgctgctgggaacatctgcatctaagtattttgtgtagacattcttttgaacatatatctaggacagaggagctagcaagaccttcctggctagggagtagatccgaagtgtggagctgggctcctccgcctgactcgcttaggatctctggtcagggactgtctcttcacagatcctggacctgaggagctcaacgtctctgagcatccgcgcaagcgcggctttccaacccccagcgaggaggcggggagtgggcggagccgacgtctcccaggccaatcgaaagcgagcgcccccgccctcggcgctgtggactgagcttgaccccggtcgcggacgggggcgtggcccta

SEQ ID NO: 35282 - DNA, 558 bp, Mus musculus
  source 1..558: mol_type = other DNA
tgaagctgttccagggtcgacaagctaggcctggagtctgtacaggcacctgtagactgcagacagtgccaaagtctcaaggcacattctttgctgttcccaatgtggaccaaagtaccactgggaagtccctgatgagctgattcccgcctgggaatgcatgggctttctagactgtggatccaaggcatggcacccaacgacagggcttccctgtctgtcctctctggagagcctgagaggagtgcccacagtgacacggcctgtcacagtggaggcggccgcgcagaccctcccagtggctgctggagccggggattccccagccgcagatcccaagccccagccgccacgcgctgcgtcgccaggctgctccatgacccctgctgcccgggcatcccggaccagctggtggccaggctgtgctcgccccagacagacagtggggtccccgggtttgcttcccagcggccgcggggcggcccagagccgcgcccgccccgcgcccaccccgcgccgcgtgggccgccaagcgagcgcccagggcaccgccgggcg

SEQ ID NO: 35283 - DNA, 550 bp, Mus musculus
  source 1..550: mol_type = other DNA
catttatttatttatttatttatttatttatttatttatttttgcataaagggtgacacaaaatattctgttcagtccacactggggaactactcaggacaccttctgtgtgcctgtggagtatcttcctagaaagggctcagaagtgtcttctcctctccctggctgaggctctccctggctgaagctatccctggaaggtcaggcatgagttgtgccattcctgaggccagggctctgacgcgcccaaggccatgtaaccttgagtgggcctttccgaaagctttgcttttagatgagacctccactccaaacttccagttcaggagtgctactcagaggggccttgggcctgcagggagcctgcagagtccgcagagggtggagcccagccttccacctccctctccccctcaccgggaggccagggcgggccaggcacccagggaggaggcggtgtccctggctctctgcccaaggtgcagcagctaagcaggcggggctgcaccagtaggggcgggcgggcgccctgcctggtattataagaggc

SEQ ID NO: 35284 - DNA, 719 bp, Mus musculus
  source 1..719: mol_type = other DNA
cggggagggaccagtgttccgagccccgccccatttctgttgccccgggaaaccccgggttgtaacgcggggcagccccgctgtgcaccaatggaggatccgcccctacgttgccctccccgagcccggcagggggcggggccgcgccagacgtttctcgcctgctccctagggggcgctggcgtgcggggcttcggcggggtcgcccttagcgggagctccacgccccccacagcggggccgcggccctgggcgagcacgccccgcctccgggtccgccccgtccccgtcccccgcccatcccgaggtgcagccggcgctgagcgcggcaggcgcgggagctggcgctggagccggagcggcggcggcattcacggggcggcggcggcgcgggctctggcacgggctcgggctccggcatggtgcaagccagcctcgtcccgggagagcggggcccgcgcgcgggaccggcgcccgcggagcggcggcagcggcggtggcggtggtggctgcgggcacagacaggctgggcgaggtgtgtgcccgctgggctcccgggccgccgccccctcacccgctccccggcccatggcgccccgcggttgagccggcgccgccagggacccctcccgcgggcctccccggggcgcgcagatcccagagccgcgcgcccaccctccgcggagcctccctccctgcctcgcccgagccgggcggga

SEQ ID NO: 35285 - DNA, 452 bp, Mus musculus
  source 1..452: mol_type = other DNA
tatggagcaacataagagtagatttgtttcaggctgataaaaatcaaccagcaagagcacagaacttcagtttccgcgggctaaaacataacgttcttgtagcatcattggaaggaccctagccactgtagtacctagcacgtactccacagccggccaccagctgggtgggggctgagggccgacgggattcgaacctgggacctccgcgaggcgaggcggggggaaggcgcgaggggtcgccccttcccgccgccccgcgcgcgcgcgcgagagaacccaacggccgcggcgcgcgccacctcgcggcaggagtctctggcgggcggggctgggcagctctcgcccccgccccccgcccctcggccgccgccgccgccgccgccgccgcctcggtggagccccccgcctcccgccgccgcctcagccgagccgctctccagagccgtcgc

SEQ ID NO: 35286 - DNA, 574 bp, Mus musculus
  source 1..574: mol_type = other DNA
aggagtcaagactctacattaatataatgtctacaacactttaaagtgttttagactaaaaagtggtattacatagcacacagctgggacctatgtgttgtcagtgaattttcattcgaagcatgaatgagtataattttaaagtttagagacttattttgaaaataatatgtttgaaacttaatttcaatatcaaattgaatgacatagaatatgaagacttcaactgcttttctctccatccattcctttcattgaatcagatgtatgtaatacagaagatatggcataatctatgcagattgtagctcataagagtacacatacatactcttagacacaaagacatataaaaatgtatccatcacctttgattctcagcttggaaaattttccaaaactttggtagtaagtctcattatctaaaagtttctgacatgtgcctccttgcaatgagtattcttcaagatccctcaaataagggtctagcacttgtcctccaaaggactggagtttgaatcccaagcccatgacatgtgactctcagccacttgtaactttagatccaggggaa

SEQ ID NO: 35287 - DNA, 161 bp, Mus musculus
  source 1..161: mol_type = other DNA
gcctggtctgtttggcaacgacaggtacctaccaggtaggagctgggatggctgtgcagccaggagcgcctgcgagcctagcacccacactccggagatcttctgcaagaagcgaatcagaggcctcatgaactaggctggaaaataactttttagttaac

SEQ ID NO: 35288 - DNA, 279 bp, Mus musculus
  source 1..279: mol_type = other DNA
gtcatcctggatcactctgtagaccaggctgacctcgaaagtccttttgtaagctgccacattgtcagaggctgcatgtcactcaagcagcagatagctctgtccctcaagatggctagctgacttttagttccttctagatagcaataactagaaatatctgtgtttgacacatagagaaaccccaagggccccatgggccattatctaccagacatgatggttgttgaagtctgtaccagaaggcattgttggccttcgtgagatcacagaggctgt

SEQ ID NO: 35289 - DNA, 273 bp, Mus musculus
  source 1..273: mol_type = other DNA
taccttttctttaactctttcagcaaagacagaagaaaaaaaaaagaggtacttcctaaggtaaaaactcacatgggtttatgtagtattcaaaagacaaaatcatcaccttgggtgctgtaaatcttgcactgttcactctggtttctgctacgtgttcagagaagccaagcggcccggctattgcgggagctgcggcgagacgtcccgcgcatgcgcgccctagccccatgcgtgcgcaccgcctagagcccgcctctcagagacggctgg

SEQ ID NO: 35290 - DNA, 230 bp, Mus musculus
  source 1..230: mol_type = other DNA
ttatcaagatgctatctttagtttgacttagaccaacctggccttgaacttgtagagtttaagggcacttcgctgggactaaaggtgtgtgccaccacacccagtcccacaaattaattattgaattaaggaatgaataaaatttagcagagtgaaggttgtgcatgcacccagaacccagaaggttggaagttcaaagttaagactctctcataggtggttatgacttt

SEQ ID NO: 35291 - DNA, 337 bp, Mus musculus
  source 1..337: mol_type = other DNA
agcactctaaagctccaattattgtgattcaaagaagctttggaaatcccccattggcatatgtatgtgccaggcactatggagggctctatacacacaccataggcgcttgtggtctctgctactctggccagcatcctacggaggagaaagccgcatttggtgaatgagctgcaattcacgccatatgcccataaattactttaatgagctgacctcttcaaaggacattgcacttcgctgaagtgcaatacaagtgcctgcatcctgggacgcccttgcaggcccaaagggggcgggaccaataccttcttggacaggttcacgacccgcccag

SEQ ID NO: 35292 - DNA, 184 bp, Mus musculus
  source 1..184: mol_type = other DNA
ctgaggaccagagtctcatgcctaaagctgggcatgatggggcataccccctctctctctctctctctctctgtgtgtgtgtgtgtgtgaaatgatataatttcttatttaaaaaaaatgttaacagatgaatcaggttgcctctgcctggctcccccagagaaggcaaacttcattgtgccct

SEQ ID NO: 35293 - DNA, 306 bp, Mus musculus
  source 1..306: mol_type = other DNA
aaaatttcagattctaagaaacaacctcgtgatcagattggagtgtgatgactctacccatcatccactgagtttagaaccaccatttacatttttctttttaattacaagaactaaggttttgttcagatataacttagttttgcatgattcactaggtttagtgtaatatgcctagagaagtaaagccataccacttgttttatttttgttcataaaatataagtgtttttaactaattattttgtagtatactgtttagagtcatttataattgacattaattctgagctgtaaggtgttgaa

SEQ ID NO: 35294 - DNA, 527 bp, Mus musculus
  source 1..527: mol_type = other DNA
agagctcttcctatgtagatcacattggaattctgaggtatgtgctcccatacctgagtcagccattacactttgagtaagttggagtagagtcttttgaaatgctgagaccaaaacatcctatttcgatttgttggtgtttacaataaaatgcattgccttggtaataatctatgcttttaaaattacaaacacaaaggtacctagtttttcttttattaactcaacctggttttattctgttaataatgatcaaacaaaaacctggaaatagatgattacaactttctaagcttttgtactgccataggttactgtagcaatatcttacagaccagtgaaattaccttcaattttttaaatggaactccatagccaatagaaaatcctttaggtggaaattttttaaaggacaattctaaatttgccctggtttgaagtgaagaatctgacccctgttctgcttctcaaggtaacttagccaatcatggctttgtattcttagctgataaagcagctcagccaat

SEQ ID NO: 35295 - DNA, 350 bp, Mus musculus
  source 1..350: mol_type = other DNA
agcttgcttatttagctaggctggcatgtaggaagctctttaattttttatgccaatttttaaaaaaaatatttattattttatgtaagtacactgtagctgtcttctgacacaccagagggcatcagatgtcatgaagagcagtcagtgctcttaaattttaacgttttaaaatgtcacctttttgtccatcctgggttccaagaatcgaattcaggtctgagagcttcaaggcgtcctcggaggtcaccacgcctcccgcgcccctgggaaggggcggggcttggccaggcaagacaattctcgcgagcagccgctgcgcactacgcgttgctgggagtcgaggcgcg

SEQ ID NO: 35296 - DNA, 401 bp, Mus musculus
  source 1..401: mol_type = other DNA
aactggtgactgaattaactaaatgaacacagctaggctttatccttctggactttagactcaagtctagagtcccagcgctgagatttttggtcactcagaggttaagagcactagctgctcttacagaggaccttagtttgaggccctcttctggctcccgagggcaccaagaagatatgaaacatgcatgcagggtcatacacataaaggaaaaaacaaaacattttttttaatctttaaaaagaatctgggccagcgtctttgaagcttgactgatgtcaggtgctaagatccggattcgggctccaccatgaccgtcctctcaccgggcgggcgtaagccccagtgtcgcgagaaccaggggcctggtgaccccgggtgaagagctaaggggctgc

SEQ ID NO: 35297 - DNA, 426 bp, Mus musculus
  source 1..426: mol_type = other DNA
tctgtccctctagagaaccaacagtacagtcctattgacacagggcctgaggactggccagcaccctcataattgcagaaactacgagtaactcaagatattgtgaccagtggcactgccacaggtggcaaaggagctaatatgggtcataggccccttacattggaagttccttttttttaaacaaaggacttactttcacttcgtgtgtgtatgtgcacacatgtgctggagccttcaggtgccagaagagggcatcagattccttactctgatcttcaaaagcagcaagccttactgctcaccagcacctgggaggtgacttgagcggcccccaacccctgattcttagaggttcacttctaggcctactcctcaagggggccccgccccagccccgcccctgccagggcccgcttcctcccg

SEQ ID NO: 35298 - DNA, 431 bp, Mus musculus
  source 1..431: mol_type = other DNA
ctaccagatagctgggcaaaagccgctttcaactatatgtttactgaacttttaaagagataagttaacaggaccatgggaaaataaattcctattaggcagccttaagcaaactaatacatgtctttagggacattaaaaatacatatcccggaattttttttttaagttttctacttatcgaattcaccagaattaggagattaggcgatttaaggctgcatcctgaagccttaagaatgaacttctccaggaagactcgccgggccacggggtacaggagaccctcagcaggggctgccggcttcgctggacaccgcccctgggtctgcccgggcggcttccggcttccgggatctgggtcgcgcagcacccgggtgggcggagccacgggcagggcgctgacgcgagcagcgtggggcgggtcccgg

SEQ ID NO: 35299 - DNA, 342 bp, Mus musculus
  source 1..342: mol_type = other DNA
tcagctgaaactccagcttcaggtactgcagcacgcacgcacgcacgcacgcacgcacgcacacgcacacgcacacgtacgtaggaagaacctgttcaaaaaaaaattttttttaaaggaaagaaaagttctgcctagtccttttgtctcttgaaggaaagactaacctaaaggagtctgggatagccacaacccttgtattatataaggataataaacacacatcttataaagacagtatgaagggcacgcagggggcgtgtcctccctcccgccgctcggattggttcctaggaggcggagccaaggggagagcccagtgcagcgcggtgggcggggcgc

SEQ ID NO: 35300 - DNA, 287 bp, Mus musculus
  source 1..287: mol_type = other DNA
aaccctgctgaagagctcgtgctcttcttgcaaaaacccaggttgttgccagcacccacgtaggagcttatgtctggtcccccatgggataaaaacttgtcttcaaaggataggcattgccaaggcctggccaggtctccagaacctgagatggttgaggagcttgcccgcccgagatgcccccgggacttcccagctggggcgtctggtcaaactcagaatgcagacccagggtgggcacagaagatccgcccctgaccgggcggagctggacagttcctccccac

SEQ ID NO: 35301 - DNA, 494 bp, Mus musculus
  source 1..494: mol_type = other DNA
aagaatctgtgatcctatattgaagtaattcactttgtcaagtaataaatttagtcatggttgagaaatttgaaaccttaatctcaacatctttagcatcacaatctcaccatattttaaattggagctacatattttaattggagctaaagatttcgcaattcactataaataatgtttatacaaagtgctattagttcatagaaactattaattaaataacatttactttgtggtcagaaaaattctggcttcacgtttcaagtaaagtcaaagtagtaacaggggccatagtgaccctatttcataaggcagtggctaccaagcctgcctgttcagtccaatgaaaatcctaatcactagagtcattttcatctctaaaaacaaccccaaatgcctcgtttggttagttatcctaggaaggaaaagttttagagcctctctcatccttatccggtccggttaagcaccggggtccattgccctctctggta

SEQ ID NO: 35302 - DNA, 255 bp, Mus musculus
  source 1..255: mol_type = other DNA
gcaaaattttttagggaggcaggcggatttctgagttcgaggccagcctggtctacaaagtgagtccaggacagccagggcggcctatgcaggtacatggtacacagacatatgtgcaggcaaaatacccatacatttggactagaatctactacatgaaataaccctttctaggacaagttgcttttggtcatgtgacaagcaatagaaaactaactgtcttggttttgtagtgtgtgagaacactggtgagtg

SEQ ID NO: 35303 - DNA, 329 bp, Mus musculus
  source 1..329: mol_type = other DNA
tctggattttatatatatatatatatatatatgtatatatatatatatacatatatatatatatatataatgtatgtgtatatacacacacacacacacacatatacatatacacacacacatatatacatatttttttcttgtttgccagcctgatctgcaatgtgagttacaggacagctagtcctagggaatccttgtcttgaaaacaactttttaaataatgccattcccattttaaaccaatcagtttgttttcaggctcctcgactctgaagggcctgtagaacccagggccgctagaatctcgttggcgccagcgtcgccag

SEQ ID NO: 35304 - DNA, 131 bp, Mus musculus
  source 1..131: mol_type = other DNA
gaagttttcttcaataattttgttgaaaatgttttttaagtgagttattaaattccgaaatgcttttaaatccagtgtggcacctgccctgcaggggcgtggtcacctcaatccctgcaaggtaccctgat

SEQ ID NO: 35305 - DNA, 457 bp, Mus musculus
  source 1..457: mol_type = other DNA
tacttatttcttgcttaattgggaaattaatctcaaacatatgtttatatcaatacactgtttgtaatcatcatggaattattaaaattaataggaaggatattccttggaaggaaagagtccttcactaaaatctgcatttcattaaaaaacaagccttttgtttactgtagccattgctaacacacgggccctgttccaggagcagaaaccatgtcactatgtccccaccagggccagactgggccaggtaggggatttcaaatgatgcagtgcagcatcctttatggtaaggattattttagttcttctattttctgaaatagtgatattgaagtctttacttataaaatggaagagtccctaaaggacagagagcagctttccggtctgttctaaggacaggtacctgccctgcaggggcgtggtcacctcaatccctgcaaggtaccctgat

SEQ ID NO: 35306 - DNA, 454 bp, Mus musculus
  source 1..454: mol_type = other DNA
tagattcatgaagcccctcataaatagttgagaaattattttcaaatatatgtttccttaagggcagtcctgaaggttacaacatttggacatgcactgtttgtggccatttaacaggaaggatattccttggaaagaaagagtccttctgccttttgcctacagtagccattgacattctcaaaggcttacacagggccctgttgcagggatgggaattcaaatgatgcagtgtagcatcctttatggtaaggattaattttgatgaaaattatagttcttctatttagaggggtacaaaataaataaataagagcaaaatcttctgaaaatagccatattgaaatctttacttataaaatggaagcatcatataaagtccttagaggacagaagagcagctttccagtctgttctaagaacaaaatacataccagtctgccctgaccctgat

SEQ ID NO: 35307 - DNA, 348 bp, Mus musculus
  source 1..348: mol_type = other DNA
ggaagattcctctatttagttcttctatttggaggaggtacaaactaaaaaggaatataactcattccgacagctcttctctactaagacacagcttagaggagcactaacattgtcaccttgatttataaaaaatcatactctgttatacttgtaggcaggagtctagcataactatattctaccaaatcaaagatcatatgtgagttatgatgtaaatccattaaaataaaatgggaacctttaatgttgtttaaagaacaaaagagtactttatgttctgttgtaaaaacaaaatagatacatgtcagtaatgatattgctgacatgtgtcctgtaatgattgcc

SEQ ID NO: 35308 - DNA, 263 bp, Mus musculus
  source 1..263: mol_type = other DNA
tatttaacagattcctttaaacatttttaatgcttttttaggggaaaaaatgtttgacactgtcaggagcctctgggctataataaaccgtaataaagtaagtactatggcactgtgctgaagtaatttctcacacatgtgctaaaaaattacgtgcaaatgacataattgttagcgaataaacagctcttttctgctaacaattaaaagatggaaagcccttgagcccggcagggggcgtggccaccggaattactttggtc

SEQ ID NO: 35309 - DNA, 473 bp, Mus musculus
  source 1..473: mol_type = other DNA
gcagggaggcgaagactgccctgcaggctgcagttaccagccagctgggcatacatagcttgggagcctaaaagcatttaaggaatgggacaagatctcctttaattttgctcagggcgcgagtggaagattttctccaccttcccagccctagcctcggaatcgagcgagggcgagcatgcccacgctcaaagcctactctattagcctccattgcttttctgtactacagacagggaaaccaaggcttgcacgcccagccaggggcgaaactgggtctcagagccctcttccggactgaggctaaaaacgtaacgccagctccttattggtctgggcctcggggcgtgaccaaccgtggacacgccccttccctcccctcccttggaggcggagccacttcttcctctcccccgggctagcgttacagccggccggtgggggtgccgcgcccagtgagggcccggaccgct

SEQ ID NO: 35310 - DNA, 275 bp, Mus musculus
  source 1..275: mol_type = other DNA
agggcttcctgtctgggagcacaggttgtaaaatggggataataatagtaccaccctcagatggcgttcataagcacccagtgaggtcatgttaagctgtggccatggctccttcttagaacttgcgagttcccctgccgcggtagccactgtttttttctgtcccattgaaaaaggcccctacttttcaaagggaggtggctgagcagcgaggctccgccagccgagatgggcaggcgcgtgcagggattggctggaggcgcaggcccgaacct

SEQ ID NO: 35311 - DNA, 490 bp, Mus musculus
  source 1..490: mol_type = other DNA
tctaaaacagccgttaggagagcagctatgacctgggggatgacagaggtctcactaccctcccttagtaaatccttcatttcacaagtaaaattgtatatatactcaggctttctagctcggaatctgtggcgcggtggaggtgcagtgtgtgccccaccatcaccaccaccacctccttcatgggtgggacgcacctgaacctggtggggcgcgccccgggaagtagactagcagggagcagctctagtccttggctctgagtaggcgcggagcgccgctctggaggtggggccggccccacctgtcgccagcggagagaggggcgggagggggaggggcttgtctcctagggaccaccccccctcctggtccccaagccccgggcgatcgcgctcccgcgtcgatcccgggagcgtcctggctgccgtgtgcgagcgaggcggggggcgcgcgcacggggggcgcgctcgtgagtgcggggccgcgc

SEQ ID NO: 35312 - DNA, 425 bp, Mus musculus
  source 1..425: mol_type = other DNA
aggaaatatatatatatctccatcgtctcctatctctaaaacagccgttaggagagtttcagctatgacctgggggatgacagaggtctcactaccctcccttagtaaatccttcatttcacaagtaaaattgtatatatactcaggctttctagctcggaatctgtggcgcggtggaggtgcagtgtgtgccccaccatcaccaccaccacctccttcatgggtgggacgcacctgaacctggtggggcgcgccccgggaagtagactagcagggagcagctctagtccttggctctgagtaggcgcggagcgccgctctggaggtggggccggccccacctgtcgccagcggagagaggggcgggagggggaggggcttgtctcctagggaccaccccccctcctggtccccaagccccgggc

SEQ ID NO: 35313 - DNA, 288 bp, Mus musculus
  source 1..288: mol_type = other DNA
tcttaattttaatgaactcaggtcatcagatctggctgccagcaaacgcagagctttggagccatgctcttgactgagaattggacagatctgattttgaagaatgactgagaatcggacactctctgagcttattagggtgcctgtgctaggcacaggagactcagtaacagcctgtggtagaactcagacaataaaccagaggccagttatacagttttattcttgaattaatgctatgaggaagccggagatccgcgccggcgcactgactgttgccatggggac

SEQ ID NO: 35314 - DNA, 601 bp, Mus musculus
  source 1..601: mol_type = other DNA
tggtgtgtctgaagacagcgacagtgtagtcacaaacatcaaataaataaataaatcttttttttttttttaaaccgtttaggggatcacatcaagatgattttggtggtgtgatttatttggaatattattttgaatccacgctaaagaaggatactccagagtcaatctgaggttgtctgggcctggcagacgctcatcggtgaaggaggcgtcttccccggacagcggggaaggcacctagcagacaggagcggcggagtccgggccctggcagcttctggcgacagaatgtgccccaccctcgaggcatggttggcatccgccccgccccgacggccagtccaatgggcgcttccggagacatgtggggcccaccccagctcccggacttgggcgctctcccaacttccaaggtgcaggtgtctgcttcagagacaccgacgtctccgcgcggagcccggagtgtgcccaggcagattgggggcccaggacacccatgatgggtaccgtgtgtccgcgctcgggcccgccccagagcccccattggttgagttcactaaggggaggagccgaggaagcgctccgggttctagtcccc

SEQ ID NO: 35315 - DNA, 413 bp, Mus musculus
  source 1..413: mol_type = other DNA
ccagcagaggccaccgggctagtacacagagacctctcactgtggggaggtcctggacatgaaccaggacccctccaggaaaggggtccttctctctgggcagaggggtggggggatctgcaccccaggtttcctgagctcagagctatcacagctctgcagagttgtaactcagcagggaagcctgtttccttgggtacagcgctaacttcagcccctccctccaggaggggggatcctaacccatccccacctctgccctggggcgagctctcttgggtacagtggagccccggtgctcactctaagcaggggtttgaagtgtctgtccaaggctcttgagagacagctccctgctctgtgacgcagcgcagagcgctgctctgccaaagtgcactctctgtcccggagct

SEQ ID NO: 35316 - DNA, 425 bp, Mus musculus
  source 1..425: mol_type = other DNA
gtgatcatcctcaggaggaggccaaataagggaatagaccttatttggcctacggctaaggacaaggcctgccacacctgtgcttaccaagcttgggccgtcagcctggtttacatagtgaattccaagatattcaggactacataggaagccagtctcaaaataaatacataaaataaaacttgttaaatttctatttgaggctattgagaacctataaatttaaatattacgttagaacagcaaacactttgcccaaagggccagatgtctaacaattaaacttcgtgatattgaaattttaatttcatataattttcatctctcaagaattggccaaaaacagctgcctggacaaccagctctgggagagacccgccccgacctaaggggaggggcgacggcgagggggccggccgagtgcc

SEQ ID NO: 35317 - DNA, 364 bp, Mus musculus
  source 1..364: mol_type = other DNA
ttgtgagctctcagacaccaccgcctctggtttgtgtcaacatccgaggccggagactggcggcggctgggaaccggctccactccttctggaggagaaccaacaagtctttttaggggtcctcggcacccaccctcccctctgctaaacggcgggagaggagtgggtgtgaggacaagagacggggtcgcatcttatgaatcaccccctatcttacccccacccccgctggggcccaggaagagaaggcttagaaattgtgacccaggctctgagcctcagggttgaggaacagatcgggaaggtcagcgcgggcggacgggcggggcgcgctcttgtggtagcctagactcacaggccaccc

SEQ ID NO: 35318 - DNA, 291 bp, Mus musculus
  source 1..291: mol_type = other DNA
gaggctggacagagctccactctgtccctccaatccatgtcggagagatggctctgccttgaggcagataattcagagctctgcaccagcggctaaagttcagcgcgcgggacttgaaaatgcacgccccctgctggccaacagtccaacacttccctgggtccaaggatagactggactgctccagaaagcagactcaagagggcggctcggacctgacggtcccccccaccccccacccccggcgggcggggcaggctcactcgcactccctcccggccctgcccgccc

SEQ ID NO: 35319 - DNA, 461 bp, Mus musculus
  source 1..461: mol_type = other DNA
aaagagaagccgaaggctcctttcctctcttcctctggggtgactcccagggataccagttcaaggtcatcttctggctggcctttgggggttcaccaaaggacttcgaagttctgattccaaggggtcacaggcacccccagtgccctggagcaggaaggtacaggtctgaggaagatccggattctctgggcttccccgtggggcctcccagggcacctgcccaaggccacccagagcgccagcccaggcagcgccggtggagcggagccggacctcccagcggccgatgggggcggtgaccgcccggggccttcccacggttcggtggcgcgtcaccgcgggggcgagggggcgccggggcgccccgggctgcggtgcaggaaagggccctgggaaagggcggcgtcggctcccgggccggggcggggctgaggcggggcccaacaaccaactccagg

SEQ ID NO: 35320 - DNA, 464 bp, Mus musculus
  source 1..464: mol_type = other DNA
tggaatgaattgattgattaaatacttatatttcctcaattgtttgcttcaaccatctataactccacatatttagtctcatgagataacatgatttgggtaaaaagtcaatgattacccttcatcatctaagcgtaaactcttaactagcgtttacatagtaacaaaaacattgtttcacatggacagaacaaaacaggagcggacagtcacgttttgttttataaaagctttggcaagatttgttcatcttttcaaaaacaccaacctcaaggttatatgttcttaaaactttcgtatgtcttacgcgtggggacgctgtgacaccttgcgggcggctccaggtcactctggtgtgactgccccgccttgggcccccggggcagagtgggcgggcacgactgcgcccaggtctcgaggcgcccttcgaccagcagcgcccggggcgggagggtataaatgga

SEQ ID NO: 35321 - DNA, 441 bp, Mus musculus
  source 1..441: mol_type = other DNA
ccagcagaggccaccgggctagtacacagagacctctcactgtgtgggtgtggtcaggtcctggacatgggaaagccaggatcccctccaggaaaggggtccttctctctgggcagcaagcaggtttcctgagctcagagctatcacagctctgcagagttgtaactcagcagggaagcctgtttccttgggtacagctaacttcagccctccctccaggagtgggggatcctaacccatccccacctctgccctggggcgagctctcttaggtacaatggagtcccaaacaggggtttccagtgtctgtcccaggctcttgagagacaggctgggcagcgccaagggtgtcctcagctgagtgagacccacggcctcctccctgctctgtgacgcagcgcagaggtaatgtgcactgctctgcaaactgtcccggagctg

SEQ ID NO: 35322 - DNA, 507 bp, Mus musculus
  source 1..507: mol_type = other DNA
tgaacagaatttctcaaaaattattttgttaataaattgctttgtgtaagctaagaactgtgtgcctatagtggcttgtaaacactaataggtctgaaagccctgttacctgtcggcagccgtttttgcaaggtctctttcttgcaagcccctggggagttgtcacaaatgcctacttctccgggggctgggccctggttcctgctggcaacggaatgtgtgccccaccctcgctgcactgctggcacccgccccgccccgacggccggaactaggggccgggtcctaccgctgctccgggactcaggatcccaccctggtgcctgcttcagaggcctggatggggacccaagacacccttaaaggcctctcttcagcccgttcgttcccacctacgggtgcaccaggcggctcccaccacttcgcgcacaagtagtagtgccggacccgcccccgtgatcccattggctggtcggggaaggggagcgctcggcggtctgagctgcc

SEQ ID NO: 35323 - DNA, 278 bp, Mus musculus
  source 1..278: mol_type = other DNA
ttaggtccttatcagaagccggcctcagcgaggtgatatctgaatgaaaaagccattcattgtgttttttcagattccagtgtctggtacaattagtcagacttggaacaagcgaacagtgtcagggcttgcctgttctgcctgagaagaggcaagcccttgcaaggagcaagtcctcggcagtaagccatttactcactagctcacctgctactgtctaagatgttgcatacagagctcccatctcttcatagaggagcttcttctctgacctcaag

SEQ ID NO: 35324 - DNA, 424 bp, Mus musculus
  source 1..424: mol_type = other DNA
taatcctattgggtctcccccccacggccgctgcggcccgccgggcccggggctccctcctttgtcccggctgcccgcggaggtcagcgctgagggcggctgcggcccagcccgggtcggcccgggggtctcccggccgctgcggcccgccgggcctcctgttcggacgtgcagggggcctcctggcggcgggcctcaggcgacggcccgccttcctcggcgtccccgctcgggcctgcggcccgcccgggcggtggtcggtcggtggcccgcccggcccagcaggggctgcagccccggggctgaggacgcgcccggcggcggaggcggcgggctgaggggcggggaaccggcccggcccggcgctcctgacaggaggcgccgccgccgccgtcgcgccggggcgggctgagggaggagcgga

SEQ ID NO: 35325 - DNA, 204 bp, Mus musculus
  source 1..204: mol_type = other DNA
tagtgccactggaggcaagcattcgtgaatctatgggggccattatctgtcttataggccaggccagccttgaactcaagaggattgctttggtgcaaatgtcagctaatacatcaaagaacgttttcatcatgtcacagtataaagaagtccctatagtaactctatagctacagtcacacaagttttgggctgcgcaggcgc

SEQ ID NO: 35326 - DNA, 451 bp, Mus musculus
  source 1..451: mol_type = other DNA
ttggactgttctagaaaaatctgttacagagataattaattaaggcttagttactcatttgctgaatatcaaaagcataagtcggatgataacaccctggtatcacttggttagacagtttaagcatttagtgatccgattaatggccgggtcattaaataaagtctatccttagataacccggttatgtttgtgaagatttcctgggaagggaaccccggtctcccagggtctctatcccccgcccccgaggcccctgccgcgcaggtgcgaaagacctcccaggccactccggcagagagcgtgaaggcgggggcgggggtgttgctaggcgaccacgctctccgcccagaccggccttccgcagggggcgccatgggccgagcccaggctcgcgggcctcccggatcggccctctgccgggcggtggcgcacgcccgtgacgtcacag

SEQ ID NO: 35327 - DNA, 383 bp, Mus musculus
  source 1..383: mol_type = other DNA
caaacctgtacacataaatgtcacttgaagttgaggcacagaaaataaacacactctgagtctgacttcatgtttaagcgcaagccttgtaaggcccttcctggcatgaactgtcctacgcagggaagtcctccctgatcatcagtacaggagggtaggcaccaggttaacctactggcaaacccattacaaggagcttgtgaccagtatcaaattactcagttgttctgacaagtggtggctgtcacaggctccctggcacagacccaagtaggaggaggccaggactcattcatccagggccaacccagggaagactgcctagcaggctggcccggcttaggccaggccaccaggggaggggatttcctctggctccctcc

SEQ ID NO: 35328 - DNA, 382 bp, Mus musculus
  source 1..382: mol_type = other DNA
tccacttctgggagtccgagacatttacaactttctggaattagaagatgttttacttatcgggttccaggtaccagcataggcaagttgtttccagtgccttcctggtacccaggacctgacaagcatcgcctagcttccctgcgttgctctcggagcccggaagaaggcggggagcggggagcagcccagcgcgcgcatggaaggccgaggtgcgttgcgggctgtgcccccagggcgaaggcccggaggccgacgagaggcgcggccaggccgaactcctcgtgacgcctcccccgaagcttggcggcggcccaatcggagctgggcttatgggcgggccctgcggcggctactgccgggggcggcggcaacagcggcg

SEQ ID NO: 35329 - DNA, 482 bp, Mus musculus
  source 1..482: mol_type = other DNA
aaacaagactacaatgaattctttgttttggagacagggtgaccatcttggaccagaatggcttcgaaattaaattcgtagaatgacttctatatagagagacattaaagggccctcttctgcacttagaagtactacctataattattttcaacataaaaacacgcataatatatatgaacttaatgttaaccactaagttattgctgtagagataagttttctaccagccagcagttatctgcaaatatcacggggcttaatgattagattctttatttttctgagccaagaaacacggcattggtctgttcctcaccaagacgcgagactgcccggaaccgcggagggcgggctcacgcagcctctctaggctccgaggagacagggatacacagcgtcccggtcgccaacaggccacaccccggtggccccggcccgtgcctgcccagtgcgcagacgcgcgcgccgttccgcgcatg

SEQ ID NO: 35330 - DNA, 234 bp, Mus musculus
  source 1..234: mol_type = other DNA
cctcagctgtaatcaggaagaaattctccccttcaaaggtgagacttctggtattaaaaagtatgaagatgctcaattcaaaactgccccaaattgaagcttttgcctctggtgcttgtggcaactctagactagaatagaaatcattttcccttgacacaagacagtctccaccacatcccacggtgacaggcactcatgctggactcccccggggggaggggttgctcacgg

SEQ ID NO: 35331 - DNA, 308 bp, Mus musculus
  source 1..308: mol_type = other DNA
cactttagctaaggtgtgtgcgtctgaaacacagcctctgtgcctgccagactcccccatctgagctgaacctgagctgctaagcgtcacagggccctcaaataggctgtaagaccatagcttcagacttatagagttaaatccttctataaggtatttcgccaggcctgaagcctaactaatataggctctctccatctccctgagaagcagggagcatccccaggctccagatacagcctgctggccacagggttcgagggccaagaaagccctctttgttctgggcagacagtgcaaagcctcgt

SEQ ID NO: 35332 - DNA, 362 bp, Mus musculus
  source 1..362: mol_type = other DNA
tttttattattagaattatttaaaaaatttaaaattatatgtgcctgcccgtgtctgtctgtctgagagagagagagagagagagagatggaatccagatcccccagaactggagggcagttgtgagctgactgtactgggaactaaactcttaatcctctgtaagagcagtaagtgctcctaattgctgagtcatctcatctttgctgagctgtttatcaatataataaataggcatctttattgataactgtgtgttcaaaccccacgactggaagtcccaaacaccggtaggtgaggcatttcaggaaaggtttgttcctgcctggggatgcagtgcggctccactacttcgaaccaaa

SEQ ID NO: 35333 - DNA, 739 bp, Mus musculus
  source 1..739: mol_type = other DNA
gtgtggaaccagtctccaccccgaggattccagaaccctggagcccaactggttcctggagcttgcatcttcagcactgccacgcggtactcacctggcctcggtgcccagggaaaggaaggcgccgatccgaatctgtccgtgcctgctgcactttcaggactgcagaggtccactggcagccgcaggaggcgaggccccggaggttagcagccgcgcggtaccgagccgggaagccacgcagcttcgctctcgctgcagcccagactcgcgggatcctggcccgcaggcagaggcgcagcgcagggaagagtgcggggctgagtctctgctcggaacccgagcgcctcccggagcccgcaatcccccgcccgccccagtgggatgcaggcggaaagaccgggctccgagtctcccgcgctgcggtgagagcggggcccacgcagccgggaccggagggggtgcggtcccagtgccacccccgcgccactccccacgtggcggccgcgcccccggggcgtgaatgtgtacgagccccagcggccaatcagcactgccggcgcgcgggaccccgggagcgagacccaatagcgagctccgggttgcaggccccggcggcgggcgggcacggggggaggaggccggggccgggaggcgggaggcggctccgcgggcagccaatgggcggcgggcggggtggggctccggagcgcccagcgggtccgggctttaagccggc

SEQ ID NO: 35334 - DNA, 350 bp, Mus musculus
  source 1..350: mol_type = other DNA
tgtctcttgttttgcaaacagcacaacagatgtggcctcaaggacctggatgggcctcgtgtccctggcagacactagtcctcccttcccggaatagcagggaggccgaggattagggtctccctgagcctcaacacgcctccagccggctggattaaggctccagatggactctagctagtcctaggaggatcgcttccagccgtcccccggggtccgaagggcgcaggaggcggggctgggctcgccgcaggcaggagggggcggggtctggcccttgcgggcgggttgggggcccgggggcggggtccgggcggggcgggcccgagcacttcctcggaggcttaggg

SEQ ID NO: 35335 - DNA, 265 bp, Mus musculus
  source 1..265: mol_type = other DNA
aaacatatgtcttttaaacctcaaaatcctgagggtatagtattattttattattttacaactagatgtctttttaaagtactctttctagtatactgtaagattcacatagccctggctggcctggcaatcactatgtaagaccaggttagcctctctggaccagtggacgttctctgcgaaccgagactctagccgattcaggccgcttgagaggggctgtatttccggtaaagcaggcttctgataggctgcattgcaagcc

SEQ ID NO: 35336 - DNA, 355 bp, Mus musculus
  source 1..355: mol_type = other DNA
tttagcttgacagctgtcctaggagagggaggtagtaatagtatccgtatacccaaggtcacaggatttcaagtcaggagaaagatatctttttaatatttatttattatatcttaagtacactgtagctgacttcagacacaagagcagtcagtgctcttagctgctgagctctgtctgtctgtctgtctgtctgtcttacttaagtcaggtatggaagagccgtcccccagccttgccaggcattgtggggggaagggtgcccttcactctgtcctcattagagacatagggaccataccctatttggggtgcctcatcggatccagggccagcctgggcctgggaaggtagc

SEQ ID NO: 35337 - DNA, 454 bp, Mus musculus
  source 1..454: mol_type = other DNA
ttttaaggaaaggcagtctagatttcattaagagcacccgactgctcttctgaaggtcggaagttcaaatggtggctcacaaccacccgtaatgagatccgatgccctcttctggtgtgtctgaagacagctacagtgtactttacatataataaataaataaatcttttaaaaaaaaaagaattacattaacctgtgctgaacagcaagcatatcattgcttgactttaaacaaaggttgtgttcaaatatgtatgagttttattaagaacaaaccgcaacaggattcttgcaggcttcttagagacagccagctttcaacgcggaggcagcgctccttcagacccccagccagcagggggaagcgtagccacggtcgcggatagctcccccaagacacttccgggacacgcggaactttggtgcagccggatgctgcgcgctggctgaaagg

SEQ ID NO: 35338 - DNA, 417 bp, Mus musculus
  source 1..417: mol_type = other DNA
gatgtctccttagttaagagaacatattgctctgggtcctgtcaccagccccgaggatctgatgacctctggccttcttaggtgagcgtgcacacacacacacactactgtgtcacagataaaggccacagaaaagctagataggtcttaagaacatttagcagttcctagaacctggcaagttggttttcagaataagacttaacttgaaaataaaagttaacatcattttttccgttagggtaacatgacatgggccttggccgctgagaaaggcgttcctcacgcaggctttccagaacgagtatgcttgaatacagactgtagattctagatttttaaatagagtcccacctactcgtccatgtccgactcgggcatgctgggacttgcaggctggctgtccgtcctgtgacg

SEQ ID NO: 35339 - DNA, 360 bp, Mus musculus
  source 1..360: mol_type = other DNA
gcagcaggcagtccaagagccggcagagccgcctgctcgggctggtgaggtaccagctggacttcagtcattctgtctgagtctcctagactaattaacacaatgatagtgttctggaacaccgtgttctaactttatttcaaacttggccagatttgagtttaaatccggatgcaaattgttcttcatagctccatttacccagagtaaagctgaggcaggactgtcacaaattccaggccatcctgggctacattctaagcacagcctaggctctggacactgtgcatggaaagggcctgagccatgcgtatggctagggcactgcagatagtgccactctgccctcactgtaaggga

SEQ ID NO: 35340 - DNA, 333 bp, Mus musculus
  source 1..333: mol_type = other DNA
agattatgagagtagctcaagctgatcctgaaggtgtcgtcgttaatagtacattaaataacatacgcaatatagcttatttctagtttgtctggaagaaggatgagggaagttaaatctccagcctggggataataattccccacctaataaagtttgttggataatgaatcagtaattgcatttggatttcagatacaagctgtgccacaggtttcgaccctgagacgcgggatcccgagttcgagtggctggccgagtcgccgaaaccgcgcgagtggaattcggacccgggtacccggagtgggttcgcgccccggagccgccggagac

SEQ ID NO: 35341 - DNA, 588 bp, Mus musculus
  source 1..588: mol_type = other DNA
ctcagatctctctgaagctggatgtgagccatctaatgtgggtagaactctaaggtcagagcagtgagatgttaagaacagagcagctgatctgtggcatgctggtgcgccagagtcacttattcaaccttactcagagggttgggcctgaaccctgatctctctaagagcactgctccattagcttatgtgagagtctaaaaattacatatacaggaatataatagaaacacgagaaaagtatcttcttgggctttgaaataccctccttaaggaaggttggaaccgctagctcccgcgggcgcgtgagaacgagaagtggggctctgctcagcgttccggtcctgggggggagcctcagcctgggctggcctacgcatctggaaggcggcggctgactgcagccttcttgctgcagctgtggacgcagctggggctgagaacacctcgacttcaccgcttcccggtgcggcaccggagcgccagtcgctccgcccacagcccgctggggagaggcgcggtctcagccccagcaggcccagggctccccgggcctctccttcctccggaaagcggaagcggaagtga

SEQ ID NO: 35342 - DNA, 742 bp, Mus musculus
  source 1..742: mol_type = other DNA
caccctgatggacctttcctggggacttgagaggggtccccttcgcgtgtataatcggagttctggcagaagacagactccacagagtaccctgggctttaagtcagcttctcgaccgactgtctagagcggatcttggcgagccgtcagcgctcccgaccctcctcggggagcaaggacaagcccctcccgcgctcggcggacgccgcggtctcccgaggctgtcaccggaaacccctcccgcggggccgcccccagcggggccgcctcacctgtagacgtcggccacgcggcccaggcacacggccagcggcttggcctcgctgcggcctttgaggcggtacacgcaactcagggccgccgagctgctcgccgagcaggccaggccgtagagcgtgtcggtcgggaccgccaccacggcgccggcgcgcagctcggccacggcggcccgcagcgcctcggtccagccggagcgctcggggctcgcggcttccacgggctcgctctccggaagccgcagcagccgggcccccggcagcgccggagcgggctcaggagggcgtaggaggcggcagccgcggccagaactagccggcccgtcgctcaaccccatgccggccgccacggcggccctcagccccgcgcacggacgcgccgtagacatccgtgccgagccgcttccgggaggaagtgacgcacggacgcaacttccggcccgcgaggctcggccccgcctccgctc

SEQ ID NO: 35343 - DNA, 605 bp, Mus musculus
  source 1..605: mol_type = other DNA
gtcacagtccagccactggccctggaaagggacagaagtctggccgatacagatggctggggcggcgctccagacctgaaccgttgccttaagttaggttgctcttccacctgcctcctttggagcggggtgtgggaagcgcccacctccccaggtccagcccggagagggcactgggcactgaccccgccaccagccggttctgggcgccggcggcccagctgccgcagcatctcctcacaggcggcgatggtgtccagaagctgccgctgccgctgctccacggcgtccagcagctgctgggcgcgttcatctcggggcggctgcgggggtggcctcccgccgagccccaaccccgccttcccacggtccacgccggcagcctccctgcccgggagagagacggcgtcagggcccggcgctaggcggcgcgaggtcgcggccccaacccaccgccccgccggcccgccgcagtccgccccccgcgccgcgcgaggagtccgctaagccgaggcctgggggtcgcggtccctttaagcggccgggagcggaggcggggccgagcctcgcgggccggaagttgcgtccgtgcgtcacttcctccc

SEQ ID NO: 35344 - DNA, 522 bp, Mus musculus
  source 1..522: mol_type = other DNA
aggcatggtgatgcttgcctgtaactaaccagactagtctggctagccagggttccagactagccaggggagtggtggcacttcaaattcaaggtcagcttgggctatagattgagttcaagatcagcctgggcacttagtctcaaagtacagagtgaggatcgaactcactcactgttgttgaactccaagcatggtacaaggcccctagcttcaatctcagtggcttagaaagcacagaagtgccaggcccggctctggagttagggtccagtgcaagctggggtcctccactggactggctccagccagggctttctcagtactgcgaattggtgtgatagatccttctactgggaaggtccggttccgcacccgacccagatctcaggtacgctcggccggggacgcgctggggccgggtgggagttcccgttcctccgcctgggcatcttgtgtgtgccgggcccgcccgcactgcggggacaggcgcggagccgccctgggcgcacggcgctcgcc

SEQ ID NO: 35345 - DNA, 320 bp, Mus musculus
  source 1..320: mol_type = other DNA
agctgaactcttcggaggactgcattctcctggggtactcagaggagaaccccagcctctgtgggcagaggttgaagaacccgggaagcggatttttggtgcaaaatctgccacccatcctgggaagcagtgctggtagggtgggaccctgtctccaatttgactctttttccaaacagcgtctggtagagcctgaggtcaggatatcaggctcggaacgcttcccccgcgcagcttgtctcgctcgccagcaggacccgcggcgatgcctagcgattggtccccatggatgatggtgaccagcgagactccgccccagc

SEQ ID NO: 35346 - DNA, 393 bp, Mus musculus
  source 1..393: mol_type = other DNA
ctcaaagtcctgtgaaaagaaatcatattggctatgtttcttcattttcatcggtaagaaattattcaaacacccctgtgtgtgcacatctctacatcagatgggaaagccaccgtattgcactcgagtcccgctggaaactcagagtagcgccaccactatctaggcaccacctggatccgggaggagtgggggacggtctcccatggggcgcgcggccttacccccgggtccggtggacactgtgacctgcgcataggtggctcccgcggcggcagccgggcctgagacgccgttgagcgcggccacgcgcacggtgtagcgcgcgcccggccgcaggtgcagcagcgtggcggcgcgctcccgcagcccagcctggcgcgggacgaaggc

SEQ ID NO: 35347 - DNA, 301 bp, Mus musculus
  source 1..301: mol_type = other DNA
tctaactttctgagattctctgaggagcattttaaaacagccatagcatctttaatcctagcactggaaagacagaaacaagcagatctctgtgagttcggagagttcatgtaactctgcttcataaatcagctagtgctgagttctcagggccatcaactgagctcagctagtgctgagttcttttcagcgtcagggccatcaactgagctcaagtcctgggcaactccccacgctgcagagtggactgcaggaagaccgttgcttcgtacgctacatctgggcattgaagtcctttaac

SEQ ID NO: 35348 - DNA, 400 bp, Mus musculus
  source 1..400: mol_type = other DNA
gtgaaggtgagatgcacatagcgctcaaagttatgacagatggcaatttcctaccggtggttattttagaccttattaagaaggggacatgaatggccacttcatcccttgcagcgccttggggagccgaaggatctcgatgttgtacagattttccacctccttgaggagggtctcgcgtcaggtgtgcgaagccgtcgcatccgcgtcctcaggaaggaggcgagcttccggcgcggctgctgcgtttcttgggagccatggcgcctggctgcgtcgagcgaggggccaagcagccggctccgcgactgagacggagttcagtcgttggagtctaggtttccagaactctgtaagggacgggcggctcctcggttaaaggacttcaatgcccagatgt

SEQ ID NO: 35349 - DNA, 244 bp, Mus musculus
  source 1..244: mol_type = other DNA
tcctttaagttatcctaaacgatgattggaatataagctagaaagtgtgtttatttatttttaacctgaaattcaaatttcactggagaatttaaaacaagctgaggcttgaatccaaagtctgttgttactaaaaacctaaaatttaaaggcaggtatgacctgtaacacttttagaaaggcagaggcggagccgggtcagccttaggcaagcgccgcgcgctctcaggaagtcgcgtagcgc

SEQ ID NO: 35350 - DNA, 420 bp, Mus musculus
  source 1..420: mol_type = other DNA
ccatcgggacaccctagggggaactgggcagactgcagtttgaggttctctccatccagtctaaagagagggtggaactcagctgtttgccaccctcaggcaggcgtgtggctccctccccggaattgggcatcgtagttaagtaacttactcctggccacacagaagggtgtggctgggccattacagccattctgtacctgcccccctttccaagattctgatggagggcatgggccttagcaagcatcctgggtccctgctcccgccatacagcagacggcgcgtccctagtcctggtgtgcgggagggggctacggagtcccgggcccggcgctccagtccgtttttttcgggcaggggggccggccgggggtggcgccgggggattccctccctcgtgcgagccggggaccggcc

SEQ ID NO: 35351 - DNA, 536 bp, Mus musculus
  source 1..536: mol_type = other DNA
agcactaagtttcttagtaaagaagatcggtttatgatgaaatggacagaccacctttgattaaaacggaagtcatctagtgactctatagagtatttggcgacgattggcatttggaagccagaggctgagagacactatttcaagaaacaaaaaagagtttcacattgttgagtgtctgtgtttcgtaactactaataacgcgcaaggaacagatttcccacaggtttttttcttttttcaaaaaaaaaaaaaaaaaaaaaaaaaaaacctggttatagagtgacttctagaacagccagggcttcgtactcgcgaggcaaacgctcgctcggtaactaaggatgaattcagagcttctttttcagattttgagacagtttcactaaatcggggggttggctcccagcagcggggaccccgtggccactcgcgccggcgtccccagcgtctgagactcaaacacctggggccccgcccatcaggggggccgacaccgtgaaggcttctgggatagcgcgctgcccggaagcgga

SEQ ID NO: 35352 - DNA, 536 bp, Mus musculus
  source 1..536: mol_type = other DNA
tcacggtgtcggcccccctgatgggcggggccccaggtgtttgagtctcagacgctggggacgccggcgcgagtggccacggggtccccgctgctgggagccaaccccccgatttagtgaaactgtctcaaaatctgaaaaagaagctctgaattcatccttagttaccgagcgagcgtttgcctcgcgagtacgaagccctggctgttctagaagtcactctataaccaggttttttttttttttttttttttttttttgaaaaaagaaaaaaacctgtgggaaatctgttccttgcgcgttattagtagttacgaaacacagacactcaacaatgtgaaactcttttttgtttcttgaaatagtgtctctcagcctctggcttccaaatgccaatcgtcgccaaatactctatagagtcactagatgacttccgttttaatcaaaggtggtctgtccatttcatcataaaccgatcttctttactaagaaacttagtgctcagaggccccgccccatccatggggcaaggagag

SEQ ID NO: 35353 - DNA, 334 bp, Mus musculus
  source 1..334: mol_type = other DNA
agtcttactggcccaaatactatgtagtacctaggagttttagaaaattgagaatttctcatacctgttgaaccacggtctgtttctgttcaataccagcctggatacagttctggatctgaagatagcaggagatctgcttgcctgtgctaaacccagcaagatgttggttttgtgggtgtctgttaagctcagaggcccacagtgcctctccgcgccggctttcgcgcgctgagccggccagcttccccggaagccgcgcgcgcaggcgcggtgtggggggtcgcgccccctggcggccagcggcgacagtgcgcagggtccgcctactggt

SEQ ID NO: 35354 - DNA, 496 bp, Mus musculus
  source 1..496: mol_type = other DNA
ctagaaacctggaccaagccggacgtgtcactgcttctgcagagccggccgggtggtacaagcctggagccgcccagacttcgtgtggccaggggcgtttcagaaacggggcggagccggctccgacctaccgtggggcggggcaggagggaggcggagcaggaaggggcggcggccctgcccggcttccgcgtcattgcccctgcccgcctgtcgcggctacgaaggtgccgtcagagcccgagactcggctcacgtccgcgctcagcggggtgagtgcccgggagggtcgcgcgcgggcagtgtctccatcgctgggaccccgctgagttcaccctggtgcgtggaacggggtgtcttggggcacccggcgttctccgggctctagccaggacctcctcgaactctgtccctgagccgaagtatgagactcggagacgaaggcggtggccacaatggggaagcccctgggtcccctgcgccaagttcaaatgtt

SEQ ID NO: 35355 - DNA, 367 bp, Mus musculus
  source 1..367: mol_type = other DNA
ccagctggatcttgatctacatggtcagaggtaaatggacagcacacaggatcctgatgggaggataagggacaagatgagtttttgcagtctgcttgatagcattcttcacggactctcccatggcgatccaccactatgcaacttgtggtggtttcaagaaactagaaacctggaccaagccggacgtgtcactgcttctgcagagccggccgggtggtacaagcctggagccgcccagacttcgtgtggccaggggcgtttcagaaacggggcggagccggctccgacctaccgtggggcggggcaggagggaggcggagcaggaaggggcggcggccctgcccggcttccgcgtcattgcccc

SEQ ID NO: 35356 - DNA, 756 bp, Mus musculus
  source 1..756: mol_type = other DNA
gccctgggccagccctgctttcccaaggtcagtctcctgccgccgccgtccagccagcgtcggccgcgtgggagctgaaaggcgaggctccgcagacggcaggctccgggtctcgcggctctcggcgggcgcgtctcttccagctggtcgggccgctgggttgccgccgctccccggctcagtgccttgccctgggggcggcagggcagatggggacgcctcagctgcggaggatagtctccatcctccgggccccgccccctgcgcaggtgtgagcgcgcaagtgtgcacccgggcgaggcgcgggcggcgggcggcgcgggaggcgagtgtgtgcgcgcgtgcaactccactccggggctttgtgcgagcccgggcggcatcagcggcggctggaggaggagcggccggagacgcgtgcaagcccgcccggcagccggggcaggtgggaagcccgcgcgggagccgagccgacgcgagccggagacgccgcagccgagtccgagcggagcccgggcggagcccaggagccttcgctcgcgggcggcccgtgggcggcagccgaggcggggcgggcgccggcggggcggccccccagtaagatgtgcgcagcgccgcggggcgccccccactcgcagaggcgctccggagccgggcggctgggccaggcggcgcctcgggggctgctgcgcgcccgcgcctagagctgccgccccagggagcccgccacggccgcgccccgggcacgctccgtgg

SEQ ID NO: 35357 - DNA, 356 bp, Mus musculus
  source 1..356: mol_type = other DNA
agcatctatctatctatctatctatctatctatctacaagaagttatcttttaagaaagaatgatgggactgtcttcacaccttgggcagctggaatgatggagccactgcgtttctgtgaattctaacacacaggggtttcaacacatatatttgtatactatggctagaagtaaactttctcattgtacagaaagggaaactgaggccctcagagggctaggctttattagagtctttcagctagacttccctgaggtcagggctagcaagtttcaggccacacaattaaggccttgctaataagccatcatcccacaaagagctcggcaggcctccctcctcctttgggaggg

SEQ ID NO: 35358 - DNA, 422 bp, Mus musculus
  source 1..422: mol_type = other DNA
gcgcgcgcacgcgcgtgcgtgtgcacgcgtatacactcattgttcctctagagcagcattagaaaacacagatatatattatgattcataccaggaaaaaattacagttatgaattagcaaggaaaataattttacaggctgactaatataccaatatatactattttgatgattttcaaacttagaacaattgaagaaaacctgaagtaaacgttacctgtcctggaatcttgattcttcccgggcagaggcttcagccagactcagtgagaagagagtctccggtgctctgctgagcctcaaagcggcacgggccaggttgctacaatgcccagtctaagacccctgaggcaggaaggtccccctccttcctgagaggaaggggctgcccgcctgtcattaacgacggggctagaaagag

SEQ ID NO: 35359 - DNA, 327 bp, Mus musculus
  source 1..327: mol_type = other DNA
tcgaaagaaggctagaacctgagggttcttacagggccccggtgtaactaggacctaagacaatggttctcttttttttttttaattaaagatttattttattttatgtatatgatatttattgttatatgtaagtacacagggcatcagatcccattacaggtggttatgagccaagagatactttaatacagttcttcatgttgtgaactaataaaattatttagttcataactgcaattttgctactattatgaattgtgatataaatatctgatatgcaagatatctgatgtgtgacccctatgaataggtcgctcgccacct

SEQ ID NO: 35360 - DNA, 123 bp, Mus musculus
  source 1..123: mol_type = other DNA
aaaaggttcaagttgtactagacaattttaaaaagtttgggcggcgccttttgaaactccggcgtaacatcgcttgatgagggattataataactcagaatccctgggaggaacgactccggc

SEQ ID NO: 35361 - DNA, 287 bp, Mus musculus
  source 1..287: mol_type = other DNA
tgtgaagatcgtgtccacgtgtgtctacacgtggatccagaacaagtacacttgttccgctggtactgctgccaccgtctgctggtgcaagaagctgtgcaatctccctggacaagactctagggatgtccaagatgaacttggccatctttggggtttccttttgacgtccccaacccggtgaggttctgcagagccaaggcggaccggcgcctctgtcccacatcctgaagatggcgcaccaaccccaaactcaggcgagggggcgggaggcggggccgagagcc

SEQ ID NO: 35362 - DNA, 321 bp, Mus musculus
  source 1..321: mol_type = other DNA
attttatttttaattgttaattagttacaagcagttgtgagctgggaaccaaatgagtatgcggacttaattgctaaagtttagcagttataatttttttttttttttaaagatttatttatttattacatgtaagtacactgtagctgtcttcagacacaccagaagaatttccgtaattttaatcagatgaaggaattaaggattgggccacatttccgtaattttaatcagattttatttatttatttatttatttaacagacgcggcctcctgggacttgtagtccgcatcctgcgaggcgcatcccctagacacgg

SEQ ID NO: 35363 - DNA, 585 bp, Mus musculus
  source 1..585: mol_type = other DNA
ggccactttcccaggaatggccccaccctcttgcaagttggggaagctgttaccccagccctgggctgagaccctggactccagaattggggcccaacctgctgagccctccgagcacccaatgcccagcctgacggtcaggctgcgcagggagccccagataaacactttccgaagggcaaagtcaggtcctggtcctggccagataccgagcgcagacggaggacgagctgagtctggctccgggggcatccggcaggtgtgcgcggggcccgctcggggctggctgcttggggagttgcggggccgccgcggtcgcttccccaagcgcctggtgcaggtgaggccggctgcgcgggggagcaggagcggccctggcctcagcctcgggccttgtgcctagtgccgcccctatgtgtttcccaggagattccggaggccctgcggggcgtcaccgagtccagaccgcgctttccgcgccgtagtcgccgtgagtcgggcgctgggccggcgggtggggcctcactgcccgcgtggaacatgacggctgtgggtggggcacccgcccgctcgagggcggggcct

SEQ ID NO: 35364 - DNA, 434 bp, Mus musculus
  source 1..434: mol_type = other DNA
cccctacttgaacccaggcgggcttggaggacctccaggcttcaggcagcggcctccccctcaccccagctccagcgtagggaggggaagggggttcacttcggtcccagccttgagcccaggtggaagcacacgtggggctgttccctagcgccgaggcccccgctggggtctgcaatatgctgggacctggctcaccgccgagtccagcagctggacacactcagccagggcactgggaggaggggctgagatgccggctgcctctactaggtctggtttggacccgcctcatcccaggaggaaaaggtcttcaagatctttgactcaggtaacctgccgccaggggctccactggcgggggcggaccctgtgagcgccctccccagcggcttcctgtaggggagcaggggccgccccctctccccttcctc

SEQ ID NO: 35365 - DNA, 342 bp, Mus musculus
  source 1..342: mol_type = other DNA
ttttacttgaatgattcatgtttaggggagaacaaaaaaacacccttaaatttttgtttcaactcctcctgcaaataaaaacaataaatacgtctctgggaagaaggacttcttggtcaggactttggctgaggtgagcctagcccagggattcttgctgcctttccccaaggagaatctgcaggtgagtcgaagcttcagggggggttagacaggagctagtatctctatctggggccactttcccaggaatggccccaccctcttgcaagttggggaagctgttaccccagccctgggctgagaccctggactccagaattggggcccaacctgctgagc

SEQ ID NO: 35366 - DNA, 523 bp, Mus musculus
  source 1..523: mol_type = other DNA
tctgttctaaaaattaaagttaacaacacaaatcccagggtttcactttccaggacatttgtggtaggtactaatatacttcctgggcccatgttcttaaaaaacttctctgggccaagctgctctacctagagtattctttgggctcttattgccattaaatgggacaggagaccgagatccaacggacttctgggtccccgaggtacaaattatgagcctcactttatacaacgatctgctgatggcgagtgggtggggctcgggccctccctcagtcccccggagaggcctctccaaaatggtgggggcagtggcgtcagcaacgcccgggccccttccgtcacctccctccctcttcctcaggccacccaggcgggagcggggggaggggggaacggaggcgcaacgcagtcgcccacgtgaccgccgatcttcgggcgcgtgacgcaaagcggcgggcccaacgctcgctctgccttgtgaggcggtagccgccgtcgtcggagagcggggacgcggg

SEQ ID NO: 35367 - DNA, 452 bp, Mus musculus
  source 1..452: mol_type = other DNA
gctaggataggcagagcccagcggcccctccttcctgctcgaagcttactactctttatcgcgacgagccgtaggaaagaactaggaccacccagtttggagccttacagggttgtaatatagcccttttgtctccaacgccccccccccaataaagatttttgtctgaggcaggcttgggagagaatttagactgcacgctagagcctccagcatcccggcacgtaccaacgcgcggccgcagggggagtcagtgtggccagcagcgtgcccccagctcggcgtccgccctgcggcgaccacagaaggagcatcgtgaagttccgggagctgcatcgcagggcggtgtcggagccctctggttgtgcccgtggtggctccgtactccatcactgcgggggcggtcatcccccgcgcagaggccaggcccagcccgggcggtacaatagggt

SEQ ID NO: 35368 - DNA, 292 bp, Mus musculus
  source 1..292: mol_type = other DNA
ggctgtggtcagtgaatacagcaactgtgagtgcaatatgtggtcatgcaaactttttataatgaactgcttctggagctgatctgcagcaacagaaaataagaccagtctggctaccacaaggtgcggatgccacctagcggccataatggtgcagccacccgggcgctggtagcattccggagctgcagctcgagctgaatcacgggtgggacttccgggtagaactgccggatgctgtagtctgactttggtcacgaacccggggtcctctgcgccacaccgcgcaggc

SEQ ID NO: 35369 - DNA, 409 bp, Mus musculus
  source 1..409: mol_type = other DNA
gcagctgccgctgctggtaccaccaccactgggcccagggatggtctccaccaaaaaactctagtttgtgtcaagttgacataaaactagccagcacacaagatctatgtagtcttggctttcctagaactcaagctggcttagaactcagagatctgcctgcctctgcctccgatgaaagggatgaaaggcatgtgtctctccctccccttcaaagtacagatctggtcactccagagatcgtctcctgcagccgtctagggcaggggtccgcggagctcagaggctgctagcccgctgcgctgcggacgggcggggcgcgcacccttggctgtggctgtggaaagagcaaggcggaggccccgccccaccgcgcccctcccgccgcccgcccactcggccggggcgc

SEQ ID NO: 35370 - DNA, 334 bp, Mus musculus
  source 1..334: mol_type = other DNA
tcagacacagtatggcctcattgatgaagtccaccagttagagggcactgctcaaccatggggccgtagtgccggcccctgcagcctgatgtagggctctgagctcccgatgctttgcgttacaggaacgagaccaacaccctgctcttggacaccaagtgtaatttgtgccccaggtggacaccttcacgcgcactggctgacgacagtccacttgagcgatggagtcgcctagacttcataggggtcgagtccagcccgcttatggggcgctgagactcccagccgttctgagactccgggccacaagggggcgctgtggggccgccagcat

SEQ ID NO: 35371 - DNA, 512 bp, Mus musculus
  source 1..512: mol_type = other DNA
gtaaatatttttgttactaacattttcctttcagtttttctgatgaggaaactaaagtccaaagtcgtgaaaataaaatctttctcaattctcttttttaaaaaagaaatatatgtcaaaacattagtatctggttccaagtatttttaaaacgtgtttaaacaccggaaggtcgtttaggttcctcaacgtattgggagactgtttaaacataaacgtaattccatctggtatacatggaacatcccgtttcttgttcatccgtttaaaaccgcctagtgcacgtgctccaagcgggtgtggccttggctggtcacccgccactctcaggcctcggcccgggaggctggcacggggaaagctggccccgtcaggcacagcgggtgcagggcgaccgcccatccgcggctccgccccagccaggcaccggcaggctctggctccaggcgagctgccgacccggagggagagcggggcgggatccgggcttccgggggcgaccgggaaaagcg

SEQ ID NO: 35372 - DNA, 363 bp, Mus musculus
  source 1..363: mol_type = other DNA
gaattgttagatccagctggagctgtccagcagataggaaaatgtgaaagccaaggaaagtcttttttttttttaatttttaagaagagatatagttttgacacaaaacgtcattcctgcagatagagagctctgtcagtgtcaaaactgttacaccgcgccaggcacgcagcctggaagggtgggtgagggccccaggctgcagccggggaaggggtgtcgcccagcccctcccctcttacgccactgcgcggctccgccactggagccctcccgccaggctgcacggctacgagtggccgccagaggccgctgcacggtccccgcgcccccgcccccgtccgccccatgggcccatcggtc

SEQ ID NO: 35373 - DNA, 385 bp, Mus musculus
  source 1..385: mol_type = other DNA
ttattagactgtcggtgtgcaaaactgagagaaaagccgttgcccgtttagttgaccagacagcctcccagaacagaacctgctttccctgcacagggaaggacgattgtgcctgaagtgtccaggggtcggaatccgggaccggcggagcggcgtgcgggaccgcaggcgagcgggcccgctggtggaagggcgggcgggcgcgcgcctgacgcgtcctctgggctcggccccccgggcgcgcgcccgtccctgccgcaccccgccccctgcctcggtcaggctcgctggaccccgcgcgtgcggggccgcgcacgcccccttcgctagccgggacccgggaccgcaggcgcctggcgcccccgccccgcccggcgggcgcgcg

SEQ ID NO: 35374 - DNA, 383 bp, Mus musculus
  source 1..383: mol_type = other DNA
ctgagctgcatccccagctcaagacccttaggggtggaatgtgtattcagataaaggggagaccagtgtcagaggtgactgtcatccctcgtatcctctgaggagataggtttttaataactttgtaaggagttttaacactggcttgacccagtccagaaaggacattcttgcctgcctatattaactctgcaggttaggattaagcctccatcaggtgtgggacactcccagaatcctgggaacttcttcccagttcaaaccaacgcaaattacatttgccgggcaggcaggaggcgcctcctgattggcaggaggggtggggcctcggagggaaaccctccctcggattggtgcaaaccctcaaggttgagcgttgtacc

SEQ ID NO: 35375 - DNA, 445 bp, Mus musculus
  source 1..445: mol_type = other DNA
aaatatgattgctgcagccatagtttgaactgtgacttaatggggctccttcttagggcagatctccctgtgcaactggaaaccagcctggtctacatagtgctttccagggtagccagggctacataatgagtctctgtttcaaaacaacaaacaataaaatcctcatagcatttaatcaaataggtacagtacagtgaaggggtctttttaaaaaacagatctcaaccacccgtaatgagatctgatgtcctcttctggagtgtctgcagctacagtgtacttacatataataaataaataataagtaaaaatcgccaattgccgagcccctgggaaacccagaggcatttcgtcgccatgtctgcagcaaggagaaccaatggatccgtggcgcctcgccaggcagttcctgcgcggagaaccgaaccggcccacgtgggtc

SEQ ID NO: 35376 - DNA, 384 bp, Mus musculus
  source 1..384: mol_type = other DNA
tcagcatccaaggatcctggctttctgaggcattttcagagcgttttttggatccaaaaccatgaaagagaggttgctaacaccccctctctcctctctctctctctctcacacacacacacacactaaactgatgggcttgagtttgccactcaccggtgtattccacactcacccttggcgtacatttgtttaagcattaattttaaaagatttagaagttcgaaccttcaggcttccactaaataagttaatgtaataagcagcctcgaatcccatttgatcgcagctgcaagcttggaggccagaaggagccctttccgcagccaagggaaaaggctgagataggccatagcttcagaggcccgagcgcgcccccgccgc

SEQ ID NO: 35377 - DNA, 368 bp, Mus musculus
  source 1..368: mol_type = other DNA
gggcaggtggatctctgagttcgaggtcagccttaagtaaataaaagtgaacatttaaaaatttgtgtaaataaatacttttttttcccatttttattaggtatttagctcatttacattaataaatacatttttaaaataatattttaaatgtaatgaaacagaagtatagtaaaatatttaaatttaaaattttttttaaaaattatttgtattggtctggcttgcagggaaaattttcccgtttgtttaacgagcaaggaaatgaaactcctctgtagcacccacacgtgctggtactagctcccgcctgctctctcgcgagaggtgacgtcattgggccgcgccagtgactgggccgtcgcgcg

SEQ ID NO: 35378 - DNA, 422 bp, Mus musculus
  source 1..422: mol_type = other DNA
tcttttcttttaatctcgatgggaagatcatcaaacgagggttcagattggggtcccaacgccggaccagcgtacccgaggcatgagctcctggtcctcggcctggcagtcagccgccccggccacctaccggggctcagggccacatagaggggtgccggctctcggcggcctccgcctcctcccgatgggctcggggacccccaaccttctctcccctcacgcagaggaggaagaaggaagtgctggctccccacccgggacagcgaccgcggccggaaacgccgcctccaagcgaggacgtccgggccctcagcctttggccgcgagcccttgcggggcggcccgcaccgatcgggcaagatggccgcaccggaggcgcccccctactgcttagcgccgccattggtcccagcgccgat

SEQ ID NO: 35379 - DNA, 416 bp, Mus musculus
  source 1..416: mol_type = other DNA
gctctccagagaaggctttgaagactcccccctcgggcagaggctgcagaggctgcagaggctgcaagagcaggagctgcagctgctgctgcagcagcagcaacattaaccccacagcctgtgggtgccggcactgtggcggtcaccacctgtcccgccgcacacttcacgatggcgcggtgatgtcacggagagatcacagcgaatttaaaaaaatatataggtagatagataaatacgtccctggggagtctcggcatcgatcagcgccggttcggagaggctccggggctgagctcaccaggctgcggccccgagcggcgaagtctttctccgggcgcgatgctccgggagcctggggctgctgctcacgcatcggcgctgggaccaatggcggcgctaagcagtaggggggc

SEQ ID NO: 35380 - DNA, 385 bp, Mus musculus
  source 1..385: mol_type = other DNA
gcctgtgggtgccggcatggcggtcaccacctgtcccgccgcacacttcacgatggcgcggtgatgtcacggagagatcacagcgaatttaaaaaaatatataggtagatagataaatacgtccctggggagtctcggcatcgatcagcgccggttcggagaggctccggggctgagctcaccaggctgcggccccgagcggcgaagtctttctccgggcgcgatgctccgggagcctggggctgctgctcacgcatcggcgctgggaccaatggcggcgctaagcagtaggggggcgcctccggtgcggccatcttgcccgatcggtgcgggccgccccgcaagggctcgcggccaaaggctgagggcccggacgtcctcgctt

SEQ ID NO: 35381 - DNA, 301 bp, Mus musculus
  source 1..301: mol_type = other DNA
aatgtagtgcctatggctcagagaaaggcattacctcaatttttggcattggcattgaaatccattccagatcagaagatctgaaactgtagaccaggcgggccttgaactcacagagatctgcctgtctctgcctccccagtgctggggttagagttatgcatcaccactttgaagtcctggatttaaacagtactagtcaacagatttttgaattgtttcttagaaccctgtcaacaactcatcttgatatatatatatatcgttcctaaaggaagtccaacctcttcatagataacga

SEQ ID NO: 35382 - DNA, 457 bp, Mus musculus
  source 1..457: mol_type = other DNA
gaagccatgttcttgaactatcaagactcttgacatcagaatcctggaggaatgcaaatcttgaggtaaattaatttatttcaaatgaccatactggcaatgttaactttgaaagcaatggagtagatggtttctaagatcctttttcattttagtattccaacactaccagtggatctgagaagctgctgttaggcctagcctgggccactcaccgcgcacgctcaggaccgggggcttggtgggggcttgtggcgcgcctgcgcatcaggggcgcgcgcaaggggctggtcctttaagaaaaccactggcggaggaatttctctgagagaaaataatcctcctcacggggccccttggaggccattaaccccccgagtcccggcccccctgccccggcaggcccttgcgcccacgcgcccgcccgtgggaccccaggagctgcggctaagcgcgc

SEQ ID NO: 35383 - DNA, 372 bp, Mus musculus
  source 1..372: mol_type = other DNA
caaattttatagtattacaacaaacgtgttgctatgaaataatgtttttttttttagagtcctggctgtcctggaatttactatgcagcccaggctggctttgacatatgccaaaacaaccgttgaactcaatgtaattgataatgtaaagataaacttgcagtcagcctttgatagggtttcaataaaagtaaaaccgttgagattaaactctgtgaaattgactctaacttcattggcagcctttcagcgctatcaggagctgatagggccctggataatttcacgcgaaagttgcagggcatgcccattcaaatttccaaaggcgtaggtttcacatagcgggccaggccgaactgtcctatttaagaa

SEQ ID NO: 35384 - DNA, 453 bp, Mus musculus
  source 1..453: mol_type = other DNA
aatggctccctactagggagagaatctggaggattagataatgattggcaattttttagactcaaatatggaaatctcaacagtgattggtaaacaaccaaccatagaaataatgtttttgaacaccagtgctggagaaaaaaatatagtatcccttatggatggtcaatgtttgaatttaaggactaatgacttacttctcccttagaagaaagaatctttttctttttttttttgctgtcccaataatgcatagtagcagggaacttgtaagctgatagctgctttcacataccttcacataagggatagtatattatgggtaacttcattgtgctactggtgaaaatagcttttgcattttaaagaaggtactaggcttttgcattttaaagaagatagttttctttctaattctctcatctacttattacctacttaaaggataatttt

SEQ ID NO: 35385 - DNA, 305 bp, Mus musculus
  source 1..305: mol_type = other DNA
tttatattttctttactattaagacttatcgaggccagcctggtctacaaacaagactatttacaaccatgtttttaaagttgtaactcaacatctgagtcactaatgttgcattagcccttaattttatttatgtatgcatgtatgtatttatttgcactctcttcttccactaaatggattccagtgacagaaaaataaggttggttttgaatttttaaccacacaccttgacattaagtagcctccgcctccgcgccccaggcggaccgcggtgcgcatgctcagccgcaaaggcctccggg

SEQ ID NO: 35386 - DNA, 389 bp, Mus musculus
  source 1..389: mol_type = other DNA
gtgctggagtccagctccagtggggttcaggttcacatgtgatgattaatcttattaaattgatgggatttagaactttgtcctgactataggccaaaaaagagaaagatggttgagcgctagtcatctttctcctatgttcctcaactgtgatgcacattaaaaaatggagttaaagattttatttattttatgtatatgagtacacagacagagcagtcagtgctcttataggagtgcgcacgcgcagttgtcaaggccgctcaggcctgtgggcttgtgagggggcaacgtaccacgtgcccaaacggggcgtggccctccacgtgactaggcgccgcaggaagttctgggtaacctcacgtgacaggaccgtccccttctggcgg

SEQ ID NO: 35387 - DNA, 299 bp, Mus musculus
  source 1..299: mol_type = other DNA
ctcccacttgggggagtcaaagcttcgtctcagtggggggttggaagagcagctgtgtaccctccacccttcagtctgaaggctgctggctcagcgggcctcctgccgtctgggggcaccatcgttatggtaacaagctgccagctcatcgttgctaattgggcccctgggctctcccctgggtttctttgctagggagccatgggcaaaacaaatgctttcataaacttgtgcatgctagctgacatgttcatgtgcacatatgcacccaagaaatctgggtttgtggttttctgatg

SEQ ID NO: 35388 - DNA, 301 bp, Mus musculus
  source 1..301: mol_type = other DNA
catgcgtggccccgaggtgttagttttatataattttcaattgttgtgaaaattccttgaacattgcttaatcatttctagaatgttattattttccttatgggtgtgtgttaaaaaactcgacaaccggaaaaaattggtcctctgtttgccagtgcaaccaagtaagggattctttaaatatctttctcataggtggaccagaaaaacttacagttactgctttatagtaactttctgaacagacccagagacactcagggagtgtacagcctgtaaggaaagggcgggccggaccgac

SEQ ID NO: 35389 - DNA, 611 bp, Mus musculus
  source 1..611: mol_type = other DNA
gcattgctctgggcgccaagacggccccgccatggcacagcccctggctcggggcccagaggtgggcgggcacagtgggcacgggtggggcccccagctaagacggcaggtatagcggggttatccctggccctcggaggccaggcacagcgccccgccctggcaggggtggggctagagcccaggccaagagctggggtcgggtttacaggtgtgacattcagggtgtgactgcctcggtgaggcagccgtgtgtctcccccagctgcccgcgctctgggcttgggtcccggtgcccaggtctgctgggtcttcggtacacaccgacccgggggaccacattcgcacccccgagctgggcctccccggcgctgtcgctcagagacgcgggcgctcctccgggaccgcggcggctgcccgccggctgcgacctcggtcctcgcggggccgctgcgggggcggggagcgcgggccccctccctgtcgcgggctcctggctcggccgccctgcgcgggggcgggggcgggggcggagcgcgcgggcgggatccccccgcctccccgtcctggtccccgggaaatccagcctccgtggcttggccgcctccggc

SEQ ID NO: 35390 - DNA, 347 bp, Mus musculus
  source 1..347: mol_type = other DNA
ccggcagaggagggtaagattgaccctcgttgctctgaccctggtggctccaaggtagtgatgctgttcgaaaccaggcctggcaggctcacagtgaagcagggctctgcctgcttttcctctcttttagaggcatcgactggaacccagctaaaggacaggggaccctagagcgttcctaagtgactttgagaattctcaccaatggggtccagtggcctcagaagctgggcacacggatgagtccggaccaggtgccagatctgccagctgggcgggtcctgggagtctgtccctcccaggccccgccttggcctaaacccgcagctgcgcgctatttaaggcgt

SEQ ID NO: 35391 - DNA, 220 bp, Mus musculus
  source 1..220: mol_type = other DNA
tgggctctttgatctaaaagaggaagaatctctaacttgacagtacagtcttgaagacgcttccttgataagtacccttgcaacatccctgctgaaatggaacacctaatgaacttcatttggatcaatgaaagctgactattcttttttcttcttcacaagaccaacgcagggtcgggagctcagccaatcgctgctctccgagagatgccagtgggcg

SEQ ID NO: 35392 - DNA, 418 bp, Mus musculus
  source 1..418: mol_type = other DNA
gattaaaaaaatagtaataatcgttctaggatccagaaccggctctgccagtcctcagcacgctaggcgagaaagccccagacgtggcatccttagggggtaccgggtggaaggaactcctcctccccttcactctccttgagcactcccaggaagagccggctggggagggaacagtcgaagattcttgcattacagaattctcttggatttctcccagctagtaaacgcagtcctttcctggggggctaatctttggccctccctggaaggtttaaaagtaagtgccaggaccaaacccataagggtgggcttctctgagaactccactctcaagctctgaattgagtgtgcaaatccagtgcctactgaatgaacactgacaaggtttaaattgcaaattgagtttgagggaccc

SEQ ID NO: 35393 - DNA, 440 bp, Mus musculus
  source 1..440: mol_type = other DNA
gtgctgtatgaatgatatgcagctcctaagagaagcaaccttgtctcaggcgctccgcttaacagagcctcctaatgtaggctgccttttgtagatcgatctggggatcccagggaaaccctggatttccgttgatctcagtcctggcccacgaataagactgcacaagctgggcccgaaagactgtctctacactgcctccctggaaaatgccaaccacatccctactgccacggcacttaacagtttgcaaggtgtttcacaccctaatgtcattgcagtccttgcaacagctgccagtggccaccatgcacaggcgagcacgcggagcctccgcaaaggagcctgctgttccctacagcgcagctgctcctggattagaacttgcatccctgaggcgactccgggctcctccgccacgctgcctctggctgtgctgg

SEQ ID NO: 35394 - DNA, 197 bp, Mus musculus
  source 1..197: mol_type = other DNA
cacccagactctgagtaagcgtggctgcatcagaactcggacttcagctgaggcctgccaggtggcttatctgggttccaaaacagaaaatatatagatctgtgtcactagcacatcctgtacctggacattttgatagggcccaagagatgagccacaggtgtttgctctgccactgtgcccagggaagtccttct

SEQ ID NO: 35395 - DNA, 335 bp, Mus musculus
  source 1..335: mol_type = other DNA
tgcccagccatagtgctgataattgctctgcccactctgccacagggctttgccgtagccaatgccaacgtcactgaggtcccaagagtgctgtatgaatgatatgcagctcctaagagaagcaaccttgtctcaggcgctccgcttaacagagcctcctaatgtaggctgccttttgtagatcgatctggggatcccagggaaaccctggatttccgttgatctcagtcctggcccacgaataagactgcacaagctgggcccgaaagactgtctctacactgcctccctggaaaatgccaaccacatccctactgccacggcacttaacagtt

SEQ ID NO: 35396 - DNA, 176 bp, Mus musculus
  source 1..176: mol_type = other DNA
catccaatagctgactgtgagcatccacttatgtgtttgctaggccctggcctagtctcacaagagacagctatatctgggtcctttcagcatcccaattctaagaaggggcacagtgtccacactttatcctaagataatatccaaggaatttcatgactttgccgattggctct

SEQ ID NO: 35397 - DNA, 162 bp, Mus musculus
  source 1..162: mol_type = other DNA
gtggggacccaacccaaggctttaagtttgctggtgcttaaaatgtcccagagcatagtgctgagatacggtctagtctccagagcccagaactccgagctgagattctcagatccccacacaaggttgggggtgatcctggacctagccaatggctaggca

SEQ ID NO: 35398 - DNA, 247 bp, Mus musculus
  source 1..247: mol_type = other DNA
atttctattttcaaattaattagttaattaacttttgtttttatttgtgatgacatccacagcagttgctaacacttgtagaacacttagagtgctatatagtgctttacaaaagtgcccagcatactgacatagagccaggctctataaacagagcatctatgaggctgtcaggaggtcacctcgcccccgagacccggcctggccccattcataagcaattggccaatttcctctgcactgcacc

SEQ ID NO: 35399 - DNA, 293 bp, Mus musculus
  source 1..293: mol_type = other DNA
ttgttcaagggactccttagacttgcatctcctggggtgggctacagctagctgagcaacaaccctttagatgtaatttgtgcctccacccccagcatttggagcggcggagaagcggctccggagtgattaatccggggataattcaccccccccccgccccccggcgcgaaccccgcgaagcgggattggagcgagtcatttccgagagcgcagcgcgcctctccccggccgggcggacacactccccgggatttttttccccccctcccggagcaggaagaaaaaaaaaa

SEQ ID NO: 35400 - DNA, 407 bp, Mus musculus
  source 1..407: mol_type = other DNA
tgacacccaagatccatggctcctgcctgtatgagaacatgtttcggtaaacccatttacacacaaacaggtcaagccattttgcttaactgttttagtgctctgtaaacttaactaaatttcaagaactccaatgtaattaataaactctccaatttcttcagagaaacgaaggattcagactctgagccgaagtgcttgggttttaaattagacaactttgtcctgacaggaaccaagtcccagctgtgcagcaggcattgccactgctcgaggctctcagtggaggatgaggaggcagcatcctgaccactgggggacagggatataacgatcccagcagataaaccttcatctttccttaaaggaagaaaaaacatcacagtatcccttctttgacccaacct

SEQ ID NO: 35401 - DNA, 329 bp, Mus musculus
  source 1..329: mol_type = other DNA
ccctctgaagtccccaggccaccagcctgagctggcctggccagtaggaccctcctccctactatacagagggatcctagtgcaagttgctcaaagcaggatcacagatcctgactccctgaaaatactctcaaaagtcctctgtggagcactttgagcggtgcagagtatgacctggagccctgcgaagagcccgatccagcctattggtgtccccgggtaccgtctggagggcacggcccgcatcacgtgcctggggggcagacggcgcctgtggagctcgcctcgaggcgggggctgcacccgaccgggaggctcatgggcctggg

SEQ ID NO: 35402 - DNA, 244 bp, Mus musculus
  source 1..244: mol_type = other DNA
cagttgtctcttcccggctgtgagaaccaaatcatgaacagatgttgacccagccctgtcctggcagttcaggtcaaggtaaaggccgagagcagggctggagccctccctacatccagtctgtcaaatgccatgacaacatcgtgttgatatattattttgcttataaaacatccccatttgttctgtgtttgcagcaatcctacagagccaacaagaaaagaaactctgtttgctttctcct

SEQ ID NO: 35403 - DNA, 364 bp, Mus musculus
  source 1..364: mol_type = other DNA
agctcgtgtcaagttcgcatgaagtgtttctgacacccagggattcaaactctaatttacataaaaatggctagtatctgctatctatagttggatcctacctgtcacatgaatgctattattcttacttcacaagtgaagaggtgagatatagaaaaccactcaactaagttgtgaatttgtgaatttgaaattgtagttacaacagacaaactctctcttgcccaatagatggtcactagggggccccacgcttgttccggtaccagagcgcctgagaagatgaggcactcattggctgacgtcatctgagaggcggagtggccaccggtccagggctggcggcgctgggactatgcgtccc

SEQ ID NO: 35404 - DNA, 194 bp, Mus musculus
  source 1..194: mol_type = other DNA
atatttcaatcttgagtgacaaacctaagttcaatgagcctgtcagaggacattgtcgggcagtgcccactttacaatgtagtgtcaaattaagtttatgatatgtacttcctaaagctaccagagagttagctgcagaggtgctctccatatgcagaatgggatggcaaggctccagagcctgcgccccctcc

SEQ ID NO: 35405 - DNA, 321 bp, Mus musculus
  source 1..321: mol_type = other DNA
atcttcctattcactgtgtccatccaacagctgtttgaggatggtatcctcgctcccagtggggaggataatgatcagggagagggtgcgtgcacttcgccctgacacgcacccgagaccccacagtgagccaccggggcgggggtcacaggccacgggtccccgggggcgccccccgagccggacgccttcgagccttccggaggacgcggggcggggctcgggcgcacaaaggaagcgcgcgggccgcgtcgtccgcccctccgccccgcgccgcctagccccgccctcgccccgccccggcggaggcggcccgggagc

SEQ ID NO: 35406 - DNA, 669 bp, Mus musculus
  source 1..669: mol_type = other DNA
acaggcggtgccacctctgatagactttctagaagtgctgtcagctcgccccaccgctgagactcaggcctagggttgggaagcggtgtcctggcttgtgcaaacttctgcaccccaggggtctgcaccagcttgcgatttcccaaggagggacacccccactcccgagagcagcgtgaccagccagtcccgggtccccaggccaccgccacccgggagcggagtctgggcgggacaatggccgcggccgcccgggccccgggagcccccgtgctggggaaggggctgtcctagggccgggcgccggtgccctccccgcgcggctcgggcgggcggaggggggcgcggagttgtggctcagcctccggcgcggcgcggcgcgggcagggggcgccgcgcaactttccttggcggcggcggcggcgagcgcgagacgaggccccggggccgagcgggggcccccagcgcgcggcccgtccccgccccgccggccccctcccctcgccgtcgccagcgccgggcgctgcccactcgccggagccccggggccgggcgggctgcgcagccgagaggcggggggccggacgcggctcgctcgcggggcccagcgcgccggggccgcgcggctgcacagccggcctccgccgccgcggcgcctgcagaacccag

SEQ ID NO: 35407 - DNA, 614 bp, Mus musculus
  source 1..614: mol_type = other DNA
actttgaacttagcccatcactacaatctatgcaaacattatatattctatgcagactacagagccctgccgccaggactaaacaaacctgacagctgtgcagaccagaagaaacagctgtttttcccgtccctgggggtcaggagcacagtggcagcgaggcggggtctggaggcccctcccctccccccgcccgccgcgggggcggagcggctcgggtcccgcccgcgggggcggagagggagcctgggcgccgggcagttcggctcggcgaccgaagcggtggccgctgagctggtgcgggtaaggggccgcgcggggccgggatctgcggccagggtcgggcagctgagtgggccggcacccctcctctgctctgccgggcaaagccgcggtgcggctgggtctggctgctctgtcccgcgcccatcgctggtggccacctaggacctcgaaaccgagctccggtgctcgcatcccgggtggcacccactcggcaccgagccctcgcgcctccggcgtcgcagacagctccccccgcgctccccggcgcctgtcgcccgtgcccccgtgggcctggcccccgggtaccgcccccaatcgcgccgcgccgg

SEQ ID NO: 35408 - DNA, 530 bp, Mus musculus
  source 1..530: mol_type = other DNA
cttcaccaggggagattttccggagtcactttttgagacgcaggacgcaggatctgcggctcagaccacgtagacgcctaggattcgaaggatttccccgcgtggacctccgcggacatcagtcagccagcttgcttagctgcgcagctttgcggagcagcctcgcagggctggctggcggcacccggttgccctggctacggagcaggcaggggcggggccagggcaccggggcggggctagggccggcgcggcgtggggtcggtggctgctgggcgcgcggggcgcaggccgcggggccggagccggggggagcgagcgagcggaggcgccgaggatccgattcacgggagcgggcgtcctcggctttgggcgctgaccctcctctcagcaggggcctcggctccgcaattgccactcctcctcgggcgaccccccctagcagcgcgcctggctctggcccccgcgaaggaggcctggggttggggtgcgggacccccgccctgcacttgagagcgtcccgcttaaat

SEQ ID NO: 35409 - DNA, 390 bp, Mus musculus
  source 1..390: mol_type = other DNA
tctgtctcttgagctcagcaactgaaggactgtgagtcccattgaagccacatttcaccagagtcttgtggattctgagaatgaagccacaaaaattctatttgaatacattttagctggcatttgagttgggagtttaaaatgcttcaccaggggagattttccggagtcactttttgagacgcaggacgcaggatctgcggctcagaccacgtagacgcctaggattcgaaggatttccccgcgtggacctccgcggacatcagtcagccagcttgcttagctgcgcagctttgcggagcagcctcgcagggctggctggcggcacccggttgccctggctacggagcaggcaggggcggggccagggcaccggggcggggctagggc

SEQ ID NO: 35410 - DNA, 197 bp, Mus musculus
  source 1..197: mol_type = other DNA
ggtttcctaatcacacttgcacattagctggcgacatcattgccttgttcaagacatctggataaaaactgtctttctgctgacttaaaagtcaggaggattgagcccaaaacttgttggaatttacttaaccaatcttattcagaagtggaattactggtccaaaggttacgttattgccacccagcccgcgctgg

SEQ ID NO: 35411 - DNA, 339 bp, Mus musculus
  source 1..339: mol_type = other DNA
gaccagcctggtctatacagtgtgcgcgcgcgcgccctgtacctctgtgtgtgtgtgagagagagagagagatcatatttctcctttccatgtgggtcccagggatggaactggtacaatttatttatttatctatctatttattaatttatttaatagctgcatttccttatatcaggaaacaagaattattaccctggaacgagggcggcctggcgccgggcgcctggctcagcagcaggggcgtggccgtgactcagccgcacagtcccggggtcgcccagccggtccgaccggcctcggcaacgcgcgcaggacgccgggctgggcgactgaggg

SEQ ID NO: 35412 - DNA, 872 bp, Mus musculus
  source 1..872: mol_type = other DNA
cccgggacgacccccgcggccacgcccccgcgctcacccgcagtcaggggccggacaccagcggcagtcggggtccgaggccaggtaccggcgcagcatgagcggcgggtcggccagcagcagacggatcgtgtgggttgagccgctcgctgcactcggggcagctgatgggcacgcggctctcgctgatctccaggcgcaggtagtggcggaggcagtcccggcacgagcgatgcgggcagctgaggaggcgcggggcccgctcgggcggcaggcgcaccaggcacagcgggcactcgtccggcccggcagccacggcctccgcctcagcctcggcagcgggctcggagggcagagcttccaccggcggggcctgagcctcaaccggggccggagcgggcggcggcggcggcggcggcgcagccgggggcggcggttcggcctgaggcttggtccgggcgcggcggccgcgggccgaggcggagaagacgctgtggaaggtgaggcgccggcgccggccgccgctgcggcacttagggtcgggggcggccgcagaggtggagcgcggcgactcggagtccttctcggagcccatggcccgcagaggctgaggagccaggggcgcccagcgccgccgtagctcccgcctcagcgccccctcccagccggcgccccggccgccgccgccgccgccaccgcctcggcagtcctccgtggttataaagcctccgccccgcgcgccgcgggcaactgcgcaggcgccggcctcagacacctcacaacccgcgcggccccgcgagaggagctgggcggggcctggagggcggggcctgcaggctgcggcgaagccccgccttctgcggtcaggtggt

SEQ ID NO: 35413 - DNA, 555 bp, Mus musculus
  source 1..555: mol_type = other DNA
acattggaagtatacaacccttctaactctcagtgtctgcaatgtagaacacaaccccatcagcgcctctaagagcagctgtccttagtacagacggagcacccccacctcccaaggtggagatgcttccgttctcgcaggtcacggcctgcactcacagaggctaggagaggagagtgctccctcctccctagagagcccccagttcatctggctcgggagtgcgggggcagcgagggtgcctatcggattcctccctcagagcgacaggcggccctgcgcccaggtaggggtggattgttcccggcttgggagagcagtccctggacactgacccgtcgacgtagagctggggggtcccccagggtggggtgctccctagagagggggccggggcagcgagggcgttctgttctctctcccgggagggggcgggggcggagcctagctaccagtgggggacccccccaggggaggggctccgggccaacgctgcggggcgtctccctcgcagtcccgcccgcccctccggccgcctctgccgccgcgcgccgc

SEQ ID NO: 35414 - DNA, 303 bp, Mus musculus
  source 1..303: mol_type = other DNA
aaacgggtcttctgtaagagcagtacttccgccagagtcctggaaagacatggccctgactcccggcacacaaagggtgagccctgcttgactcagagagggccgtagagccgcccaggcgcggagaccgcggccccactctgacctgcaggttccgggtgataagatgcagcttctcctcagggcggggcggggttaggaaggccgcccatgacgcaccctctcaggggcggggcggtttcctgccaatcactgcttgcttgccctccccctggtgttggccccgctgcctcggggtggggg

SEQ ID NO: 35415 - DNA, 469 bp, Mus musculus
  source 1..469: mol_type = other DNA
tcttttaataatctagaatgtgccagagcccaccttggattcaaatcctgcccgagtgtctgcgcctgacagtgccctcagctagacctccagggagtcagaggagagcctcttcggccccccccagagtaccgagtctgtaccccccttacactctacacagatgggcatctcccaagcacttgccctccctcttccctaaggaagagcgggaccggggccaggtcagggttaaggctgggactgaccgcggcacggtgctacgggtcctgcatcgcgtgagccgcggggtccccaaagcccctggcttcccgggagcccacagagtgaagagcggggacaggagtgggggcgccctcggtcctcaccccgcccccgccctctccccgcagcgggggcgccccgccccccaggcgcccgacgtggacgcggccgctgccgccgccgccgccaccaccgccgccgccac

SEQ ID NO: 35416 - DNA, 234 bp, Mus musculus
  source 1..234: mol_type = other DNA
ccctgaaaaacgggtcttctgtaagagcagtacttccgccagagtcctggaaagacatggccctgactcccggcacacaaagggtgagccctgcttgactcagagagggccgtagagccgcccaggcgcggagaccgcggccccactctgacctgcaggttccgggtgataagatgcagcttctcctcagggcggggcggggttaggaaggccgcccatgacgcaccctctcag

SEQ ID NO: 35417 - DNA, 704 bp, Mus musculus
  source 1..704: mol_type = other DNA
ctcccactcgggagagcgagtcctcgcctccccgcggatagcgggaggagcgcgtgttccctccgcgcccctccccccaggggcgacccaggtccccccgcgggctccgccagggcacccgacctcaggggacagacgctgactgccacatctcggcaggctgcggcccgcggtcgcccggagtgggtcgccctctcccgccacgacgccccgcgggaagcccgccatccccgctctccctagcaacagcctcccgcggggaaggcaggcaccgggagaggaagacccccccccccgcccccactggcagggccggcggcccgaggacctgacagctcccttttcctcagcgggatgaggggcgtcactcgcccacggatgtggaggtggggggcagggacaacctccccgcccgccatcacctctggcgcgagaagcagcccttccctcagcgagacgagcttccctactcctcacgctgtggagaagcaacaggcggcccgccccctcccccccgacccctcgcctagacgacgggcgccgactccggaagccgggccaaaagcctgggcgagcggcagcacctccccccaccccgaggcagcggggccaacaccagggggagggcaagcaagcagtgattggcaggaaaccgccccgcccctgagagggtgcgtcatgggcggccttcctaaccccgcccc

SEQ ID NO: 35418 - DNA, 331 bp, Mus musculus
  source 1..331: mol_type = other DNA
tgtagcccagactagcctggaagtcactatgtacaagccatgccaggtcagagggtcaggcttgtgtgatggatttaaggtgcatctgaacgtattcaggatggcttctaaggccttccctgtcatcctcacaggcagccctgggttcctgcctgccaggtctggtctggtggctcttccagccaccatctggcagctgggagctccggcacccaaatgtttgggcaagaacttgggagcccacagctagctagcatcagcaaagcgcccagtctctgggggtgggaggagaacctggagcagcccctccccctcctgcccgaactctgcc

SEQ ID NO: 35419 - DNA, 482 bp, Mus musculus
  source 1..482: mol_type = other DNA
aacattatgcatatatatgtatatttatatacacagacacacacagagagatttagactggagtgtatacgtcatgtccacctatacaaatacggtcaacctgacatcaagggactctagttttcccactggtaaaatgtgccgtacacattgagcactgctactattattttcaactccccgggttcagagatacagttagtgacactcacggggtggtggccggtgggcccagcagcagcagggtcctgcctgtctggaggccagtccctcaggcagctgggctgggagatttcccgacccgcctaccatctgagccctacccagagcgctcagggcggggcggctcagcaggtctccctggtctctcggaggggtggagcgggcaggccttgcgccaggccccgcccctcctctggccccacccccggcatgaccattggccgcagtgctagggggcgtggccggactggggctggggg

SEQ ID NO: 35420 - DNA, 327 bp, Mus musculus
  source 1..327: mol_type = other DNA
ttcccagctgtaggatgctctaaacctccctgactcggggactgagtgggactcaactttattccagacgcatggggtgtggcagttaaccacccccccccctccaagcccttgcgtgggtggggatcgctcattgaactcggggggcagctcccctgggaccgaacagccccctcctctcctcaccatgcaaccagggccagaaggaaaggcgaagtgccgctgggccgccccctctccccgcccccagggccgcggggcccgcgccctcctcccgcgggtaatcgtccggccaagtgggcgcgtcccgcccgggccgccgggatc

SEQ ID NO: 35421 - DNA, 379 bp, Mus musculus
  source 1..379: mol_type = other DNA
gagcctcgcagcttataaaatcagagatataaaaggcttctaaaggctttcctccggtggtcctgagccaggggaatacctgccacaggtcccaggtgtctgggaaaaaaagtctttccccaaccataggtacgaatcccgaacaccctcggggtttttcgagagacagaccctcgaggatcaaggaggggcggggcgaggactactctgcagccggacctcgccctcggggcaaggccggcggggaggggcgccttgccgctgcgctgctaccgtcccccccccccccgcccccgacggccgctcccgccgctcgagccccgcccgcccggcggccccgcccgcgctgcccccgcccccgcagcgatcgctcagcctc

SEQ ID NO: 35422 - DNA, 423 bp, Mus musculus
  source 1..423: mol_type = other DNA
ctttccccctaaattgggtccaaagaggggcacactgtgatcacgccacctgctcgcggaaggatatacccgcttgcggctgccgggctgccgggctgccaggctcggtcctgcactcatcactattagtaccgagggagtcagttaaaagacgccaccttgaattaggccgtctggccctcttctttcgctcctgagggagttgtcagcataacggccttgtcacgtgatctgcacgggcctcatcccggcaggcggggcgcgcgcgcaatccgtggaagtcggagcgcgcgcgcctcgggactctggagaaaacgactctcgagcgtctccataggccgcgaggcggatgctccgcccacccctcagacctgttggcgcgaaggcacgcgagccggccccctacgcacgggccgctagagg

SEQ ID NO: 35423 - DNA, 358 bp, Mus musculus
  source 1..358: mol_type = other DNA
atgtggtcatcagaggtcctcagactccttggagctcaagttgcaggtggtcctcaggccctatgcaagagttgctggttagcacccagtccggtctgaaacccagcagccgctacacaggctctgattggctggaatccagggcttaaaaccatctgaggtatttgacaggtagtccacttaagagtttggatccagaacccagccatataccggttttttgaataaagaaacttttgttcatgaacgctggagtcttcagagcgcatcctccagaggtgggtacccggaccattgacggacctgctggctgaagggcccgccttcatctccccgcttctcactggagggccgcagg

SEQ ID NO: 35424 - DNA, 569 bp, Mus musculus
  source 1..569: mol_type = other DNA
ccgctccggaggagctgctgcgccgttagcccgccccgccggggagctcagtcctcaggccggcgtcgctgggacgaggctcgccagagtcgggcctgctctccgtctcaggccgcgtatcaccttccttgtcagccatggcggcaggagagccggaggggcggggaggctacgagcgctccactccgcgcgcgcggcctctagcggcccgtgcgtagggggccggctcgcgtgccttcgcgccaacaggtctgaggggtgggcggagcatccgcctcgcggcctatggagacgctcgagagtcgttttctccagagtcccgaggcgcgcgcgctccgacttccacggattgcgcgcgcgccccgcctgccgggatgaggcccgtgcagatcacgtgacaaggccgttatgctgacaactccctcaggagcgaaagaagagggccagacggcctaattcaaggtggcgtcttttaactgactccctcggtactaatagtgatgagtgcaggaccgagcctggcagcccggcagcccggcagccgcaagcgggtatatccttccgcgagc

SEQ ID NO: 35425 - DNA, 242 bp, Mus musculus
  source 1..242: mol_type = other DNA
taccagcaacaatctttttagcttgttcctcagggtcaacctcctgctggaggtgaaggggatttttccagaacactttcagctagcgttttcttaaatcgggcttaatcctgggtgtcatcccgaggagagctctggattctccccatagccttactctggctctgaggtccgcaatcggagcttgctgaattagcctgcagcagaacaccaaggagctgctacgcggctggactgtagtc

SEQ ID NO: 35426 - DNA, 512 bp, Mus musculus
  source 1..512: mol_type = other DNA
tgcagcagcgtcagacagtggcagcccgggcagcgtcggagcggcctggcgaaagcggcaggcgcgcgccgctccgggctatcctgggactcgggggcggaggcaaggccaggggagtctccgtctcctgggcactcatgtccaggccccggggcactctgtataggagtggcggtcaggcagctccgggcccctagatgctccctgcccgtgcttacctgccagaggccgaggccggtcccaggctggaagcaactgcccgagccctggccacgggaggacgctccggtccaggcggagcctggcaggtgtctgctgcgcgcccgggccccagcgtcgaaggggaggatctgcgtgacctccacagcctggaattcttaggcagtcccagagcgttccggcatttagtgagggcccgggcctgaggccagagggctctggagatcgcaccttctgcctggaagcggagcccacatggagaaggcccgcctccctgacctacgcggccaaag

SEQ ID NO: 35427 - DNA, 225 bp, Mus musculus
  source 1..225: mol_type = other DNA
ctgtcctgctttgtagaccaggctggcctcggatcctggtttccctacatccttctatactgacttgctttctgccatcctgactcaaagggaggaagatcccttccccaatggtcttggctttggccgcgtaggtcagggaggcgggccttctccatgtgggctccgcttccaggcagaaggtgcgatctccagagccctctggcctcaggcccgggccctcac

SEQ ID NO: 35428 - DNA, 268 bp, Mus musculus
  source 1..268: mol_type = other DNA
ggatcctggtttccctacatccttctatactgacttgctttctgccatcctgactcaaagggaggaagatcccttccccaatggtcttggctttggccgcgtaggtcagggaggcgggccttctccatgtgggctccgcttccaggcagaaggtgcgatctccagagccctctggcctcaggcccgggccctcactaaatgccggaacgctctgggactgcctaagaattccaggctgtggaggtcacgcagatcctccccttcgacg

SEQ ID NO: 35429 - DNA, 230 bp, Mus musculus
  source 1..230: mol_type = other DNA
ccacagttgtggaagaaacgattcctgtcacattcggcctaagtcaggtatacttaaacatctctgcagttaggtcagccccccagggtggcctctgacgagtctggacatgttcccaagtgatgggggaaccagacagaggaacccgggcccgaccccgcctccaccccggattgggtgctcatttaaatgtccggccccgccccgagcctcgggcgcgtacatatagg

SEQ ID NO: 35430 - DNA, 485 bp, Mus musculus
  source 1..485: mol_type = other DNA
aaaattaagttctgggtaggtgagatggttgctgccaccatgcctgacaacaccaagttctgttactttgtcacagtggcatattggattttgtctttttttaaaaaaaatatgtacaattggagacggaatttaatttgtaacactgaataagctcttcagctttacctgtaaaattgttttcatgctttcactacggagagcaagttggcctcagattactttccccgggaagcctcggcgtattctcggtaaaacccaactgtgaagcgggctgcagagtttacggagccgactccctctcccgggcacccctccgcgccggactttggtacaggcccagggggcccgcggtggcttctctaagctgcccttgccccccgccgagttccgggcccgaccccgcgcatgccgattggaggcccggccgggggtgggcggggcttcgaggccggcccctccccctggtcggacgccgtaaggag

SEQ ID NO: 35431 - DNA, 168 bp, Mus musculus
  source 1..168: mol_type = other DNA
cttcattcccttcacttcgtggctccgaatggggttcacatccagggatctcagaaaaatcgatcaaaagtcgatggtcttgtatctgccttatctgagccgtaaggacgccgagcggcttttggcgcccgggaacacgcatggatccttcctgatccgggaaaggcc

SEQ ID NO: 35432 - DNA, 267 bp, Mus musculus
  source 1..267: mol_type = other DNA
gcaaaatagattaaacgtttgaggccagcctggtctacagaatgaatttcaggtctcaaggtcagcttggttagctaaaataaataaataaataaaataaaataaaagttaatcttcgcttgaggctacagagggagcctcgctctgacctggttagagccacaggtttctctctgctgctgagaagcaaaagcctgtttctggaacctctcagcttcgttgggcccatcccaggtgggagggtgggactagccttgggcctgggcc

SEQ ID NO: 35433 - DNA, 291 bp, Mus musculus
  source 1..291: mol_type = other DNA
ggtctctgtgagtttgaagccagcttggcccacaggttgaagcttatcctggtctacataggtctacatagtaggccgttgttggtgtcaccgacctgtcccagggcccagggctcctgactcccaggctaggcagctggaccctattgccttgcagaagggctagctctgtaaagaggaaagagcaccagccagtcagctgtctcttccccttgactcctctgacttgggtcttgggagggaaccaggaacccctcctgcccccacccggatgggcatcacgtggcccct

SEQ ID NO: 35434 - DNA, 393 bp, Mus musculus
  source 1..393: mol_type = other DNA
gcctgaaacttgcagagatctgccagcctctgaatgctgggattaaagccttatgccaccatgccccagcctgtcactagggccttaagacatgaggttttcttgtcttcctcctgaaacagactgtcaacagtcgatccttaggcacaggatgaactatagtacatataaccttgtcaccaactatctaacagagatagatgctgtccaggttcaactctgaacaagagatgcctttgccctgtgagctaaactgtagctgctgtgttctgctcacgggcaggagcttggagggtaggaggagtgctccatcaaacagccttccccaccatgtttagtgaccttcaaggggtcctctcattggttgatgacgacgacgacgatgatgatgat

SEQ ID NO: 35435 - DNA, 469 bp, Mus musculus
  source 1..469: mol_type = other DNA
cccagggcaagttgagccgaagaaagccagcactcaggagtcagatgcaggctgatctctgaattcgaggctagtgagttcagggtagccagggatacacagagaaaccctgtatagtcattgattgaacatgtaccctgtgagttcttatatcagccctatacaagggttatcattaaatcctcgtccgtgaccacgtccgctcacgcacttgctccaggccggaggaggctcgcttcagcagcggctgcgtgccaccccacagtgcggccaccagcactcttcccgccgggctgtgatcggtcgggaggacccgcccaggctcagcattcctgaggctcggggatgccaggagactgagagtcggagcccgcggaggtggggggcccggctacccaccccaggacgccgccacgccaggcccttctacttccgggagcgagagggcggagcccccgcatccggaagt

SEQ ID NO: 35436 - DNA, 552 bp, Mus musculus
  source 1..552: mol_type = other DNA
ggccacaacagctttcttcaaagggcagctgtgaagctccaatgaaaccatgtctatgaaacttaaaataagtgacttacatactctgtaattaaagtctccatgttttattaaaagggaaaactgtggtttatagaaaaggtaaatgtcatgttcaaagcaggagttagggctcagatctcaagctccgacttaactctccactgttaactatcagtttattgattgaacagaccacttgatgcggaatgctgtcgccaacctaccgcggtatggggttggttttccagaaaaatttccctcccgcaggcagtaaaccttgtccacccgcagtccgggcggcgcgaactcgccccctccgggccccccgccccggacccccggccgcccgcgaaggtctccttcgcgcgtgatggaccgctcatggccctgcagcaggatgggttctgtggggacagaaccggggtgtcagtgccgggaaccccgtcccatgcctactgaggccccccgacggcagcacgccgcgcctggaactcaccatcctggcgactt

SEQ ID NO: 35437 - DNA, 580 bp, Mus musculus
  source 1..580: mol_type = other DNA
agcaggagttagggctcagatctcaagctccgacttaactctccactgttaactatcagtttattgattgaacagaccacttgatgcggaatgctgtcgccaacctaccgcggtatggggttggttttccagaaaaatttccctcccgcaggcagtaaaccttgtccacccgcagtccgggcggcgcgaactcgccccctccgggccccccgccccggacccccggccgcccgcgaaggtctccttcgcgcgtgatggaccgctcatggccctgcagcaggatgggttctgtggggacagaaccggggtgtcagtgccgggaaccccgtcccatgcctactgaggccccccgacggcagcacgccgcgcctggaactcaccatcctggcgacttccggatgcgggggctccgccctctcgctcccggaagtagaagggcctggcgtggcggcgtcctggggtgggtagccgggccccccacctccgcgggctccgactctcagtctcctggcatccccgagcctcaggaatgctgagcctgggcgggtcctcccgaccgatcacagcccggcgggaagag

SEQ ID NO: 35438 - DNA, 516 bp, Mus musculus
  source 1..516: mol_type = other DNA
aacagtgatatcttttttgtttgagaccgtctccaagagagattcgaaacagggtttctctttgtagccctggctgttctgagtaaagcaggctggccttctggaattaaaggcatatgccaccacatctggctttcagattttaatctttttttaaagatttatttatttatttattatatgtaagtacactgttcagacgcaccagaagagggcatcagatctcatcggaccttcggaagagcagtcgggtgctcttgtggttgtgccctggtgtggtggtcctgaacacacacacacacacctgtacaagtgtcacagtccttgactgacacagacactgagcctgaggccagctgcgtaggtgtactgtgaattttacggattcggaagacagaaaagcgactactcggtgctctccttgttctcactgtgccaaacacagggttggggaggggggccgcacccggatgcgtgcgtctgacggagaagcccagcgtgtgtccctggagacgc

SEQ ID NO: 35439 - DNA, 264 bp, Mus musculus
  source 1..264: mol_type = other DNA
gcaccctgctccagcaaaagggacacctctgggtgcccacattgagcctgctgggcagcctgacaccctctcctgtggcatcggatgctgttctggagatctgaaccagaccctgtcagttcttcagcgattttccgtaaaatcgggataacagttatgtatgggatcctgacaagaaaaggaaatgattttaaatccatatcccgtaactaacagtgctcctttagtagagggctactttctctttaaatgcaaatcatctcc

SEQ ID NO: 35440 - DNA, 111 bp, Mus musculus
  source 1..111: mol_type = other DNA
aggatcatcccagcccttgggtggcttagcctagactacacagtgagttcccgccaagtcaaggctaatttggatcctagttccattgttctaaggccagcatgtactggc

SEQ ID NO: 35441 - DNA, 412 bp, Mus musculus
  source 1..412: mol_type = other DNA
taaactttttacctgtgggtaattttataaagaacttttgtctaagaaggtataaaaaagctccacccaacaaatataaatatatatattatgtataaacatatatgtacaaatatatgtatatatatgtacatgcatatgtgtatgtatataagtattcatgtgcacttgtgaaattgacgaaacaggtggtcaggcccagccagattgtgtagatatggctgctattagatcaggacagattctgggctgtctgggtcacgggctgccaagaagtcagccatcctccttggagccctggagaagatggacatctccctctcacagggcccgaggtcttcctttctgtgatcagaccacccttgaggccctgaggtcagggaaatgctcccatgcaaggggctcacagcct

SEQ ID NO: 35442 - DNA, 284 bp, Mus musculus
  source 1..284: mol_type = other DNA
agctgtgctcttttttaaagatgggtgctggtgtcaggcttccagctttgaatctggagatgttgtctctaacaaacaaatagtagtttgttttattttaactaggcttttctgtactatcgtatatttcacagatcactgagtattttgtacttaatccgagtaattatgagaatcaagcaaaaacgtttgaattattataaaccttctattgtaatagagttctcagagatcatagaaagtcatacatgtttataaaggactaatgagtggcaggagagggc

SEQ ID NO: 35443 - DNA, 478 bp, Mus musculus
  source 1..478: mol_type = other DNA
gagatgttgtctctaacaaacaaatagtagtttgttttattttaactaggcttttctgtactatcgtatatttcacagatcactgagtattttgtacttaatccgagtaattatgagaatcaagcaaaaacgtttgaattattataaaccttctattgtaatagagttctcagagatcatagaaagtcatacatgtttataaaggactaatgagtggcaggagagggcggtcctgttggcagcagttacctttccggtgctcggccggagaggaggacgccgccggacgtcctcagagggtctgtggcccaggacgagggcggcctgccccgagggctgggtggcttctgtgcgcgcgcgcgcgcgggggtcccacgtgggacctggtggggcggggagccgatcgggactggagcatcccgccacgtcagtctgcggctctgagccaatcccgcgctccggctgccgagagggagcc

SEQ ID NO: 35444 - DNA, 289 bp, Mus musculus
  source 1..289: mol_type = other DNA
aaaagggagctcattgacctgttgttcatttattcattcaatagctaactgaccctgtcattaaaaggttactgtagagttcaagtctaggatatctctctcaaaataattatttagttcagggtctatacaggcttaattatgaagaatttttgggaaagaagggatctcttctgcctttaaaaccacagtgcttgtggcaaccgggcggagagtttgacacactttgcccctatcctgatatcccttggagggaagggggcaacgcgttttagcacggtataaaacg

SEQ ID NO: 35445 - DNA, 420 bp, Mus musculus
  source 1..420: mol_type = other DNA
acactgattaaaacaggactacatggattgtctcatttaatcttccatgcctacaagataatccctgaataaatctgtcatagtgagagtaataattccgacactatagcccgatagcctacgtgttaggctacatggtagaagaaccagtactactaccagttgtcttcccaaaatgttaagaaccctaataggcggttattattaatacccattaacactatttcgaaatttgaaaatgactggggtgggccaaagcacactaaagcctaagagttcttggtgtcctcctctaagtcaggaaacacgggaggtgggttcgcccgctccagaatctcttgagcagcagctgcgggaagttagcacagcttttgtccaaacggcccctttaagaagcccgcctagcatgcaaattgagca

SEQ ID NO: 35446 - DNA, 321 bp, Mus musculus
  source 1..321: mol_type = other DNA
aattcaggaggttggaggggcggcccccgattccactccggggcaccgctccctcggggacctccccaggctcggccgttgaaggaggcgtgggggcccgagcgcacggcgcccgccccctccgcgcactccgcccgggggagggggaggggagacacgtgtaccgctagcaggcggcgggcgcccgcgcaggcgccctaagctcggagcccaagcggggaggcgacgtcttcagtcggcgcaggcgccgtggtccaactggggactttgttctccgcggagaaactcaagggcggtgccggtaggcgcctgcgcacgcgc

SEQ ID NO: 35447 - DNA, 557 bp, Mus musculus
  source 1..557: mol_type = other DNA
ttagagaatctctaagataatcttcaaaactgttaaaatccaactcaaacttttttttttttttgaggctcccaagagttgaatttagggcctcacatgcaaggcaaccaggctggccttgaactgggtttaaaggcatatcatactttatttaagtattgaagagtatctagtatacctaggaaaaaactttttccttaattcggagcagggcagacttcgcagagatgttcctgtactcggttccccacttctgagctggaaatccccgagctcaggccccggtcgcccagtcccagtcccagacccagcgggatctggctcgaggcgcctcccgggatccggaatccgcccgcgaccttgcgggtcactgggtggccagcgcagagtgggctcgcccccagtgccgagcgcagcaagccacgcggaggcggagcgcgggaggcgcccagggcagagtgggtggggccaaccgccgcgagccgccggcagccaatcatcggttccgagggcgtggctgcgccgcgcgcgccgcgccccgcagcgccccctgaggg

SEQ ID NO: 35448 - DNA, 378 bp, Mus musculus
  source 1..378: mol_type = other DNA
agttaattcactgtgtgacaccttgttctaaacttagcaaagaatggccatacataaaataaaagatttgactgtgcttaatagattaatatcataattgttcgtaagatttttataaaatcaaatttttgaagtaaaaatttgttgattatcctcagcttatttacaaatggataccctattttaaacagagtacataaaaatacagtagttttgtgagctgaagttaaaaaagagtccatagaaggaaattttcttcaagtacccttaatgtatgatttgaatgaatttttaagatctcaagacaacgaagaatgagttatagagaatctattctttctgaagggggcagacttctgccaggctcagcacagcctt

SEQ ID NO: 35449 - DNA, 793 bp, Mus musculus
  source 1..793: mol_type = other DNA
cagtcccagtcccagacccagcgggatctggctcgaggcgcctcccgggatccggaatccgcccgcgaccttgcgggtcactgggtggccagcgcagagtgggctcgcccccagtgccgagcgcagcaagccacgcggaggcggagcgcgggaggcgcccagggcagagtgggtggggccaaccgccgcgagccgccggcagccaatcatcggttccgagggcgtggctgcgccgcgcgcgccgcgccccgcagcgccccctgaggggcggcggcgggagctggtccggctgcgcgcgcagcggtggtggcggcggcgcgatcggccgggctgtaaccgtcgttcgtccgggagcggctggagcggcagcagcggccgggcacggcgcgaggcgacgccagcgggcagcggcggtagcgggggcagcggcggcagcggggggggaacacagcggcggtcgcggcagcaacagtagcagcagccggactcgtggacacgcgccgccgccgccgccgccgggccgggccgggtgtcgcgcgccgaggctgggggggagtcgtcgccgccgccgccgccgctcccgccgccgccgccgccgccgaggtgactgaggagagaggcgcctcctcgctcccgcctccgccggccagcgtgagtgcgcccctcccgggcggccccgcgcggcgcccgggcctcgggcaggggagggcgggaggcgccgctgccattagagcaggcccgagacacgtccccggaaggagggccgggccgggccaggggcggggagcgcggc

SEQ ID NO: 35450 - DNA, 215 bp, Mus musculus
  source 1..215: mol_type = other DNA
gccctcagtgtaacagggcaggctgccgacatcgtagttcaagtcagccttgaacttgcaatcctgctttagtggcccaagtgctaggatgatcagccagggtagactctctctgataaatgagtggggagagggcccccagctgagcacctcaggccctgtctctggaggtccacagcagatagtggctactgttgccctccagccaaggcctg

SEQ ID NO: 35451 - DNA, 473 bp, Mus musculus
  source 1..473: mol_type = other DNA
ctggctcagagcacctcaacttgggtggctttcctaacgctgctgaggttggggaaactgcagcacaggtctctccctggcccggggctttctcctgtggagacagcagaggcattggggggaagagctagcttctgtccaccgccggggcctgcccgggatcctgaaacccggcatcctgcctcggggtgggggctgggcatatgaccccccccacacaatatctcctgatagggaccaggaacgggcagggccctggttgcgaggagtcgcccgctgcccactgcgcccgcccccaccaggacgggagtcggcacccccaggctgggctcagtctccggggttgtcactccgagatcctctgggctccagagcgaggaaccctgggtaccctattgctcccaaaggtttaagcagttgcgttgcaaatttacatatatctgcatgtcattaacataaactatccctggaca

SEQ ID NO: 35452 - DNA, 638 bp, Mus musculus
  source 1..638: mol_type = other DNA
cagagccctgagccatggacatctctccgggtaccgcctgagccgtgtgggcttaggctccacccaactgttcctcggcacagtgccaggatggggtgggtctgtgtctctgtggcttctacacaaacagatgcaacatgggcagtctgcgggggtatgtgtgttgcttctatacccatagcatgctacacacatgtggcacctgtgagcttctacaatgcattcaggacctgagcgcatgtcaatgcatatgtgcagcatttgcatgcacccagccaggcaatattgcagtgcacacgcagggcacctgtatgcatatatagtgcactgcacagggacacgcaatgcaatatgcactgcataatggggaggggggagaaaacgctttagcctccacagctcggctcactctgcagtccaggcggtcacaggcagggtgggggcttaccctgggcttctcccgcgccggcgcctggggcccagggtggggagggggagggcgcgcttggctcggctggcgctgctccccctttaacaggaggcggcgcgcgtcgcccccgcccccccgccccttctcccgcggctcctcgcgcccggcccggcgcgcgccccctcccgggcccggcccgcgcaggcgc

SEQ ID NO: 35453 - DNA, 371 bp, Mus musculus
  source 1..371: mol_type = other DNA
aggccctttccccggccttggaagccaatcctgtggagaagacagtgaggctcacccacccagcaagtggctagctgagctgggccgaagcctggtacctccatgatcctgtcttcgggctgggttgggcacagttgctggcacctggcagtgactccaccccttcctttcttgctcagtgaagggagagagtgagaacattgttccgggaataagaatctcgctgatttataaaaaagcaaatggttgtcaaacaccgccactctcgatgtgtatgtcaggcccagacacctctggccggcatgctgagcaggagacattttataggataccatgagatagctccagctagggacataggatgacggcca

SEQ ID NO: 35454 - DNA, 549 bp, Mus musculus
  source 1..549: mol_type = other DNA
tagcctagaatatgcaaactctaggcttgcctgtgtacacgttccgcacatacacatacaaaataaattaatttaaaaaaaagtcttcttaaccaaccttctggagtccaagaggactccctgaccctatggggagtggtgctctatcccctcctcccagtgcaagcagaggttctacagcctaggaatgctaggcccaggcactggaaaaagctgaccaccgaggcttggtcagcagccacgtcgcgggtggaggtctccagctttctgggggggcactaaggaggtcccgggcgcgcctagcctggcctccctcccgccagccagccagccgcaggcgccccttccagggcagctctgggcacgcagggtcccgccttgctccgctcacccgcaggctcacctggctggggaagcgggacgggcgggcccgggcgcagggccaggccaggagcgcggcggtgcaggccaatggccagtgcctccgcagccgccctccagcctggcgggccggcccagctgtgttccattagcctcttggcaggcttc

SEQ ID NO: 35455 - DNA, 373 bp, Mus musculus
  source 1..373: mol_type = other DNA
tttttatttaaaaagtatagtgttggcactgtagatactggggatacaattataagcaaatcaaacacaattcttgtccacatgagagtttttgtgacagagcctcattatgcagccatggctagactggaactgtctatgtagctgagactaaaggcatgtgccaccaggcccggccacgtgggtttaggtaactaagtcattgcctttctgagcctcagtttcataaagataggagcacgtacccacgttctaaatgatcacgacagtgacgtaactaatatgcgtcaggttataatatggccttgccaggttataatatggccaccgctggccaggcccattgacagcctgtccgggcattgggagcagg

SEQ ID NO: 35456 - DNA, 609 bp, Mus musculus
  source 1..609: mol_type = other DNA
gtagtggtggggtccacccctgctctgtggcccctcgacgctccccaccccaggtgcgtgctgaatgccggggctccagctgggtgacctcgagtgcagacaggccggggctccctcccctctcgctcccctccccgcggcgcgcagccctccctagccctcccgagctaccgcgggcaccagagccgggaccacgcagccactgagcggacagcgccgcctcaggagggggctaccccgccgcgttccagcaacggaggatgcccggggccgggagccaacaggtgcggggcgtgggcgacccccaggactgacttggggattccagctctggggacctgggtgccggaagactgcgccaccccccactggaatcctcccagaccccctaaggagcagggaggtcccgctgggaaatcggtaggccaatgtctctgccccttcccctagggctctcgaaaggactgcggcctgcgcaccggctcagcgacccctggcggccgtcggggagcatctcggccccggggactccaggagacctagcaaggggggtcttgagaagcctgggcgtgaggatcctcctttcctaggaaggtgcttacccgcact

SEQ ID NO: 35457 - DNA, 407 bp, Mus musculus
  source 1..407: mol_type = other DNA
ctgcagtctcggagaactaagagcctagagagtcctctggccctgggcccaatctgtgctctgcagggggccccagctgccagggcccttgatgtggggcccgccacgggaccttgggccaagaaggatgcccttgggcctggtgttgggcaaggtgcccatcactgggggagggcagaccccacaaggggcggctgggtaagctcagactccgcaccgcacccacctcctggggaggagctgcccggagctccgtgagcctaggcagcttccgagctgctgtggcttggagtggcccccagcccagggtcactgtctccgtgagttgcagttctgctcccggccccgccctcccctcccacagtccggggttggggcgggtgctgccggcagggcggtacaaaaag

SEQ ID NO: 35458 - DNA, 339 bp, Mus musculus
  source 1..339: mol_type = other DNA
caccatagggacggacctacacaggttcgaacctcagcactgcctctgaccttgggcaaagccccgagctgtcagtaataactatctcccccaggctgacgtttctgacatctctggacaccagctgctccagcgcgtcctgagtgccaccaccctaatcggtcaggtgaggcagcaagtagtggtggggtccacccctgctctgtggcccctcgacgctccccaccccaggtgcgtgctgaatgccggggctccagctgggtgacctcgagtgcagacaggccggggctccctcccctctcgctcccctccccgcggcgcgcagccctccctagccct

SEQ ID NO: 35459 - DNA, 399 bp, Mus musculus
  source 1..399: mol_type = other DNA
tcaggcttaaaacccgggtgacccagcaggtgactgtgcctgcaaggaaaggcagactttctgcctcggagaggtctgtggccaggaatcatctgagagcttctgtcataagagctgtaacactgccgcttgggaagaagtctccagctcatcaccttggggcccagcagctggtcttgaacaagagttgtcaatcttggtaaagagggagggtaattcccaccccttctattactgtcagacctggctttcccattccctgacactcagggtttcacggctgaagtcatctgcctccagctttgctgtatggttaagacataaaaataccagagttctaatcctatccgatttagggccagagtaactgagtaactgagtaactgagtaagggattaa

SEQ ID NO: 35460 - DNA, 265 bp, Mus musculus
  source 1..265: mol_type = other DNA
ctctctctctctctctctcgtgtgtgtgtgtgtgtgtgtgctgtgtgttctaactttagtttcaataggggaaactgagactcagagaagcaaagtagcctcccttaatgtaacccaggctgacctagatctggctatgcagccaaagataatttttcaaatctgtatttccaaaatcctagctcagagttgagttgggctgggaaatgtctggcgccagtacctgtcccaggtgagtcctaggaggccccgagcgtcgccgggt

SEQ ID NO: 35461 - DNA, 340 bp, Mus musculus
  source 1..340: mol_type = other DNA
atgtaacccaggctgacctagatctggctatgcagccaaagataatttttcaaatctgtatttccaaaatcctagctcagagttgagttgggctgggaaatgtctggcgccagtacctgtcccaggtgagtcctaggaggccccgagcgtcgccgggtggggccagccaagcgcctggagtcccaccggatccgggatccgaggccggtgccccgagccccgcgcccctcaccgccatgggggcctgtctcggggcctgctccctgctcagctgcgagctgctccgcttcggccgcggtgcgctggacagctggtgtcgcggggaggggtggggcgcggc

SEQ ID NO: 35462 - DNA, 296 bp, Mus musculus
  source 1..296: mol_type = other DNA
cttttgtcttcgcggcttgaggcgctgggcagctcagccatcgcaagagggctcaaaggccactagaccatgcgagcctctgagcctcttctacaagaagaggggcccttgctgtcaagccttgacaaccccagtttgatacgtgggacttgggttgcgggaagcgccccgcagccaggccagggatgggcaccaacaggaccgcgggcgccgctgacgtaggcgacgggagggctgtgggggatgggccccagccctttgcgggagtgcaagccccggcttcctatttcgggagc

SEQ ID NO: 35463 - DNA, 439 bp, Mus musculus
  source 1..439: mol_type = other DNA
aaaaaagatcatagttacacagatctcttctcttctacaaaaaagtttgccttccccatttgcaaagtaacagcttcttttaccatggttaatggaaatgttaattacaattatactttcctgatgaagatttaggaagcttgaaggttttaaatgattcaatgcgggccaaaggcgggatgactccccacttaccgcctgcagcaatgcccctggagtcgcctgctgcggccccgctccggggccggctcctgccgctgcggccgggaaccaggggtagctccgggccctggcggcagccactctcctcggcgccgccactaaccgcgccgccgaccggaggcgccgcgcaattggctgagttcttcctccagaacttccggagaggagcaaccaattgcccattctgatgacgtcacgtcgcggagctggcgttctc

SEQ ID NO: 35464 - DNA, 348 bp, Mus musculus
  source 1..348: mol_type = other DNA
aaaagccttcaagtttatattagtaactcacagcaaatggtttttgtttaacatcaaatttgtttaacacgtttcccacttcggaagaacccggggacataaattaaagcccttttaaaaagacggctaaatcagtccggcactgaagcctggaggccaggactcgggccagcacagagctgttgagtcctggaggacagccgcttcatagctaggcacccacgatgcactgcgcgcccgagggggcgggggagaacgccagctccgcgacgtgacgtcatcagaatgggcaattggttgctcctctccggaagttctggaggaagaactcagccaattgcgcggcgc

SEQ ID NO: 35465 - DNA, 324 bp, Mus musculus
  source 1..324: mol_type = other DNA
aagctgggtcccagtcccacagactccaggatggaaactggctggacacagctgccattccctaacagtggctgagaaatcatcaaatttaaaacactattccggtccctgagagaacggaagaccgctcaagcgcactctggctttcattccaactccctcagctggccaagctaagggctactgtctttgcccctgaggcccctgggcgggggtggtccagagagctgccagcgcgcaggacccgcacccctccctcgcctccctccggggtggcggccgagccacgtggtgggccgggaagcggcggctgccgagcgcccg

SEQ ID NO: 35466 - DNA, 402 bp, Mus musculus
  source 1..402: mol_type = other DNA
gagaaactctgtcttgaattggttaagagcactgactgctcttccagagtgcttgcaactaatgacctttgaacaagggtcctgtgtatgttacactggggaatcgaacccagacactggccaggctgtgccaaggttcaggcacatcccccccacggcagcccgggcactccgtgcgcgctcccgtgcctcccaccccgctccctccgcggcggcggcgcgcgctcgccccagcgggcgggcacagcggttgtgtggcctgcgagccgagttcacacaggccctgccgttggcatggcaaccgggcaacctgttccagagccgcccgcccgcccgcccgctccgcacacgccgctgccaccgccggagctggggccggcgccggcgccgctcccatgatgc

SEQ ID NO: 35467 - DNA, 540 bp, Mus musculus
  source 1..540: mol_type = other DNA
tgaaaatacagagagcctcagcctcctaagtcatgagtactggggttacaggcagtctaccgaggttagctaggcaagccttgcatacctgtgtctttccaaggacacatggccatcaaatggacaccagcgtgtgagcagcagacgcgtgctggtgttcgccatgcgtgcctgtagctgacccaagcccctgcttcctgaactcagggtggctaggggcctgtgtctctcagacaaacagcagggggaaccccgagtcggggtcctctgacaccaccctactgggagcagagagacccggggtgctgtctggaaggttctcccgcggctcgcacacggcgtgcagtaggggggcagacgtcaacgcccctcgcccccccccccctgcgcggggggaaactgaggccgggggcggtgtcgcgtgccggtgtcgccgcggccccgccctcctgctcgccccgcctgcgcggggggcggcggcggtggcggcggcggcggcgacgcttcctgcgggcgcggccgctgtgggcgcggagccgc

SEQ ID NO: 35468 - DNA, 390 bp, Mus musculus
  source 1..390: mol_type = other DNA
cccataaaattatgttttgttgctacctcataactgtaattttacttctgctatgagttgtaatgtaaatatctgatatccagaatatctgatatgtgacccatgaaagggtcggccaccctggaggttatgatccacaggttgagaattactactctagagaaggataagaatagcactcctgggaagtgacagtattcgcctttaatcccaacacttggtaggaggccagcctgctactgtgaatcttccattagaactattagggacagatttccatatcggattctttttctagaaaagagcccctgggagtggtagatgcctcagtcgggctctggcccctaccgtctgagggcaaggcggaagtgaggcaggcagcctgtggct

SEQ ID NO: 35469 - DNA, 255 bp, Mus musculus
  source 1..255: mol_type = other DNA
ggaaagtgggctgatagactccatctctctgcttgcctcacaggtatgtggggatcactgtggactagatcagccgtctctcctcccagaagagggatgaggttgctaccaagcgtgcaaaggccccgtgggggctcaagtatccctgagcttctggccgaattccagctgtggctcgagttccttctgcaggcaaaggggcccttgtggtcagctgtgggggttggggcaagggtgctgtcccctgcccagtgg

SEQ ID NO: 35470 - DNA, 235 bp, Mus musculus
  source 1..235: mol_type = other DNA
tggttttacaatgtattatcctgtcaaccttaacattgttctaatagacagattttgtagaccaggctggcctcgaactcagccgtctgaaatgaggtatatcattttcatggcatcaatgagaaatcctcacttgcccaagctagtttgaggccagcctggtctacagcagctttaagccagttctgaaaagcgagcggcctcttttaaagaagggggcgcggtcacgagtagt

SEQ ID NO: 35471 - DNA, 304 bp, Mus musculus
  source 1..304: mol_type = other DNA
tgctggggatccatcctgagccctttgcaagagccgcgtgcacggatatttgagaagcaaatgggcctggtcttaagtagccactgacaactatgtgaatttcatattactgaaagtcagaggagccaagggttcctgggttacagtgcaacggatgcgttgaggtgccgaacaccggcaccggccgcacgccaaggccggcgggcccagggaaccgggccgcagcgcgcgacaccacgggacgcctcgagaccgcggaactcgcgcccgggggcctgacgtcagcgccccgctcgttcgggct

SEQ ID NO: 35472 - DNA, 542 bp, Mus musculus
  source 1..542: mol_type = other DNA
ccgggacagccggggatatacagaaaaacccttaataaacaaaaaaagaaaatagtaattttctgtcgtgcttaatataggcagacaggcaaagtttcaggccagcctggtctagtgtagctgtttttagacagacaccctagaagagggcatccatggttgtgagccaccatgtggttgctggtcagtgctttaaaaaataaaaattaaatctgagatgtaactcagagatagggcacttgttaacaattattggttttacatacctagtatcgacactgtagagacaatgggcccaaggtcatggatccactaacttaacacccgctcggcgcgcacccgcgcaggcacttccgggggaagtgccgctgccacggcgagctcgcgagaggacgtgctgcagctgtcgctcactcggccaggtcccgccccgcgccggcgcgcctccagtaaagccccgcccccgcccctgaccaggcgggaagcgggcgcgcgctccctcccgttcccctccgccgggggggggggggtagggagacggg

SEQ ID NO: 35473 - DNA, 827 bp, Mus musculus
  source 1..827: mol_type = other DNA
ccgctgcccgcggcctcccggcgccgggaccagggcacaaggcctcctggagcggctccagcgtgcggccccgaccccggggcggtgctgttctggcccggacgcggcccacggaggcctcgggcggaggaggtgattcatccccgggagcccgaatcgggccggcgagcgatccaggaggagagtccgtccggcgaggacctgcgtccagcactggcagtcccctgcctccagccccggctctagcccggccgtggggggagggggaggcctcttaggagaatcctggagctggtctcggccagagcggtttcccagagtaagtctctcctgctgcagctccagtgccggctgaggagccggagtcagagacacctccgccggccctcgctgcggtatgtaaagcgcagtaagggggaggtggggcgcgcgcgcgcgagccccgcagccccgggcgatccgagtaccccctcccctggttacttcggggcggccacgtgcggggggtggggtcgagctcgggaggtacttaccccggccgcgatcgcaaggggggcccgcgcgggtgggcgggcgggcgggcgagcagagcgcgcgcaggctgcaggagccccgcagccccggctgcacccgagccccgcagccccctccctgcgcaccgcccgcgggcccggccaacgctggctcccagctccgctgcggaaaacccgagcgggggcggctccctgccttgcggccccgggaaaatccgggggtggccgccagggatctccaagcggccggccgaggcggccccgcgcatccctcccccggagcccggcccgtcg

SEQ ID NO: 35474 - DNA, 493 bp, Mus musculus
  source 1..493: mol_type = other DNA
tatgagtcatatccataaagtacatatggtagaaaggtatttcctgtttctataaatctctctgagagttcgaggccagcctggtctacagagccagccagggctacacagagaaaccagcagctgaggtcatcaacataattatttgtacgagcctagatactaggatgatggaacactcatcataaatttattttccttagagaatgagaagacaagaaaactgaaactcaaacttgtatttttaaactttaaatgtcctaagtaagacacgtgagaggagtgctatcatcacaggcttgtctttcatttcctgtattttaaaacttgtaaggtttgagatgattttaaacacgtacagagcgttccactcggctctgacagtggtcagctcctgagctgctttccttgtatattttggaagcaaatcttagatatcatacaaatttagctgtaaataatttgctagttcactaaaggtagttaccttcct

SEQ ID NO: 35475 - DNA, 502 bp, Mus musculus
  source 1..502: mol_type = other DNA
ctggcagggctgagcctcagtatgttcttacaacagaaccttctttctgctctgtagggaggcagcctgttcagacatcagcctggcaggatgtagaagggtcaagcggcctctgaaacttctagagagaaatatactcttctcaaatctttggcatggtctcaacgcttaagattccatttcaggtcttaacatagctgccaggagaggtaaattcccaagccctccatggggagaaaggtttcacacgcgcgctgctggagaccagaacccagctccagctcgggttcaacttgcgcgtgcgcgcagctgctaccctcccctctccttaccgctctaggggagggggaggtaagacgcggggagcccgaacagggcctcagccaatgctctggcgggccgcgggcccggccccctccttccctcccgcacggcccaataggaatttactacaatgttgtggcgagccgggggggaggggcgcgggcgggccgcgggcggg

SEQ ID NO: 35476 - DNA, 335 bp, Mus musculus
  source 1..335: mol_type = other DNA
ggaagttatttgccctcagtgaccctcagtttctccatttgagtctcactctccagggctccctggcatggtgaatactcccttaatctcatgaagagcgctgggagtcagccagcttcctgaccttgcacctcttcacacacttttgggtcccagacttggtttgatatataccaaatgtcacttatcctcaagaaaacatcagaagatttctagtctatgtcgtaggagctgctctaggctgggcgtcccggcctggccgcacctgcagcccccgccccttcccggttgcgacagtcgggctactgtgcccgcctcccgaggggagggcgggg

SEQ ID NO: 35477 - DNA, 418 bp, Mus musculus
  source 1..418: mol_type = other DNA
cgctcaagcagcctgctagctcagagcaatgagccagacaggaaagttgtgtctctaataacatacacacatctgtccagataggtgtgacctttagattttcttcatcgtgcagtcaactagcggctcgctcaaggagaggcgggaggcgggattcgcatccaggttcttctgactccgaaggggccgggctgggggcacctggagtcagcggagcccaggcagggagcgcgcgcgaggcctctctggcccagctcggagcccggtggtgcagcgcccgcccccgatcgcgggcgcagactggcggccgcctccggaccacgtggtgcgcgcggcggctcggggctccccgggcttgggcgagcactgcgggcggtcgaccgggcggaggaggcgggagcgagcgctgcagcctgcg

SEQ ID NO: 35478 - DNA, 594 bp, Mus musculus
  source 1..594: mol_type = other DNA
ggcactttgaacttgttgaaagtctttaaatttaatgtgtcagaaagcacttaatgagtcctacaacagacttcaagaaagtgtgtgtgacaaaagtccagagtttactagattattttggggtcactgacttctctgaaaaaaagagagtgtatatttttctccctcaaaattctgggccgacctccatgaagtttcgggctcaagtcctacacagagtagaagcctctgccccattaagaaaggggcttctgcgtgttttcttaagacaaaacaattattctctaggtgtttgccaaaaaactccagtggtgacccccggtgccacccagggctcctaggcccaaagcggcggcggtgggggcggggagaccgcgcgcgcaccgcttccgctcctccagcccagcagagggcgccacgggcgcggctctcccttcccgagatgcttcgcgccgggcccttccgcgtgggtcagcgactgtgagagtcagcgctcgcgccgcgcgcgccgcccgcctctgccgctcggcctcccccattcgggctgcgagggggcgggcgcgcgctccggagcatagagacgggcgttgagct

SEQ ID NO: 35479 - DNA, 577 bp, Mus musculus
  source 1..577: mol_type = other DNA
tcacgcatgcctggtatctgacgtggttggtcggagaacaatacatgctctcaactgatattataaataacaaaactgttgtgaaatatggagtcattgagtcagaactgacctggaaaagaatccttcaaagtggtggtgatctttgctgagttcaaggccagacttgtctcgaggacagccaaaaaaaaaaataaatgaagttgtggtttgctttggtcaatcctgaggacaggatcctccagacgatttcctccagacgatttcctccagacgatttcctccagactatttcctccagacgatttcctccatccttccacctagaataatttttccctgggaaatcctttgcctagcaggtgcaaggccccagataagaattctagtataatctatagttgccagatgtggtgcatcctacctgtacagaccagaggtcagaagagcttgaacttgaggtcagtgtgggttctaaagtgaaatcctgtttcaggtaaacaagcccagtttgtccaagggaccccaggggactcctgtccctctgttcaggactgaggaggacatcagaaagaac

SEQ ID NO: 35480 - DNA, 343 bp, Mus musculus
  source 1..343: mol_type = other DNA
accctgttggcctaccactatgtagaccaggctagacgttcctgtttaactttcaaagatgagaatagtacttttcaagtatcatttcattgtacatgaacgacatgtacccactgcacagttgttgtaccggttccaaggaagttcaaatttgaactccaatcccgagatgacctctgcgaaggcctaagctctcaggctcccctaaatcgctaggctgaggggggaggtgtatcccctgcgcggcccgcaataaggacgcgtcccctttaaggcgccggctcgcccgccgcggcggccggaagtgctggagcccggcttggcggcggcggtggcggcggcc

SEQ ID NO: 35481 - DNA, 458 bp, Mus musculus
  source 1..458: mol_type = other DNA
agccagatctgagtgcacacgtgctgcctcatgtgagctttggctttctgactgtctctttttaggcatcaagggagtcagtcatgggcttagagtcactatgactctaagaagcactgtatgacctgggacaagccacatgggacaagccacacctttgagccttggactcctaagcctaagcctaaaatagtccactaaagctgaatctaagtggtgtgtagccctggctgtcctggaactcactctgtagacaaggctggcctcgaactgaagatttatttatttattatatgtaagtacactgtattctctggctgccctggatggaactttgtagcccaggctggcctccacagttgtgggattaaagactttttaattcctttatactgtgaagcaaaagtggtaactgtggtcttgcccgaccaactacatccgggatccaggatcaagtt

SEQ ID NO: 35482 - DNA, 472 bp, Mus musculus
  source 1..472: mol_type = other DNA
cctctttgtgcaccaggaatgcacatggtgtacatatataaatgccttttccgcaaagaaaaataaggttataaacagtttgccacttaatggttaagcccttgcatccaggattttggaccaagagggtggatgaaatggattcttccgttgatagctctgagatgtcagacttctatacttgaatctcagggcttagtggtttaacagttactgtaccagcccgggctttggagtaagaattttcaattcaagttgagaacctacatccctgagggactgaaccagtccctcacagacagtgtatgttgactacagattaactaataggcacaatcagcttggaagctctccgaggccgtcggttaccggtcacgctcgtgccaagccaggcgctgggctcctgcgcctgcgctagtgaggcgcgcgcccggcggccggaagagccgcgcgtttccgggttggaggcggg

SEQ ID NO: 35483 - DNA, 388 bp, Mus musculus
  source 1..388: mol_type = other DNA
cccatgtaagattacatgtgccattatactggtttattttaattaattaatttatttattttggtttttgagacagggtttctctgtatagccctggctgtcctggaactcactctgtagaccaggctggcctccatatttttaaaactatctgatttcattgaaattcagaataaatcctagaatctaggtctttgatgataagtcagagacctgaattcggttcctagcacccatatgtagaacataacgtccaagttggaggctacaagtggccacctctagctgggagcagctgttttgcatatacaaaaaacgacacaacagttctctttgtgaagagctttaatatacagttgaaagttggttagactttaaatgccactgt

SEQ ID NO: 35484 - DNA, 495 bp, Mus musculus
  source 1..495: mol_type = other DNA
aaatgtcacctctctactttaaactgtagactgcaatctggaattataagccaaataaactatattcccctatcaaagatcagcagttaagagcactggctgcttggctcataaccacctgtaattggatctaatgctgtgtctgaagacagtgacagtgtactcatatatacatcaaataaataaataaatctttgaaaagaaaagaaaaaaagaagaacaaaattttggttttttgagacagggtttctctgtagccctggctgtcctggacctcactttgtagaacaggctggcctcgaactcagaaatccgcccccacgcctggcttctgagggtcattctttaagaagatctgccagcatgctgttaccctctaggccatcccgggatgctccgggggattaatttgcaaaatctctttattaagcacatccaaatgtggaaaaccctttctaagatcggtttcccagaggcgccgtgcgtcaggtggat

SEQ ID NO: 35485 - DNA, 254 bp, Mus musculus
  source 1..254: mol_type = other DNA
ttcccagaggcgccgtgcgtcaggtggatctccggatgattcgtgagataccgagcctgccgggaagggaccggatttttccggcgcagtgataactcagggccccactttctcgctttctgattgcaaaaagccgccattttattcagctaaacctgatgtccacagcgcgttaaaaagcgtttgttatagtcaggaacctatcccaatgtctaaagcttcacgtattgacttttcaggcgtctctctagtag

SEQ ID NO: 35486 - DNA, 226 bp, Mus musculus
  source 1..226: mol_type = other DNA
cccactaagttgtcaaaaaccaagtttactgagggttctgtaaaggtccttcttagcttgtacgatctctgactagagacagactagtgtactgtgcggccgcggctcctccacagtccctcggttttattaaagagcggggcagtccgcccacagagaccctcttcagagccggtgccagctaggcctactgtgccccagccgaggaacgccccctgggggggcc

SEQ ID NO: 35487 - DNA, 595 bp, Mus musculus
  source 1..595: mol_type = other DNA
tcaggcctgtattgatcatctattggtaaataaacaatgccttggtcactgtcacagtccctataaggtaatgactgggaatatggaacaagattattgtggctaattcttttccaagggctgtggctgcctgtagccatgggatagtgcctgcagctgcccctatatatgtatatcaggcctcaagttgagcgtatttacaacaaatgtttcttctgcaggttacactgaagagtctgagaagacggcctgtcaggctcctaactggctaagacagcctgaccctccggtttttaaggaggaagagcaccctgaagctggcctcacagcgatgcagtctgctgtagagcagcaggccagactcagacatcttgagaactgatcagtattgctgagtaattttaagggccatgtaaccagtgaagcagccattatatatgatttggtctacacttgttgggtaagcttaaggattgttaacccttttcctaagtagtatagcagaaattcaggtttgacctccataatttatgtctgaactagttagctgttccaaagatgtgtgccatgttggctggtatttgtcaattgaaca

SEQ ID NO: 35488 - DNA, 343 bp, Mus musculus
  source 1..343: mol_type = other DNA
acaaacaaagtagattcaaactctggaatctagaaaatatttctctaggctttttttttgcatttccaatgagtgagcgtaaccctgcgcaggcgcaggcatagtcgaccacctgagggtttgcccgcgcggtcccgcacgggctccgcagacaggcagggtcgcggctgggcggacccggtgtgggaggccgggctcactagccgagcatggcgtgaggtcacgcgcctccgagcccagtaaccctttcctttaatgttcactttaagaggacaggctgtagtcacagtttcctccagctggaggtctggcaaaaggaccctgtggcattttgtcaaaaaaa

SEQ ID NO: 35489 - DNA, 382 bp, Mus musculus
  source 1..382: mol_type = other DNA
tggaatgatgggattgtaggcggtgccaccaacccaggcacactttacccaaagtccattaaagttgtgaacatttcatactttcagactatatggcatttccagttctacaactgtatacatacgtggtacacagatgtacctatacatataataaataaggaaatgttattcatcctgaatgcctcttccacttagactaattagtgtataggtcttttgagccttctgcatatataatttgaaaacaagaaccatcagaattctagtagttcctccagttggtatcccactttggggaggagcagccgctcgcacttcccgcggtggccgccaggggccgcccggctctgcttctggccagggtcgcggccggaggccc

SEQ ID NO: 35490 - DNA, 337 bp, Mus musculus
  source 1..337: mol_type = other DNA
cggacccggtgtgggaggccgggctcactagccgagcatggcgtgaggtcacgcgcctccgagcccagtaaccctttcctttaatgttcactttaagaggacaggctgtagtcacagtttcctccagctggaggtctggcaaaaggaccctgtggcattttgtcaaaaaaaaagactccgacgtggatatcccgggaggtcactctccccgggctctgtcctagtggcgagcgggagcttagggcattgcccggtgatgtacatccctttcccctgcatattcctacgacttctcagagtcctgtggaactctaagggtttaacttactgattaaag

SEQ ID NO: 35491 - DNA, 304 bp, Mus musculus
  source 1..304: mol_type = other DNA
tccagaaggtccactgttgactgaggtctctttgatcccagcactctggaggcagaggcaggcgggtttctgagttcgaggccagcctggtgtacaaaggacagccagggcaaataaatatttcacaacaacattcatcaggcttaatttcatgtcttaaaaatctgggaaacagcattagtcaggccctttacaaacaaagtagattcaaactctggaatctagaaaatatttctctaggctttttttttgcatttccaatgagtgagcgtaaccctgcgcaggcgcaggcatagtcgaccac

SEQ ID NO: 35492 - DNA, 409 bp, Mus musculus
  source 1..409: mol_type = other DNA
ctggtgtgtgacaccacaactgggtttagccctggctgtcctgtcactttgtagaccaggctggccttatttttaatgttatagattgcgtatttgaaaggtataagtgtactttcacaaaacaccgacttgtttgtaagttttttgcacttaaaactggttatcaatagtttgaaacaaaccgggagagtctgttccgagaccttccccttgctcagaactgggcaaggtgcccaaatccgtgcagtgcaccggactctggcggcgcatgcccagatcggcagagtaggggtcaggcgcctcgcagcggagggccggcagttcccgccgctggccactgcagtggactacaagtcccgtgaggctccgcggcggcacctccgccccccctcccctggggccgaaggct

SEQ ID NO: 35493 - DNA, 428 bp, Mus musculus
  source 1..428: mol_type = other DNA
catgtctaccacacggatgcagtgactgatgtagtcagacgagagagcagcaggggctattaactgctcagcccttattaattaacttatttatttatttatttatttatttatttattaaaaacctcacaatattgtttcgttgaatggctctgctggagagatccttaccataaagttatggtatgcactgtaaattgaacaagtgttcctgctgaggtctatatataaatacacaacgctgtgaatttaatttttaacttatttcaaaatttaaatatggtatccaatcggctttatgagatctgatcaaaacgtcctatgacagtcaccttccacggtaccactctagactttgcgcgtgcgctcttgcacaccggtgccagaaggcgggcgcgttccttgccctctcgggcggtagcggagtc

SEQ ID NO: 35494 - DNA, 211 bp, Mus musculus
  source 1..211: mol_type = other DNA
actccttaacccagagactccacaaataaggtgatttccttggttccctcagggcgtggttagaactctctgcagacctaaccagtccctttgcagcatctgtgcacagctcccagctccggagggaggtgtcggctccgcctccccgagaaacaggcatggctgcgccgtttgtgtccccgccctcccccagggaccgcagcgggctgac

SEQ ID NO: 35495 - DNA, 326 bp, Mus musculus
  source 1..326: mol_type = other DNA
tgtgacacttaataagtaagtataattttaaaaattaaataacaaactcctacatgcatgctacctcaatgagatctgttgtaacgtatttcacagtggtccaaagatgttgaactactgaagaggtcatgaggaattataaaatgcagtaaaaaaaaaaaaaatttttttgacagtttttttttcacaggcctggctgtcctgaaactagcactccagggagtcatgtagatctctgtgagtttgaggtcagcctggtctacaaaaacctaaataagaattgtataagtagatgatttctttctgcggcccctttaagttcagct

SEQ ID NO: 35496 - DNA, 323 bp, Mus musculus
  source 1..323: mol_type = other DNA
cccagcactagcccaataggctagattaagctagattaagctctttcacaaagttttctctgagaaagtgacattcacctcttaagagataaacacgatttcatatgtataaacagaggtttgaggtcgatatccaggctgtcggcatcctaggcatggctaccacaaacttgtacatttttaataaaatcgacgagaccaaaagccaagattcatcttttgacttcgctctagagccttgtttattaactgttaactaagggataggcgtctagattggcagttcagccgccctcgcagttagcgcgctaggagagaagcag

SEQ ID NO: 35497 - DNA, 242 bp, Mus musculus
  source 1..242: mol_type = other DNA
aaggggctagcttggctactcaggacctgaggctaggcactgggtggggagtcagaatccctgccttcttggctctccaagacagacttggcgccatgtctcaccataagacagactttctgatacctgagctgctatccatagacaggtctatcatggagcctggctgacctcatttgcgtactcacttgcagctgaactctagctcaagggcttgagaaatttagaggtatatgcgctgg

SEQ ID NO: 35498 - DNA, 173 bp, Mus musculus
  source 1..173: mol_type = other DNA
ggcgccatgtctcaccataagacagactttctgatacctgagctgctatccatagacaggtctatcatggagcctggctgacctcatttgcgtactcacttgcagctgaactctagctcaagggcttgagaaatttagaggtatatgcgctgggcagtactgagtctggctgg

SEQ ID NO: 35499 - DNA, 341 bp, Mus musculus
  source 1..341: mol_type = other DNA
aaagcggtccggtgctcttagtctttcccttcaaacatgaatggaattgaatacactgagagttgtattttagaattaatgaagcattaaaaaatgtttctgagctaagcccagtctgatcttccttttctacaatttgccaagtgtaatataatactaggtataaactaaattttcggatagaaatgttcactttgagttagcctttcatttttttttttagaacttactttcaaagatgacagttcgagatcagcctgatgtgggcgggacctaagccttgccccgccccgagacgccgcatctacttccggtggctagggatgcgcatccgggtcacg

SEQ ID NO: 35500 - DNA, 503 bp, Mus musculus
  source 1..503: mol_type = other DNA
atactgactctgctgccaagcctgcacgtactggaggtgttatgactgtaggcactgccagcccacccactttctcctggtaaaattgggcaacgttacccaatggagagagatgaacttttgccatcagtctccccccgcggagagtaaagtgtcaagtttcatgttttatccacaaaacttgtttgcggtacatgtcttggtgcattattcgctttaatacaaacatcaaggtctgtgcaaaaccccttagtacttttaaataaaagacttttttgatttggtgtgagggatcacagctgcggccggtaactctaaggtttccttgagactcaaaactgagttcgaggccagcctggtctacatcaggacagccagggctattcagagaaaccctgtctgctctgcacagggcaggctgggccagtgtaggggcggggccgcgggctcgctccaccccggacggggcgagatggggaagttccgcccagcagcccagcctc

SEQ ID NO: 35501 - DNA, 300 bp, Mus musculus
  source 1..300: mol_type = other DNA
atgtggagtgattcagccctcatcagcaaataactctgtttgttgtcaatcctcctgcctcaagagtgccagggctatccttgagagagggcttgcacatctggttttaaggctagcttttaaggagctaattcattcatccatccgtgttgcagctctgcaaggagaagacagtaagtcgatggtgcttcctgcattttctggaggctgactgaaccgaaatgccttcaattcgactagaaaactttaaagttgctcctaagtacttatgaatttctttcgcacgccctgctgggcaag

SEQ ID NO: 35502 - DNA, 284 bp, Mus musculus
  source 1..284: mol_type = other DNA
aatttgaccaggtcttgaccaactttctgaatttcgccttgaaaatgtccatattcttgcagttttgggggttagccttggctgtcctggaactcactctgtagaccaggctggcctcgcggcgatgctgttttctcaaaaccccagtttagcgagatagccatctctgacaaaattaagcttgcttaatttgaccaaaaattgtttaatcatttctactatttatttatgaatacaatatcacatccactgtcctatcggaaatttgccctcagtaaagatgg

SEQ ID NO: 35503 - DNA, 406 bp, Mus musculus
  source 1..406: mol_type = other DNA
tctctgtctctctctctctctcacacacacacacacacatattgcactcaggaggcagaggcaggcggatttctgacttcgaggccagcctggtctacaaagtgagttccaggacagccagggctatacagagaaaaaaaaaaaaaaaaaattatcaagtcttgatgttagatctggtcaatttgacccaagttagaattatctccagtgggtgggcccagcccatagggtgtaggtagtgccaaccctggcaaactgagcaaaccagtaagctgtgtttctgactaacctctgtgatcccagagttgtaagataagttttatcacattagaaaccttaagaaaagattcaattcggggcgcttcagagaaccctgtagggctcccgacctgaggggcgtggcctc

SEQ ID NO: 35504 - DNA, 416 bp, Mus musculus
  source 1..416: mol_type = other DNA
acacacacaaactaaaatgtattaaaggttttgggtcatgtacagatggcctatcatggccaccgtgcaggtgcctgctgagttaagaggcatcagggatagccctgcagctggagttacagtctgagcctccagatgtgggtgctgggaaccaaactttgcaaaagcagcattcggagcctcgtagttcgaatgctccaatgctcccgcagcccccggagaggcggagcgagggcggagcctcagcgggcaggtgggcggagcccgagggcttccgctatcctactgctcttttcaggcggcgcccccgcgtgactgcgctttacgcgggaaccctcccgcgtgatcgacgtccacgcgagccagcgaacggcctctgagcaccggagagcccgcccctgcgcccgcggcccgcc

SEQ ID NO: 35505 - DNA, 384 bp, Mus musculus
  source 1..384: mol_type = other DNA
ccttgtaaggtgaggctagcctaatgcttcctatgtcactatgacccacagagtaaacatttttgagaattggttaagttactaaaaatgcagcagtttgtccaaagttttcaaaaacagactacatgatttctgacacagtcgcctaatctatagattctcccagatctaagaaaattactggttttggggaattgaatcagtggcctcattagccgtacacatcagtgtcagaggacaaatgattaaaagccatcacttcttatctctagccatcacctgcttatcgctagtttctggcggaaaacgccctccgccagaggcgctcccaggagagcgtccttgcgttgcgcgtgcgcacgcacgcgctgcgcacaggctgct

SEQ ID NO: 35506 - DNA, 379 bp, Mus musculus
  source 1..379: mol_type = other DNA
catattcgtcaaggatgaatttttttcttagaatccctttcacaggatgggtctgttacaggagggggctgtcaatcaaatgccatctggctggcaacatgctagaaaggtgttgaacagttttgaatcctgtcgggtacaactgcacgtgtactggtcccattccatgctcatgcattctgccgcgcggagcagcaggatgcgggagcggcaggatgcgggagcagcaggatgcggaatgcggggcgcgccgtctgtagacgacaggctgaagaagtccggtcctgtagcacacgcgcactgcaggatggggcggagcgcgcgcatgcgcaccgcgatgggcggggggtcagtgcgcacgcagtcgcggtcccttccc

SEQ ID NO: 35507 - DNA, 315 bp, Mus musculus
  source 1..315: mol_type = other DNA
tgtgcggctccctttctgacttaagcaggcagccaaagttggttgacctgtgctgtccttcagcaactccagttgttctctgttctacacacccttgaggccagcctggtctacagagtgagttccaggacagccagggctacacagagaaacccagaaattttttggcaagatgccagtccctgtgtaaatgtttaataaattagcacattttcactaatagtcatggacatgtcatgtgtggatatgggtgtatctgtacatgcatgtgaagggatgcccatacagtgggcaatgcatgctccctacttttta

SEQ ID NO: 35508 - DNA, 296 bp, Mus musculus
  source 1..296: mol_type = other DNA
ttgagagaagcattcctatctgcatccatcacttgctgacaccggtgtctgtacactccccaggcagggggattgtgaaaaacaggccatgggccaagttatcctgagtggggagtgggagcctttgggatggccaaccccccacccccttggtatcccactctagtaactaaagggacaggtccctttggccggaacctcagggacagcgctgggagagcccatccacagcgggatgggagccccgacttctctggctgccgcctcctcctccgcagtcacagagaagtccgaga

SEQ ID NO: 35509 - DNA, 500 bp, Mus musculus
  source 1..500: mol_type = other DNA
ctccggaactcttatatctaaaatagaaataaggtctcgcaaggctccaaggaccccgtgctgcccgggtgctcagtaaatggcagccgcggcaattctcctcagaggcgcacattcccatctgtgccaaccccacaattgttcaaattcagaaggcatggtatctacacttttttttgcgccctcgccgcccgtggacgacgtttccagagcggctttcttgccaaacgcctcttctgataggaaaaacgaggtccgtttgggacaccccagaaagtaccttggcgcagccagagccccgagtaggggcctcggaacgcccggaatgttcctaacccttgaggaggattcatccggggactccggcatagggtccgctccgggccgcgccgtcggagcagccggagtggccccgcccgcacagcgcgcggagcggccgaacagggactacaagtcccggcgtgctctgcgcgcgctcccccctggggttccggatggtg

SEQ ID NO: 35510 - DNA, 295 bp, Mus musculus
  source 1..295: mol_type = other DNA
cgtgtgcaccctttttgaaaggaagtacagagatgctctagtatactaaatgtgctaaaggtgtttggctcacctgacagtggcctctcagaactagctccagatgccagcttcacctttggggtgagctgaagcctatgactcactcgcgcttgggacaagggctgttctttacacaaaaaacaaaaataaatcgtgtttcaatacatacttaaacttgggcgtcgatgtaccgtggagttcccgggacactcttatttaattggcacagggagccaatcgctgcgtcccgggg

SEQ ID NO: 35511 - DNA, 292 bp, Mus musculus
  source 1..292: mol_type = other DNA
ccggccgcacccggtcctgagccaccggtgagtagtgggccctgccgcgggtacccggagtctgggaggacacagcgtgcaggggcgccgggccggcggaaggctgcttgcccctgctcagggtcggggggtcgtacctgggactctggatgtgcagagtctgcataagcaggcagctccccacccccagtccgagcttcaggaaccgtgcttcccctattcacttaagctttgattcacttctttgaccacgtgtggccaagagggggacccctgtttagagggtggggtg

SEQ ID NO: 35512 - DNA, 365 bp, Mus musculus
  source 1..365: mol_type = other DNA
ccttgtaaccaatggccagagagtgaggggtcaccccaaagaaaggcacctttctagtaggaactctatgccctgggtgccccactgggcaggcctcctttgcagttacaaagtggtcaccacaggaaccctgctatcttgtagggtacctaggcaagtacttagagttcctggaacctgcccagaggcagagtccgagagggaggcagtacctaggctggcagggatccaggcctccagggttcagccctggcctctgggtgtggtaggaccctggggtctggacaccattcacttgcacgcaaggcatgctgggcccccttggcgggaggcctcagctaaaattagctgcttccctgcgcggg

SEQ ID NO: 35513 - DNA, 271 bp, Mus musculus
  source 1..271: mol_type = other DNA
gctgctctgagcacggagctgcggggaagtgaccaataaataattgagggacgcacctgtcctgacagcaacttacctgctgggcagggatgctgcagtcatcctgacaatgctgtggctgtcctgaggaggcctgcctcggggccctatcagaggcagagcctgtcatcctcaccggcgcagagggcgccgcgtcaaggacagagagccggctccggagggggcggggccgcggccacggtcactttttatgaatgggggagcgggcggc

SEQ ID NO: 35514 - DNA, 403 bp, Mus musculus
  source 1..403: mol_type = other DNA
tctttatggttttctaagaaataaaaatatgtataaaaccttctcccaatgtttggtccgagttcaagaccagccttgtcagggctaaacctggtctgggaggaggaggacttctcctaaacgagtaatgtaggaatttggtaatcaaaatctaaaatgatagctgggtgtctgcgtctgtcccagacacaccctgctgctgctcccggcctttgactccaggagaggagcactgggtggctgcgatctgaaagcacagttgaacatgtaaatttttttctgtcaatttacagactaaactttggtagtgttaatagatcctggcagctagtatttagttgctgacaaaggcaaatctgctcagcctgaccgtgtcctcaaatggtgtatcaccatgttgtat

SEQ ID NO: 35515 - DNA, 341 bp, Mus musculus
  source 1..341: mol_type = other DNA
tggtgtccccacagctgggaatagccagccacacctgtgagacagggttaaaaacatctctcatcttggagagatggctcagaggttagagcactggctgctctcccagagcctttagggtttaaagttctcaaccctcccaaccataaaattattttgtaattttgctactgtcgtgaatcataatgtaaataatgtttttgaaaggggggtcccggcccataggtcgagtagtagctatgttgacaaggcctgttctcacagagcagggaccaggtgactgagacagcagagcggggctctacctggaccctcccagaggtctcggcctcgctccagcc

SEQ ID NO: 35516 - DNA, 506 bp, Mus musculus
  source 1..506: mol_type = other DNA
acctaggaagatatatttttttccttccatgagacaactgtgaaacagaggcttcctaccgtttgttgaaaggcaaagcccaacatattatttttataaagttttagttttatttcatgtgcttatatatgtgcaccatgtatgtgcctatcaaggagagtgccaggactcccctgggcctgagccaccatgtgggttaaacgattatgaaacggccctaacctcagagtctcaaagtctgttcagggccctctaaggtttatagcaacttagattcatactatgatgttaatggagataggaagtttaccgtagaagtgcttttcagctccatggtttcgggtggaccaataaggtccacgtggtccctgcagggcgccctgggctgggcacacgtcttacgagcgcttgctttggcccgaataggggcacaggctgtttggggagcctcattgccccagggccgagggtggagcctttcccagtcgggaaagggctgggcccag

SEQ ID NO: 35517 - DNA, 401 bp, Mus musculus
  source 1..401: mol_type = other DNA
ctgtgtcaggtgctcatgtgtttcacatacatttatgagtcagagcatgtatgcacatacataaatctaaaaattaaaagacttggaatagaagatcatggtccccaaatctgtgtacttctcagcccatgagccagggcccttcagatggaaggggcccagctgttctgtgaacatggatggtcagactgctcagatcagcacagtgctagatctgggcctctttcaaagaaagtctggtacatacagtacagtcgggcccaaccacaggggcccacaaaactggccctgggttctctaacagctgttgtgggtgcacccagtgcaccctgaggagctgcagtccaggcccggttttgcaccaggccccctcctccacctcctcgggactggggcagcag

SEQ ID NO: 35518 - DNA, 278 bp, Mus musculus
  source 1..278: mol_type = other DNA
aaaagattccaagactggagcctggccactttgaagttttaaatgtcagcctgcatagtgctgtatttagataagtcttggatgaagtgtacgtgtcacacacagctattaatctacaaagacttgcgtttgaataacaactaaatctaatcagtttatagacagtagtaccaatgaatatcacatgctcctgcaccacgtgccggcatgcggaaccgcggttggtttccccgggggaagatcgaccgagacactccgcctcccggaagtgacagggg

SEQ ID NO: 35519 - DNA, 405 bp, Mus musculus
  source 1..405: mol_type = other DNA
tgcttgtttcttctttttaaaaacataggaacaattgtatctatcaaagagtgaaaataaaagtgttattacttagacgttggcataattgcttttctcccttagagaggagggtgtctccgttctgacttggttcctagagctcccaggtcacctagagcaaggagcaggctgaggctttgctctgggaggactcagggtcttagccttaggcccactggctgccgttcccgcgagcggtgaagccgattggccccggcgaagtggggggctcccccgctagcaggttagtgggcgccaccggcagcagacgttgaccgaggactagggcccgcgctcactagcgtagccgcggaccgtgagacgcggggccggcgcggagactgcgtggcgcaggcgcagtgc

SEQ ID NO: 35520 - DNA, 254 bp, Mus musculus
  source 1..254: mol_type = other DNA
aactcactttgttacacaagctgacgttgttttgaagttgatcaaggtaaggcctaattgtccttttaaaggggcattgccatcaaagcacccaggaaccaatggtagacaagcagttgagaaagctgtgaaacagaaaataacttgttcaaagtcacatgctaacaagaaaacactttgtagatagtacagtatgtcactcgtgtcctgggcgacaggggccgctgcaccgcgcgggcgctgacaggtctctc

SEQ ID NO: 35521 - DNA, 325 bp, Mus musculus
  source 1..325: mol_type = other DNA
aaacggggcctcctccgcttcagaaagaagaaagtgttctggtttgaggcaagtagctgtttctaagtcctgatccttagtctgccttttaggaaaatggaaggcttttgctatattattattacgagaatgacaagaaaacctgcccatgacacatatatttaaaatctgaaaaggagcaaagagctacatagatctttaaacctccatcggccgggccgccttgtcaacacggcaaccagacctccctcgacttctgccgctggagggcgctgtcccaaactccagccagcgctgggcgtgcggcccgcggcctataagtgtc

SEQ ID NO: 35522 - DNA, 211 bp, Mus musculus
  source 1..211: mol_type = other DNA
attggaggaatccacgtatctcaagcaccttccccacatggagacccggagcgctaagttctaggctaggctctcactgtcacgcgggcccggcagaggtgaaatgtatgacttttaaacattaccatcgaattcgtcacttatctaccccaaatttgggatgatgcccaaaccgccccatgtgctataagatgctgggcggcgcgtgcgg

SEQ ID NO: 35523 - DNA, 368 bp, Mus musculus
  source 1..368: mol_type = other DNA
tcccagggcagccttggctacttcccaggatcttgtattggaagaccgttctgcctcagagagcactggctgctcttcaatcccttacctgtgggcacaaggcacgcaagtggtgcatggatgtacaagcaggcaagacattcatacatataaaaacatttaatgtatgcctagctattcaaacattcttaaagagtccagagaactggggcccggacggcttcccaggaggcatgcatgccctttaagtaggagctttgcggcccggtaggcgcccttgcccgatgatggcccctctcagggcctcactctcctggctgggccggagctgggcggggcctcggccaggtgcgcggcggcgctcggcg

SEQ ID NO: 35524 - DNA, 409 bp, Mus musculus
  source 1..409: mol_type = other DNA
tgtcaagttgatataaaattaaaccagctctcagagacctcaatctgatagaaggaacctgctctttgggagtaagagttcctaagatagccaggctctctggaaaagttaatgtaataatcttgtaacagtatagcactctcaggtttacaaagtaaagcctgcatgcaatctcagtgcttggaagtttgtctttgccttggatacacggggcatgtctcaacaaaattaatgaaagagcattaatcctagtgcaaacagtttgtaaaactgttctactcaaactacgccctattaagatgtgagctcagagctttctagaaagctcccaggtatctcggcagcgagccccgcccactgccttggtcctcggcttagccaatggccagacgggaagggcgaacccgca

SEQ ID NO: 35525 - DNA, 360 bp, Mus musculus
  source 1..360: mol_type = other DNA
cactttagtgactttgagtaggtcacttcacttcttggagtgtcattggaaagtcttcagggttacaatggaaaggtccttagtaaggggaaggggctctgaatgatcttcctcccacagaggcccctggattggagtcccagaagggcggcctccgagactgtacagtgagcaaagtcccccagggacctggctcccttccctgtggcggtcaaggctttagccagcttcctggctggctcctgagcagtcccaggcactggctggttgagcggggcatccaggcagtgggcaggtggccctgtgccctgcaatggccacttcaaaggccacgtggagcttcctgaatggagtcaaggt

SEQ ID NO: 35526 - DNA, 262 bp, Mus musculus
  source 1..262: mol_type = other DNA
accaactgctcttctgaaggtcgggagttctgtgtctgaagacagctacagtgtacttacatataataaataaataaatctaacaaaccaaaccaaaaaaaatttttttttccctcgagacttcactctgtagaccaggctggcctcgaactcagaagataattttatgtgcatgagaattttgcctgcatgtatgtatgtgcaacacgtatgtgcagttccctcgtacggcgtgaggcaccacgcccggctggtggactct

SEQ ID NO: 35527 - DNA, 355 bp, Mus musculus
  source 1..355: mol_type = other DNA
cccagcctctgacagaggtaatctgagtcaggcaggggagtggtcaaagagttaggcccccaccctctacttcattaagtggcaccctgagatgccacctgcgcatctggggtgttctcaggccggctcagctaatggccccgacctcaatgggggaaactgtacagccagctccctgggctctgcctgggctaaagcagctcggtggcctgcaatgcagccagccctgaactgcagggggcagtctggagccgaaaggtgcctttgcaggtgggacctgcggcccccagcccttttaccttaaaggtagagccggaaaggaggaggcagggcccaggcccgctcagaccacgcc

SEQ ID NO: 35528 - DNA, 392 bp, Mus musculus
  source 1..392: mol_type = other DNA
ctcctctccagaggctggagagcagaatttgtgctatgagcatgagaccgctctgatagaacaaaccagatatgtagtaattacttcctgtctcttgcggctttgaagagagcagccttctcaccaagagctctgttttatccagataccatcctctgccccaagaccagggggagaccttgctccggcgccttggacagacctgagcccgagtgagcctatgtccttggtcaggatcactctgcggcagggaagcagcccagagcctgggagcagccctgagcacaaaagcccctccgtctcctggggtgtttgtgcctaaaagaacagtgaagatctggactgcctgtggcaccgtcggtcccttaccacgccacaggtgtgggtgagac

SEQ ID NO: 35529 - DNA, 433 bp, Mus musculus
  source 1..433: mol_type = other DNA
cgcctgcctctgcctcccaagtgctgggagctagcttgggtggagtttcagcaaaactcagataagactgcctgatttagcaagaatttgctaaaatatttctggacttccgagtgtgttttcagctgaaacagggactcacttgaggtgaactcaccaggagttagcccacccgttcctggttggttaggtctgttgtgaaaacacccacatctagaacccagggttgaaccctaaaggatatttcactcttgccctcagaggtgggcgagcctggagtgcccccctgaatctctgactcctaaggcagggtctgagagcaccggcagctgagggagccctggaggccgcatctgcagagcccgggctgggcgcaggaggcgctgcggagcgagccgggggcggggcggcagcggagaggccaacccgagcg

SEQ ID NO: 35530 - DNA, 481 bp, Mus musculus
  source 1..481: mol_type = other DNA
agatagagacccatctctttgttcccacccacatttgtggctgttgcaagataaacccctccctcagccagggctgtggccagaggttaacctcaagcgccagttcctgcgacagaaactgcttgagggagaatcctcgggggtgttctcctgaggtgggacagaggactgtcgccaggaggggaaaggcagggggaattcccctactttcttctcagaaggctttctcgtggctctggggcagcgcccgggtccagcctcggctcacaccgggggctgctcacggcaggggactggggtgagagccccgacccgggagcgcagcgcccgcgcacagagaggcctactcctcaggtgtcaccacgccgggaaggtgcgactcaccgccgccgcctcggcccccgccctagctggggtcaacatggccgccgaggaggggggcggggcgctccgagtccgggcaggagcggggcggggccgc

SEQ ID NO: 35531 - DNA, 803 bp, Mus musculus
  source 1..803: mol_type = other DNA
cgcggcccgctccctttggagcggccgggaggggacaggccaggctgaacgcggcgagcgaggcggcgcaggctccggaggcgcgggctccgggccgggttttccccgaagccttcggcggcggcgcagccgagcgaaagaggctgagggcttgccgccgccgccgcggctccttctctcccctcctcctttgtgaggggaagggagcgagtccattccacggcctgcgcccgctccgcgctctggtttttcaggcggccgcgacggcgctgggtcggaggagagtggggcgctctagctgctcagtcccgccgcccgccccgcccgccgccaagcagcagcctcggcccgagccgcggccggggaggcgaggcagggcgcccgccagagcagcgctcctactctgcctcccggcgccccgtccgccgccgcgcgccctccagcccgcccgcccgcccgcccgtcccgtccctcctcctttctccggcagcagaaagcggagagtcacagcggggccaggccctggggagcggagcctccaccgcccccctcattcccaggcaagggcttggggggaatgagccgggagagccgggtcccgagccgccagagcccggagcagctgagccgccggcgcctcggctgccgccgccgcctcctcctcctcctccgccgccagcccggagcctgagccggcggggcgggggggagaggagcgagcgcagcgcagcagcggagccccgcgaggcccgcccgggcgggtggggagggcagcccgggggactcggccccggggcggggtg

SEQ ID NO: 35532 - DNA, 687 bp, Mus musculus
  source 1..687: mol_type = other DNA
cctcccttcagtctgttggtaaaatgggggggggggagatcatgcccccagggccttgtcagagagggcatagtttgaacaatggtcagtcctcctttggggctagccaaagggggggcagccaagagcccaggcccggtgccagggggtcaggtcccggccgcggcggccgcggtttcgggctcaggccaattttgcaggcgcgggtaaagttcacgcggcccgctccctttggagcggccgggaggggacaggccaggctgaacgcggcgagcgaggcggcgcaggctccggaggcgcgggctccgggccgggttttccccgaagccttcggcggcggcgcagccgagcgaaagaggctgagggcttgccgccgccgccgcggctccttctctcccctcctcctttgtgaggggaagggagcgagtccattccacggcctgcgcccgctccgcgctctggtttttcaggcggccgcgacggcgctgggtcggaggagagtggggcgctctagctgctcagtcccgccgcccgccccgcccgccgccaagcagcagcctcggcccgagccgcggccggggaggcgaggcagggcgcccgccagagcagcgctcctactctgcctcccggcgccccgtccgccgccgcgcgccctccagcccgcccgcccgcccgcccgtcccgtcc

SEQ ID NO: 35533 - DNA, 240 bp, Mus musculus
  source 1..240: mol_type = other DNA
ccctagggcttcctaggaactccctggaaaagactgaggctgtaggttccctgctctccccaccctgagggccagtcttcatgaattggtgagtctctatcacagagacacgcgttgttggagatatttaatatatatatatgtatatatatatatatatataatacacattgtatatgtatgtctgtctctgctcagcagctggcagacctcaggccccggggaccgggaaaccacagg

SEQ ID NO: 35534 - DNA, 536 bp, Mus musculus
  source 1..536: mol_type = other DNA
ggagcgccattcggactccgtggagcataagactctagcttcgttttgcagctcactgtcagatggttgtgctagactttcacactgaaatccacgccaggctttgaactctgcttctgctccagctcgcacttgagagcgctcggctgggctgctgtggcgccgcggcgggaatgtgcgggggccacggcccggctccgcacgtctcagcccggagcaggcagaaccctccctctgcctctgctagcaagcgtcctgccccgagtccagtaagggagagaggtctggaggaagaagggcttgtcctccctgcaagcgttagcctccaggcccagcttccacattttgcagttgactgtgtgggtgcacgctgtgcagccagagagaatgagagcacatcctctgccattttcagccggttgctgccggcagcccagccccttggctgtggctgccgccggagttccggcgcccagaagcggcccccggtccgcccggccccggatccagtgagccagcgaacgagactttagtcc

SEQ ID NO: 35535 - DNA, 421 bp, Mus musculus
  source 1..421: mol_type = other DNA
tttcacctgagagtaagtctcacgacaccagaacttgccacggaagaggcgcggacctggcctgcttgggacccggggatcacatggagaccccaaagtgtgggctcccgtgatgtgcacaagctttcggaagcctaagggcttaaggcccaggctccttccacgcctcagtcgggatcaggcccaggacgtcccatgtaaatgtggggtggcagcccctccccctggagggagaaggcacatctgggttaacatcccaacccgcggagcctccggtgggcagggccgacagtgggctggggtctcctgactcccggcgcgttgggggcgggggtccgcgccgggaatgccgcgccgtggggggactgggcggggctactcaggccccgcccccgcgcaggtagccaatgggcgcggcggc

SEQ ID NO: 35536 - DNA, 539 bp, Mus musculus
  source 1..539: mol_type = other DNA
acgcaaccgagagcaagccagctcgatggtgtgtgagtctgcaaagcccaggttccatggcctctgctgagtgggggcagctgggtagctgcagcccagacccagagagagtgggaggggcgtgctcccgggctggggcgccggctgctcagcagtaggtgctgaaaggacagctcctgtgtggaaagtggactgctttccaggtgagcacaccgagggactccccacctcccggctctcagcccacgggagcccgtggtccccggggctgcggccggcgcgcttcccgccgcctctggagctgggcggcgcggccaggcctcacaaacccctctgctggggccccggcgggagcaggaggcgggagcggaaccccaagcctgccgcctcgcgcgctccgaggcgcgccccctcccccaaggcgcgccgccgtctcgagactccagaggaggtgagtttaaaccccgcccacgtgaccccaactgggccaatgagcggcgacgggaggtgaaatccggttctaaccggtccggggctcc

SEQ ID NO: 35537 - DNA, 443 bp, Mus musculus
  source 1..443: mol_type = other DNA
ttttcctcctgctctggggagggtcaggaatataagtgtgtccctccttcccctcatcaactaaggaaatcccgggctggctgcccctgtctgaagaagcagtccacagaccgttatcagagccctgtgaggacaaggggtggacctggtccactatcccaggacttaggactaatgtgtctgaacagaaacaggaccaggcagggtgctgcctgctctgctgggtcagccagaccgaccggccttgcagacttctgacccatatgtcctcgggaagcccccagggtcctgtcttcactccctgggggtcaggagacaaaaaggtaagcacctttgggctcgtcctaacgtggggctcccctccttagcaagggagtcttgagttcctccttcctgctgagagggaagtgagaaggaggggagccagaccctgccttctgggc

SEQ ID NO: 35538 - DNA, 410 bp, Mus musculus
  source 1..410: mol_type = other DNA
ctgcaaattataaagttgaagtgaccagcgcaagaaacccttctgatgcgttagcagcataaaaacacgtcagaattttttgaggagacagtatcccctctaaatttactaagcagaagctcggctaaaagaacacttttaagacaattttgtttttttaaagattaattttatgtatgtgaacactgtcgctgtcttaagacacatcggaagagggcatcagattaaataaacttgcgatcatccatagagaaactcaattttgaggtggatgcgtgggccgaataggagtatcggctcacgtgacctcggcctcccaggcgctgtttccacgccccgcgagagcgctccgcccccgagtacgcaggggcggccccgcccaccacggacggaggaggcggagccaatca

SEQ ID NO: 35539 - DNA, 201 bp, Mus musculus
  source 1..201: mol_type = other DNA
cagggacactgtccttctggacccactctctgctggagggttctttacacgcgggaatgtgtgagctctgcgtgcaccaagtactgcacgcctacagagcccctggactcacaggtaagcggggagaatcccccttgctagcaaatccacttgtagacgtggagaagagagggctcttggaagccatcttgactgtctagg

SEQ ID NO: 35540 - DNA, 270 bp, Mus musculus
  source 1..270: mol_type = other DNA
gagcttgtttctcactgggacaaacccagggcgccaagcagccgggtcagctctgaggcctgaggcacgtggttataaaactacgcattgagtcctcaaagtgcaggatcccaaattctggggtactgaagacttccagtgcaaaagatccccatctccagatgtgtgtatgtggagggggtgtaggttctgggaagggacaccccagaggtgtcagactttgaaaagccgtgggccctcccaccgctattgtgcgggggaagatgtagc

SEQ ID NO: 35541 - DNA, 419 bp, Mus musculus
  source 1..419: mol_type = other DNA
ccccttcccctagctgggtaggctatgagaaggctgctgacctccctgcgggtcatccggacggtgagcagaggcaactcacacctaatcccggggtgggtggtttccctgagtctcggggggccccaggactttggagacccgggacttccagggcagagttctgcactgccggatgtggagctagcccagcacctcgggcgtgtgagtaatccccgccccaggcgcagggcgggcccaggagcattgcggaccccgccctcgccgacccatcccacgccctccccgcaggtgggtggcctatgagcgggttggcttctccggcgaacagttcatctgggcgtgaccgggggcgggccgttgggcggggccaggtggctcgccctggctgctggctcagtgccccgtaagggggcggg

SEQ ID NO: 35542 - DNA, 307 bp, Mus musculus
  source 1..307: mol_type = other DNA
tatttatttatttatttatttatttatttatttattttaactatgtagttcaatcttggaacttggaactcacttagttttaattgtatatgcattgtcctctggaagagcaaccaggggataaaaaaataaggcttatcactgcagcatactttttttttttttaagacttgtaaattcagcctcaggcctgaggtctgagttgtcaaatcattccttcccaggacacagggctccaagcctggaaaccatcctttcccaggtttgaaagaaggaagctcctttctctcttctgcagaaaaagcag

SEQ ID NO: 35543 - DNA, 451 bp, Mus musculus
  source 1..451: mol_type = other DNA
tagaccaggctggcttcgactgggattagagacaagaaatattttgaaaacatctatagaggtgtttgataagtactttgtctgtacaggtctaaagtatctctagtactttggtgctattagattagtgctcctgcagaaatcggaagacagatccaggagccgttttctcctgttggtcttcagcttggtagtaagaccaagacttagtacccgttgagccatctaccaattattctacttaggaactagaattattcctgcagtgcatcatctagtccataaattagaggggggaaatgagatttaaatatttattaagtcacctaacaaaggaaacatgatttctttgatacatcttcaggtctagaggcttctagggaccaatctcttgaactcaagacccggcctcttagagcggtgtgggatttgaagtctcacgtgcaacgtc

SEQ ID NO: 35544 - DNA, 242 bp, Mus musculus
  source 1..242: mol_type = other DNA
tggctttgaggaaatgacttccccagaagcagacaggcagccccaggtctactcccatttaagttgggatcacccctgaagggtgtgagccgctcccccacctggagaggtgcccccagcatggggctgacaggggtcctcccggctccaggccacggagcagggcggggtcatgcaggccccgccttacccgcctgcgcagctcattggtcccgagagcagtgactcgcgggcggaaaccg

SEQ ID NO: 35545 - DNA, 400 bp, Mus musculus
  source 1..400: mol_type = other DNA
gtaacagatgctccactgtagaaatacactttttttttatacactcactgtatagactcctgattctactgcttcagcagatttatagatttcaatccacaaaagaaacagaagcactgggaaaactttcttcccattagttcatcaatttttaaacatcgttttaaaacatcatcattaattcttaattcagtgacccctgagtagccagtgaccctggtaggtcacaggcacaatctgacttcctggttccgccaccctaagcctcgcggggacacagcgccaccgagtggcggtccggaacctcctgcgcaggcgaaagaggcggggtagccacgcgcctagactttctattggccagcggcaaggagaggcggagctgggcggcgcgcgctctggg

SEQ ID NO: 35546 - DNA, 357 bp, Mus musculus
  source 1..357: mol_type = other DNA
gacgtgtttaagacatagagtggaaggaaatctcccgccctctctgtgaggcagaaatccctgggatcagaccagatctggataggtgtttattttacaagccgcttttccaccaaataaagttgatttctctgacgtgaacctgcttctccatcatagggtgggtgacaagctctctgtgtagcccattaccctgagctatacactcaaggccccagtgccaaggtcctgagctctgtggtcaggaggtcaggcctgcttccctgtcctagccccagggagcaaagtcctggatccagaaaaggggcctctgggaacatggaagcctgtagctagcagctgcctctgtgatctcac

SEQ ID NO: 35547 - DNA, 244 bp, Mus musculus
  source 1..244: mol_type = other DNA
ttcaggaggcagctgacatctgcaaatgtcttgtggtaaagccctttgtgccctaaaataagtaataactgaattgattaaagtcttactttgagaaaggagtccactgcctagttgccaaccgacaggcggtggaccaatggcagtggcactgccttacctggttggccacgtgggcccaggtatgcagcggccccgccctgcctgctctggcccagccccgcggcctccgggctcgggctcg

SEQ ID NO: 35548 - DNA, 504 bp, Mus musculus
  source 1..504: mol_type = other DNA
ggatcttttgcagagcctgcaaaggacagacagactttctatcactgcacagagaacaaaaagctaggcatgctggcctatgtgtagccctggctgtcctccaggctggtcgtgcgccaccactgcccggcaatctcagcctctgttgagttcaagaccagcctgatctacatagcgagtttcaggacagccaggaggctaaaatacatgcacactgataaatgtagttaaaattttttaacataacattatagacacaagcccacaaaagatgttcttgtgagaactccatctttggttggggggtggagatgaagtgtaccctcccaccaaggtagttgaatttacagaatgcctagacctgatggggcactgtcagccaagacttggcctacatgcctggcctggcctctcttcaggcctgatgctgatccctcctgacagctgctcctaaggctggcaaggcagcagcaggcagggggggagggaccagatttaaagatc

SEQ ID NO: 35549 - DNA, 365 bp, Mus musculus
  source 1..365: mol_type = other DNA
cagggatgcacgtgcctcactccctgtttcctggcaactggttccaaagagccagaatgctattgctgaggtcctctgcccccatatagtggagctggctctggccagcctgagaggcaccaggccaagatggccctccctgggcataaagaaaagtgatgtggtgccccaccccaaaaaagctctttttgtaaaaagagctgagcactcttcaagattctttgtgaaacaattttctgctttaggtgttagaacctaggggtatctctgggtgacccatccatcatttatgaagtaatttattcatggcagtatagtgggaccggctcccctcagcccgctcacgagagcacgttccgcccccg

SEQ ID NO: 35550 - DNA, 204 bp, Mus musculus
  source 1..204: mol_type = other DNA
gggatttggagggtctgcgcaagtccctcctacccttgcaaaaaggctaagacccagtgtcttttgaacttcctttacgaatagggcttcccaggctgtaccccggagtcacccttagggtgcagatactaggaccacatagcacccatttctgccctttgtcctacaacacggctcacgggtcctgtcagcactaatgtctgg

SEQ ID NO: 35551 - DNA, 791 bp, Mus musculus
  source 1..791: mol_type = other DNA
gatgcttactcaatctgtgtaactaacgacgggccggccagttggtcctggtttccaagtgactgtcaccccgatctcagggcaactcttctgacaaccgggggactgcagtcctaggagacctgttttgtgtccgtacacccgcctaaaatggggccagctaggctgcgcgccgcagccaggtaggcgccgggaacaatgaggttccccgcgccggtggggcaggggacagcatcctcccagatgatcgcacccaggcccgcgtcgctgcctgggccattgtgccacccggtcggaacgtaggtgcagccagcctcccagcactggccgcgcctccccacggacccgccgcccagtcccgtgcaccgggcatccggccccagcgaaccgcgcgctccagcccgccgctcggtaggtctgagagggcgggcagcgtagcccgccacggggcacgagcaccgccggctcgggccagcggccgcagcttctctggggtcccgggacgcgccccccgctgcggctgagggcgaccgtcccctgccgccacccctgcagggcagcattggtccgctctgcagcgcgcacaccgctggaaacgctcggctgtgcgccgcgccagggcagcgacggagcgcaatggccagagcccgcggaggagaggcgggcgctcgcccggcagcaggcggcgctcggcttgcgcacgcgcgctacggcaagccggagggggcggggcccggcgtgagggggtgtgtccgcgcaccacgggggcgcgcgccggcttctgactggag

SEQ ID NO: 35552 - DNA, 373 bp, Mus musculus
  source 1..373: mol_type = other DNA
ggggtgtggtcttctccgacacagtctcctgcagtgtgtctgttcgttaaaaagacaggacactgttcttggccgatctggccactccagatcgcaattcaaaatgggtctgtaactccaacagccctattgtggggcaccgccccagcaagggggaggcagatcctctctggctgcagccacggggcaagagcaccagccggcaatcgaaggattttctttagaccagtctggcctcgaactttctagaaacttggattccaaggcggcaaaagtcaggtcctgggggcagagccgcaattcccttcccccctccccgcgggcttttgcacacgacgcgcggcgggcggcttcacaccaggtggcgaggagg

SEQ ID NO: 35553 - DNA, 356 bp, Mus musculus
  source 1..356: mol_type = other DNA
gcctcagcctcccgaggaggagctgggaatagagctctgatcactcctgtgtcaagagaggtaggctcttcctggggcccaagaatgagtccagtggagcctctggcagacttcggaagacagataacttgccaagacaagttgtgccatcctgctggccctcaagaaagccttgccagcctaagttcaatgactggctgagggctgtcagggtgggagtctcaaaagactctactgaaatgcttgattcccttactcccaattgactggaggggcggttgctagccctgccagcagcctggctgcggaatgctcagctggtcccctcctggggctcatgtgacagaggtgcagct

SEQ ID NO: 35554 - DNA, 335 bp, Mus musculus
  source 1..335: mol_type = other DNA
tagaccagtctggcctcgaactttctagaaacttggattccaaggcggcaaaagtcaggtcctgggggcagagccgcaattcccttcccccctccccgcgggcttttgcacacgacgcgcggcgggcggcttcacaccaggtggcgaggagggcggggcgcagcggcagggaaggtggaaggtgactgcgagctgccatcgtcccgcgcgcaacttcgagggcgcaccgaaggggcgggaagctgggcagtcactgggacccgatcccgcccgagtgggacgtagggtgcctggaaccccgccttcactccagcccgggcagccctgaggtgggg

SEQ ID NO: 35555 - DNA, 323 bp, Mus musculus
  source 1..323: mol_type = other DNA
ctccaggggcaggaaaagagggcggagcctcttcactctctaatccatgttgcagcagcgtgagggggatccacgaccagtgccggagcctcagcccctggatcaggagttcccggttggccaatcgctacagggatccctgagggcgggcccaggggtcgacctatgtctgtcagacctgcagccttgagcacatcacgaggccccagggccggcctgcaagctccgtagggcggagtctgtaaatatttgagcaatagctggttcctggtcccggtacacggtgtctcggcagacccgggatcttgggtgactagcagcac

SEQ ID NO: 35556 - DNA, 428 bp, Mus musculus
  source 1..428: mol_type = other DNA
cccaccctgtctcctgcgtgagaaagcctgcggtttgggcacctcactgtgccctgccctcaggctgctcaccaaggaggagaggccagcgagtgctcttgtaggacctacaatagcaaccctccaagggaatgatgttaatccattttaaagatgcaggtagggccaggctctgagttcaaatcttcacctggacacatcaaagctgggtctaagaaaggcaatccctgctctgcgcttcatttttctcaatagtaaaaaagacaaaagagcggcgtgatgcaggtagctggcattcgagcactcctcagggactcaaagtccttggttgcaaggtgggtttgaaaccaaccgggggcaaggggttaagtggaaaccctgcctcctagccaggagccaatcagagctggcgggggtgtggccaggct

SEQ ID NO: 35557 - DNA, 310 bp, Mus musculus
  source 1..310: mol_type = other DNA
gttaagagcactgactgctcttccagtggtggctcacaaactgtgcatgaagatagagactatgtactcatatacattaaataaataaatttcaaaagaaaaagagtcccaaggtgtcaccagggggcggcttgatgtgtcctcgacaatcagtctcattttcacagaaaaaaacgaggtgtcaccgcggctgccgctccgacactgcatcctgggacttgtagtgataacacttagaagcaggaggagtttaagttcgcacgttaagtgactactcccagaaggccacgggctcctgggcggtgtcggg

SEQ ID NO: 35558 - DNA, 208 bp, Mus musculus
  source 1..208: mol_type = other DNA
cagagggagtgagcaccgcaaggctttagcagtccagatggagtctgcctttaagcttagtggctttgcttagggagccaaaagaagtaggttaggaccgacccctccaggagtctctccagagaggcggtgctctccaggcttcggggcgggactggcacgtgccgtcacccgcagccaatgcggagcgcctggtctgggtcacgtg

SEQ ID NO: 35559 - DNA, 425 bp, Mus musculus
  source 1..425: mol_type = other DNA
ttgttgaatgagaggccagtctctcacatacaattctcttaagataatatgctcatcacagtacagagggaaattttcatgtccctgttaatgtgtcagggctctagactcaaaagctcagtaaaggacagggccctagcctctaccaatcaggcctctttactcattattggaggcataccctgcctctggaagatgtgacaaccaggagtggttgttctagctccccagggagaggctgagctcaagcttgcctcagagcgaagcttgcgcttgtgggtaaactctgcaggagtctgcagcctcttccgcaggactgcataacgccaggcgagaagctgcagactggcggaggcggctgagctcccggtgcccagcgccgccctccgggcttggggcgtggccgctacccctttatctgcgac

SEQ ID NO: 35560 - DNA, 488 bp, Mus musculus
  source 1..488: mol_type = other DNA
tgggattaaaggcctgtggttccaatgccaattagtggcaacccctagtgtcgggtaaccaaccactgggtcagtctagaacctggctccactgctccaggaggggaggctctggagtaaaactgtgcagtctgagactggagaggtgactcagaagagcctatactcgctcatgcgcgcatgcaacataattcttaaaaattatgcataaatatatttacataaatatatcaacacaatatattaatatacactcacttatagagtatatgcatgtattttattttatcatgtattctataatacttatatagtatagtcacaaattatatgagtacatattatatatgtggatacatattacatattataatatgtattcatatatatatttctgaaaaaaaggagctcccgggaaccgcccggcttccttagcgcactgggcgtggttaggggcggggcttacgtcattacggccgggcagagcc

SEQ ID NO: 35561 - DNA, 364 bp, Mus musculus
  source 1..364: mol_type = other DNA
caaaagatttgtccctttaactggatgctgcacacgtgtgtacgtgtttccagtgctgagcagcaacactggcagaagcgggatgcgcgcacagacttcgtgccctcccccggaggggtgagggcgtggcccggggaggggtgtggcctcctggccggtctgccgtccactctctcctgggcgtggtgctcgccgcgcagctgcaccggaggcacttcgaggccgggccgcccgctgggagtccgggctaagcccgatgcggggtcccacaggagacgggctcggtgagcgccctgggccgtcgccggcgtctccgtcccggcgcaggggagcacgcgttccctgttcccgtgcacctcggtga

SEQ ID NO: 35562 - DNA, 362 bp, Mus musculus
  source 1..362: mol_type = other DNA
tcacctaggatgtagtatattctgtaggtgtgtgtacgtactcactctataatgtttgtgtaactcagtcacctaaggacacgtttcccaaagagttcagatataactgtaatctgggcataatgcccattgtgactgcacaaacgaatccaaaagatttgtccctttaactggatgctgcacacgtgtgtacgtgtttccagtgctgagcagcaacactggcagaagcgggatgcgcgcacagacttcgtgccctcccccggaggggtgagggcgtggcccggggaggggtgtggcctcctggccggtctgccgtccactctctcctgggcgtggtgctcgccgcgcagctgcaccggagg

SEQ ID NO: 35563 - DNA, 332 bp, Mus musculus
  source 1..332: mol_type = other DNA
atgtatgtttgtatgtatgaatgtatgtatgtattccatattcatgtatgtatgtatgtatgtgtatatgtgtgtgtagtctatgtgcatattcatgtatgtatgtatatatgtgtacgtgtgtgtgagacagggtctctcacctgtttggctagactaactggccaacaagttattaaataatgtgtgggcacaagtttcaggcttgcctagtgaaaggatgtctaaaagaatttatttatttatttattattttatttatttgggcctatggaccggctgagcaggcgctgtgccctcgggtgatgggccggcagtccaccgccccgccc

SEQ ID NO: 35564 - DNA, 568 bp, Mus musculus
  source 1..568: mol_type = other DNA
cgtcaatgttttgcttatatagacctgtctagatacactttggcgctgaaattaagtgtatatttgcatgtaagcacacacccacaaggtagcctctgtatgcataaaaatgcaaatgttcacatacatgcatatcctatgtatgacccgtgcatatgtaccccacccaagggccttggccacattagcgaagcagctgtactaccgcggctggtctgagctctgggcatccctggctaccagcaacctggcaatccccggctggtgctgagaagtgacagggtcgcccaacgatgggcagcgcccctggtctcctggcccttccctgggcagaaaccaatgggtgattgtggcccatcggggatccctcggaagcagcccgccctctccacagcgcgcagctggaccggatgggggagcgcagcgccagcatttggagcggggggcgtggcccagactgtgacccgccctggccgaactgcggtgccgcggcgggccgaggcgcgctgtaggcgtggcctgagggcgtggctggcggggggcggggcagcggcgctgtcgcagtgag

SEQ ID NO: 35565 - DNA, 335 bp, Mus musculus
  source 1..335: mol_type = other DNA
caggatgccttggaacttgcaggaatcctcctgcttcagctccatgagcctggggctggagcaggtgctgcgcccagacaggagcctgggtcacacagcatgcctgagtctgcgtctactcatatttatttaattatttacatttattttgtgtatgtaagcgttttagctgagctatctagaaggccatggcgcgcgtgcagcctcggagccggtccaggtccgggaagggcggggttgcgctctaggggcgtggcggtgggcgtagcccctccggccccgcccctagacgtcgcggggagggcgggggaggagcgcagcgggcgcgcgccgcc

SEQ ID NO: 35566 - DNA, 604 bp, Mus musculus
  source 1..604: mol_type = other DNA
atcagttgtgaaaagtaaaaatttccaaataaacaggcattatatttctagtatttttagtttttacaaatgagttaaatgaacctgtcactttaagtctatagtgaaaccacatttagactaatcaaaaattatatattttaacatttataagccttaatatgggtttgacagtatttctttggaaaagcattagtgacctggaagaagatttatatatttattatatatataacgttaatgccttcggaagagcagtcagtcagtgctcttaccacagctgtgattttggaatcaccataactgtgtttatgacttaactttacaaaagcagctgttgctcctattcttagatacacaaagattaatgtataattgcctagacttaactctaccttgttaaaaattaaaaataatgtccttttgattttgttttgttttctatcctggaacttcctctataaactaggctgtgcttgaatttagagatgattttttaacacttagcatggttatttgtagatatccattaaaaatctctaccctctagttctgtttaaatattgtattgagaacttcatacatgtttatactctattttgat

SEQ ID NO: 35567 - DNA, 598 bp, Mus musculus
  source 1..598: mol_type = other DNA
cgtggattcccgggttcgaactcggtcctcagacttggcacgcagcctctgaggccggggaggagcccgcggaaccctcagcctgcgcaaacctgcggacgtggagcccggccacgccgccgcacacgcccccggcagccccgcgcggcgtcgcgcgcacccgaggggccgcccctctctggtgacgcgaaccaggggcggacccgcacaggccccgccccaccacctccgattggtcggcgcgctgtcaccacgtcgcgggaaggcccggctgacgcggccggtatggctgcgtgctcggctgcccgcagaaggggccgcggcggcgctcccgggacgccctcttacatagccgttcggttctcacacgccaggcgggagcccgcggcgccgcgccacacggtgtacgccgacgtgggcctccccacggcgagacgcagcggcataatataggatgttatatttatagggcctatttataagcctctatttaagcgggcaccgggattggccgtgcgcggcgcggcggcgccttcgattggctatgcgggccgtccgtcgcggcaaaggaggcggggcgggcggctggctggtgcgg

SEQ ID NO: 35568 - DNA, 245 bp, Mus musculus
  source 1..245: mol_type = other DNA
tgaccccagcgaggccagcctggtctacaaagtgagttccaggacagccagggctacacagagaaacagcctgggtcagaatgctttcctccaaacttcagtctggtctacacagtgacttccaagccagccaggacggactgaatgaacaaccatactgaataaatgttgcttctctccgagctaggccagcccggcagcctgagatactccctatcgctccttcaagtgggcgtgggggacac

SEQ ID NO: 35569 - DNA, 337 bp, Mus musculus
  source 1..337: mol_type = other DNA
aaacctttaatctctaacagctgtaatcaggcacctcttctggcctctgccagcacagtgcacagtggcgcacagatgtgactcatcatgtaaaacatgtaaaagttaaataggttatgggtctagaacctggactgagtggtagagccctgggttctttcaaattaaagcaggtacttgctgctaagtcaaataacctgagtttgacaggctccactctagcatttctcacagtgacaagggagtccgggtaacccacagacttgtcggcgcggtgggcgtggcccataggctgcaccccagggatccgcccttcgctctcgatccgcatgcgcac

SEQ ID NO: 35570 - DNA, 270 bp, Mus musculus
  source 1..270: mol_type = other DNA
acccccatacttggtggcccacaatggctctgtcttatcactgttgctcctcaaaggtcaactgtggtcgttggaattcctgtcgacctcaaattaccttaattagctcaaacaaggccgttaaagcaccgaggcacgggaaccgacttgttttcccgaatttcaaaatcgaaagcaaggcgtgacaactgacgcgcatgcgtcgcgattggacgagagtgggacccgccctttcgcacggatgtctgtgcgcatgctcggcgccagctt

SEQ ID NO: 35571 - DNA, 367 bp, Mus musculus
  source 1..367: mol_type = other DNA
tctctgtggctagaccaggctggcctcgaactcagacgcaagccaagttttattaagcttgagaagaagcttttagatatcccatgtcttatagcactggctagcctagaagtcactgtgtagccttggcaagccttgcctccaccggctgagacgctaggagatggctttttcatttctaaaattaattagtcgtcgattttgaaaggtacacgtttcatatattctacagttagtaacatcagcaaattatctactctatggaagggacttaatgcggattaaattcaagaggggccccgcctcccactaaaaggagcgtgagaggggaaggcttgagtctgggccgcgggccagaggccgccgg

SEQ ID NO: 35572 - DNA, 618 bp, Mus musculus
  source 1..618: mol_type = other DNA
ttcccttacctgacagatttctgagataacagaatcagacagagtaaggcagggggcctgtccggtgacgctcagggtctctgcctgtaacaccctaagagcatcaaaggccctggaccagtgagctcaggcctcaggctccagcagggaggaggggcggtcctaggtcccagcgccaccagtttcccaagcaaggcctttcttggtgtgccacccagccacatatgtggatggctctgcctggcagtgtggtgacgggcatggcagggtgtcagccgcagcccagggcagtgacagccatggggaggggtcctctgccctctgggggaaccaactgcctttcattatgacggggtctccggggccactgcaaaccaccagctcggcttcctgggttccaagatccacaaacagaaagcctaccttctctctctcttttgggccgtgacatcacagcccaggtgacagtggcctagccaatggacctaggccgcgagctggcttcttgcaaggccaggccctcgccgcctccagggccctgcgaggagctggttggttcctggtgtccccaccccctggccaccctggcccctgccacagcctgggctccgtggaggg

SEQ ID NO: 35573 - DNA, 525 bp, Mus musculus
  source 1..525: mol_type = other DNA
gttgctgggccaacctgacagctctgtaggctcagcgctactagacggacggtggtttgtaggccccattgtagttttctggacaggagccgtgtggttgtccccaccccactttctgtctgcctcgaaggttgacacagaagccacagagacgagagccaaggccgcgcggagctgtggactccctcgccggcaaccagctgagggtgcaggttccgggctgcggtggccagagctgaagcagccaggctgcgactcgagggaggggaagcgagccgcagccaggaggctgccgatgtctgcccaggtcgcagcggccgctcctgactccggggaccgcggctccccgcgcggctaccgggacgcgggtgtctagaccctctggggcggagcctggcccctgcttggctcgcgcgggcccgagccaccgggtcctccacggcgaaccccgagcctgggggctgcgattggctgcgccccgcgtcgctcgcacggccccgccccgaggcccggggtactaacccc

SEQ ID NO: 35574 - DNA, 599 bp, Mus musculus
  source 1..599: mol_type = other DNA
gcaaatttcccaaaggtgacattcaccctgtcctcaggtaaagtactcgcccctgcgcgctgagtggcactcaggtgactgaacaggaattcaggcgctgcctcaagcactggggttgtgctggagcgggacgctttgagtatcttgatttcaaatattaaaaagttcttaaggacatgaaaactttcgcaaaagttttccaggaaaaggcggccgcgcctaacagaagtagccgaggaggccgccgccccgggaaccggaggggacgatgagtccctgcggctgcagcgggggagagggcgcgaggcgggccgccgcatgaggtcacttggcacccaaccagcagcagctgcgccgcggagagaggcggtgtcaggctccggctccagggaccttccccgcccaccccctgaggggcgtggcttcggggggacctcccggccaatccgcgctgcccagcctaggccgcgcccccagcgccctccaggctccctagtggtcggtccgtggaagctagagcgctccgctgtcttcctcgcctgaggccacgcccccagctgtggcgcccatagggctccgcccagcggtttgaagcggcc

SEQ ID NO: 35575 - DNA, 354 bp, Mus musculus
  source 1..354: mol_type = other DNA
aagctacagccttgtaggtaaacactgccagttgaattgccgtctgggtccaaaccgttattgttactatacccactgggtattcactaataactttatttgatagagtcctctcagtctgtgcccacagtctcttgtctagtcagtgagggagtccagaaccagtccctggccctcttgaccaaagcaggagctgctactgcagccccagaggctgtggcaggcagccgtccagcgctcaccgcgggcagcttcagacctcgctgcagccctgccctgccaggtcctgacttgggcaggaaacaggctctctctggaatagagggggagggtgaggggccacaccctgaacca

SEQ ID NO: 35576 - DNA, 314 bp, Mus musculus
  source 1..314: mol_type = other DNA
gggcgttcaaatgggaaagtcttcgggtttctacactttttccatgaaaattacaaagtggccccagagaaacttttctggagagaaagcgcttggtgccttcggcgtggtttcgcagcagaagcacgcacacgaatgggttgggcgacccaaaggcgaaaggctgccgccctggtgcgcttgcgcatgcgcgtcgttctcgtggcgcactgagcaggcgcagccgcaggcccgccggagcggggcgggtgtagcggcgcgcgcagcctcccggcgctgggctcccttctgccggtcccgccctccgtcgcggc

SEQ ID NO: 35577 - DNA, 220 bp, Mus musculus
  source 1..220: mol_type = other DNA
ctcgttggtgaagcaataattcttttttttaaaaaaagattttatttattataaataagtacactgttgctgtcttcagacacaccagaagagggcgtcagatctcaggtggctgtggggaactgaacttatgttaagctcatcttctactactagaaaattagtttcaactgccagtcctctgctcacaattccaacctggaaggcgacagcggcggct

SEQ ID NO: 35578 - DNA, 374 bp, Mus musculus
  source 1..374: mol_type = other DNA
cagagaacacttgcaggagttctctccttccatcacgtgcgtccggggttgggacatccagtttgtgagctggaagagggcacagctccctgacaggtaatgttcattatcattaataggggcgcgcgcagtcacacacctccatcgcctctactgggcgacgggagctgcggggccatccggctgccaggttcctagaaggctaccccgggttaagctcacaggaacccgcccgagggtgttcctgtcactgtcacgtgagggcgaatgcgcgcgcgcagaacagccccgccctcctgtctgtgcgccggcgcagcgcgccccctgggcgcgaggaacccagggagggcgcgaggcgcgcgggcccgggagcg

SEQ ID NO: 35579 - DNA, 379 bp, Mus musculus
  source 1..379: mol_type = other DNA
gacccagttggtctttgggcatctcccataatacaatatggcatcaacatctcccccagaggttgctgcgtgctgaaaaatgagcgcgctggaagctccacgcgcaggttcatgctcaagcctaccggggctgctgagctgcaggtccccgagacgtgtcagggctctgctgggtttcgatactggagctacctgatggaagcagcaggggcgccgcccgggacggtcggtggcagttagcgcagactgcggggggacaccaggcgggctgcttaagcccagcctacttgtccggcaggtgggggaccaaagcagcccggacttcttcctttggccgctagaggggactcctccgcctgcgcagaggcttcgccagctt

SEQ ID NO: 35580 - DNA, 286 bp, Mus musculus
  source 1..286: mol_type = other DNA
tgcagctcagcagccccggtaggcttgagcatgaacctgcgcgtggagcttccagcgcgctcatttttcagcacgcagcaacctctgggggagatgttgatgccatattgtattatgggagatgcccaaagaccaactgggtccacactcagggtgtgtttattccttcgatgagtcacaaaaacaatgtcaatccgaaccccaaaattctggtttttggtttttgaaacgtctccaacgattggtcaacctggctagttagccagttgcctgccgccggactctg

SEQ ID NO: 35581 - DNA, 356 bp, Mus musculus
  source 1..356: mol_type = other DNA
gcacagagcacttacagtgtactgggctggccagaggcatgtggtctgcccacatcccgttcagattggcatcgcacaagattctctctctctctctctcacacacacacacacacacagggggggcgagcgaggagaccttgcacactcggtacttagtaaatgtcccctgtcttcaactcaaggagtagctagtctcccagatgactgaacgggtctctgacactggctcacatttcctcgatcacctgtagagggccttcctcagagagctacctgctctcttccgtgaaattttccgggtagagattgagccaggagctccgcccctgctggtgggccaaaagttaacatct

SEQ ID NO: 35582 - DNA, 309 bp, Mus musculus
  source 1..309: mol_type = other DNA
aaaaagctcataattttaggatgtgtttttgtgcttctcgaatgtagtttaaaaaatctaactcgagttaaagttgggtctgagctataaaggcaacaattccatagagatatcaatgtacctatgtgtccaggatagaaaacaaagcctgaagcgatgtcctttctggttagtagcgacacagaccgagcctcctccaagcttttaccgcgatgcccagaactggatttcttgtctgatttttaaaaagagccccgcccccacccacggcaggcgacgcggggcagccctaggtgaatccccaccggt

SEQ ID NO: 35583 - DNA, 424 bp, Mus musculus
  source 1..424: mol_type = other DNA
gtgcctgcacatgcgcgtttgtgtgagcgggcgcagactcccgcgaggagacagcatcacttggtgcccactgctgcaaatgccactcacagaagtgctgggattacagacacttggacttcacgtccatctgttcacatgcttgaacctcccacctcagcagccttgccaggaggaggctgttccaaccacactgctcagcccccggggaggaaaagggcgcactgagctccctagtcattgttgaaggggataaatcctcttgtaatggaattattaggctttgatatgagccaattacggactgataagactgcttgcacggccgcaccaccaggggccttgggattgctggtgccttgtctgcacccaagaaaggaacctcccttgctcctctccccgccctgggctgggcggggccagc

SEQ ID NO: 35584 - DNA, 250 bp, Mus musculus
  source 1..250: mol_type = other DNA
gcggtctccaaggagcccctagctgatgccagtgtggcgctcccttggaccgtctccgcgtggaggccccaggctggctctagagctgaacctggttcacctgggctgcgcagaatgagcatcactatcacaatcattatcatctccatcatcattatcaccaccatcatacttgatcccatatttgaatcatattaagaactttctcgagccagggtcagcctgtggggagaggagagggctcccaccc

SEQ ID NO: 35585 - DNA, 385 bp, Mus musculus
  source 1..385: mol_type = other DNA
acatcctccccaagctgcaggaagagcagctggcaggttacctctctgacctgagctgggacagccttcccagacctgcacatgctctggagggccatgtcccctccgttctcatggttaggtcaccctgacatgttccctgtctctcaggagggaattcagatcagagaagctgaagacctttctctgggtgccccacaacgggaaggacagttgtgatccgacttctatagcagagaacacacgtgtccactagccagactggagcccgaggcatggctcttactccaggcgagcagcagggggtgggggccaccccacctgttgctgctgcccagcagtgctggcaggaagagacagccctgcactgtctcagcgctgctat

SEQ ID NO: 35586 - DNA, 283 bp, Mus musculus
  source 1..283: mol_type = other DNA
tgggtgccctaggaggccaagctagcgggcccgggtctcacggggtgcgtgccgagtctaagttcctctctctggccagagacagcggattccggagcagcctctagctggctccgaggctcccgagcccggagcgctcgcctcggccgaacggcagcgaggccgcggtgcgcgcgtcaggccggcggcgcgcgcacgcccagagatctcgcgggccgttgtccccctccgccggtgctgcggggcgggaggtgggaggggcaagtctcgcgagaagaggcag

SEQ ID NO: 35587 - DNA, 454 bp, Mus musculus
  source 1..454: mol_type = other DNA
atttggacaggcttgcagaattctggaccaacttaattctggacagcaatggctatatagattgcatcacaatttggagccaatgaaacgttgaaactgacctcaaaactgctgtgattacaggcctgaatgtgttgactaggatacacgtttttctttttctcttaaacaaaagatatctctccttttttctctagttttcccactttcgaaacaagaccaaacaagtgctgtgtatagaaaaagcaggccctgataggaatatgacccacggcagctctggggctggcccagtgacggccccgctgccagaggccagcagaagagcagctgccctccgccagccggggaaagtccagcagcgcggctcccgaagcgggccacccccccccgcgtgccccagcaacaggcggtggctggcgtctcattggccgcgggacgcgctgccgcgtcc

SEQ ID NO: 35588 - DNA, 264 bp, Mus musculus
  source 1..264: mol_type = other DNA
cacacgtgcacacacgagcatccacaggcacatgcacacatgcttgtgtgcacataccaggcatggagcctagccttgcctgggtagctagggtttcgttgctatgaagagacaccatgacctgtcatcatgcccagcttctgaacttgcttttgtcacagtcacagaatggagcagaactcatctgccaacacctgcaggcatttgcatctcaaagctctgacccaagtttctggagtctaaggtctatgcccactgtggcac

SEQ ID NO: 35589 - DNA, 412 bp, Mus musculus
  source 1..412: mol_type = other DNA
agctcagtcagtagagtgctgcatctgcaagagctacctgaatcccagcactcctgaggtacaagcatcaggaatgcaaagttactgtagctgtaagttcgaagccagcctgagcagacttacctcaaaataaatttaagttacaattctaaattaaattaaaatgtctgagagcgatggtgtactcatatacataaaataagtaaataaatctttttttaaaaaaatgtttaagttcctcggagttcttgttaagttcaacctccacctgctggctggaggtatatggcttcagccttcccctgaagattggtgcaacaacgtggacttctcccagttttcccctaaatccttaggcgagtctacggaatttaaattcaatagagcagtctccctgagcgccggcgcttgc

SEQ ID NO: 35590 - DNA, 382 bp, Mus musculus
  source 1..382: mol_type = other DNA
tacaggaagatagatctcttactaggctggctggccagtgaaccccagggatccatccacaatggtcaacttgacagtattattattattattattattattatttattcacgttctgctgggcctgaagacctgtaggcatggcatcctatgtactcggggcctctgcaggagcagcctcccgaatgatcttaaaccgagacaaaagtgtcttgagtccctatgctaagcccggggactgcccgaccgggactagaaagggcccagtcccgaccttccccctcgatggaagcgcactgcgcaggcgtttaaagcctgtgcagaccatttgtccctccagggttgccgtccaggcagtaacccagtacacacgtttcctgga

SEQ ID NO: 35591 - DNA, 150 bp, Mus musculus
  source 1..150: mol_type = other DNA
gatttatttaataagtacatggatctcactacaggtggttgtgagccaccagagtcagtgctaagacagtgtatacacagggacacaatgatttccctttaagactaaaggacttttggcccatgtcatggctcttcatgggacacggga

SEQ ID NO: 35592 - DNA, 459 bp, Mus musculus
  source 1..459: mol_type = other DNA
aatgcctctcctccaggacgcaggtccaccaggagggcttagctggtatgtccagacgctgtaggtggcagcgtcgcatcacagggagtggtcccactgtgggcaacatggcagcttctacctggaaagccggactcgcttccgggttccgtactgctggccgggctacttccggcagcaggatggctgggttcccgggactggaacggaagttccggcggggcgttcgctcagcgaggctgcgagggtcccggggtggcggtggggagtggccggagggcgctgtccagtcccgggacggccgggccaggggctgcgcgcgtggcgggagagcggctgcgcgctgggcagtgggagaccccattgtggggcatgcccctttgatgtgatgaccctggctcagaacccaagttcccactgtggagaatgggagacgacggatcccacaagcttccggag

SEQ ID NO: 35593 - DNA, 471 bp, Mus musculus
  source 1..471: mol_type = other DNA
gcctgcaaggcattcctgccagtgtgtcagtatcctgatacggcctacggactttcccagggtccttcttcaagtgggtaaggcctctcacactgtgaaacagcaaagtgatgaaatagcaggtggttatcacagtgtaatcttgaggtcgatatatatttcctcatctttaaagataagagtggaggacgtataatgctacagcttgagaatctgagacttcacagcagtgaactgtataagtgcaccctgctaatgcctctcctccaggacgcaggtccaccaggagggcttagctggtatgtccagacgctgtaggtggcagcgtcgcatcacagggagtggtcccactgtgggcaacatggcagcttctacctggaaagccggactcgcttccgggttccgtactgctggccgggctacttccggcagcaggatggctgggttcccgggactggaacggaagttccg

SEQ ID NO: 35594 - DNA, 321 bp, Mus musculus
  source 1..321: mol_type = other DNA
atgatgctgctgagcatcccaacgccccggaggcggagagataagatagacccatgatagatatataataaatgtaactaattaaatctaacaccagatttggtggtgcgtgcctttaatccctgaatttgggatggcaagctttgctgtgctgtcggccccgcctggctcgggaggggaggattcgcgtccctgccacgcgtccccagccttgaacggtaccactgagcgacaccgccagcgtccagctctgctggcgcagctcccggccccgccctctgggccgcgcgcgcatgcgccgcgcaggggcgccttttacga

SEQ ID NO: 35595 - DNA, 369 bp, Mus musculus
  source 1..369: mol_type = other DNA
acatatgtttaagccactactctgatttgtatacttgttaacatagttacaaagtaaagggtctagaatctgtatggtttctctgcatgtacaggaagagctgtcaagtgctcttaaagggtttctcagtctaaccttggaaggcgtgcgccctcagcttatttatttataaaaattattttatttatatgggtgttttgatgccagaagagggatctgtctccgcattaatggactttgggcagtgacatcactcaagaaccaccaggttctgttcttggagtcatggactcctgcagtttcgaggacagtccactagaggtggcagcgccacgacagctatgcctccccgcctcctgacccataagg

SEQ ID NO: 35596 - DNA, 346 bp, Mus musculus
  source 1..346: mol_type = other DNA
ggtttttaatatattatgactttttattcattatgatttaatttatttttaaatggcccggacgtagaggcaggtggagagttccaggacctatagaaatcctttttgtttcaaattgccttgaaaccagacagcctggataaaattacaataccgttaagttactttaaaattacacgatttcttttatgaagtcagataatttacctgagtcagtcaagggtccctggagccgcgtcggacccgccagagtttggctgggcgggtccgaggcctgcggaggcccggaagggaccattcgcgcttccgtctccgccgggccctcacggagggcggagttgcggcc

SEQ ID NO: 35597 - DNA, 294 bp, Mus musculus
  source 1..294: mol_type = other DNA
tgtgcaaagttggaggaccttctaaaagggtttatgcagcattttctttctccgtggaaaaggactgggtccagacccctctggtcacaagataattcctgacgccagtgagtttccttacaagtttcccttgaaaattcttgagagacctcagagctgtgggttcgaaccaaaaggcatattcttaaaagttaatggttttaagtgatttttccgaggctccgctgtcgcccaggaccggggaggcggtgcccagggcgggcgggggtcctagagaggactctataagagtcg

SEQ ID NO: 35598 - DNA, 442 bp, Mus musculus
  source 1..442: mol_type = other DNA
cagcctggtctacaaagtgagttccaggacagccagggctacaccgagaatttgttggaccctcacccacgctgtgcctgtcaagggcggggcagagtttgggagctctttactagactgccaattctcagatcagcgaatctgggataaattaaacaacataacatatataatggtctaatcttagtgtactgtacgggcgtacagtaggttagtttttttcctgaagaaaaacataaaagggagaggacatattggttatattaattaatatattaataaatgatttaacctaactagcacttgagggtcaagactcaggtcccgactctgactctcttccaaggaaaagaggtccgctcctcagcgctcttgatgcacctcctgcctcagtttcgcctactgttacaagaggacgctgaagtcagctcttagactaata

SEQ ID NO: 35599 - DNA, 532 bp, Mus musculus
  source 1..532: mol_type = other DNA
ttagtttttttcctgaagaaaaacataaaagggagaggacatattggttatattaattaatatattaataaatgatttaacctaactagcacttgagggtcaagactcaggtcccgactctgactctcttccaaggaaaagaggtccgctcctcagcgctcttgatgcacctcctgcctcagtttcgcctactgttacaagaggacgctgaagtcagctcttagactaataacgcagagctcagcagggcgcacaggacacccttcgcgagagcacacgagtgtccgcggggtccgtgggcattccgggacgctttcacgcacgggcgcgactccggacgcccagatattcggggcacgagccggaccgggccaactcctggcagtgccacctgtgccacgcgatctccgagtggcgatctccgagctcggcagcgctgggcggcgggccaggaggggagggtccggccttgcccggcgggcgtccattggcggctgctcccggcgtccgcggtgcagccggctgcaaagcc

SEQ ID NO: 35600 - DNA, 146 bp, Mus musculus
  source 1..146: mol_type = other DNA
gtctggggaaaggggaccagacgccaggggggcccctggagttatgacatgattccttttaaaaaccagagggcaattgattcaggccttgcctttaatctcagcaccggtgaggagccagaaccaggagccaggctctgtgtctg

SEQ ID NO: 35601 - DNA, 420 bp, Mus musculus
  source 1..420: mol_type = other DNA
agctgtgaggaatacagtgcagcagttgggagacaggtgtccacaacaggctccagactttctctgactcagaaacagaaaggtcattttctgtcaggagaattaccgctcgcgagccgagagtgggaggcagagttattccctccacccccgtgtacggcacaggccttgggcgcaccaaggagcctacctaagttagggcagagcttcccagcttgggcatagctccctctgggagcgcagtgatgctgagacccggcagctctaatctccctggagcctggggcacccctaggagagttggaagagaagagccccttcttccgacccgccaggctcaggcaatctttgcccgggcagtccttgtgcccgccacccctccccccagcgatgggaggggcgcgccccgccccctcccgg

SEQ ID NO: 35602 - DNA, 408 bp, Mus musculus
  source 1..408: mol_type = other DNA
ctttgaaacagagactactagcatccttaggactccaggttgtcgcaggcctaaggttttcatgatgttgggaggtctccaagattctctctataaacaccctgggccgggccgcggacagcactccagcaccggacaggggacgcgaggcctcggaaggcctactgggagttgtagttctcagtatccagaaagcgagagtccgtgggcggggcccaaagttccatcccggccagggagtctcccaagggagggaaaagaagccttttcccgctctggcctgggctgtcaaatgaggggtgatctcagctgaggtcagcccgagcttacctcgcataatatatgactcaaagatgtcccgtcaggccgcgaggtgcgcgcacgcgtgatggagctacccggccaaaa

SEQ ID NO: 35603 - DNA, 447 bp, Mus musculus
  source 1..447: mol_type = other DNA
agtgcacttttgcacatgtccgttcaaaaacgcatgggtagactaacaataaactttggtttatccagatatgtttggaaaattacagagaaatctccagcgacacgagtcaagtcaccctgaagttgtgttccggcgcggggtagcagcgccattgcggagcgtggccgccgggacccgagggggcggggctccggaggtggccacgcggcggagggaggagcttcggccacgcaaggcccgctgccccgcagccccctttgtgtgcatgcccccgccccggaggcgccgcagccagtggcgctgagacccctcattggctcagcccgacggccacaccgattggtcctcggagtccccgacgtgagggccgaagctgcccgtcatacggtctcgtgggccgattggtcggccgcacggagtccctggaagcagttccgggaaacc

SEQ ID NO: 35604 - DNA, 354 bp, Mus musculus
  source 1..354: mol_type = other DNA
caaacatggtggctcacaaccgagatctgatgcctgaagtcagctgcagtgtacttatgtataataataataataataataataataaataaatctttaaaaaataagagcactggctgctcttccatctacaatgggatctgatgccctcttctgatgtgtttgaagacagcttcaatatatgtgtgtgcgtgcacatatatatttaaaacaaacaaataatatatatatatttatattaaaaacaaataaatacaaataaaaaggttcaattctttttctagaggtgaatttctatcatgaaaaatgtccaagaatttaaaatgtagcggttaccttctttacttaataaga

SEQ ID NO: 35605 - DNA, 230 bp, Mus musculus
  source 1..230: mol_type = other DNA
acttcatgatgctaaatcaagaccatctactggtggatgctgggccaggtccaccggagctgccagcaggaggggcgggggttgcacaatggttttaagcccagtgcatacccgcggatggagtctaggcacggtccactttccccggacccctgcgtcctcctaccgtggggttggggcaggggctccgggcgggcctcccctgctgtgggcgggaggccgagtgggga

SEQ ID NO: 35606 - DNA, 276 bp, Mus musculus
  source 1..276: mol_type = other DNA
ttataatgtatcccctgtgctggagtcacacagagagcaaagagggttggtctttttgccttaccaggccatggatttggcctttgttccataggcaggcaggctgctgggtgccagcgcgtgggagggcgcccacagaacgtctgcctagtactttgtactcactgagtaagaggccttccaagtcaggtttcctccggagcctagcccaggtccggggcacctagctaggaagttcacgtggcctggcatacgccccgccccggagcgctgacg

SEQ ID NO: 35607 - DNA, 473 bp, Mus musculus
  source 1..473: mol_type = other DNA
ttcgaggccagcctggtctacagagtgagttccaggacagccagggctaaaaaacaaaaaaacaaaaaaaaagatttatttattattatacataagtatactgtagctgtctaaagtcttcagatgcaccagaagagggcatcagatctcattggaagagcagtcagtgctcttaacctgttactgaagatgatcttgaactcctgatccacttgacactactgtaatgctttaaaggattttctttcatattgcagtatggatagagtcttgctatatagtatagcactatttggcctagaactatgtaattatgtctctctttcctgagttctgagattataggcatgcctggtgaaaattccaggtcactctgcttaatgttttgaagactttacactcctaatagtacatggatggaaattgtttccatattgcttacactagtggaggtaaaaagattttgatttgca

SEQ ID NO: 35608 - DNA, 236 bp, Mus musculus
  source 1..236: mol_type = other DNA
tagaggccagtctggcctacaaagtgagttccaggacaggctgggctatacagagaaaccctgtctcgcgagtccactttgactcaaaccagaaattcctcatttcctagtttccctaggagttacagagcacaggataattaagtgatcattaattaagttgtacttcatcagcctcgcgatcggagctgcggcgccgctctagcctccaggacgtcgtgcggcgggagcgcgca

SEQ ID NO: 35609 - DNA, 374 bp, Mus musculus
  source 1..374: mol_type = other DNA
caccaacaaaaattttcttgttttgtgtggggatctctcattaccacacagtctgtactgtcatctgtggattcaaagctcagaccaccaataaacagcttccgcagctgctcctcttccaactcgagttcaatatggaaccgcagggtttctctgtgtagccctggctatcctggaacactcttacctgactaaataaatatatttttaaagtaaatcaagtatgcagcctctacagacttattgacagcatcctgctgtgactatgttttctttcagagaagcgttccatgggagaggtacccctgaggacctccttcatgtggctgccatgtggatgtcaggagatgatgctggcaaagccgcctgccaga

SEQ ID NO: 35610 - DNA, 427 bp, Mus musculus
  source 1..427: mol_type = other DNA
atggaaagtgtgacaagctagattcttcttcctgcagttcctgtcagatcaaagacacagacagctgtgtgcttgccaccacgcctgatgacctgaattcaatcctctgacattcccgaaaatctaagtcagtcttagattttcttagacttagaaaaaaaatctaaagtcagcctttggaccagattgggagtttgagtgccagccttggcagagccagcccctcctaggggcaggtcacgggcttctgccttagaagctagagagagtctcacttcacaaaaggctcacacctgtgttctcagaggtgactggtgaaaagggcctgagggtcagagactatagcttctgtggtcacatggcatagatgtccggcactctgatacatctgcccagcttccctgctgccagggctcctgggaagcca

SEQ ID NO: 35611 - DNA, 482 bp, Mus musculus
  source 1..482: mol_type = other DNA
caggtccattccaccgaggggtggagtaggggctgtcgctaggcaccccccacccccgggcggagggaaggcccggggtctgcctgccagggcccgccactcctgccagagagaaccccgggcccgcgggcgagcgccaaggcccactctcccaggcagaggccccagcccaaccctagagcctgggaaagccgcctccgggtggcagggctcaggcaagggggtggcactcccagtcctgacaggtagggccagtcccccggtcagcgccgggagagaccactgctgcgcgggggggattccggggtcccggacacccgggtgagtggggtcacgatgctccaacacggttgctgccccatccggtgcaacccgtgggtgcaccgggcagaggcacaggattggcagtccaaccccggctccccccacgcccgcggctcaggtgggccgtgcccagcgctggcggagcccgggtccccgtt

SEQ ID NO: 35612 - DNA, 273 bp, Mus musculus
  source 1..273: mol_type = other DNA
tttaatgtttaacagcctcccataaagggatgccctcaaaggacaggactctaatggacctcatttccctgagtgtaaagtgagggacagggtgggcacagtgacctccgaatgaataagtaatgaatacatttaaaattcattattagattattttctgccacagcctcccaggctggaggccggtggccatagatgggccactctgtatccatagaggaacttctctgtagaagtcatgtgctcacaagacgctggcagcaagggaaggtt

SEQ ID NO: 35613 - DNA, 358 bp, Mus musculus
  source 1..358: mol_type = other DNA
agcctggctgagagcattaagttgggctaccacttgaggaaagagtcaggaagaggcctggcctgaccactgcaagttccaggggtctctggaattcctacatccagagtgactgcgtctcctggtcagggagagaccagagcagaggctctgtctgaatgggtacatggatgtctagactcacttgacaatttttctggaaagctgctaggggtcacccagcacagtgtctcagtttcctcttctggaagaggggctgtaacttcatctcagggagataattatcaccctgcccctagggacagctgtgccctgggttcaggtcacttcctcattttggccagggggctctccctgc

SEQ ID NO: 35614 - DNA, 323 bp, Mus musculus
  source 1..323: mol_type = other DNA
acaacaaccttctgagatagaatctaagttcgagaccagcctggtctgcagagtgggctccaggacagccagggctacacagagcactggcatatatgcaagcagaatgctgtatgcataataaatagatcgttttaaaaacaagagtatcgtaagctcttgtgtctttcccaatcatgaaaaaagccccagggtacaagtttgaagacagagtccttctgccctgtctggatcctgaagaaccccaccacaactgtggctgggcaggacatcccctgtccgtgtcctggtgacacgcctttgctgacgggtgtcccaccatc

SEQ ID NO: 35615 - DNA, 538 bp, Mus musculus
  source 1..538: mol_type = other DNA
ctgggggacctagcgttagttccctgcaggcacagagctaacccatagggcacctccccccagcctgcaatcctcccaggatggatgggcgttaccgcagccctggggcacaggcccagtgattcctgatttgctcagccagtgcgtccagctctctggaactgcctctctgaacctcggtgaccacccagtcctggaggtggggaggcagagcgatttgtcaactccaagtaccactgagttgtctatgggcgcgcggtcccctgcgaggtgcatgggcaggagtgggagaaccggcggtgcgtcccgtgtgcgtcctccgggacatccccaggctggccgcggtagcgaggtcgcgtgcttgcggtgcggcccacgagtggcacggggccaacgcccccaggcgcgagccggcccgggcgggcgtgtgcacgtgctgccggccggtggccgcggtgcgggctccgcgtcccgcccgccccggcgctgattggctgcgcgcgggggcggccccgcccggggcggtggcgggcgcggg

SEQ ID NO: 35616 - DNA, 362 bp, Mus musculus
  source 1..362: mol_type = other DNA
cactaagcctgactcagcagtagctgcaaactgcagtcacagtattagatgacagaaatttgagtgtcattgcccgatccgagaagcctggatctcggacaaatgggtctccatgtgatgcagggacagctctcatgaccagtgccaatggggctcatgttaactggatccgattcacatccatttgactgccaggacactggactcggggttagaaggaaagaaatctttgtcgtctcttcgcagcaaccaggttccaaacttggaagcctgccattggtagaaagcgtgcacgtgatgcagggacagccttctcgcgagaccgtcccccagcacgtgactacggcgtgcgcacatccggg

SEQ ID NO: 35617 - DNA, 765 bp, Mus musculus
  source 1..765: mol_type = other DNA
ctgtgccagacaccttggttcctgtgcaacctcgctgcctggagcgcgccagaactcagggcgatccagaagcgaggtttcggattcccggagtctcaggccactgtcccaagctgcccgaagtagagaggcccctgtccagctccgggaaggcggaccacagaacgcggggcgggcggggaggggtccggtggggacagccgggcggcaccccagcctggtgcgccctgagcgcgagcgactgggtgcgcgcgagtagcagccgctctcgctccggtggctccgccggggtcggccggggatcccggctcccaggcgccggcggggggccgcggggcgcggccagggcggcgctgcagtgcccgcagcggcgggctgggggagctgtgcccgctcgtccctaaggccccgggcggggacccagcagctgggtcgccgcgcctctagctcggcccaactgggcggcgtgcggccaagcgtgcctgcagcagcggggctgaggctccgagcgcgtccgggcgccgggccggggaggccccccaggagaagcccagtcccgcgggctcaggaccgcccccgtggggggggggttgtcccacgccgctggacccgcccaggatcctcggcccgcccccggcccgccccgccggccgcccgcccgcctccgccgccaccgccgcatcccggctctggggcggcgctgacagtcgggtccgccgggcagcgggcgcagcagcgggcggcgcggccggctgctcggaggct

SEQ ID NO: 35618 - DNA, 409 bp, Mus musculus
  source 1..409: mol_type = other DNA
tctttagttacagcaagtcacttcctctctcagagaagcaaagaggcaggctatcgcctataagctcagcacttcggaggtatagccggtagcctgggtatggtgaatcccagcaccaggcaagggattctctgagttccaggctagcctgggctccacagcaagtttcggcatggtagtacatttcttgaaatatcagaactctggaacaaaaatataaaagtaaaacatatttacaacacttttcttcaaaactttagttacaacaccgtgcacatcattgttcatagttttattacggataaaaaataccgggaacgcagcccgcgcgcgtgcgcgccaaggggcggagcccgagccgccctcagcctcccctgcgtgctgacgtcaggcgcgtgcccctgtccgg

SEQ ID NO: 35619 - DNA, 445 bp, Mus musculus
  source 1..445: mol_type = other DNA
cgagggtgctgagccaccatcagaagaacagtcagtgctcttgtccccagagtcaatatgtcactctgcctctgcctcccaaggcaaatggaaagggaggggtcccctcccgatcacccacatttgcgtcttaaaaagcctggtcttccaaaaattgtgggttgcagactgtgagtaggctgggatcacgtgctgtctgctcacagccctctcttatggaggtggacatcaatattaatccggatctgaacccaggcctgatcagctgtgctattctagccttccctgggaaagcccggcctgtctactgccacctgtgaaatcactggttggaggaagactggggtccctccttcagctcccactccctaatctacagtggttggtgtggtgttctaccacctgttgtgggagtggggtctggcgccagcccctccacctgcct

SEQ ID NO: 35620 - DNA, 196 bp, Mus musculus
  source 1..196: mol_type = other DNA
ttgtactttccggagaagtcctgagcctggaactttgcggctcaggaaatagcacaagatctcagggactggattagtcctggaaacccagacccatgggttccccaaaggacagcccttggagggtgtgtttgggctagcacaaaaataggacccatctgttctcccctgaggctggggcctggtcggaatgacc

SEQ ID NO: 35621 - DNA, 317 bp, Mus musculus
  source 1..317: mol_type = other DNA
cagctggagacaaatgggaagggaggggtcccctcctgatcacccagaggccagcctggtctacaaaacaaaaacaaaaaattgtgggttcatcttgtgccatcactaggcagactgtgagcagactgggatcatgtgctgtctgctcacagcccttctcttatggaggtggacatcaatattaatcccggatctgaacccaggcctgatcagctctgctattctagccttccctgggaaagcccggcctgtctaatagacaggttggaggaatgtgggagtggggtctggggccagcccttccacctgcctccggc

SEQ ID NO: 35622 - DNA, 464 bp, Mus musculus
  source 1..464: mol_type = other DNA
gcacataagccctagcacaaaatgtgtggaagagatatttgccacaaagctctgttacctgagagctccacatgtgcactggggcatgtatgtaggcgcacgcgcgcgcgcgcgcgcacacacacacacacaccaataaataaaagccactttatagcttgttgggatagctgagtgcatgtgagatccccctctctaaactgctgtgcactccgtgtggagcacgtggtggagggctcgaggccctgccaggtggcgcactccaagccacgtctggcgtggagccggttgggcctcatcccacatcgagggggattggggcccagacaaacacagtcggccgcgccgctcctccagagagcctagctcgcggctaggaggcgggggccgccgctgagggggcggggccggctcctgaacttggcgcctcgggggcggagccggagacccgggggcggggcgtg

SEQ ID NO: 35623 - DNA, 398 bp, Mus musculus
  source 1..398: mol_type = other DNA
tgttttttattttcagcctaaattcaaccaaaggaccaaatcttgcttcagtaaatcttgacttcagggaattagtccttgaattcccacagggcttttacatatttaaagtcctggaatttatagctcttttctgttacaaaacgctgtgattcagtttagccttttacactccatgacgtcaaagtgttgatgcctcgcgctccgcgagtggcagagcgcattgcacgctgggattgtgcataacgcctcgtgacgtcatatggtgtaactttgtcacagtagtggcgagtcgcctttgggctttcggcgcagggactcctgggagcacgcatgcgcagactgcggcagggcgtacgcctccaacgtccgcaggcgcggggtctgtcgggtatcgg

SEQ ID NO: 35624 - DNA, 448 bp, Mus musculus
  source 1..448: mol_type = other DNA
gcagtcatttccttaatgagatgcagttccccggactcaggaaagaaactttaaatttatgatttaagttgtttctcccaagtcctaccttgaccttggacagcctcagtttcccgggttagaacaatgagcgaatcctgtccctgtggcctgagggagagggactgttggccatcagtagcctctcctgtagtctggggcagggaagggaagggccattaactgggcctctcctggttccagggtgccactgggccgcctaagctgtcagctagagccaccagcactgccactgcctggctgtgctaggggcgcgtggcaggggttgcctccctgccgctcccgcgcctggggctcaggctccgcagtgaggggggagcggcgccgagaaggagcgctcggcggtcacgtgacgttccccctccccgaactgcggcggcggtggcgg

SEQ ID NO: 35625 - DNA, 504 bp, Mus musculus
  source 1..504: mol_type = other DNA
catatccataaatcaatatttgctgttgttaattattaaagccaaaacctgaccctgggccaggtctgggagggcagggaaagtgctgcctgccttcctttcaggagctccctggccctggggacctgccccccgcccctagctggaggacagtcctgcccctagagcatccagacttctccacctgctgcagactggctgcaccagccggtgccagagactctgcagcttcagactcttccagggatcccggggttttctagcaaaaaaagctattgcacctcttggaatatgctgggcacagctgtcccaagaaccttgtccttgaagcccagaggcagggtctccagtctgggaagacgaagtgcctgaggcttcccgcgcgcaggcgcagtgtcctgggccccttgcccggccgccccgcgagtgggcgtggtggccttccgccccgcccctcctccgcgcctcccgcacctggcgccccgccccctcgggcccggcagc

SEQ ID NO: 35626 - DNA, 451 bp, Mus musculus
  source 1..451: mol_type = other DNA
tgataagaccctcctcttaggaggataaggcccactggcacccagcggttgctgcgggttatagagccttggccagtcccccgaagtcaccagagcaggcctgtgggcctagacagtctggctccactgcctgggaagtggtctgccccgggcaggtcctggggcttctggctgggacagacagaatgtcctgagtccctgtttctttattagggagggagggccctgtctccttctgcttcctactgacttagttaagggcaaaaagagagaggcaaggcgggttaccctgcctgttgcagccctacgggccgggtcgagcgccgcgctcccggcagggggcgccctggcaacgcagaggcacccgcctggggctcggggtgcgggccgggggcggggcggccgggggcggggaggccggcgggtgctcggccaggccgccttcataagc

SEQ ID NO: 35627 - DNA, 375 bp, Mus musculus
  source 1..375: mol_type = other DNA
tgtgtgtgtgtgtgtctcaagctgcatgctcgaacacacatgtatttcttcctctgcacctgcgcagcgggcataaagagaaagtgcgcctgcgctggtgtacacacacacacggctcccagaaccccaactgggcgcaggtggacctgacaccggctccgtctgtccctcgagagggtcccggcgaggtccaagctggaggttcgggcccgcacccctggacccaccggtatccggggcagctagagtatccagcgctcggggagtctaaccgacggggcccgcagcccccgcacttggttcgcggcgggccccgccctctggcctgggcgccccagcctcgcgcgccgccccggcagctagccctgaggttcg

SEQ ID NO: 35628 - DNA, 320 bp, Mus musculus
  source 1..320: mol_type = other DNA
atagagcaatgccttatgtcctggccttgaacccggtttataccaccctggggatgggacccaggcctgaatgcatgctcagctagccctctactgctctgagagtatacagtctacgagaatctcaggctctgaccctgtagggaacctgctctaagctccctcccgggctggagtatgtctcctgtgacaggaggcatctgtcacctttggtatttattgagcacaatccaggccctatccggggtcccgcagggacagggaaagcaattaggatccccacatttgtagaattcagggttcagtacaggacttcctgc

SEQ ID NO: 35629 - DNA, 316 bp, Mus musculus
  source 1..316: mol_type = other DNA
ttagttcaagaactcagactggagtcatgttgcctgggtttagatcccaaaccccacccctgagggttggacaatcgatatacatatcaagcatttaaagtacttggcttgtagtgtttgactggtatacagcaagcactaaataaatgtatgatgtgttgattagagccacgttgttcatttctcctccacaccacaattcctgctgctgagagtgaactgaatgaatgagtgtcaagccttacctctccaggcagaggaacctctctaaagatggatgcagcttcctgtaaccgaccacagcagtgtccggtgc

SEQ ID NO: 35630 - DNA, 352 bp, Mus musculus
  source 1..352: mol_type = other DNA
ttcttgggattatatgagctaatgcagtactccatatctgcaccctccagtctgggatcccgtttgcctcctctgcaaaatggggctcctcgcactttgggcatctgaggacgacgtgtcgacataatgcccatggctggcgacgtcaagggccgaggtctcgacggaccgcggcctcgggtgccgcctcagctccgcaccgcgccgcggagatcctcagccgtcccggatctcctgcggcgttcccgaacagcggccgaaggcgctcccgagcgctcccgaagaagcccggccgctcgcggtctccggaaatagccgagagagcttgccaccctcggtctgccgagtcctt

SEQ ID NO: 35631 - DNA, 614 bp, Mus musculus
  source 1..614: mol_type = other DNA
aggtctcgacggaccgcggcctcgggtgccgcctcagctccgcaccgcgccgcggagatcctcagccgtcccggatctcctgcggcgttcccgaacagcggccgaaggcgctcccgagcgctcccgaagaagcccggccgctcgcggtctccggaaatagccgagagagcttgccaccctcggtctgccgagtccttaaagctccgagcggccgtcctgccggactgctggaggcggccgcagcgagccccgctaccgagaagggcgccgcttcccccggggagggggacagagaccccccgccgccggcccatgctcctgcccctgccgggtccggcccccccctccccggggtcgcgttgtcacggagaccggcagccggtggtgctggcccgcggggcggctgctgctgcccgcggcggcggcggcggaggcggcggcggcggagggcgtgtgtgaccggtcccggccccctcctcctccctgcccccggcccctgcaccccggcgcgcccggtcccgctctgggggggttggtggaccgcagaaaccggctctgaaatcaggctcagcggctgcagcaggaaccggacccggcaccggagcggcggcggc

SEQ ID NO: 35632 - DNA, 522 bp, Mus musculus
  source 1..522: mol_type = other DNA
gagcttcatgcaggaaggagcctggctctagtaactacctgacccagattctgcttttcattagaataaaagcaactgacagctgctgaaccttccagaagttcagagcttgttgcaaaaagccaaccgccgctactgctgttaccactgacggtaattccagccaattgctaactgattttttatccaagcagagggctcgaggcactaggacaccgagcctgtccttgcctttcagtcgagaattggagtggaaggcagggctgcagttctcggcaacttggccctctcaagtccaggctgcccgagggaataaaagtgaagagattttactttttcaccacaatctgataatgagaatgaagagactctgtgactgatcctccagtttgaagacagtgtgcacagagtccagggctcaggacacaagtgacacaaaactgtgttatgtgctttaccacggctgaggtgagggcattgtaacagagtagaatgttccagtaatggaattctctgggagtt

SEQ ID NO: 35633 - DNA, 385 bp, Mus musculus
  source 1..385: mol_type = other DNA
atgcatgtacttgaggtacattgaatttttccaaagtggctttgaagaactacacctgtcaggttggttacctaccgtcatcacactgggctctaggtgctggcgatggcaccgtgcacattacatgaataggcagaataaaaggcgactccctagaagctgggggcagcccggctcacgcatcttccaggctgccaattccctgtggactcaggaagtggccccaaacccgaaggactcggggtcggagacagagacgcagccaggaagctagcgctcccagccccacgagcgccctgtcgcgcccctgcgcgcccgcccggggacccacttggcgggcgcgcgcgggggcggggccggcgcgggggcgcgcgcgtgaggccgc

SEQ ID NO: 35634 - DNA, 347 bp, Mus musculus
  source 1..347: mol_type = other DNA
gattccttaccattcaatagcatcggtatttactgaccttctcacctggctgaattaacatgattaaagtgttaatctgtgggcaacaatcacaccttattgatgcccagagccgtgccctgcgcactctgcactgcacctgggaactcccctgaggctgcagattcagtactgcgctcctcacctaatgggatcagaagagctcgcccgtcctgctggaccccagcccagtaagtggattcaccgtgcagacctagtggagtagctaggtctgccccgccctgagctcaccgagtctggacaggtcgcagcgtgggcggagccaggtaccctcgcagcctctgatt

SEQ ID NO: 35635 - DNA, 704 bp, Mus musculus
  source 1..704: mol_type = other DNA
tgccaattccctgtggactcaggaagtggccccaaacccgaaggactcggggtcggagacagagacgcagccaggaagctagcgctcccagccccacgagcgccctgtcgcgcccctgcgcgcccgcccggggacccacttggcgggcgcgcgcgggggcggggccggcgcgggggcgcgcgcgtgaggccgcgggcaggggggcggggcggcagagctcggtgcccggcctggaggacagcggtgtcgcgagtcggcgatcggtggtccgcggcaacgccgagaggccgtacggcgcgggcgccatggacccggacccggcgcgcagggagtgggcgcgagctccgtgcgcgagtgagtagcggagggccaccggcctgggcgctgacgccgctgcccgggcgcaagaggcgggacgcgggcaccgaaggccggcggcttttgtccgtccgccgcggccgctgcgccctctcgcgtcgcgcccgccacccggcccctgcccctggcgcgcgggccactcgggccccgcggcgcgcgctcccgccctggaggaggggcagctcttctcgggtcgggcccaccccccctcgcatgctccggcgtgcgccgcggagccccggcctgtcaacttgtcttcaagcccggttcgaaagatgccggcactagtgagtggctgcggcgggcccgccctcccggcttctccg

SEQ ID NO: 35636 - DNA, 411 bp, Mus musculus
  source 1..411: mol_type = other DNA
aaatgcacacacacgcgtgagcacacacatgtaatttattaaaattcagactctgatctgtacagcccacaggatccttttaaaggtgacccacagaaatggctcatttgtagaggaacaacagaaagattaactcctaaattttttttgtctttttaatttttttttcaaatatatttatttatgcgtgactgggaccatgtaggcccgtcttttaaaaatatgaattctctcagactgtccctctcagtctgtaacccctaagggaagtggagtcagatgtgggctaggggttgctgaacctcactgggctggagctgcgatcctacggcctggtgcatcccctgcaccctgtgacgtcacggaggttgcccagcaacggcgaacgccgagacggcgtgcacgagcgcg

SEQ ID NO: 35637 - DNA, 362 bp, Mus musculus
  source 1..362: mol_type = other DNA
cacgcagcagcttgggtagccgccagccaggtgcgagccaggcgtgtaagacgataaatcgtctttaccttggccggccagagcaggcctggactcactatgtggaccaggctggcctcgaagtcaccgggcctggccagagcctctcaagagataagggcccgttagactagcgacaggcgaggaattcacccctatctggcagctacagcctacagagactcggcctccggagggccacttccggtggcgttccctgcttcttggtccgtccccgcagcggcgtgggccgcggggccacggagtacccggaccgcttccaagtggtactccgccgctgcgagcggccattgggcggccgc

SEQ ID NO: 35638 - DNA, 496 bp, Mus musculus
  source 1..496: mol_type = other DNA
cgaggccagcctggtctacagagtgagctccaggagagccagggctatacagagaaaccctgtctcaaaaattaaaaatttcactggatgaccagtatttggtattatgtgattttacacacacacacacacacacacacaaaattatgcttaagtcagaggggtggtatatacctaaccagggctatgcaaggccttgtctagtaaaaatagtaacagggttaataaccttattatcagctagctattcgtaacaagcagtttaaggatttattaagcatctgggtggcttctggttaagtctcccagtcagtctcagacctcagctcctggtgcataaattatggcgccaaggtcttccctcgatagccctgataacaaatattagtttaccaggaccagtgaagttgttcacaacccctcgacctagcgggtagcgcccccgcgtgctgcgcaggagaactgccggggaccgccccccgcgcttgcgcacagg

SEQ ID NO: 35639 - DNA, 304 bp, Mus musculus
  source 1..304: mol_type = other DNA
agtctggtaaccacaggaagggactgccaattgtgaggtagcgcagctcttcctgggagaagcacatttgtgtgtaagacaagaagaaggagggccctgtttccctccattagctgaggaatcaggatcctttgagccctgggactcactgaggtggcagtccaccgtgggacccccctcccgccctgggagactcactgggctgccaagtcctggccagcatcccgccagcctgggagccagcctccaggtctccctctagcgcagggacacaccccgggggaggagccacctcttcttggcc

SEQ ID NO: 35640 - DNA, 293 bp, Mus musculus
  source 1..293: mol_type = other DNA
gatgggaacaagagccatgtctgtcttgtcctctgtctgtccactgggcctgggacagacttcagcatgcagtaagcatgccttgtgcatcttctgacaagaaacaacacatgaaaccagctggctctctctgcagaaaggactcagagggctctgaggaaatgggagccttccttaagagcagctaagatttcctccaggacctttcctccaggtgcttggggtaagccagcaacaccggggagcttgagttctagaagcttggtacaattgacttagactctaagaacgta

SEQ ID NO: 35641 - DNA, 220 bp, Mus musculus
  source 1..220: mol_type = other DNA
taatagtcactcaataaaaatatttgctgttattattaaataagcagtatgctcgcgattcaactggtgtagaatcaattcaactggtgtaactttgtagaccaggctggcctcgaactcagaaaaggtgctttgccaccatggctaagaacttgagttcccctctatagttagatgtcatttagaggccgcagtaacgtcgcaaccacctaggcaacgt

SEQ ID NO: 35642 - DNA, 457 bp, Mus musculus
  source 1..457: mol_type = other DNA
ctagagcccctccccagaggatggagacaagtgcctggactctatgcagtcactaggttctgagtgacccatctccttccaaccacatgagcctgaactgccttgttcgcgaatgccaagcacttgggaactccaaagtcggtctctgcagataggacattatctgtctaatcttcaaagatgccaccagcggttgctggtgtggtggtgtgaccgaccagtcagtctctcagctcaggggaagcggcctagtccacggccacctcagctggctttatgctgtgcacagaagaggcaaatctctgctttcagagaggagagatgcgctccctgggaactcggagtccaccagtgaagctggagaaatttacattcgtaaatccctccggcgcctgtgctgggtcttgggctagcggtaccgcccggtgatgcggagtcgcgacgcctgaaggagtcc

SEQ ID NO: 35643 - DNA, 393 bp, Mus musculus
  source 1..393: mol_type = other DNA
gctgggagccctctggtctgacagcagacaactaagaaggttcacattcaatggtttctattttcctttgcagagggcaggagactgtcatcccacagggagggcatccatcacactaagcagtcaggctgccggcctcccagattctaagggtctcgttttaaaacagttgcacaaccctgtttaaaacaaggacactggcaaagtcaggccaaggattgacagggatttgttcctggtccctaccccgactccagggcagggctccaatggcaggggtccaggcccagggccctgtggcctccatggggcagggccacaccaaggtcctgagccaggtcaggcaggttccggtcccaccggaagcacgtggcccccaccccttggcggttg

SEQ ID NO: 35644 - DNA, 346 bp, Mus musculus
  source 1..346: mol_type = other DNA
cagggcaggtgcccattccttaattggatacaaatgaaatcaagattcccgtggttagggtctggcatataccgggacatgtacacgtgcattggtcttttaaatctggaagcaaagcttcaagtggagctgtgggaggctccctgcagctcctgcctctgggtccagggactggcttgtagacgcccctcccaggagattcccttagctgctgcagactcaggctccagccaggttggctctgtccctggggagggccactcagcctccggtgcctggctgcgaccagctggtaaacagccctgtctccctggcaaccgccaaggggtgggggccacgtgcttcc

SEQ ID NO: 35645 - DNA, 313 bp, Mus musculus
  source 1..313: mol_type = other DNA
tgcatgcatgtgtctggtgcctgctgggaactgaactcaggtcctggtaacctggaacttgctatatagatgaagatgaacttgaactctgctttctgccaggtgccagggctacaggcacgtgccacggccctaatgtggtattccctacaggaaggtcccttgaagaaagtaccttttgttttctcagacaagtgttgggtaacattccagctggggatggggtgagctcagcccttgcttcaggtgcagggggtgggatcgataaaccccactcccaagcccaagggggtgggtaggaggacatctgtca

SEQ ID NO: 35646 - DNA, 393 bp, Mus musculus
  source 1..393: mol_type = other DNA
atcttatgaagcatttgaggccagcctgggttccatgagacacagaacattttcctggactgaagataacaattatgtagatggtaaatgattgatgatagactattggtaatagatatttatgattagctatataatagattaatgaggataaaagatatgtagatagattgatgggtagatagatggatagatagatagatagatagatagatagatagatagatagatagatagatggatggatggatggatggatggatggatggatggatggatggatagaataaaccaaaatgctaattgtgtttcctgtcttcacacatgatcctcaatttcaggtggctcagtgacagaatgattctttttcattattattattaaaaatatctg

SEQ ID NO: 35647 - DNA, 224 bp, Mus musculus
  source 1..224: mol_type = other DNA
ttattaggaattgaggatttatggataagtcttataactttaagcagaattcaaaaatttcaaaatgatattttggcgagggggctcagacccaggaacactgggtcccctagggtctccccagtggcttcagacggggtgttcgtgctcctggcggcttctgaagtggatccctccccactggaatgcgctgggtggctgcccagggccctgctgcagagggg

SEQ ID NO: 35648 - DNA, 338 bp, Mus musculus
  source 1..338: mol_type = other DNA
cttactttgtgaactccaggtctcaaaaaaagttgtcttctgaatgcctttggttgacagagactgcgtcatccagtctgcatggccttgaaacttcacaaaagcttctgtgacccaatgaatgaatgattgactccttgcaagctctcagaagtgactgctgccgatgtatctccttgcaagctctcagaagtgactgctgggaggtgtccggtagtcacacccgtttatggaaagttccccagtcaggagaggtttcaaaatcagctgattttccagccctcagggctgccctgccagctgttggggaacaaaaagggcattgggtatgcccatcc

SEQ ID NO: 35649 - DNA, 382 bp, Mus musculus
  source 1..382: mol_type = other DNA
tgatcaattctactagaacatgggctggtgcctcacaaacagctgtaagtctagttccaaggcatatgcatacataatttttaaacactagtttatggatgctctttgtataaataacaatgtgtcatcttacatatattgaggcatggacattaatgtgacaaccaatgttgtacataatattctgtctctaggatccacttgagaagtgtgactcagtatacttaatttttttttccttctaaaaaagaatcctgagcagtcagctgctgtggttcatcctgtcaacttgatcaccagggaagacccaccctccatgtgggtggcaccattccctaggctgggggaagccagaggagcacctctgttcatctctcagcct

SEQ ID NO: 35650 - DNA, 299 bp, Mus musculus
  source 1..299: mol_type = other DNA
cctctgcctgctgagcgctgaggttccagatgatcagatccagggcatcagatctgcgtggtcccatgagtgtgctggaagcataggctccctgcaacagccctaaaaagtcagtctaattatttccatttttataggactttgctgtaatttctgacaagaggtgtgaacttcaatggggtagcctcctccaggaagctagcccagatttctccatgggaacattcagtgtcccatcctgcccaggtcaggattcaaaagcaaacttatgactcatggtttgaggcctcgtgacccag

SEQ ID NO: 35651 - DNA, 436 bp, Mus musculus
  source 1..436: mol_type = other DNA
ggctttataattgtgttattataaagtcagacatagtcgctgtattaacatcattcctctgattttatttaaaaaacaaaaaacaaaaaacatcacctacccacccccgccctcagcccaaaggggctaagttggcccttggtgagccctttagggctgcctccccacctcaccccctgtcgtgggctatggagggtctttggccctgtgtacacccctgtggccctgcacatgctcagtgcgagccagttctaggatgcccctgtctctgtaacacagacaggaacactgaggtcccaagcaagggaaagggactgcccagggcctcgtgcgtgtcaaacttggctccgagaaagcttcagtttctccaatccaatgggttggggaagagccccccggggaactggctggcccctcccctgggtggacaggccct

SEQ ID NO: 35652 - DNA, 254 bp, Mus musculus
  source 1..254: mol_type = other DNA
tactgccgttttataaaaccctccatggcctctgcatctccaaggatggatgttgaagtgtaagccaacttgtagctcactgattggctaaactgcctggcagtgagtgcctctctgacaggcctaccctaaagggtctgtgcacgcacgcaggcgtttgtaaaccaggctggcctcgaactcaggcgtgcgccaccaggcccggtgcctgctggccccgccccgggggcggagctaccaccacgtgacctggc

SEQ ID NO: 35653 - DNA, 187 bp, Mus musculus
  source 1..187: mol_type = other DNA
gctcttaggggtctgttcccgcggtaaggtctggaggcctttctcagagggatgcttcccagtcaccctcatcaggactttaaaggctgatgagatgtctcaccacatgtggaccatgaagacatgtgtcacatgcctacagctccagacagcgtccctgcctgaagttactgattaaccctgggtt

SEQ ID NO: 35654 - DNA, 402 bp, Mus musculus
  source 1..402: mol_type = other DNA
gcctcagccttggcaccacgctgcaacaaggagctgtggtttcaccatcaggccctgctgatccttttaaacaagaagcagggcttagctcagaggcaacctgtaactacagtaaagctgtcacttgcttagcaaacgtgtgcttccaatcttaacactgatacattggacaagatttttttaaaaaatcaatattgatatgtggcaaactattttcaaattcgttttccattagagaatgaccgtttttttttaactttcagagttacatttatttttttttaatatcaagaacttactaaaatcaacttatgctgaaattctcaggctgacaacaataggatcttttaaaattccatgatatataacctcctagctcttctaggtcctgattggccgata

SEQ ID NO: 35655 - DNA, 187 bp, Mus musculus
  source 1..187: mol_type = other DNA
ctcaggctgacaacaataggatcttttaaaattccatgatatataacctcctagctcttctaggtcctgattggccgatatcaagtccactgaccaggatggccacctacttcctcagtgggatacccagattataaattggagtgttaaattaatcacgtagtaggtgctcagcaaatacttgttc

SEQ ID NO: 35656 - DNA, 499 bp, Mus musculus
  source 1..499: mol_type = other DNA
actagacccagtatagaggatgctatttcctgcatgctaggaaagcactgctccctgagggtgttggaacccccaataggttggagcgccacactcccaaggcctggcaactgggaagcggccggacgcttggctcgtgccctttcatccctgtcccggccgtcggggagcggggcccatggctcgggcgcccctgctcacgagtggagggagcggccctcgctcgctcgctcgcccgccctgcccgcgcgtcctgacgtcggaggcgctcggcccgccgctcccccgcgcctcgcgcccgcccggggccgcagacggccagcagcgcagcccagccgagcctcgcggggccgccccagcccgaggaccccgggcctgcgacccccgcggctcgcacctaggacccccaggaggacgcgccgcgctccccgcggccgccgcgcgcggtaagtctcgcccgggcccgcatgccggagcggggcaaccggagcccctttgc

SEQ ID NO: 35657 - DNA, 442 bp, Mus musculus
  source 1..442: mol_type = other DNA
ttaaatccatttgaatggaagtcgtttgtggatggagtggtgcagccctacaagcctgctctacagagccaggtccaggacagccagggctacacagagaatccctgtctggcagtggtggcacatgcctctaatcccagcacttgggccagtctggtctacagcaaaaacaaagtatataacatatatatatatatatatatacacacacacacacacacacattattttatttgttatatgttttattatatataatatagatatataatatacgtatattttatatatatacatgtatacatatacatacacacatatatacacatacacacataaggccttcctccggctcccaggcaacctgtcaccttgaatcccgcgatatttggcgcgccggctccggccggaagcttatggtggcggccggctctcgcgagac

SEQ ID NO: 35658 - DNA, 336 bp, Mus musculus
  source 1..336: mol_type = other DNA
tgatggtgcagtgggctatcaccttcaaggaacgcgtgggcaccactagacccagtatagaggatgctatttcctgcatgctaggaaagcactgctccctgagggtgttggaacccccaataggttggagcgccacactcccaaggcctggcaactgggaagcggccggacgcttggctcgtgccctttcatccctgtcccggccgtcggggagcggggcccatggctcgggcgcccctgctcacgagtggagggagcggccctcgctcgctcgctcgcccgccctgcccgcgcgtcctgacgtcggaggcgctcggcccgccgctcccccgcgcc

SEQ ID NO: 35659 - DNA, 493 bp, Mus musculus
  source 1..493: mol_type = other DNA
acaaaacaaaattcactcttttgaacagcaaattagcctgcctgaggctctctgagtcactatatgattcgagagagatactcatttagggaaacgctgattctctgtacataatgtaaaaaaacctaaaagctgcccgcctggtcctgatagcaggtgttcagcaacaggggcggcagagccggcttccccatgcaggttccgctcgctctgtaggggccgggcctcgtccggcgcaccagttccgggtccgggtgggttgcggagggccggtcccctcgctagcccgcgtcctgcagctgcgagaagcgaggctgacatccggaacgccacagccctggccgcgcaggagcgttgcgcctggcccgcccctcctgagacaggacacgcccactcgaccacagggcctgcccccgtccccgccccccgcgcggcgctccatacttggcgatcgctgcggccccgcgctctcattggtcgggagctggcggcc

SEQ ID NO: 35660 - DNA, 390 bp, Mus musculus
  source 1..390: mol_type = other DNA
gggtgggggaggggcggggtcccggaccctaggcagacgccactcttcgggtccggagtgggcggcgggaggccctgatagcctatgaccccgccctgggctccattgcaagtccaggctagtctcgcctatcccaggctagaccttccttccttcaggggccaggccgggcacccctcgcaggccttcatcccatgggctgtacttgggctcctgcctcggccccagggcccaggctaggaccgtggttctcgctccaggctctttctgggcagcctctggcgagcgggggagagccccagccagggtgggggtggcaggttggtaagccaactggacaggggtgaactcacaattgctcttgtgaggccgcagccctggggctagggg

SEQ ID NO: 35661 - DNA, 588 bp, Mus musculus
  source 1..588: mol_type = other DNA
cgaaatgccctgggttgagatccacaggtgctgtcgactgcacgggacaaagtctagtccggacctcgcacccgcctcggtagctgcaactagaagtttctaagggagcttggggtagacccagctgtggatccggagcttccgaagctcctggatggtgcacgccggttgcgggcaccggctcagctctactcggtgcggggggcgggggaggccgggtgcagcggttacctgtgcagtcgccgctgcccagcccgagccccaggccgcccaggatgttctcggactggccgtcgcagtacatgaaggccgtgtccagctcgctgtggccgcgctccaggaaggcgcggaccgaagcggcgctagcactcgcatccatgcgacgccccatctccatggtgcccagcaccgtagcgggccggagaggggcgccagaggcggcgcggcgacgcccgaccgaagtcccggagcgctgcgcggagcgaacagcagcgcggcccacggctctggacgctgcacgcagcatggagactgcgcctgcgcactcgaagcttcaggctccgcccacggcggggggcgggacttcgc

SEQ ID NO: 35662 - DNA, 326 bp, Mus musculus
  source 1..326: mol_type = other DNA
cccactaggggactggccaggagacagtatctatattctgttctgctgtacattgtagtctctgtagcccctgcgctccagcggctggggcaagcgccgcgaggcccccacccagagcccgtcccggatccctggccaggttgggcagagacccacgatcccgctccccaggaggggaccagcgccggggaccgtgcagctgggcgcgtctggagtcccgaccccccagcccgggacacggtgtcagcttcaggatccgagcccgccgggatcagctgacctccgcgaagtcccgccccccgccgtgggcggagcctgaagcttcg

SEQ ID NO: 35663 - DNA, 355 bp, Mus musculus
  source 1..355: mol_type = other DNA
gcctgattttcattttttttagaaaaagaaagaaagaaaaccgtggcctacctggtggggcccacctccaaccatctggtatggtgccccatatacaaaaagctggccgtccagtttatatatgtgatagcaatttgaacatgttgatgagaaattcaaatttttgagctgtgtgagacagacaaaaagctcaggtctaagggctcagccggccagcatcctctaccagatggtgtatagccacgtgaacatcgtcaagtttaacgtggaggaaacttggcagggcagctgcaaaggcagctgtgttcctgatgcccaatacgtttaaagcactttgttaatacacaaagtgtgc

SEQ ID NO: 35664 - DNA, 339 bp, Mus musculus
  source 1..339: mol_type = other DNA
attcaatctgaaatctgcacccagagagtccctcagagacaccagctagtttcaggcttaaagttcactggggctagtgacctgggacccatacatcttacgactcttcatatctgaagaggagactctcacattgtcagcagcatatctccttcagattagcaggaccagtcaaacttgcccacttggtcttcgtagaccgcggccgcaaagcaccgcctgccgccagcccggcatgcaccgggcctcctcgggactcggaagccgccgggactggagggacccgggacctggcactgggggcacacgcgaggggcagccccgagcgccgtcccataa

SEQ ID NO: 35665 - DNA, 371 bp, Mus musculus
  source 1..371: mol_type = other DNA
gtgtggacacccacacctgtaattccactggaggtgaagatagatttggcctatagggaccaaatttcaaaaaagcttaacgttctctctagattattatcgaaggaattctaaatatataaagaagaggaagtgactaacactgagcaggttgtggaaagtcatgcggggcccgcgcacgcgcggtagttactgcttcccgcgagcatgcgcagggttgctcgccgccatggcgcacgcgcagagggcattgctccgcactaccctgggttaagcccgcagaagtcagacgacccgcggcgcgctgtctgacgcgcacgattgcgtcacttccgccccctcccgggaggcggcgctgggccggtggcaag

SEQ ID NO: 35666 - DNA, 401 bp, Mus musculus
  source 1..401: mol_type = other DNA
agtacactgtcactgtcttcagacacaccatcagatcattgttgggaccaggacccaaaatgaacacctttaaaaaaaatacatatgtatgtgtgtgtgtgtgtgtgtgtgttagttgtctgtcaatttccccagaagcatacaactgatatgcttattcaatctgaaatctgcacccagagagtccctcagagacaccagctagtttcaggcttaaagttcactggggctagtgacctgggacccatacatcttacgactcttcatatctgaagaggagactctcacattgtcagcagcatatctccttcagattagcaggaccagtcaaacttgcccacttggtcttcgtagaccgcggccgcaaagcaccgcctgccgccagcccggcatgcaccggg

SEQ ID NO: 35667 - DNA, 270 bp, Mus musculus
  source 1..270: mol_type = other DNA
cacacccctaactaaggtggtgagtctgcatgccagctaacaagcttaattccagtgtcggcccggacatctcggccggccgagcctctcggagaggccccggcgtctcacccgcgtccccctcggcggcggaagactgggcggccggttaggacccggctgccgcgggggcttatgggacggcgctcggggctgcccctcgcgtgtgcccccagtgccaggtcccgggtccctccagtcccggcggcttccgagtcccgaggaggcccg

SEQ ID NO: 35668 - DNA, 333 bp, Mus musculus
  source 1..333: mol_type = other DNA
gagccagagaactagctcagccaggtgtgtttgcactcacgtggatggacctacgcccagttttgagaacccatgtgcgagtgtaaatctagcactggagaggtagaaactcgccgaactcaagattattactaggcttggcagcaagcaccttaccctcaaaaaaattacttctttaaagtttaatcattttttgatcaacagctttgaagtgatgtgaaatagtatgaaatagtttcatttggaagaagttcttgctgtgcgtgagtgtgtgtgcgctcgcacgcgtgtgttctgggatgcgtggaggcactccacaaggtgcggaggctc

SEQ ID NO: 35669 - DNA, 262 bp, Mus musculus
  source 1..262: mol_type = other DNA
caatgcccaggggctggactggccttgggaaagggcggactctacttttctccagagaatagactgcctgcagtaaggccagaccagcttggttccaaatgcttttgttggctgctccctgggctgtcacagcgcccatgtgtctctgtgccccagcgttatgcaccaagcaggccttcgagaggactctacaaatgacttctagacagctcggccagaccagcagctgtcacccagaggtctgatcatggagtcactggcc

SEQ ID NO: 35670 - DNA, 513 bp, Mus musculus
  source 1..513: mol_type = other DNA
acagtggttccctaaggcatcattctaagagcaggtttcggaagctgttttaatacgttcgagtattcatcaaacaacgtctcatgaagaaaacaactggtttttgtggctagttatctcattctgattccaatctggaaggaagcaagcccaggcttggccctgagccaggctgggaggctccatgcacggtggcagcccccggggaggtggcagggagctggccggcgggcccgggcagagttgtagcctgcagatgtccagccttcctggggatgtcgcgtcgaccgggttactgagcacgcgctctgtgcaggatctgtccctgcctaagaaggctgcagctcatgcgagactcagtgaggctcacgccctctctccttgggtcataccataaggagaggagacgaggagaagagagtatcatttcattgtccacagtagcaattttgatgttaaatacagctgatggaccgggcgatgctgcgcctcccgcccgggcttgtctagtcc

SEQ ID NO: 35671 - DNA, 494 bp, Mus musculus
  source 1..494: mol_type = other DNA
gtggtgcaggcctttaatcccagcactctctctgtaaattcagggcctggtctatagagccagttccaggatagccaaggctacacagagaaacagtggttccctaaggcatcattctaagagcaggtttcggaagctgttttaatacgttcgagtattcatcaaacaacgtctcatgaagaaaacaactggtttttgtggctagttatctcattctgattccaatctggaaggaagcaagcccaggcttggccctgagccaggctgggaggctccatgcacggtggcagcccccggggaggtggcagggagctggccggcgggcccgggcagagttgtagcctgcagatgtccagccttcctggggatgtcgcgtcgaccgggttactgagcacgcgctctgtgcaggatctgtccctgcctaagaaggctgcagctcatgcgagactcagtgaggctcacgccctctctccttgggtcataccataaggaga

SEQ ID NO: 35672 - DNA, 455 bp, Mus musculus
  source 1..455: mol_type = other DNA
tggtactccatattgcagcaaggcatagagcatgtgactagcaggctcaaaggctgcgagaagccctgatcctgcctggtagggacctttgcaggccacagtcacccgcatgcctgagaatctggggtcaagcccgcctggcacggtctccacaggctgtccaccttttcaagaggctgcggtgcccggctctgccgcgttcccgggtacatcgcattcagactgcgttagattatctgaacctgcagcgccgcacgcaggcgacctgtgggtgggcggagcccaagggccgataggcgtggccggggctgccgagtctcagcgggcggtccaggctagggaggaaggccttcgcctatagatctgcagagggcgggccctggaggcgtggtctgtgcctgcagagggcggggctcgccgcagagggggcagcgccggctgagagtcctctgcga

SEQ ID NO: 35673 - DNA, 217 bp, Mus musculus
  source 1..217: mol_type = other DNA
gacctgcgaacccgagcaggagcgcgtccccgttccagtcctccgggggctctgggctcaggaacttcggccgggagcgcgggagcgggtggcccgcaaggcgcagctggggacagggagcccggcctgctcggcccacggcagccggtgttggccgagcccggcgggccccccccgcgcccagcttctggaaggggcgcgtctgcaaccgggtggg

SEQ ID NO: 35674 - DNA, 304 bp, Mus musculus
  source 1..304: mol_type = other DNA
cagtggggctgccagtgtacccattgcccggctaagtaaacttggaacttgacgatctaagctaggagcacctgcctcttcctcacgtgggacaccccggttctcaggtggaggagctggggtgttgattttttttttaaggtgacatcttggtctcagaagaaaaagtcgaggcgcggggcgcggccctaaggacgacgttcatagggaggacctacatccctccggggaaagcatctctctctcctggaaggaggaagggtgcttgcatccaccaagcggagggttctcctctctcgcgggg

SEQ ID NO: 35675 - DNA, 440 bp, Mus musculus
  source 1..440: mol_type = other DNA
agaatactatcttttaaaaagagagtggcgctcgcgtgcgtgcacacacacacacacaccaaaatacctttctgctggttttgtggtcccaaacagacagtgacccaggagtaattgctgataagcctgagtgtgaattgcctctcacgtagagaggtgactaattagtgaccctaactgtaattacttggcagcctcgaggcaagcaaggatggaaagctttgccacctcctggctgccaggctgcatccaacccctgtggatgtaggatagccactttaaaggagcctggtgtcttcagactcttatccccagcctcagtttccctaagagggaggaggatgggaggggaggagagccgagccccgccccctccaggatcactgttgggggaactgggaggggccaccacggtgacctcagccgcgcgccccgggacc

SEQ ID NO: 35676 - DNA, 236 bp, Mus musculus
  source 1..236: mol_type = other DNA
gcaagtgctctcatgcacacacatacatgtatgtgcatacacatacatgcacatgccatgtcatgtgacttttcctggggagatatgaccaaatgtctgttcactccaggagtgggtggcggcctcctgaaggctgaatcctgaaacccccgagtctcaggtgaggctctagtgcgcagcatgtatgtatgtgtgtgtgtgtcacacatgaggaggacagaggaacttttaggagt

SEQ ID NO: 35677 - DNA, 293 bp, Mus musculus
  source 1..293: mol_type = other DNA
gaactgcacagtagatatacaattgtgttctcacacaacagctgtaagccaggctgcacaggtctagcccatgcaccagctcctgactggcttatcatcgttacccgggagagctagctatagcttggtggtgacaaatgctacctcataactgtgattttgctactgttatgaatcataatatgcaggatatctgatgtgcaatttcctagggctgcagggtctacaggcagcagctgctaaaacaggctcacctgtgaacccttaacaaggggcttacctctactaaagag

SEQ ID NO: 35678 - DNA, 354 bp, Mus musculus
  source 1..354: mol_type = other DNA
taacacctcaggctctggagtctccaggaagatgactttggcaaagccattccccatcattcagaggctattattattactattattatgcctgcagtttaaccttaaaggatctagatcatatagggaggggacagcagatcccctgggctcctccctgggcctcccgggctgggctgagggatatatgcccagccaggttgggactgactcagcctaacccttcctggtggtagaggccagggccccctccagtgtccaatgcaccggcccagcaggtctggcgggttaatgactcatacagctgggttgtcagcaagcccagccaagcctggctcaggagcccgagtgtgt

SEQ ID NO: 35679 - DNA, 456 bp, Mus musculus
  source 1..456: mol_type = other DNA
cgatcgtgcacgtgaggggggccctgtcgactcctcagccttgaccccagaccctgcactgtcccacggggtaggggaaaggtttcctctcccacgcaggtagattctttacaattttaaaactcagctctcccagggaacgccttccttgatcctggaacccggtaagtagtaaatacgtttttaaaatgaagaaaattcaattactaatttcatagtacgtaattactaattgaaagttactcacaggtgacctgtcaagacgccttgtgacgcgcaggccgcgctgcgtgcaagggcgtgcggagcgcgcaagcggcggggcccagcggggcctgcggcgtggcgccgggcgtccgggacgcaggctcgggtgggcggcccggctgggcggtggggtcctccggccggtagggggcgcgcgcacccggggcccctcgccgcccgccgcgcgcg

SEQ ID NO: 35680 - DNA, 330 bp, Mus musculus
  source 1..330: mol_type = other DNA
ctgggtggccctggcaccaggtgcagagccctcatgagtgccctcagggcgggcgcggcccacacccgcaccatctggtcttctgggggaggtcctgtagaggcagatacccagggtatgcagcaaacctcacctctaggttgggtaacatggtttccagggcggcgacctcagccaaagatgtgcagtcctggcccaggcaggggtggctaagggcatagcctgtgctctcccctcacaggccccatggctgtgcagccactggggcagctgggcctccggggcagggcaggtgctgactcatgggctcgcctggcactataaaggaac

SEQ ID NO: 35681 - DNA, 313 bp, Mus musculus
  source 1..313: mol_type = other DNA
gtgctagccaccaagcctgacgacttgaggagtcctccagcctctgcacaggtgccacggcacaggtgggcacaccgatctagacagatctgtaatcccagcgcttaacctcatgggccacctgcacttccggttgcctgcaccagggtgaagtggggccttgcatcctgcatcaggacaaagccctgggttccccaccccagatgtgctggccaagcacctgtgggctaggtagaaattaactccttgggtgctggggtgggagccccagccggccagtcctgaagagaggatctagagctagagccaataa

SEQ ID NO: 35682 - DNA, 341 bp, Mus musculus
  source 1..341: mol_type = other DNA
cctcctcacagggccactgtgggagtgtcgacctaacacttcgagcccatggtcaaggtgatcgctcattgacggtaccagcatatcacctcctggtggctagaggcctgactagctggtctcagtagctgtcacacacacggggtcactgagtccaggggagctctcgagcctctgagtgtcaggccttggattcgaacctcagagccctcagagaggcagtcgcagggtgggctcaggcaccaagaggctgggtggcaaggctgggaccctctgagcctccttgttggcagccaaacctggctgaggagccaggaggtggggaccaggctcaggcaggc

SEQ ID NO: 35683 - DNA, 316 bp, Mus musculus
  source 1..316: mol_type = other DNA
gtggggttcagagtgcttcagaccccaccctgccactagatgtcacggtgcaccttgctggagtcaacgctgtctggggcagccagaatgcagggcttagcattctggtccctgccagggccgggcagcttccagaaggtgttcaggaggctcctctccaccccctggtgttgccaagatctttaagaagcctcagggtttcctctgagaagcattctcccccagacgcactttctgcccctcggagctggaggtgagggaggagtccggcgggaagccccgcccacgccccgcccccggctgctgcttaaggccg

SEQ ID NO: 35684 - DNA, 351 bp, Mus musculus
  source 1..351: mol_type = other DNA
ccactgcccccagaggacctgggtgatcaccaggcatgtgtgcagtacacatacacatatgtaggcacatatggatccctccatgaagcagggtacccttggataggctgggcctgagtcccctcagcccggagcctccctactgcagaaggagccccttttgtggctcaatcgtttggccctcgttctgtatcatgaggctctagagagacgctgacttagatcattgaatgacatcatctggctgcagttactcgagtctacctccagggggcactcccggctcgcagcgctgcccagaacagctgttgccaatttgcctttagaaaaggcttatctaaacccctttct

SEQ ID NO: 35685 - DNA, 269 bp, Mus musculus
  source 1..269: mol_type = other DNA
cagggctacacagagaaaccctgtcacagctgtaatcccagctctctgcagttctttggaattaggtgagcagctcgctcacttaccacgtgacttcagtcacttaacaagtgtcccaatcaggtagggacttccagaggtcaccttaggaacataggaagcccagtgggcatgcgccctacgggccgctgctgcacacaggcgcttaggcggctagcggtcctcagggtgagaggccggcttcccaccgcggtgttcgacgggatgcc

SEQ ID NO: 35686 - DNA, 190 bp, Mus musculus
  source 1..190: mol_type = other DNA
tgctattgtgcatacatgcaccacacacacacaattagaattaatagtgctgttttgttttgttttgaagaaaaggagacaggcttgaacctgcacgcgtaaggtgcagtgctgaggggtgcgcctggtcccggcagcccgcgcggcagcgacggacgcaggcgccgtggaggggcggggcttgacggcc

SEQ ID NO: 35687 - DNA, 402 bp, Mus musculus
  source 1..402: mol_type = other DNA
aggcttacacttcttcatagtgtgtcaccttgaagcaggtaagtgctaaagtgagctgctatgagcttagctctgggagggaaactgctctcagactttgggggcccagggactgtgcacgttgagttttctcctgagtgaagacaatgtttacccagtgttccctgggtgaactggcacctggtgccagctctgacacaggaggatgctgggacacagccgggggcggggcttggaccggctcagttcctagtcttggcctagcagcaggctgtgttctgagcagaccacgtgagctcgcccgttccgggtcagagaagatgcagccgggcttgtaaggctgcagtgcccacagactggggagggaggagggagtggggaacactgttccctaccatgggg

SEQ ID NO: 35688 - DNA, 385 bp, Mus musculus
  source 1..385: mol_type = other DNA
ccagacacctgcctggatccttagggccagggaagtgggccagtacttggtaaccatggggcctcaatttcctcctcttgagtatagaaaagaacatttccagccaggagccctatacagagaaacatttctgccaggtgggttcacttcctgctcaagtggacctgacagcaggggacagctggctgaccctgctacattgcaatattcatttccagccccgtgacctctgggctctgggtggagaagtatcaggcccaggccgagccccagcggtgttggggaggggctggagcctcgagggtgcgtcgtggcggcggcggcgctctctaggacccagcgactccgggctaggggcgggcgtgggccttgggggccgtagggg

SEQ ID NO: 35689 - DNA, 379 bp, Mus musculus
  source 1..379: mol_type = other DNA
ttctgatttattccatttagaagaatcagacagatgggcctgcaggatgatatgataacaatcagggcaacaccctttttaaaaataagatttaaattattatttatatgactatgttttgtgctcagcaggagggctccgcctccagcactgcttctgtgactgagggccggaaggagatagtcacagctccgtagggcggtaagcctctgcagctgggacgcttcccgccctacggaaggttcagacgatcccgctgctgggcagctagccccttgcgggagagccttccggcgatcagccaggcttgctccggccccgccccgatggagccacgcccacctaagcctccgaccctgcgccgcggaggcgccccgcc

SEQ ID NO: 35690 - DNA, 210 bp, Mus musculus
  source 1..210: mol_type = other DNA
tgaaggctgagaacagtgctgagctctttgagcaagtttctgttaaaggcactaacagtcgctgaatgacagtgaactttctctgcagttcaactaagctaacaggcagatctctgtgagttcgaggccagcctgatctaagccaggtctacacagagaaaccctgtctccccttaaatctgtggtttgtggaacacagagacctgagga

SEQ ID NO: 35691 - DNA, 372 bp, Mus musculus
  source 1..372: mol_type = other DNA
gaaagctggcatcaataaatggctatttagaggtcacgcctgcctgcatgccgccatgctctcccgcaagcccccaatgaaaggatttctttttgtaagtgttgccttggtgtgtctcttcacagcaaagacaaccaagccactggattcctccagaagcctctgagaacctgcagggctgcagggtatcttgcatatcagccaccctggtctagggtatagagtttgaactacaaccaggttcgggattaggctcagatcagcggcatctcgagcttctctctgatctgaggcgcccggcagagggcactcgggagcgatcggggggtcccccggagcttccgctctagatcgcatcacttccggtcctga

SEQ ID NO: 35692 - DNA, 489 bp, Mus musculus
  source 1..489: mol_type = other DNA
ctgacagggtttctctgtgtagccctggctgtcctggaactcactttgtagaccgggctggcctccaactcagtttttaatcctttctttaagtatagaaatgtctcaagaatgttgtaaaacagtaagagcacccgactgctcttgctacagtgtacttacatataaataaataaatcttacctgtagcttagaaaaacttagactcactttttttcttttgagattcaatttttgaaaaaaaaattaattttcaatcattgccctggagcaggtaacgtcacttgaactctctcattcagtaaaccagcgagcgtattatgaaagaggccgatctgacttccctgccctcttccaagatggcagaccaggcgagtggaggacctggccgggcgcctcttccgggctgggggagggggcgtggtccattgaggaaagccctgcgtgcctccgcccgcgactcaggcgcgcttcaaggcgcaggcgcgg

SEQ ID NO: 35693 - DNA, 418 bp, Mus musculus
  source 1..418: mol_type = other DNA
cccaagtgctgggattaatagtcaaccaccatgccagggcaatggaataatgtttatatgaggaacataaatgttttttttagattgaggttcctcaaagtagattcaaactcctggatcgaagcctcgtggtacttttgacctagtaccacgtctcacgggctatgcacaagagcttgagctctctgatgggttctagaaggttctcacctacacacagctttcttgaagtgagactctggtgaagggtagcaacatagctgctgctacagtttccagccgggagctggagagtcctagaaagctccgcgccctcggcccttctcaatatggcgccgcccagcggccgccgcgcggaaggccggtcacgctgacgtgtgtgcgcgcgcgcgcgcttcctccgcgccccgcctcagcg

SEQ ID NO: 35694 - DNA, 211 bp, Mus musculus
  source 1..211: mol_type = other DNA
caggtactcagcggaagcgtacagggccaattgggcttggcaaagtcgtgtgaggttggtcattgccactggtggggagtggccacctgacttctgtccccccaggagcttccaggacgtctgggaggcatagggctccccctcttgtacctgactggccaaaccggttctggggagcaggcacgttgagacagccgcctgcctctgcaag

SEQ ID NO: 35695 - DNA, 428 bp, Mus musculus
  source 1..428: mol_type = other DNA
cactcagagtgtaggcatttcctgagctgccggtccgggccggagcatccagtccgagggcaggacttctccagcaccaaccagatgctgggcacacagttggggcttggtcattgttgaatgacaagaatgaataaatcaattagtagacaaatggctctttattcagagctgtgatgttaataacaggagcgtaagaactaaacctgctgagctttgctgcccagcatggttgtaaagaaccctgtgaccagacatggtagcacatgcctttaatcccagcactaagaggcgggagtttctgtgaattcaaggatgtaaaggctactatacagagaaacccggaaataatatccattttgtagaaaaggtattccatgatcatgtttgataggaaaatatgaggagctgcagacctcgccatggca

SEQ ID NO: 35696 - DNA, 143 bp, Mus musculus
  source 1..143: mol_type = other DNA
gttccctttccactggccaaatggtaacagagcaacacaggtcagggcccagcttcaagtcctgtgacttgtatcctagggtaccttggaaccttatgttcccagaggcactaccttggtacacagcttagaggttacaattc

SEQ ID NO: 35697 - DNA, 383 bp, Mus musculus
  source 1..383: mol_type = other DNA
atgtgaatgcacacagtgcatatgtgtgagaagaggaacacacacacacacacacaaccctgggaggtagcctacgcatgagaccgcttatctagccaggaggccactaatgcagtgtcttgcaggttaaaggtacttaccaggaagtctggttaccaagtttgatccctatcttctgagctcgaggccagcctggtctacaaactgagttccaggacagccagggctattcagagaaatcaagctcgatcttgctcattgtgcacagtgggatgaggctcattgaaactagaagtcttccttacagggccgagtccggcacagagggggcggggcgcaccccagccccgccccctccgcgctccccgggtccccgcccgccg

SEQ ID NO: 35698 - DNA, 379 bp, Mus musculus
  source 1..379: mol_type = other DNA
agactgggttacatagtgagaccctgtctcaaaagctaagctaagagagagtccttacctagcggcctaaggcaaatccttaaagagatataataataataataataataataataataataataataataataataacaacaacaacaagcttacttttaagtctttttcttgagatagcctcgtacacgattcaatatgccaggtgacttctgtgacctctcccagggatgggcatatatagagactcccctccttggtcctgcgtgttcctcagctcctgttcccaggaaccccaggagccccagagtcctagcaacacagatgggggaaccctctgcctgcacacctgtccgggtgcacagccgctgttcctgcc

SEQ ID NO: 35699 - DNA, 276 bp, Mus musculus
  source 1..276: mol_type = other DNA
gtccaggctcactgatgtcctgggaggagagggcacccagctctcacctctgatgcctcggcggcttcccgggataacaggtggacagctgcttggtgacagccgctctgtgactgtccttcccaactgaaggcagaggcttatgctgtctgcacctgggactctaggctgcttccctcagccagaaagaggtccttgatgggtggatcctggcaggcccgcctggcctctttgttcacggcaggaacagcggctgtgcacccggacaggtgtgca

SEQ ID NO: 35700 - DNA, 269 bp, Mus musculus
  source 1..269: mol_type = other DNA
acagggtttcaggaataatgacctccagcttcctatgaagccgaggctgtctggccctgacacccagcggcagtgactcaggccctcagcaccgtgacagtgacagcgtggcgggcttctccagggggccccccctctgaagccttgccagacacacttcagctgggactggcaacacaaggggttgacagagccctctatctcaaggcatgggctgagcgcttccctaggcttctgcctcctgcccagcatcagaatccgggattcta

SEQ ID NO: 35701 - DNA, 383 bp, Mus musculus
  source 1..383: mol_type = other DNA
cgtgtgcacatgtgtgtgggcacacacacagacacatgcacaacacacataaacatatatatgcacacacacatatacaaacatatttgactgtcaatgtgagctcagagaacagtgtgcctactctggtgtccccaaggtgggagtcccggctctggccctcagcagctggggtgcagtccaagaagccttgcagttctgagatgctgttcctttgaaacaggataatggaccatctgccagcagtggtgaccctattactatgaacccaggtgccttccatatcggctcagcggctcagacccctggagtccccagggacctgcagcattggagcatgctccggcccctcctgactcctcagcagcttcctggtcagtctg

SEQ ID NO: 35702 - DNA, 289 bp, Mus musculus
  source 1..289: mol_type = other DNA
gatggaatcccagccatttgagttgtgttaagatcaaagagggctctgctgggaagagaccctgaggtagagcgctgtggcagatgacaggggtcaccagagctggacctggagcgcctcggaatccctcggggtacctgcatgtacctggggacaggcacagggcaggacccaccccctgccctggcaggtacagaggtccttgtgccaggtggtgagctcagccttgcaaccctgccctcctgtgtctagacaaggggctggcctcgagcccagggacagttggcgc

SEQ ID NO: 35703 - DNA, 204 bp, Mus musculus
  source 1..204: mol_type = other DNA
atagatggctgtgagccaccacgtggttgctgggagtcataactttaaaactcccgaaactttgtgaaattgaatttagggtaacccaaatccactttattcgacacagccagaagttccagaactctagcgaggccagcctggtctacaaagtgaattccaggatagccagggctatacagagaaaaggattggtcctaatga

SEQ ID NO: 35704 - DNA, 440 bp, Mus musculus
  source 1..440: mol_type = other DNA
ctaattcctgcaaatagcagaaggcatcagatctcttgaaattggagagatagagcttgtgtagcaagcaagcacttgtgccactgacctggcccgcgggtcagacaagacaggctatctgatcaaatctcatttgtatatatgcacttacttaaaaacaagatgttatcagagtgtgttcagctgcttcttgcaaaaacatcatggaacatggctgcagagatgacagccgctttctgctaggagtcggctcccaacaggccactgagtgttgctgggtttgatcccttgtcacaaagatgtttgagtaatgttttcactcctcccaaagagaggagatccggtgcacagcaagtgtcccggcagctctctgtggtggcacggcgcatgcgcctgccggcggtcgcgcacctcggacgagcgctgcgccagcgacggaa

SEQ ID NO: 35705 - DNA, 330 bp, Mus musculus
  source 1..330: mol_type = other DNA
atgtaattatactgtgccactgaggccagaggtatcagagacctgggagctgaactctgctcccaaaccaaaaaaaaacttttataatttcaagtggcttttcaaaattgttatttctggcctgtgcaggccctgcacacatgtgcagcacaaaccaattaatactttgagaaaaagtgagagattggtcccctgtctccctctcagcccttgaatggcagagacggccttggtgcctcgaacgcacagagatctctctactaaagcttttaccaaagggaattacctctaagtagttcactaagtaggtaaccttttctttgttaagaa

SEQ ID NO: 35706 - DNA, 370 bp, Mus musculus
  source 1..370: mol_type = other DNA
tctattctctttatgaatagaaagcgactgcgcctcttcctttctctggtctaggaaagaggatgagagaggccctagccttctggggacattcactcttccacttcaaagtttaattctagtcctcaaccatcccctcccaggggctgcagcctaaggccggccctggctggctggctggccggctctcagccaggaaagggtctgctgggaagttttcatagaatgctccccccaacccccaccccacccccgcctgggtgaactcagggttagtggaagcgccagcaggctctccttaagggacctgacagggctttgaaaatccccagcgctgcagctgcgatctggccttcacgctggatgtttc

SEQ ID NO: 35707 - DNA, 637 bp, Mus musculus
  source 1..637: mol_type = other DNA
tgtactgcacactttgtagacaaacaaaaagtgtaggctgtacccgaagcaccattttatttttgtgtatgaaaaattaaagtatgagtttgaaagccggccttacatgaaaggtcaactgccagtttcaaaagtctggaaggggaggtctaatactctctgtttaaaaaactattccaaggggaaacagtatggaatgttaatcatgagcaaagacatcttgcagaaggtttcgcaagctcctatataaaaagttggcggtgaaaagggtggcctggtcccgaccactttcccaagcaggcaccgggttctcttgtgtttccccagagcaacgcctgaccgcaggcagaagcggccccccccaccccgacgcctccggcggccggcctcccggcctccggcgcgcctgcgcactaagctgactgcgcgggcgccgcttcccttccgagctccgcgcgcctgcgcgccggctgggaggccctccgcgtcggggcgggaggacgcgcgcgcgcccgcggccagggggcggtggccaggcggcgggaggcgggccgcgcgcgccggtgggaagcgtccggcagccacagcgccggctccgtcgtagtcgcggccgcccgggtctcgctcgcccctcctc

SEQ ID NO: 35708 - DNA, 557 bp, Mus musculus
  source 1..557: mol_type = other DNA
acaaggaccacctcgaggagctgttgtatagaaggggacctaatcccggcttgcctgggaatcagacctagattcctttctcttcaggtctctagggacctgagctgtccagagcagccccaacccaggccgcagggccctgtgctctgcttcttcaggggccagtaacagggccggaaagcaaacaggtgacctgattgtttcccctgtctcctgtaagggcctctttccactacaggacctgacaggcagtgacagcccaggacagcagatccaggtgacttgcttcgctggggtgtctgaaaaccctacccttatgaccctgaaggatttcagagtcagtctggctacaagtacccctctccaccaattggggcaggtggagcctcggtgacctagagcgaggttggctaaggatcccactccccagcccgccccgcccctccccggtgcaccgtgggggtgggcagcggaggagcaggtgggggggcaggtagggcgagccagcgccccctccccgagcgtcaccttttatggtaaggcgcgcgcggggcggc

SEQ ID NO: 35709 - DNA, 236 bp, Mus musculus
  source 1..236: mol_type = other DNA
gttcttctgaaggtcaggagacaaccatttgtaatggtatgtgtgtcttaagatagtactcacattaaacctgctctgtagaccaggctggccttgaactcaaaaggcgagtgccaacactcctggtaagctcgctgctctcacttcagagaggtcatcctccatgtatctgtcagctgcagctgtgtaacagattcccctccacagttctgtgagtcagactccagctgctgcga

SEQ ID NO: 35710 - DNA, 359 bp, Mus musculus
  source 1..359: mol_type = other DNA
catctcttaagcatctcctagacacttcaattaatttataggatcaagttcctttcttctacaagacttggagattcctgaagtgcttccccatgctaatgaggcattcggtgtggtctttcacagtgagtactcacagggcttctgaaccccctgttcgacgttggccgaatcggccttccatgctcgtagttctttgtcctgggacacaagaacctggtacttcagcctgtgtcctttgtcccccagggaactcagggcagggccaggtttgaggctcatatcctagaagcctgcccccgaagacattggattcaggaagcccctttccattctgaggtcacaattgtcctcttgcc

SEQ ID NO: 35711 - DNA, 277 bp, Mus musculus
  source 1..277: mol_type = other DNA
tagagcactgaactacatggtagctcgagttggctctgcagggctctgaggccctcccttgccaaccccggggaggcagaggcgggcggaccagggttatatagagagacctcgcttcaaagagaatagggctataatctggcagagaagcctagggcttttagctggagccctcaaggaggggtgccctcccctactcccatggcccaggcccgccctggccagcagcagctgggattggtctgagccagccctgctgatgaacagcaggtggagt

SEQ ID NO: 35712 - DNA, 384 bp, Mus musculus
  source 1..384: mol_type = other DNA
ataaatgatatattttttttgatattttttaaagtgtttgggaatcttttttaaatgccttcagatattagatgcccaggctgcaagcatgcccaacacactgtgagctggccatccctcaattgggcagaccgacgacgacaaggtcctgcagcgcctgtgtgagcacctggaccacgccctgctgtacgggtttcagtcccctcctcgtgctgtgggggccgggcacagggaggcttgtctcactcaggcaggccacagtgaggcacctggttgcctgagacagcccgcctcagcccagcactgctgacttgtcactagaaccgctcccctgtggggagctctggtcctgccagggtcggccagtggcagtgggggctgaca

SEQ ID NO: 35713 - DNA, 277 bp, Mus musculus
  source 1..277: mol_type = other DNA
tcctctcagatgaaccacttgtgtcctggtcgagctgctgagctctggccaggccaagccttgtctccagagtctctcgagtaaggggccccgtctgtcgtgcagggccttgcccatccgggtgtgagtcccctaggtctgcaggtccccggggctccggatctctgagctcccaggtctccatcgccccgggtctcggaggaggcgggcccgcctggtcgccgccgtccctcccggccggtgctggcgccgccccgcctgacatcagttcctgcgg

SEQ ID NO: 35714 - DNA, 414 bp, Mus musculus
  source 1..414: mol_type = other DNA
gcctttgatttgtacaatgcacaaatgtggaccaccctgacaacaaggtattttatctataccattaaagtaaattgttcagactggaacacttatgatccaggcaggcttggatacggagtaaattctaaaccgtacccagtaaacgtccagtgctggatgcagtcttgtggctgccagcgcagccatgccagcccgcaggctgggatgggcctcgattaatattactgaaatgacaacttccattacgaaaactctgttttagaaagatgtgcttaatttgtgagctcaagcacgtggggttcagcctagcgtcgcgaaggctgccggcagcctggcgcgctttacggccgtggcgttgcgacggggcggggcgccgggcgggcggcccgcgagcttgacggcagcggtggg

SEQ ID NO: 35715 - DNA, 388 bp, Mus musculus
  source 1..388: mol_type = other DNA
caaaccaggctgctctgcaagacagcaccggctctttccttctgaaacgtctctgtagacctcaagacatttcttaaccatatgtatatgtatatgtatatgtgtgtgtgtgtgtatgtatatgatgtatatgtatatatgtatatgtgtaatgtatatatatagtatttatataaatacaaaatattattttgtatatatacacaaaattatacaatatatatatatatatatatatatatatatatatatatatatatatatataattgtgtaatcccaggacccaacctgggctgcataagttctggatcagccggctcattgaccatccaggggctgaagtccagatctgggcaggtggaaaacccttggggctttggggccct

SEQ ID NO: 35716 - DNA, 271 bp, Mus musculus
  source 1..271: mol_type = other DNA
tgagcactctgtcttcatgcacagagggaatcagatcccattacagatggttgtaaaccactatgtttcaattactttttttaaagatttatttatttattacatgtaagtacactgtagctgtcttcagacatcagaagagggtgtcatttctcaagatggtgaaccaccatccagttatttcaattactttttaagtcgtggaaataagtggtagaggtttactagccgcagcgtatgcagcgccagtgggcgtggcgaagcagcgcgg

SEQ ID NO: 35717 - DNA, 448 bp, Mus musculus
  source 1..448: mol_type = other DNA
cgaggattacacggtgagaccagcatgctaggtaagtgttttagaaaccgattacataagaagtacagtcctggctgtcctggaactcactttgtagaccaggctggcctgcatccagtctagaacatccttgggttgatgtactgaatttggacgaacttcagtataaagaggttactgcgtccccgtcctagcaacagttgctagatgtgggccatcttctggcaaccagtggaaacccctccccggttccgggaggtcttcctggtatcccgtgatgcatagcgactccgcctcgctagaaggcacgttctggcctcgctagcaagcttccagccagagagcgctctccgttcctatagcagtgaccgtcaaggccaaacgcgtgtgcggcctaaaccggtctgtgcgcgccgcaaagtgacacgtgactgccccgggcctgggc

SEQ ID NO: 35718 - DNA, 237 bp, Mus musculus
  source 1..237: mol_type = other DNA
accaagagtaagtctagaagactgtctctctgtccctctttattgaacagggtctaatgttttctttggaaaaagcaaccccaggaacaaacattgtctttcttcctcaacactcagcttgaaaggcccaggctgaccccgagcactctacatagccatggatcccagagctggggttccaggtgtttgctggcaaaggaccttctcagtgtacttctagaacgacaatggactcca

SEQ ID NO: 35719 - DNA, 204 bp, Mus musculus
  source 1..204: mol_type = other DNA
gaaccaccatccagttatttcaattactttttaagtcgtggaaataagtggtagaggtttactagccgcagcgtatgcagcgccagtgggcgtggcgaagcagcgcggaggccgcggggcggggcggggcggggcggagcggagcccagtggaccgggtgaccgctggccggagcgggatcggggcgtgggcgccggggcggaa

SEQ ID NO: 35720 - DNA, 398 bp, Mus musculus
  source 1..398: mol_type = other DNA
cccaggtgctgggattaaaggcgtatgccaccaactccaccactgccaggctgagatggcgtctcacatgcctgctcagcctctggcacttcacccatcagctgggcatgccgagagctggggccagactctgtggctccatcttggggacccttctcccgtgctgcaccagggctggttctcatggacgtagatggtatccacctccgcgtacacgggtagaacagggaactgagagctttaggggcctggtcctcttctgacagcagggctttgcgggaagggggaagtctgttcccatagcccagggtctcggtcaggtgggaccttgctgctaagctgcccgctcaggcttccacgtggctgtaggcacctgagtgtgagatggcaggcgagtg

SEQ ID NO: 35721 - DNA, 280 bp, Mus musculus
  source 1..280: mol_type = other DNA
gcatctttacatgaccccagccaatgctggagtgggtttatttttaaggttccgtgattgctatttattcagggaccacatggtggctcacaaccatccgtcatgggatccgatgtcttggtgtgtctgaagacagctacagtgtactcaaacaaaaacaaaaaaagaacacatctttcagttgtatttatcttgccaatgctcttgaatacattacattgtaaaagtaatcacaaccaaggttagggaaaggccttgtccggacaggtttgtcccagac

SEQ ID NO: 35722 - DNA, 537 bp, Mus musculus
  source 1..537: mol_type = other DNA
acagactagatgacagagacaaattctctctgagccccccattcctgacgctttggggaggaggtcacccctctgggatccccatcaaagaggcaacatggagatctctctgaaatccctctgaggtcgccggataatcatcgtgtaacaggattgagaactggtagggtgccagacgccagtcatgatagccctggagacagtctcaactgggctccagtgcaagaacgcccagcggttcactaccagtggtctccatggcaaccgacagggtgtcagagacacaaacccctttcagagaacgggttgagagccgcgcccctctccagtcggaccctcttccctcccgaagggttgggacacccccttcccagtccagagggctcctgggactcagcgtcacccagaggtctggggagcggaatgcacttgacccccctacccccctccggggcccggcaaaggcggcgggagccagcccgggggcgggcggtcccctaagtcccaccttcagggcggcgcctggcggcggggagt

SEQ ID NO: 35723 - DNA, 280 bp, Mus musculus
  source 1..280: mol_type = other DNA
aagctttatagcccagggctggctggatgttatgttggtttagaacacagacttaaaaatcgtaaccccgggtatagtgaacttacatataataaataaataaatctttaaaaaaaaagtgccaaaatatcacttattgatcatttcatcatggagactgaggcttccatgcccagagtctcagctgccaggccccatagcttccacattttctttagaacgtggtaaggtctgctgccatggaaaccaggtttgttaaataagggtccttgacttgccg

SEQ ID NO: 35724 - DNA, 241 bp, Mus musculus
  source 1..241: mol_type = other DNA
actgtttaaggaaaaagccttattcctctgccctatctgaaagtcagttgagctgacagctgatggctggcagccacggcccttgccctgtgcccactgggcaggcaagtcaggtttggtgggtaagactgggaacgtcttgatcacactgttataaaagcttgtgagcctcgtttcttcctctaggaaatgaggcgtcctcgggttgcctgcgcgctcgcccgccacgttgtcatggcga

SEQ ID NO: 35725 - DNA, 301 bp, Mus musculus
  source 1..301: mol_type = other DNA
gcattccagcaggaggtgaatcccggcttcagctccagccaggagagctgtaaggcttcatggcttggatgttgtgtaagctgatctagaacctccctcccaggccttcagtctccttgatgctcccagagccttgttgagtcaattttcagctccaataggcaacagatcctaaatgggaccccagaccgggaccaccatggggacccacagactgtgtggaaccggatggtaacaaaggtctttctgttccgggttgatctcaggccatcaggcgtggcctctcagctgagctgggccc

SEQ ID NO: 35726 - DNA, 384 bp, Mus musculus
  source 1..384: mol_type = other DNA
ttgggaagagatccacttccagggtgtagggattgaccccgcccctaccctcagacataggtgtaggatgaaggctttgaagcagaggcattgagcagcagaccgtccctttgctcctgaagacctgggtttcattcggaacaccacgtcgtggttcacacctcctcaggtggcaggcacacaggtggtgcccagacatgtctgcatcaaataaactcatgtgggtcaatctcttcatgtctttgatgtagaaaaatcctcattaatgataacagtactatattatcatatatatgatatataatgacatatatctttattaatatcatgtatatcaaaaaaagattgaacaagatttttaagacatgcttcccttttcccaag

SEQ ID NO: 35727 - DNA, 453 bp, Mus musculus
  source 1..453: mol_type = other DNA
tatacattccaagtgaacttggctgcagctgtctctctctctctctctcacacacacacacacacagagctggctgcgcccacccaggtcgagattcagagctggcagggcacatagatctgtgcctggatcaccctccccggctccaggcggagggagaagccgctggaaagttttctgccaagctgggaacgcgccccttacgggaacactcccgagctagactggctcgaagtggcgatccggagggcgtccgggacggaaaacttggctgcctggagccgcaggagcggcggcctgcgcgcacagcctcagagtaggaggtccgggaccctgcactgcgttgcagggccaggccctccagcctgctccgccccagggtccgggtccccgcctggtggcgtagggcgcagggtgggcaggtgggcggtgcctcctgcgggcgccctcggt

SEQ ID NO: 35728 - DNA, 245 bp, Mus musculus
  source 1..245: mol_type = other DNA
ctgggctcttttcccaagggccttggtaataaccaagccactttcagattcaagacaagttttgttacctccctgcagtctacagcaagggaaagccagcctctggctcccgggcctgcaaactttacactcctggctgcttcagcggtgggtgaacactggagggccaggcacaggcctgcggcctttctcacgcactcgggcttgagcccatccagagtttctctaggaaaggctacctcgct

SEQ ID NO: 35729 - DNA, 450 bp, Mus musculus
  source 1..450: mol_type = other DNA
acaggtacatgagcttgtctggtctttccaaagttttggaggcacatttgaacataatacattatctatttgggtaccatctagatgtgacaagtaactttcatctctgattgattggcaactgttcccgcaaaccgaagtgatgctgggtaccacagagccttggcactgacctaggcccatagctggcagttagccatttaaacggtctatttgcctgcgccagtcagtcgcgcttgagtttctcagccctaactctatagtggtcaggctggcccggccatggcgacgcgggcttcccttcgaggtaataacgctctggggcgagcggcgagtccgtgattgacagagagggcgacacagtccgccggggtcacgcctgaccgtcgtgttgagctcctcggggtcgcaggccacgagctacgcgcggggtcggggtcggggtcgggg

SEQ ID NO: 35730 - DNA, 427 bp, Mus musculus
  source 1..427: mol_type = other DNA
cctgttcttagattccaacaggttagaagggaataaggattaccagttaaaccctaggattaatagatgagctgaactcttattagtaagccacaaagacaagtacctcaccgggccaagtactgcacttgtgggaggacagacgcgtccttccgtccgtccgtccatccatccatccatccatccatccatccatccatccatccatccatccatccatccacgtgccttgcatgaaggtaatagtaaatatagtaaataaaaatttagtggaacaaagtcaaaagctttttttttttttcccctctgggctgggccccagtggctgaggccctgtaactttaaacctggcctgaggtcagttcgggggcggtcctagatctccgggaccacctgacgcccacccgctcccgccccgggaccggag

SEQ ID NO: 35731 - DNA, 375 bp, Mus musculus
  source 1..375: mol_type = other DNA
agacttagctctgaggcttcggaatagctggctccaccaatccccagcagtgccaggggatggggtaactgactagccacctgcagggcgatttgcctgtagcagtgtagggtctaagaccaacctcacctctgaggagctgggctctaagcggccatcaaaatgaagggagagcggtgagatgtccccaccctgctctggttgcaggtcaccaaactgccccactttggccttgctcagagctacagagcatggaaaactaccttggcagccacccgcctagctcacaccctcctcctgcaggaggtggggcaaaagcaggtggccccaggcggggagggtggcgctctgggcgcatgccccagacacgcccca

SEQ ID NO: 35732 - DNA, 153 bp, Mus musculus
  source 1..153: mol_type = other DNA
attggagcctggaagtcaatattgcactactacagtcccgccctttgtgtgttggccagggcctcagggcctggaatttaatatttaattaagaaaatgctaaaggctccgtatagccctggctgtactaggctggccttccggctctagatt

SEQ ID NO: 35733 - DNA, 234 bp, Mus musculus
  source 1..234: mol_type = other DNA
acagcacccgggtcttatggctcaggtccttagtttattattttttcattcatgaaagaaatgcagaaccaagtgaatgaagtgaattaattttaaattattattttttgagtcagagtttcactatagcaggcagggatccgcctgaatatccgccatctgcctctccgcggatgttgttgtcagtcatccaatcagaggacggcttgtggttgacaggcaacacttcaggcc

SEQ ID NO: 35734 - DNA, 405 bp, Mus musculus
  source 1..405: mol_type = other DNA
tacagagcaattgtgataataactgcatggtactggttcttgaaaaagacagcattttcaacaaatggtgctggcacaactgagaattgatccattcctatctccttgtactaaggtcaaatctgagtggataaatgcatgtgtatttgagtgacacacacactcaaatacacatttgagtatttcctttaaagattcatttatttattattatgtgtaagtacactgtgcctgtctccagacacacccaaagaagattctcattataggtggttgtgaaccaccatgaagagcagtcagtgctcttaatcactgagctaatttattattatgtttgagttcacacaaataactatgattgaataaaaataaattcaatcataaagatccagtagattgaatctt

SEQ ID NO: 35735 - DNA, 285 bp, Mus musculus
  source 1..285: mol_type = other DNA
tcagagagattactctgtgactcacaagatctggtattaaaggcctataacacaataacacatcaagctcttttagtattttgggggacatatatgttttccatgcttataagtcagcaagggagctcctatgattggagttgcaaagagctgacatatggaagctctccaatgatttactcaaaggcaaatcatgtatttggtgttttaacacacctcttagctcaggctatataatagtttcagagagacctgattcactcaactatgtcaaaataagattaa

SEQ ID NO: 35736 - DNA, 241 bp, Mus musculus
  source 1..241: mol_type = other DNA
ggtattaaaggcctataacacaataacacatcaagctcttttgctattttgtccgtgcttacatgttagaatgaactaccgttatgagctgattagaacactggaagagtagttcttcttgaaattcctgatccattcataaaggtttctgcaattattgcatcaaaggcaatatatttaatgttttaacagatctgattcactcaactaggtgaaaaaaagatcttcatcatcctctgag

SEQ ID NO: 35737 - DNA, 368 bp, Mus musculus
  source 1..368: mol_type = other DNA
ggcgggaatgggccccttcccctgcttcataaccttccagactagaatggctgctaaagaatgtagcagacactgtagactggatgattctttgcatacgattagaagagatgatgaccattatcttaggctctcctcaagtttactgtgtagctgaaggtgaaattaaactgatctgtttggtcacttcagtcttctcaagttaagatgaggacccttgaattctgctgctagcagccacttaacttggctttgaagtaatgaaccacttgtcttcagtaaatcaattcatgacttccaatttacctacactatttaaatctgaaaatgagcaatgatggagactcaattattgaaccagcagctga

SEQ ID NO: 35738 - DNA, 523 bp, Mus musculus
  source 1..523: mol_type = other DNA
tcacaaaatgaccgacagatatttcttcctgatttctcagatgaccatattgaagatctgtgaggcctcatgcagctggattactctgtttatagccaatttgatctacatgaagagcttccaagtctccaataaaataagtgaattgttgacaaaaataataaacttactgattaaattacatgggtccagtaagacaactcaatgataaagttttactctgtcagaagtgatccactgaggtcaactacacaatgaacaactcaatcagtggactcttcactttctttctttctttaaagattcatttatttattattatgtgtaagtacactgtagctgtctccagacacacccaaagaaggcatcagatctcattataggtggttctgaaccaccatgtggttgctgggagagcagtcagtgctcttaatcactgattactttatttttgacttcacacaaataactatgattgaataaaaaaaaattcaatcataaagatccagtagattgaatcttg

SEQ ID NO: 35739 - DNA, 456 bp, Mus musculus
  source 1..456: mol_type = other DNA
ttatggatgatgtcaaaggtactttagaaagaatttcaatgcagtcctgcttggctgtcctggaactcactttgtagaccaggctggcttcgaactcagaaaaggcgtgcaccaccacgcccggcgcagtgtgcacacaggattgtgctaattatcaccgctgtacttaaatatacgtaaaataaataaactagagccttgttgactgctggcacgggtgtttgcagagacccctcacacgtgaattcaattctgtgtgaatcactgtgtcaagatggcacattttttttttttttttttgatgaaagcagaattagaggtgaattagaggccaagtctgggctgtaagagaccctatcaaaacaaaataaatattaaaaagtaaaacttgtgttgcgatagacactttaaaaccttggctttgaattgacccttaagtctggaaagccttcccct

SEQ ID NO: 35740 - DNA, 181 bp, Mus musculus
  source 1..181: mol_type = other DNA
catggtatatagtcactccatagacctgggatgtgagaggctcccagcatgcatgggctagtctgtggcccctgccacatatgtagcccctctcataacaacagagacctgaagtggggccagctttgctcccccagaaccaactgcttctgcccagagtctgtcaccatggagacagtca

SEQ ID NO: 35741 - DNA, 343 bp, Mus musculus
  source 1..343: mol_type = other DNA
tctgttttacaatggagaaaaaaagctctttatcaatcataaccctgagagtgacccagaccctgattcagcctctaggcttaaagccacaaagttcagagctagcttttagagatgaactttttagttaatagttatgatcactaccagtggatctgaagacttcttctggtatcccgtacatcagaaaggcatcttaaaagagcaacataaacaattctatatttaaaaagtgtgttctacctgggttgggtactgccattttaaatatctaactaggcagaagatgacataaaggccctggggcctcctcatctagttgtgaataaggtgataagacact

SEQ ID NO: 35742 - DNA, 368 bp, Mus musculus
  source 1..368: mol_type = other DNA
gcatttgaaatgtaaatgaagaaaatatctaataaaaaaatttaaaaataaaaataaataaataaattgctggccttttctttagaattattgcatctatgtgtattactgatactagtcttatctggtttcattaaaggaaggaggaaagaaaagttgttaaaaatatctctcaaaattagcttatctggtttaattttagattgacttccaaatagaatagattattttagacactgcacaactctctaatctctgatttcacacctgagaggagagtcacagagtatctcagatgattcctgtgaatttactccagtttctagggacttgactgtcacagggtttcacttctcctggcatgacag

SEQ ID NO: 35743 - DNA, 310 bp, Mus musculus
  source 1..310: mol_type = other DNA
catactgaactactatgtatacctttgtcacagcaaggctatagaatagttcttcatcctacatgtcctggtttatataggaaaagattagctaattcccagggacatcagctataccatagatgttgatgtatgagatttctgatacccggtatatcaggctagcaagatgggtaacctttccatatactcctcaggggttttcctcaaatgttacttgacataaaaggccatctctcatctgccctggggacaaggtgccagggatcttctccaggtggggatctgatgtaatcccttgagcaccaca

SEQ ID NO: 35744 - DNA, 160 bp, Mus musculus
  source 1..160: mol_type = other DNA
ccctgacttggtgctctgagaggcccaacaagcagctgactgagcacatatatagctgaggaagtagtagtagtgatcatcatcatcatcatcatcattatcatcatcaccatcatcatcaccatcaaaatccccaactttggtcatctgcagccactga

SEQ ID NO: 35745 - DNA, 411 bp, Mus musculus
  source 1..411: mol_type = other DNA
ttttgagagatcaaatagactggttctattttttaaatcaattaagaagacatctcaggagctaattttatgttattacacatatatgccactgtatttagatgtttatttaaagtacttttatttacatgtgcatgtgcttgcatgccacggtgcatgtataaaaaaatcttgagaattgaactcatgccatctgacttcacctcaagtgccgccagaaaactctctgcaatagtgtgaaaatattgaaccaagcagttttaaggtgtatgctttgctcaccttagctcaggcatgtatgaatcttacagtggcaccttaatggttcagatatgatttcttacctttttgtttctgaagaaacaagtacatttggctcttcttgactggcttatgcaagtataaaactcg

SEQ ID NO: 35746 - DNA, 388 bp, Mus musculus
  source 1..388: mol_type = other DNA
ctgtgtttgctaggccctggcatagtctcacaagagacagctatatcagcaggaagatgcctttggaggcatttcaaggccaacttgtttacccaactcaaggctggggaaagagcacaggagtgatcatttgtttaccagtgcacatgtgtgctggttagagaaaaacatggaattcagttctctgttttcactacataataattttaatcagaagattctctgtaaatatctgtgttctgctttgaaaccctaaacagttgggttgggaaatgctttgcttactcgatacactccatatatcatacaattgaagggttctcagatttttcttggaaagttaggagaaatctttcaattcagatgtattctgagtgtgtgacggcag

SEQ ID NO: 35747 - DNA, 367 bp, Mus musculus
  source 1..367: mol_type = other DNA
aaaattgtttttaatagctgactagtattccattgtgtaaatgaaccacactttatgtttctagtttctagctattatgaataaagctgctatgaacataatagtcgggaaacagccagattcatttcgaatttcagactgacttttgaaagtgtcttttaaatttaaatcactgtgattcttgccaaggttgggatttcaagtttttaatgcatgatctatcattcttgttaatatattctgaatttgttccctggcaaaattttatattctggtcttaattaaacatgatgccaatgtgtttactaaatgagcttacaatttgattattctcagattctgagagaggtgctctgcttataacttc

SEQ ID NO: 35748 - DNA, 427 bp, Mus musculus
  source 1..427: mol_type = other DNA
agcaataaataagctcccagctaatcttatggggattttatgaacataacctcctggtcctacctggaggcagaagcggccgctcaggggtggtcacctggcccaggctgggagccaggtctgatacagcaagctggcttgccagagtcgcgtgttcgagttccggctgcgagccctcggggactagggcagcaagttccagagacgcagcgagaccgggtgcgcgcctaggcgcgtgccccgccacggcgcagggggaggggaagtcgcctttaactgtcaatcagacttaatgggcgccctttcggtccacgccgcagctgccccgcggacgaagtaatagggcggtgcagactagggcgtcctatccacgagtgggcaactcccagcccgggctgcgagagcgggcgcgcgcgagggcgagctg

SEQ ID NO: 35749 - DNA, 305 bp, Mus musculus
  source 1..305: mol_type = other DNA
gagacgcagcgagaccgggtgcgcgcctaggcgcgtgccccgccacggcgcagggggaggggaagtcgcctttaactgtcaatcagacttaatgggcgccctttcggtccacgccgcagctgccccgcggacgaagtaatagggcggtgcagactagggcgtcctatccacgagtgggcaactcccagcccgggctgcgagagcgggcgcgcgcgagggcgagctgccccctttctttttctggagaaagttggaggggggtgaatttcccagccgaaacggctgttggggcaagaaacttcttg

SEQ ID NO: 35750 - DNA, 385 bp, Mus musculus
  source 1..385: mol_type = other DNA
cggccgctcaggggtggtcacctggcccaggctgggagccaggtctgatacagcaagctggcttgccagagtcgcgtgttcgagttccggctgcgagccctcggggactagggcagcaagttccagagacgcagcgagaccgggtgcgcgcctaggcgcgtgccccgccacggcgcagggggaggggaagtcgcctttaactgtcaatcagacttaatgggcgccctttcggtccacgccgcagctgccccgcggacgaagtaatagggcggtgcagactagggcgtcctatccacgagtgggcaactcccagcccgggctgcgagagcgggcgcgcgcgagggcgagctgccccctttctttttctggagaaagttggaggggg

SEQ ID NO: 35751 - DNA, 220 bp, Mus musculus
  source 1..220: mol_type = other DNA
agacagtctcatcagaaggaggtatttttttaattaaaatttgcatttattcatttttccaccacagttatattcctactcagtttacccatttgtaaaacggggctgattgtgggaggcacccgccgcccttacaggaacggctgcggacgctagggggcgccccatcgacggctcggtgctctgctggccaggcccaggtacgtagccactcgattgg

SEQ ID NO: 35752 - DNA, 386 bp, Mus musculus
  source 1..386: mol_type = other DNA
cttagatcttcatttctgaacgctgagagtgatgggattttgagcctcagactcaatagctagggtgtcccactcactggagaaccctggagagctgcaggtcaacatttgtgttaacacatgtcctactttccatttcccatgaggacttagggatactatcaagaatgcttgcttagcatgcacagtgccccaggttccttagtcagcctggcatccctgtctcaaaaacagatctttgggtgttaaatcttaaattctttgcaaaccatctctggttctttgaaacaagattcatttgtaatagaatgatagagtttcataaaacacttgaagtttcatgtgatcccacgctgaaggtggacctaggccccagtcttcctggg

SEQ ID NO: 35753 - DNA, 390 bp, Mus musculus
  source 1..390: mol_type = other DNA
aggtcaaaggtcaactcaggcccaggactcagcaactacgttggctggccaatgtagcactggggctacaagtgggaaccatctgccagtctgaactggaacataacacttgtatgccaccaaggcctttgagggacatgagtcagtcttgctacatagcactctatagcactagctgacagaattcattatatagctcaggtatcttagttagtttttgtgtctacttgatacaaactatagtcatttgaaaagagggaacctcaattttaaaaatgcccctagctgattggccgccattggtttttttggtttttaaaggttaaacatttaaaaacacaaaccaaatgaaagctgtaactttagtaggtctctactgagagtttcagg

SEQ ID NO: 35754 - DNA, 488 bp, Mus musculus
  source 1..488: mol_type = other DNA
atccccaagttcaacaactttgttttggatgcgaactgaggtgtttcctctcagaagtccaacgtcacttaatgtcacgcccgtgagcgaagacgaaggccagcccaggcctttgcttcccagccgttaagggagcgctgaagacccagctcgctttccgctgatgagcttcctcgaggccccgcccactcggctccacagcccgctagaggcctggaggaggcggggccaaggaggagcatgcgcacgcgccctcgcgagctggccttctaagggggaacgagcgatctcgccgggagatgagaaggcgccgggaggcctctgagaaccttcccactcccgtcgacgtgactcccgccgtgaggtaaacgccagtggagtaggaggcgagcggcgcggctgggccggctcgggtcggtggcggagccctcgcgcgtgagagcttccgggcgcgtctcgctcctctggcggcccggacgccagtgtcc

SEQ ID NO: 35755 - DNA, 377 bp, Mus musculus
  source 1..377: mol_type = other DNA
agtaccgtccttgaggtggccctcacaagggccaaggagggacagaatagttgcctgcctctggaggaagcaagactttctggatggttttcttcctcgatttctgtttacctatcagccaagagaactcagaaaaagaggactgctcttacttagggttccaagtatgtttaaggaaaaaatgaaacatattatactatgcctgtacactccgagtaagcagacatatgctgcacattataggagccatattatatagctcatattaataagctccatgagaagatgctctagagtctaaaccagtctcttccccaccactggaaggctgtgtaaagaggcgtgtcctcagggcgcggccccgcccattcccgccc

SEQ ID NO: 35756 - DNA, 217 bp, Mus musculus
  source 1..217: mol_type = other DNA
gcaggcatccactaatccatctattgctttatgcattccatccatccatccatccatgctttactttacagcaaatgttacaatgaagaagtgcatgtggatctcacccgctagaggcctcaggattctgtacctctcagactcctgagtcctgtacctttagagctgagccggcttcccggttccacgcaggggagccccctgcgtgcgtgcgctg

SEQ ID NO: 35757 - DNA, 462 bp, Mus musculus
  source 1..462: mol_type = other DNA
ccagagtctttggattccttatcaaactttgctcatatgtattgcttacagtgatattctgaaaatataaagaacactgatgggcactgggctgactctgtgcctcgcggaattaggcaaaatgtcctcatatgctttatttttgcaaacctgctgggaggaacacaagaagaagcacccggatgcttctgtcaacttctcagagttctcctttcttcttgttcagttctgagtactgccccaaaatcaaaggcgagtatatcctggcttatctattggtaatgttgcaaaaaactaggagagatgtggcacaacactgcattgtgtgacaagagataataatgatgaataagttggttctggtgcagttttattttcttatctataaagcatttaacctccttgtacacaactcacttcttttaaagaaaaatttgaactgtaaagctgtgtaagatttgt

SEQ ID NO: 35758 - DNA, 230 bp, Mus musculus
  source 1..230: mol_type = other DNA
tcatgcagtaaataatattgtgccttgacctaacatcattttaattcatcatttgcatttattgaactcaattttaatattttatattgtcatttcctcataaattgtgctccttataggatacctctatcagaattcaaagaaaagactcacaatatctgaagggttcagaacccaggtgcagtgagcctgcattgaagaattgggaagctaattaattaaaaggccct

SEQ ID NO: 35759 - DNA, 273 bp, Mus musculus
  source 1..273: mol_type = other DNA
aatttttctttaagcagtaaataatattgtgcctaaacctaacatcattttaattcatcataataatctgtctttcacacgttctctatgagacattttacctaggatatcatgtaaattgctctctttataagatacattcacagttgatagtttgagcaaaagacattgtatcttagttttactattgtgtgcatttttagactagactcataatgtgtgaaggattcagaacccagatgcagtgtcctactcaatgaattaattaattaa

SEQ ID NO: 35760 - DNA, 195 bp, Mus musculus
  source 1..195: mol_type = other DNA
tagagtggaataattatttacactttttaccacagggctgtattcctgcctacatctattaacctaggcctagtaactcctctccgagcagagttcttctctcagacaacttggaattaaattaatcagtctgagtctgtaaaactctcagaacagaaattccagagaagttgtgtgaaaggcagcctgcaattg

SEQ ID NO: 35761 - DNA, 307 bp, Mus musculus
  source 1..307: mol_type = other DNA
tgatgatgttgctctaaacagacacatgtgaaatttctcatgactaaggtacaacaactttgttttggtaggaccttatgcgaataattctgaggtgatttttcctctcagagagggagccctagcccggcctcagctccacagcccgctagaggcctggaggaggcggggccaaggaggagcatgcgcacgcgccctcgcgagccggccttctaagggggaacgagcgatctcgaatccactcccggagaggagaaggccccggaaggcctctgagaaccttcccttactcccgtcgacgtgattc

SEQ ID NO: 35762 - DNA, 259 bp, Mus musculus
  source 1..259: mol_type = other DNA
aaataatattgtgcctaaacctaacatcattttaattcatcataagcacatattgaacaaaattttcattcaattctttacctaggatatcatgtaaattgctctctttacaagatacatacacagagccaaagacattttatgttagttcagaattcagagggtctgctgtgcatagtctagactcccaaaaggattcagaacccagaatcaaccaatcaataaatcaatcaatgaattgagtaagtaagtattaatt

SEQ ID NO: 35763 - DNA, 193 bp, Mus musculus
  source 1..193: mol_type = other DNA
gctttggaaggattcctgcctacatctattaacctaggcctcatcaacattatgtgagacaggatttctcagtgtagccctgactgtcctggaactcactctgtagaccaggctggcctcgattaaaggcatgtgacaccatgcctggcaagtctgattctgtaaaactctcagaaccgctaattaattgaca

SEQ ID NO: 35764 - DNA, 320 bp, Mus musculus
  source 1..320: mol_type = other DNA
tttacctaggatatcatgtaaattgctctccttataagatacatacatagttgatagtttgagcaaaagacattttatcttagttttactttttgtgtgcatttttagactagactcataatgtgagaagttagacaggattattatatctgaaggattcagaaccctcagatttctgagttcgaggccagcctggtctacaaagtgtgttccaggacagccagggctacacagagaaaccaatcaatcaatcaatcaatcaatcaatcaaaaaatcaatcaatgaattaaataagctaattaattaaaaagtcctgaag

SEQ ID NO: 35765 - DNA, 224 bp, Mus musculus
  source 1..224: mol_type = other DNA
taataagtgccttgacttaacattattttaattcaactcaattttaatattttcatggtttacaaactttaatctcccttttctattctttatcttggatatcacataaattgtgctccttataagatacctagaactacattgctagactcacaatatgaagggttcagaacccaggtgcagtgtcaaattgatgagtttagtcttagaagaattccaggaac

SEQ ID NO: 35766 - DNA, 202 bp, Mus musculus
  source 1..202: mol_type = other DNA
gtgtatccctggctgtcctggaactcactctgtagaccaggctggcctcaaaggcgtgtgccaccaagcctggcaagctcagtctgactctaagagtggaaggcagcctgcaacagacgatagcagctgtcttcagacagctgctacagtgtacttacatataataataaataaatctttaaaaaaaataattaatttaaaa

SEQ ID NO: 35767 - DNA, 386 bp, Mus musculus
  source 1..386: mol_type = other DNA
tcctccagtagtgagtggttgtaaaagcttgcaattccaccaacaaatgaattatttttaaaattatatgtctgtgtatatattttgtgcacttaagtacccaaggatttctctggtatacaagatatgttattttctttaacaaatgtgatggattgggtagtttaaaataagagaaaaattaattaaatgtattatgtatgtatttatgtatggtaccctgcaggctgagtgaggaagcagtgctatccactgtcttccgaggtgtctgagaaacactttcagctactttcccaaagctaagtgtttccaaagatgcttgaaacagttgtgtagagaagattctcagagtgctatgaggtgagccctctgtgacatcacagggt

SEQ ID NO: 35768 - DNA, 222 bp, Mus musculus
  source 1..222: mol_type = other DNA
aaacactttttgaaaggaatttttctttattgcaagcagtaaataatattgtgcctaaacctaacatcattttattcttacctaggatatcatgtaaattgctatctttataagatacatacacagttgatagtttgagccaaagacattttatcttaactttactttgttttaattcactgaaggattcagaactcaatcaatcaatgaattataataacc

SEQ ID NO: 35769 - DNA, 272 bp, Mus musculus
  source 1..272: mol_type = other DNA
gcagtaaataatattgtgcctaaacctaaaatcattttaattcatcattttctttgtcacacgttctctatgagatattattttacctaggatatcatgtaaattgctctctttataagatacattcacagttgatagtttgagcaaaagacattgtatcttagttttactattgtgtgcatttttagactagactcataatgtgaaggattcagaacccaggtatcaaaaaaatcaatcaatgaattaataattaattaaaggaatttccg

SEQ ID NO: 35770 - DNA, 305 bp, Mus musculus
  source 1..305: mol_type = other DNA
tattgaacaaaatttttatatcctattgacatttacctaggatatcatgtaaattgctctctttataagatacatacatagttgatagtttgagccaaagacatttaatcttagttttactttattagcccaggagtctagactcccaatgtatctgaaggattcagaacccaggtgcagtttgtaggaagctgaagagcacccgactgctcttccgaaggtctggaccacatggtggcagtgtctgaagctacagtgtacttacatataataaataaataaataaacaattagaggaagtgact

SEQ ID NO: 35771 - DNA, 423 bp, Mus musculus
  source 1..423: mol_type = other DNA
gatttccagagtggttgtacaagcttgcaattccaatctgctgcttatttttaaaattatatgtctatgtatatatttgaatgtgggcttgtgcacttaagtacccaagactaaaaaagagcattgaatctcctgttcagatgtttgttaactcaggtttctctagtatacaagataagtaattttctttaacaaatgtggattgggtagtttaaaataagagtaaaattaattaaatgtattatgcatgtatttatgcaggcagtgcagggaggtgtctgagaaacactttcagctactttcccaaagctaattgtttccaaagatgcttgaaacagttgtgtagagaagattctcagagtgctatgaggtgagccctctgtgacatcacagggtaaatccctgccttagtaatagcagagt

SEQ ID NO: 35772 - DNA, 205 bp, Mus musculus
  source 1..205: mol_type = other DNA
taaataatattgtgccttgacttaatatcattttaattcaaactcaattttaatatttttgtgttttctattctttatcttggatatcacataaattgtgctccttataggatactagaatctacattgctagactcacaatatgaagggttcagaacccaggttcagtgtccctaatgagttgtcttagaagaattccaggaac

SEQ ID NO: 35773 - DNA, 308 bp, Mus musculus
  source 1..308: mol_type = other DNA
tattgcctcatccttcaagcagtaaataatattgtcccttgacctaacatcattttaattcacctattgaacataattttaatattttatattgtccttttcacaggtttacaaactttaatgtccttgatcattggatatcacataaattgtgctccttataagatacctctatagcatcagaattcaaaggccattgtatctgaagggttcagaacccaggtgcagtgtccagctttgcagagggaaggcagcctgcaactaattaattaaaaggcccataagtaggtgggcttagaaagaaggga

SEQ ID NO: 35774 - DNA, 241 bp, Mus musculus
  source 1..241: mol_type = other DNA
atcattttaataatctgtctcccacacgtacctaggatatcatgtaaattgctctctttctaagatacatgcgttgatagtttgagccaaagacattttgtcttagtttttgtgtgcatttttagactagactcacaatgtgtctgaagggttcagaacccaggtgaatcaatcaatcaaaaaatcaatcaatgaattaagtaagtaagtgctaattaattaagaagtcctggaagttccg

SEQ ID NO: 35775 - DNA, 293 bp, Mus musculus
  source 1..293: mol_type = other DNA
caattgacatatgtggtttacctaggatatcatgtaaattgctctctttataagatacatacatagttgatagtttgagccaaagacattttatcttagttttactttccaggagtctatactcccaatgtgagaagttggatctgtatctgaaggattcagttgtaggaagctgagcttcattgagcacccgactgctcttccgagggtctggagttcaaatcccccacatggtctgaacagtgtacttacatataataaataaataaatcctaattaaggaggaagtgact

SEQ ID NO: 35776 - DNA, 185 bp, Mus musculus
  source 1..185: mol_type = other DNA
tgcattaatccccattagagtggaataattatttttgtttcatactgagcagtgtctacattttaccacagggctgtataactgcctacagtcttctctgagctgagttcttctctcacagtctgattctgtaaaactctcagaacccagcagcctgtaattaattaaaacaggcagaaatgaca

SEQ ID NO: 35777 - DNA, 106 bp, Mus musculus
  source 1..106: mol_type = other DNA
ttaatccccattagagtagaataattatttttgactccgagctgagttctagtctgactctaagagagaaattccagagaagttgtcaatgaaattagaaatgaca

SEQ ID NO: 35778 - DNA, 308 bp, Mus musculus
  source 1..308: mol_type = other DNA
atattgaacaaaatttttatatcctatgcaattgacatatgtggtttacctaggatatcatgtaaattgctctctttataagatacatacatagttgatagtttgagccaaagacattttatcttagttttactttccaggagtctatactcccaatgtgagaagttggatctgtatctgaaggattcagttgtaggaagctgagcttcattgagcacccgactgctcttccgagggtctggagttcaaatcccccacatggtctgaacagtgtacttacatataataaataaataaatctaattaag

SEQ ID NO: 35779 - DNA, 259 bp, Mus musculus
  source 1..259: mol_type = other DNA
gtaaataatattgtgcctaaacctaacatcattttaattcatcataagcacatattgaacaaaattttcattcaattctttacctaggatatcatgtaaattgctctctttacaagatacatacacagagccaaagacattttatgttagttcagaattcagagggtctgctgtgcatagtctagactcccaaaaggattcagaacccagatcaatcaatcaaaaaatcaatcaatgaattgagtaagtaattaattaa

SEQ ID NO: 35780 - DNA, 346 bp, Mus musculus
  source 1..346: mol_type = other DNA
ggagtttctctttattgtcttcaagaagtaaataatattgtgccttgacctaacatcattttaattcatcatttgcacttattgaagtcaattttaatattttatattgtcatttccttggtttacaaactttaatgtccttgatcatgatgtcttcgatatcaaataaattgtgctccttataggatacctatatggtttgagcatcagaattcaaagattgtgtgcatttatagccagaggaaaagactcacaatatgagttaagttgtatctgaagggttcagaacccaggtgcagtgaggcagcctgcaacagagtttgtgaagaattgggctaattaatta

SEQ ID NO: 35781 - DNA, 336 bp, Mus musculus
  source 1..336: mol_type = other DNA
atgttttccagaacgtaaattaatgttgtttagatatgcaaagtgtgattacattacgtgactgtatagccataaatcagaatgaagccagactactctacattaaagtgcatgaacactgcacatgtgttgaggtgacttctaatgatagcaggatcttgataatgtcacttctatgttccatcgcagatgaacttctctgcctagagacaatccacagaagttctggtgatccattccctgggacacgaattgaagcctttgcccacagttccgttggatgtaacccagggcctgtacgtaaaggttcttttctggacaagacaggatcatttg

SEQ ID NO: 35782 - DNA, 348 bp, Mus musculus
  source 1..348: mol_type = other DNA
ctgaggagggtctccacatctctcacactttggccaagccttgactagaaagttggccctccatcatcaggtttaactagaatttgatttccttgatcaagaattctaggaaaattactcaactcaggtcaggatatccatctggagctagggcactcagtgccctcggcagctcagctcactctccagtgtacgtattgaagagagactgacaattttgaaccaaatttaaagcaggcatttattaaatattaaatactgaccaagagacagacctgggtcagtaaaattcccccggaatcaaagaactacaattcccagcattccaggaacttacgtagttccggg

SEQ ID NO: 35783 - DNA, 286 bp, Mus musculus
  source 1..286: mol_type = other DNA
ttttccccaacttcaatcctgtggcggtaggaaagaagtatgtgcattcggagctgggaaatttcatctctatgttcaaaagtatggtacctgcagcagctcacgccgggttaacagtgtcattatccggagagtcattatccggagagaattggtttccatattgaaactgccgcttcaattggccgagcaggacagcggcggaggccccgccccagccttagactggaggttccgcccctgctggaggcggattccccggctgctgggaatctgggctttcggg

SEQ ID NO: 35784 - DNA, 182 bp, Mus musculus
  source 1..182: mol_type = other DNA
ccctcaccttatctgcagacactttcttttccccaacttcaatcctgtggcggtaggaaagaagtatgtgcattcggagctgggaaatttcatctctatgttcaaaagtatggtacctgcagcagctcacgccgggttaacagtgtcattatccggagagtcattatccggagagaattggt

SEQ ID NO: 35785 - DNA, 351 bp, Mus musculus
  source 1..351: mol_type = other DNA
atttaattaagataatgtatttcatttagcccagttacacatcaatataaaattactaataaggtagtttgcatttctttttatattaaaagtagctacaagtggctggtgggtgttactacgagcccaggcttggagccctcccagcttggggtcatgtcctgaatgtccttcacctagtagctgcatgcgttgtggctgctgtttagttgcctcaaaggcaactgaaggacaattacttctcggattatgaaatgcgagtctggatttcaaaactgacaggtgttatgctcgtccgggctgcagcggggcgagtgacgagcgcagccccctcccctcccgcttctctcg

SEQ ID NO: 35786 - DNA, 320 bp, Mus musculus
  source 1..320: mol_type = other DNA
cttttgcttctggaagagatgtctgcaatataaagaaccaccctacaggcccctggagacttgggtttcggagcaggctgcagggcagggtgcacaccggggcctaggcgcttgccccttctctaccggtctagcgggacgaaggcacgcctctgtggtcccgagatcagcggctgccatggcccgaaagcccagattcccagcagccggggaatccgcctccagcaggggcggaacctccagtctaaggctggggcggggcctccgccgctgtcctgctcggccaattgaagcggcagtttcaatatggaaaccaattc

SEQ ID NO: 35787 - DNA, 358 bp, Mus musculus
  source 1..358: mol_type = other DNA
ggatttgggaggatctatctttaacaatgagtcatactgaggactggtctaaatgtagatgtgcttggctcacatctggaccagtgtctgtgaatggcactgaaaatttatttccttccagggagcggaaagttgaattaagtctggggctagactttatatatatattcccaccatcgcggtgcagatgatattaagtctcttcaggcctcgccctcctcgcccacttggagagaagcgggggagggagaggtccggcatcgggacccagggggcacaacgacctgcttccccgaggcgggcggaggcgtgcgcggcaccgcccccggggcgggctcagtgcgtggcagcgcccgcc

SEQ ID NO: 35788 - DNA, 286 bp, Mus musculus
  source 1..286: mol_type = other DNA
agtgaccgttcaattgtcaactgtgaatttgcaacagcccgtctggctctggattgcccagagagatcttaatgtttcgcgttatttaatgagttaaaactcaagattgacatcaagaaaactacttgctgtgttcaagaaacaggctggatttaaacgctgccaacaaaatatttcctaggaaataatttttcagtggccttcattcagttaaatatagtttacagaaacagtacgttcttattttttaactttcagcagcaaacgaggcgcagcacatgttggg

SEQ ID NO: 35789 - DNA, 402 bp, Mus musculus
  source 1..402: mol_type = other DNA
gctggggagaggcctttcccacacgtctgactttctcttccactcatggtgggggaggagactttggcacccagagatgatgccccagtgacctcatctttgggtcaggagggttggaattccagaagttccttgtcatatcccagttgacactggagagtgagcatcctcaagctgaaatcttcaaccattgtgtgagccacatcagaaccacggacgctaccagagtacccggtagtgcagtccagctaggtgctgggaagccaggccgggcctggattccccacactcgccacaggctgggaaagctggggctctccccgccatttccaataggggtggggcgtgtgttccgcacggggtgaattctcaggtcctgagctcagccggcaggaatgcagc

SEQ ID NO: 35790 - DNA, 483 bp, Mus musculus
  source 1..483: mol_type = other DNA
tcatttgacaatagactgatcaattctgagacacaactcaagttttcccagcttgctttgcacggggaagctggatcaccaggcatgggcgtcacgtcccgcgaggccctccctcggagtccagagagaggttatagaacagaactctggctggggcacggaggtaagctggatgcttcccgagcccaggcagcggtctccgggccccacccgctgccacctgcaggcgcggtccggcgcggccccacccccggcagccaggcagccgctcaccagctcctcgggggtgcggctctcccgttcaccgcagcagcaacaccaccgggtccgcgcctcacgtgactggccccgggagggtcacgtggccctctcgagctctgggtccggagacagggagtggctgggggcgagggctcgcgtcacatgacgcagggcgggacttccggccgtcgtctcgtcagccctagggaggtggcaccctcg

SEQ ID NO: 35791 - DNA, 344 bp, Mus musculus
  source 1..344: mol_type = other DNA
tccttggtctcaaaggtcatgaaggacattatggagccacatatttcatgctcagagtctgggctttggaaagaagaaaagtggtttcatcctctttagagaatatgctcttcgggtgggctgtctggggccagaggtccacccaggccagcctagctggcctgacagctgagcagcaagcagggggagctgggtgcaggccagccgtcaccctctgcttccctgcatgggtcctgttgccagggagaaagaatcctgaggcgagcgcccaggaagataaccaaggactctttgacagaatggggagggttctagcccccctgccttctcaaagagctgggggg

SEQ ID NO: 35792 - DNA, 356 bp, Mus musculus
  source 1..356: mol_type = other DNA
cttcctttccaggatctcggagttcgaggcccagagaggacactatggcaggcagccaccatggggtcacctggtcgcgggtcccagaaggctgcagggtctggatcactgccccagatccaggattccgcctccatgagtattcataggccctaaggagccttcacgtgcaaagggccggccagcacctaaccgcctgcgagggtgccacctccctagggctgacgagacgacggccggaagtcccgccctgcgtcatgtgacgcgagccctcgcccccagccactccctgtctccggacccagagctcgagagggccacgtgaccctcccggggccagtcacgtgaggcgcgga

SEQ ID NO: 35793 - DNA, 330 bp, Mus musculus
  source 1..330: mol_type = other DNA
aaaccttggagcggtttgctgtgcctgagtcagctcctccgaaggcctttgaaggcctttctctggaaagaaacaaacctgacctggtttctctgttgctccactcaccacacagatagccactactgtgctggcccactgctgtgcagtggtagactagactgcagtatggcccacctttgttcagagttggacatacaacacaacagtctttttgaagtagtgtgatctcaggagatctggctgcttggccatgctgcagaaagcaatggctaatagctaatctctcttcagctcggggctctttgtcacagctccgcccagttgggc

SEQ ID NO: 35794 - DNA, 355 bp, Mus musculus
  source 1..355: mol_type = other DNA
cagctggaatcagaacccaggatggaagttgtggcatgcatccacccaccccactcataaacacggtcttactttataagccaggcaggctttgatatcatttttaatgtattctatgaaattctcttgaaatccaataagcttggaaggaaaatttaatacagtaagaacagagcttcgatttttttttcagatatggacatgaattcattcactgatcctcacaatcttgtaatcccgacctcctggcttgaagcacaggagctgcagctgcctgacgccgtctcctagcaaccggctgcagtcacgtggccgcgcgagttggcctcccgccgttggaactggcgcaacgcga

SEQ ID NO: 35795 - DNA, 591 bp, Mus musculus
  source 1..591: mol_type = other DNA
agttatgggggccgtgggacccgtaacccaacattcccggacaggaggacaccccgcacggtgatggatgagccgcctcaggctgagtagcgcgcgcaagggcacaagtgtgccataggtacctaggtgaggtcgtacagggacttctgagaaccggctacaaaggcctcgccgctgtcggtcccgccttcaggcggaataatccttggggaccccgccggctcctgccccgccagacgcagccgcagctgaactggggggagggggtccgccagggacgccctgccgctgccctttggcgccaccgctgcccggcgcccctcccgtcccacgcgccccggggcctcgccgaggtgggttttacgcacccggaggagcgggcccgcctcgcccggtgcccacacggccgcggggctgcgctcgccgtctgccccgcgccctggcggcggcgccaaggcctcgggggagcgggcggcgatcggcgagcgcagctggctagggcgcagcgcccgcagcgcacggggcttggccaggccaggggctggccctcggcgggaggtcgcggagctccgcggcccctcctacgtcccc

SEQ ID NO: 35796 - DNA, 379 bp, Mus musculus
  source 1..379: mol_type = other DNA
tggctccggaaggcagctgagcccttgtgtctgattttggtgagtttagcgtcccgaacacacccagcctccggggggcgtcgttgaaagggacagaggcgccctggtcagctttgccccctggagacttctccaatggtgatagacgaagcagagcatcctcccttccagcaggttgcggaccgtggtcagggtggtccaccaggtgagcgatgggcggggccgggggcgggccgagccaagccgagccttacctgtcgggcggacggggaggggaccgagggctcagggccgagcgcctgcgggaggggacgtaggaggggccgcggagctccgcgacctcccgccgagggccagcccctggcctggccaagccccg

SEQ ID NO: 35797 - DNA, 395 bp, Mus musculus
  source 1..395: mol_type = other DNA
gaccactcttcaatttgtagcacctatatagtggttcacaatcatctgtagctatagttttaaataaatagaattcagggtttgtaatataaaagggttccgtataatggatataattttcatactattaaaatgatctgatccgtacctctacaggaaggaccctggagcagcactgctgccctctcatgggacacttagttctctagggagctgcggattcgctttcggttgggcaagctaagagtccggggacgttgacgctggactagcagcagagcccttggtacccagctgtgcttgcagcaggttctcacttgcaactcaggcggggctccgcccctaagctccacccccgagcctgccccgcctctcccaacagggcgaggttctga

SEQ ID NO: 35798 - DNA, 394 bp, Mus musculus
  source 1..394: mol_type = other DNA
tgtaatataaaagggttccgtataatggatataattttcatactattaaaatgatctgatccgtacctctacaggaaggaccctggagcagcactgctgccctctcatgggacacttagttctctagggagctgcggattcgctttcggttgggcaagctaagagtccggggacgttgacgctggactagcagcagagcccttggtacccagctgtgcttgcagcaggttctcacttgcaactcaggcggggctccgcccctaagctccacccccgagcctgccccgcctctcccaacagggcgaggttctgatgggaccgcgggagcaccgcggtggtttggtttctatagcccggtcgtagattggaacctgaggagagggatccggctgct

SEQ ID NO: 35799 - DNA, 341 bp, Mus musculus
  source 1..341: mol_type = other DNA
gttggttcatggacaatcctgcctggccctagagaggcaggagtgcccagcttaaggggcagagccctcagccctatagccctcatgcccgggagtgcaatccaaggtggccatgccattggttgagcccagaagctaggatggctgacctcctgccttgaaactcatgatggcatttaatcccagcctcaggaggcaagactggaggtacagctctgcccctccccatgggtggggcagatccaagtagcgcttccttcgctggaggaggaacgggggggggggatcctagagctccgagctcaccatcttcgcaccgacgcggaaggcccgctggtcgg

SEQ ID NO: 35800 - DNA, 370 bp, Mus musculus
  source 1..370: mol_type = other DNA
ccagataggcaggatcagactatctttgtcatcctaccaatgagcaggactccccagaagaaggacctggccaagtcctctgtggcttgaagatgccccagccccatcggtgggagcgtcaattcgttggttcatggacaatcctgcctggccctagagaggcaggagtgcccagcttaaggggcagagccctcagccctatagccctcatgcccgggagtgcaatccaaggtggccatgccattggttgagcccagaagctaggatggctgacctcctgccttgaaactcatgatggcatttaatcccagcctcaggaggcaagactggaggtacagctctgcccctccccatgggtggggcagatcca

SEQ ID NO: 35801 - DNA, 390 bp, Mus musculus
  source 1..390: mol_type = other DNA
ccgcctctggcccccggctaagggctgggagtcctgtacccccccacccccaccccccgccccgtaacccaaggtgcggcttccgggaggagctgactgcagagtggagttgggggtatcggagctttcctcctccccaaccccccaggtttgtggtgacaaacagtgggcgggtcgcaccccgggcctccattggtccgctcatccccaggatccatgttctccaacgtaacccggctaagagcgggcagtaggcaggtctgccttccgggccacgcaggctcgggctgtacagccccacggcctggcaggatcgctcagcggagggggggggcgcgcgcgctctgcgatcatgagggcctagcgcctttaaggcccaggcctcaggct

SEQ ID NO: 35802 - DNA, 445 bp, Mus musculus
  source 1..445: mol_type = other DNA
gtttgtaaaccctaggaccccgcggggactccggaggctcaagaggcggctctcaaaccccaggaagtctggagcctgagatgccagagtcctccgatgccattttggagacccaggcgctccctagactatctctagggtttggcgcggcatctccatccatcgctgcggtgctgtcaagagagaagagcctgagcgctgcgggtggcgagtcctggagctgcccgcgtcagccgggcccgcgccgccgcgcctcttaaaggccccgtgcgccccgcctctggcccccggctaagggctgggagtcctgtacccccccacccccaccccccgccccgtaacccaaggtgcggcttccgggaggagctgactgcagagtggagttgggggtatcggagctttcctcctccccaaccccccaggtttgtggtgacaaacagtgggc

SEQ ID NO: 35803 - DNA, 387 bp, Mus musculus
  source 1..387: mol_type = other DNA
ctaggccctcatgatcgcagagcgcgcgcgccccccccctccgctgagcgatcctgccaggccgtggggctgtacagcccgagcctgcgtggcccggaaggcagacctgcctactgcccgctcttagccgggttacgttggagaacatggatcctggggatgagcggaccaatggaggcccggggtgcgacccgcccactgtttgtcaccacaaacctggggggttggggaggaggaaagctccgatacccccaactccactctgcagtcagctcctcccggaagccgcaccttgggttacggggcggggggtgggggtgggggggtacaggactcccagcccttagccgggggccagaggcggggcgcacggggcctttaagaggc

SEQ ID NO: 35804 - DNA, 350 bp, Mus musculus
  source 1..350: mol_type = other DNA
gtttctgcccatggagcataagaggcatcacacgggcaggcagtgcagcacgcgctccatgccaagggacacacaaagccagtggtctcctgtcttggcaatggctgtacccgtaacggccgctgccaatagctgggtgcctgccgtgtgtcaggcattgaacacatgcggtcatatttaagctttgagatcttctcatggcatggctgttgtcctcaggggatttgtaggagaacactgtacagccctggctatcctgggactcactctgtaggccaggctggcctcggattcagcattcctcctgctctggctcaaatttttagtatgctttgtcaagaaaaccactt

SEQ ID NO: 35805 - DNA, 546 bp, Mus musculus
  source 1..546: mol_type = other DNA
tttcataatgatcctgcattctcttgcttgaaggccaagctctcagccggcagtgatgtccctcctgcagcgggaggctggcgccaggaaaccagggatagccttggtttctaggcgcggaccttctgctgttactggacgagtgcctggtcccaggggctggcagagctctgggctctgctgccagaggtgccaggcgcctgggcttggcaaccacctccggagggcacccggggatgccctcgagtgtccagcaggctgggcctgggaaaggcctgggtgcccagaacctcgggggcgggcatggccccccaggggtcgctgcgctgtgctcagtccctgccaacacgggaagctggctgtaccaccacgcggctcccgcagggggagcggcagccagggcggcgcctggcggcggaatcgggagacagcagcgcgcggcggcagagcccgcaggcgctgatgctggaggcgccagtggacggggggaggcgcgactctaaaggctgcccgggacacccccgcaccccgtggtaggaaaaggcg

SEQ ID NO: 35806 - DNA, 272 bp, Mus musculus
  source 1..272: mol_type = other DNA
cctgtatatatgtatatctagtgtgatcttcttgcatgtatgcatgcctggtgcctttaaaggccagaataggtcagatcccctggaactggagtgcaaaaaaccatgtaggtctttacattggccagcctggtctacagcgtgatgagttggttactcctttcaacgtaggatgtattggggtaaccacaaatgagtcttatttcttatttcagtaagtccagtgactttttagcgccggccttcaccgggccctgcccgccccaggtccg

SEQ ID NO: 35807 - DNA, 329 bp, Mus musculus
  source 1..329: mol_type = other DNA
ctcctgccataaggacagagggacctttgtacatgcccttcaattaaaggtatgaaagctgccatcccgttttctcagacactgtgtacggataggggcttgagtctgagccttgggtaaaggtcaggcccactcactgctgcccccaaccccagaccacgcctggcatggctgagactccttgtaaatgttgaaagatcgttttacaacaggatttcatctcagcccagataaaccaggacctggagttatataaccaaggagtggcctctgagccagtggctggcaggccaggcacctgaccctcccagatgaggtgggaggggcat

SEQ ID NO: 35808 - DNA, 231 bp, Mus musculus
  source 1..231: mol_type = other DNA
agacaggcatgcactttacacagtgctgggaaggcgtgcaccaccacgccggggtgggcaaacactcttagtttacatccctaggtttgaaaaataaaaaaaaatttttaaggatttttctttaaaatcttgtatttaaagtagttcggtgatcatcttatcctgagaatgagctcacaacttgcaaatgcatattcagttttagtggctccacacggtcacagcgtgtgt

SEQ ID NO: 35809 - DNA, 370 bp, Mus musculus
  source 1..370: mol_type = other DNA
ggccacactggctctactgtgttcaggacaccacgttgtatctgagtaaattttgtgccaataaatgacatcagaattttaaaagcatatatgtgtattggtgagccactgactaacagggtctcttggaatacatacatacatacatacatacatacatacatacatacatacacacacacacacataggcgtgtcactttatcagtatggcacatgtatgtatgttatgggtgcccatgtcagccagttgaagtcatctgctctggtcatgaacggtcctctttaaaaaaaaacagcgagtgttcttgttttaaacaaattggaaaaacccaatcctaacgtggttttgcacgtgcgcgcatgcgtgt

SEQ ID NO: 35810 - DNA, 281 bp, Mus musculus
  source 1..281: mol_type = other DNA
agaccaggctggtctggaactcagaaatcgctgactcagctgttagcactagctgctattcccagtacagcgctctctaatttttacttatgtaattgctgggatccctccctgcagggctccagagccacaggcaggagaactagacaagtctgaggctagtctggtctccatggaaagaccctgttttcaaatgagtcaactaccaggctgccgaaccttcctgcctggaagggaggcaggcaggagccatggtgattcccagaatccttggtttgtgg

SEQ ID NO: 35811 - DNA, 461 bp, Mus musculus
  source 1..461: mol_type = other DNA
aaatactgaaacatccaagtagttttttgctgtaggattcagcctcagtttcttcacttattgaaagaggagagagtatcggctacacagtgactttgagatccctgtctctaaaacagtatccagagagtgctaaaaggtacttgatacaaaatagtacttagaacagggaccattttgcagatcaaagttgtttccacgtactaggaacccagggttcccagggattccccccccgccccagtcccggcctgcgctagtctcgcgcattctcggcgcgcgcgagctcctcgactagggccggccgttggtcaggcgaagccatctaccgcgttacgtagggggactcggaaggccgagtggccgttctgtgctagcatccgagcctctgggaggagagagcgcctgtggcttccctcggagagcgcccctcctgcagggaagccagtgggagggcggga

SEQ ID NO: 35812 - DNA, 548 bp, Mus musculus
  source 1..548: mol_type = other DNA
agagcactcagtgctcttaactgctggagcttgaagtcagccaaaagcaacagctcatgcccttcagctgtgcgttatggaggctgctgagtatcagtcagaaaccgtccctgacaccgtgtcaggaatagccaaactgtgtatggagcaattagcatttaatattcggtaattagcatgcttaatgtgattctgataagttccttgacattttcataaaaacaaaaagaaaaaaaaagccgcgccagtcttttttggttttgaatatgcatgtgcggggcctcagctggtaaatttagaaagagctccattcttattctgcagccacggggtccaaggatgggccccagccctcgaaccgctgcgccggcgcggcccgccccggaaccctcccgccgccagggcctctccccacgtggcccggcagccggccgcactaccctgctgcggctgacagacgttgcagcccggggagccaatgaactcctggtgaagctgcgggccggcccacgccgccattggagagccggggtcccgcccctccgtag

SEQ ID NO: 35813 - DNA, 349 bp, Mus musculus
  source 1..349: mol_type = other DNA
gccagtctggtctacaaagtgagttagtcaagtttccatccatgtctcctcaggtgactcaggataaacccgggattaaacaccctctcagtgtgttttgaaacattttgtaacagatggcccagcggttaaaagcactgactgctcatggtagctcacaaccatgtgtacagctacagtgtactcatatacattaaaaaaaaaaagtgtatggtagatgcaagcagggttttaaacccttttcttattgcttttgatcatggtgtttgctatagcaacaaacaacagcacccgtaattaatgtcaccctatggagaggtgttgacacacatctgtgcattctaaggga

SEQ ID NO: 35814 - DNA, 331 bp, Mus musculus
  source 1..331: mol_type = other DNA
tgcaattaataatttgcctattgaattctgcagaggaccggtgacccgtaagaggccctagatgaaaacggctgtcacctcccatctccaggatttcttgcataaggggctgaatgaaaactcccctttgtgttgcaaaaaagagagccaattttcattgaacagagggtgtagaaaaagggagcagcgcgctctgattctgcttcgctggccgatctcgccgcgcgcgcacgcggagcccagccttggcgggggtggagcggagcccagccccgcgatccggcccgggttttgcatgccacccactcgcccgttcggccgcgatccggga

SEQ ID NO: 35815 - DNA, 269 bp, Mus musculus
  source 1..269: mol_type = other DNA
tgccctgagaggaacacaggggtcccctgagagtcagttctgaagagacatccagctcaggactcccgtgggctcccatgattttatttggactatgtgtcgttaagcaaagataaagttcattagaaaaccttgtttactcgcctccattttaaaagtctacgtttacaataagtcgctaattaaaatatgaaattaagcaacagctctgttttttttttttttgtgatgtaattgcagtggtaactactaagtaaggacatctatcc

SEQ ID NO: 35816 - DNA, 362 bp, Mus musculus
  source 1..362: mol_type = other DNA
ttagcatgtatataaatgtgggcacattattatgggtatgtgtatatgaaggtgcacatgctgtatgtggagggagatggacgccctgttctcaggcctcaccctctcagacattagggtccagccaggccgaccccggactcacagtggcttcctctactttgagggtctctttcatattaggccaaggaaactttgtttaatgtactgaaaagccatcggccagaacatttaggaaattgattttcctggctattttaccccagtattaattacttttttttaaaacaaattaatttaagagtcgtaaaacgtctcctccctccatgggtgggggctcaaggtagaggggcttctcctct

SEQ ID NO: 35817 - DNA, 429 bp, Mus musculus
  source 1..429: mol_type = other DNA
gtggggaaggctgttctttttagaagggacctcagaagttacaaaagacggtagcaacagtgttccctggtgatccactcactagagggcacggtccggccctctgatggctcaggtctacaccctgcctgacactgggactccttgaggttcctgggggagcaaggtctcccagccggaagcgcctgtcagggtgctgcctctctctcaccccgtctcccctcctttcccagacagtgagaggcagaggccattggagcctctggaggggcagcagtggcctctaccacatgaggcgcatgaccactccatggctccaggcatggccagccctggtggacagagtagagactgtcccttggaaggcagctcagcacgctgtggtagacaggctcctggggaatgtgcatccagcagctcatcctgcag

SEQ ID NO: 35818 - DNA, 332 bp, Mus musculus
  source 1..332: mol_type = other DNA
tcgaggctagcctggtctacaggtacgaatactagtgtaccgaaagaccaggctggcctcgaactcagaaatccgcctgtaaattttaacttacattttcatgtgtttattaaataagtagtccctaaatcgcctgttatctcagcacctcgaggtggaggcaggagaacaagtctaaacatacaaacatgtaaatttattttaaaaagacagcgtttatacatcaacaatgtaaaacaacaacaacaagagatattctatttttttaaaaagaatttgaactatggattttcctgtaaactgcaagataaccgggggagaactagtgcaag

SEQ ID NO: 35819 - DNA, 447 bp, Mus musculus
  source 1..447: mol_type = other DNA
ccttttaaaaacttaataataatttcatagcaacgtatgtgttcacatgagcatacatgcatgcatacaaatgtcaggttgtgtgatcagagaacaacttttggaaatctgttttcctaccttgtcagctatttaacttaatgtaaaatgtttacttaatatttcaacttgcttgtaaatcatatcctttaaacttcaaaactctggatccttctgcctcctgaggataaaacatgaatatgcatctggagagatggcccagcagttaagagcactgactgctcttcatgatggctcacaaccatccgtaatgagatctgatgcctctacagtgtacttatgtataaataaatctttaaaaaggaaaaaaacaatgtagtgtagaactatgcttaccatacatgagaccccgggttttccatcatacagtcttttagagaagaaaag

SEQ ID NO: 35820 - DNA, 381 bp, Mus musculus
  source 1..381: mol_type = other DNA
taacttacaattggtttgtgtgagtgtgagcacacagtggatgaagaaaacaacaaactcagggcctcagggccccaggcttgcaggagtctttgtagaccaggctggcctcgaactcagaggcatgtgccaccatgcctggctttcacaaagtctggaactcacagagatcccaacatatatatattttttacttaaacacttttatttacttatatatttattatgcatatgtgtgtatttgtgtgtgcatctgcatgcgggtaccaagagagacctcagtgactgctaaccagtgagcccgggttaagacccttccgcgagctgtcgccagggggcgcgcgcgggacaggaaggaggcgcttcgcgctttgaccctcg

SEQ ID NO: 35821 - DNA, 256 bp, Mus musculus
  source 1..256: mol_type = other DNA
atcgcaactttttttttttttttttaaagaaatgtgcaaactgctgacctgggcatcttggaaagccctagaccaggaggcccaggacagcgtccgtggcactggagcctggggcagagggcagtctgggacatccgtgctgggctgagctgagctgcgtcccagcctgcacaggcctgaggcttcctgcttgccacaggcacaatcacaagcgcgcatgtgttctaaaataagagcagattgtctttaattaagg

SEQ ID NO: 35822 - DNA, 326 bp, Mus musculus
  source 1..326: mol_type = other DNA
aaaaaaaaaatcttactttcaatttctaaatctgatttttaaaaaacatggctcatagagcttttcccaccgcgccgggctcggtatggcatctggaccgtccagtcccgggtgtccccttacgaagcgggtcattcggctacccactaacacctttccgggggtcacccgggagggaactctggacacacccgcatcggctcccgtaccaccagggggcgctcgagtgtctccgtcgctccgccggcaccaccccggggcgggccgaggtgacgctcggcgctctagctcggggcggtgtcccgcgccggcggcttcgggcggag

SEQ ID NO: 35823 - DNA, 344 bp, Mus musculus
  source 1..344: mol_type = other DNA
ttctccccgagtatcggccacgcacacgcgccactgctgcacgtggaggtcagatgccaactttgcggagtgggttccacttccaccttggtaagggctgcaccaagcccttaatgagctgcagacccgagcttccgcacgagcgggaggcatcgtgcaaggtcccgctagaacagaagaagccctttaaacgctcctagaacacttagaagaagccctttaaacgctcctctccagctcgaggtgccatcgactgctcggcgctctacagatctgggccccgggggtgggcgggtccgtttgccaatagcgtggggcatcggcccaccctgtaagcctctcga

SEQ ID NO: 35824 - DNA, 380 bp, Mus musculus
  source 1..380: mol_type = other DNA
tatacttacaaataataaataaatcttagaaaacaagagtatatatacaactcttgtgttttaacattgcggatggtaacatatgctgtgcatacaactctgaacatttagggagatggtgagaatatgggtacagggtttgactgccagtcacacattcttgttccttactttaaaacaaagggtttagtgcattactgtgctgcagagctgcccagatgtcaggcatggtcaaaggctagcctagtctaccctttcctttttctctgcaaaagtctccggcgggttgagcctagaactttgcaagttcagtccaggttagcctttgggatccccttctgtgacatcacagagggaaggcctgtactggaggctgtggt

SEQ ID NO: 35825 - DNA, 361 bp, Mus musculus
  source 1..361: mol_type = other DNA
acttccaaaagtcaaattttgttaaacagtcaaaatgtggaatacagtctgcccagacagctcattctccatcctagcaaatggcaggagctcagtggaggactcccagagcatcccagaatgctcagttatttgagtacactgtcatcggacacaccaaaagaagaacagtcagtgctcttaacccagaagcttaaggtatatatcagatagcagtggccagtgcgagctctcagaggccgggagagaaggcatgcgacagcctgtgctctgagacataagcagatgttaaagccttgatggcaggattatttatttatctatttgtgaatctaggtcacagatttagatttaagttcgc

SEQ ID NO: 35826 - DNA, 530 bp, Mus musculus
  source 1..530: mol_type = other DNA
cttttgtaagccatacgatatatactttgtggcaaaatctggattttcacggttctgttagatttttcaatttgtatttatacattgattgtaaagtaagttcattacaaagggttagttactaagtcattgttcaatacatttctcaataatttaacaaggtaaaataaaattaagatcctgttagttttcttccatgggttttcctgggggaggattgcaggatggtgctaaatgctccctgcagaaagcaaagccggcttgcagcatcctggaggatttccaagtcactccacagcagtctcgcccctccccccgcctggcgccgctcagggaagagggggtggggcagggaaatcggcggcgcgacgcccgctgcttattggctggcgaatcccagagcgagaagccccgcctccccggcgagggtcacgtgaccccttttccagcgagggcttcgccagtcccgtccctcccctgccccccaccggggttctcgcgtggaggcggggcgagcctggcctgctggg

SEQ ID NO: 35827 - DNA, 488 bp, Mus musculus
  source 1..488: mol_type = other DNA
atctctgtgagtttttcaaatacatacatgtatacacatatacatacattaatgttatagttggttatggcttttgtaagccatacgatatatactttgtggcaaaatctggattttcacggttctgttagatttttcaatttgtatttatacattgattgtaaagtaagttcattacaaagggttagttactaagtcattgttcaatacatttctcaataatttaacaaggtaaaataaaattaagatcctgttagttttcttccatgggttttcctgggggaggattgcaggatggtgctaaatgctccctgcagaaagcaaagccggcttgcagcatcctggaggatttccaagtcactccacagcagtctcgcccctccccccgcctggcgccgctcagggaagagggggtggggcagggaaatcggcggcgcgacgcccgctgcttattggctggcgaatcccagagcgagaagccccgcctc

SEQ ID NO: 35828 - DNA, 349 bp, Mus musculus
  source 1..349: mol_type = other DNA
gagccaccatcagtactgacagtcaagtctgaccagctggtctaacctgagcaggctcagcggttaagagcactgactgctacatggtggctcacaaccatctgaatcaagacctgaacagtgtacttacatataataaataaaataaatcttaaattgaggccagcctggtctacaaagtgagctccaggacagccagggctatacagagacccaaataaatgagttcctatttattaggatggctagtgcatatacattgatgtataacagctggttttaaacatttatgttgactcgtttagttattaacatctaagaatagggatagccagggctccacaccccc

SEQ ID NO: 35829 - DNA, 458 bp, Mus musculus
  source 1..458: mol_type = other DNA
agtattgaataaaagtatcctgtcccgtgcacggtgctcaaaactcgccaactgtcggagctctgagtgtcatcaatttgaggataaagtttaccttacgtaaaactgttaagagttttatttgctagaggccactgaatccctgggctgtgcctctcctctgggtgaggccacagcactcggagcccgggcccgggaccggaccgcacgctcggatgccggcctcctccccgcggacagacgccgaggtgtgcaggtcccgccaaggccgggctccagcaggcccggtggtcacctgaggaggcggggagtcctacgcctgcgaaacgcttctccatccccgcctgccgcccgctagcggatcccagggtttggaaccaggggccccgcctacctgactccccggcctggcggaccgcatggagcgagcacttccgctggattcgcgcacttccggc

SEQ ID NO: 35830 - DNA, 509 bp, Mus musculus
  source 1..509: mol_type = other DNA
caactttcaaaattctcagtctttcaaaatttcaaaacttttaaagttccgagtctctttaaaagtccaagtcttttaatcatgagctcctgtaaaatcaaaataagtttcatacttttgggtcccaaagtggtaacagtttacagtccactcagcagcaatttaactggttctcaaagcttgctctttcccagatttggaaacgactaaaagggaatgtccttctcagctgctctcaagaaatctctagagaagttaccaactttttggttccaagggccccagggaccgttacaaaagtctctaaaggcccagccattgtgcattgtcccttgcttggcaaagtacgggtcagacctcggtgggttgcttaccaggccttgaaggccaaacggccctagtcctccacggcccggacgccagcgcagggaacaccgccgccttgccggaagtgcgcgaatccagcggaagtgctcgctccatgcggtccgccaggccggggagtcagg

SEQ ID NO: 35831 - DNA, 404 bp, Mus musculus
  source 1..404: mol_type = other DNA
atgagtaccatttttagtttttaaatttatttattcaattgattttttatgtataccatgggtaggtgcccatggacactagcagagagtatactcagctaagagcgttgctcgcaactgtctgtaattcgtttcagggaatccatgccaaggctaaatttttcaaaaataaattggaaatgcatgtgcctttaaactaaaagcaatttgccgaaaatgaacaattttcccttctgtggattaatcacagaggccctgggcactctggatttcacagaaccccttcaggccccgcccctcagggtacctccctctggggcgtggtcggcgccgcgcctccgccgcgcgcgcggagcctgatgccgcccccctccgccggtccctcctccggcagcctggcgcct

SEQ ID NO: 35832 - DNA, 351 bp, Mus musculus
  source 1..351: mol_type = other DNA
aagtgtttgcgctcacctgcctgcctgcctgcctgcctgcctgcctgcctggtagaaggcggtcccgtatggcagggctgagcagggctgagaaccgtgctttggcgtggtggtcactagtacacagtactaggccacacttctaccaggttagctagtacacagacggctgccaggctatgcctcctgtaggtgtgacatgtgtctgtaccagaggacagctacagatgtcctacacagactagctcgcacactcagcaccccagagccatgaccataggctctgcgccagcggctctggtccctcagggtcggggtgtgtgcatgggcccttcaggctcctcccatgac

SEQ ID NO: 35833 - DNA, 513 bp, Mus musculus
  source 1..513: mol_type = other DNA
taatgaggccaccctgccctccaggcagttgtttgacctgagaaacacagtgtgctcaccgaagcccaccgtgactctgtcagccctctcctctagaatagggcagtgtttgtccatccagattacaggagacatacaaccccagaaagggccctttttatcgcgctacaactggatcacctccactcggcagaggaggtcaccgactctgaggccctaggatcaggacaagtccttaggttcggaaaccaaggagcggatccccaggtgccttggggggcttccagcgtccaggggcgcgcgcgagctccgggttggccgcgggcagggggcgcgtccagcgggtccctcccggttgctcccgggccaatcttcctcggcgcgtccccgcaggcgcgcacccagggctcagcctgtgggctcgcgcacccgcggagcggggagcgtgcgcgcgcgctctccctccccgccccgcccgccgccaccccgcccccggccgggtaccctcgccgg

SEQ ID NO: 35834 - DNA, 276 bp, Mus musculus
  source 1..276: mol_type = other DNA
tgacaggggcctgatttaagatttctttattattatatctaagtacactgtagttgtcttcagatgcaccagaaaagggcattggatcccattacagtggtgagctgaattgctttttgtcatggtgttttatcagagcaatcacgctttataaatagtgcttaatatctgctggtttttaagggagaacccttaaggctccggccttagcccctggcttggtgaggcgggctctgctcccgccccattcctggggcctccgaccgggccccgcct

SEQ ID NO: 35835 - DNA, 176 bp, Mus musculus
  source 1..176: mol_type = other DNA
ccctaagttcctggggattaaagtgaccgagtgtcctttttaatgatgagacttaatgagcgggactggcgctttcgtacccattcgaaaaggttttgttatgtcaacttgacacaagctgaaaatgcctttataaaatctgattctaggcaagcctgcggagcattgtctcaatt

SEQ ID NO: 35836 - DNA, 406 bp, Mus musculus
  source 1..406: mol_type = other DNA
gttcgaggccagcctggtcaaggaatacatagtaagttttttttaaatttagttcccggcctgggctgaaaaagatcttgtggctagcctcaccctccccaggtgtctagaagtcactctgtagaacaggatgcctcaaacacacagagatctgcttggctctttgtcagtacacccagccaaccactagatattcttgtttgtttgtttggtagaccaggctggctttgaactcagagacctacgagcctctgccaaacctggctaatgtttttaaaggacctttgagactcgaaggcacctgctggtgctaccctcgcagggcccgctgggcttggggcggggtttttcctgttatctgtagaaaggaaacaatgcggactgtcagtaggcgggctgtcccgct

SEQ ID NO: 35837 - DNA, 398 bp, Mus musculus
  source 1..398: mol_type = other DNA
atatgtaatcaccatacatgtttatacatggaaatattacagaatgaaattcttaaaaaatccgacaacttgagtccaattcctgggacccgtgaggcatggtggctcatgccttcatgtgtgaacccatggtgacttcgaggttatcttgtctacatagatacatggcaagttccaggcagtccaggactgcaatgtaagactgtacacactcagtttccagcctctgagaaggaccaagcagctttgaccagtttgctggtcattgagcagcccttcggggcctgatcccgccccgcgttggcgtacgggatccgggcccacacctccgccgcgccgcgccccgcgacgtcacggcccggcctccgccacgtgacggccgcgcgctaggctctctg

SEQ ID NO: 35838 - DNA, 363 bp, Mus musculus
  source 1..363: mol_type = other DNA
ttttttgacctttttttttttaaagaaatcaaaggcttataaatatttcttgctagagcctgatgacctggaactcactgtgtagtccaagctgagtttttcttgatccctaatttagctcacgtaaatttgaagtgcacagacttcatcaaacttgtatgacactgtggcgtctgaagcggcacggacctgcaaatgcatgcgtgcgcaggctgcaggcgcaggcgggactccttccagctctagagagggacgctggggggcgcgtccgagccagtgccgagggcttccgtaggcgccccgcccactcaggctcgccccgcgccgcgattggctgcgcggcgggagcgcgccgagtcaagg

SEQ ID NO: 35839 - DNA, 344 bp, Mus musculus
  source 1..344: mol_type = other DNA
cctccccacgtatgggtgaggagagtgaaaattccctcagtcacctgtgactactctcttctgtaatgacgggaaaggaaaatccctttcagactagatggacgcctatgcgaccaggacctcggggtcttgaagtccttaggttgctgcagaggccaaggcagagcgatgtatgtctgagcctacagccctgtatcgggggctacagagttcgcaaagccccaagcctgccctgcctcagagccctgcgcgctccgggctctcgggcgaccagcgccgctcaacgctaggaaacccagcgctgggtgaggcggggtggagcgtacaagccccgcccacggcgc

SEQ ID NO: 35840 - DNA, 356 bp, Mus musculus
  source 1..356: mol_type = other DNA
gaggacaggctgtgcagctggatctcatctggaactcaggtcatcaggattggtggcagacacccgagctgcccccaaatagggtttgggtgacacctgttcaacagaccagacacccggacagggctggagcataccaggcctgaggccagcctgggctaaaccagttggatttactaatgtgatcagagctctgatctgagtcggtttggccacacgatagcaactggctggccagtgctgagcagctgcttcatttatgtaatttcactttattaatggctgtgtttaacaaccagctgggaaaaataccggaaattttgcaatcaaaacattgcaaaaaggttcaaaggggc

SEQ ID NO: 35841 - DNA, 377 bp, Mus musculus
  source 1..377: mol_type = other DNA
tcatgaaataaaatcccctctcagaggtggccatgtagccctccgacggataccctcatccccgggcagcctgggaggtcagggcaccgtgccttcgagggaagctgcagaccatcttcagtgtctcttttaaacacctactgctctctagagagagagccttgacacaggcacaagctaagcctcgacagcacattaggtggtgtcagatctggagctgacttaactcactcctctgggtggggagaaggcagggaacccgttccaggttccgtctctgagccagctgggaagccctgccacccatcagaggccccgcctcctccgcgcccccgagttagggggcgtgcctatgcccgaggccccgcctcctctgc

SEQ ID NO: 35842 - DNA, 344 bp, Mus musculus
  source 1..344: mol_type = other DNA
cactgcctgaagtgaagagtaccctctactctcagacagtaggtgggcttcagctgagcccagtctcagctctgcaggcctgaccagtctcaggtcccgtatacactgtgtgtgtgcctggtaccagtccctgtaaccaggtgatagaacctgggtcctctgcaagagcagacagtgctcttaaccgcgagccatctctcttgtggaagccggaaggcattcctgaagccctcctggtggcgtccctccgcgcttccaagtgctggaggagtgtgtcatacctcggtagggtccactctgcgggcgcctcagcctgggctggccagcttagctaaggaagcaat

SEQ ID NO: 35843 - DNA, 274 bp, Mus musculus
  source 1..274: mol_type = other DNA
atccagcccccacatggtgcagggggtggggatccacgcacgtaaaatgataaaatgtatttttaaaatagcactaataaggtatatagaataaacaaggaactaaaagtatatatatatttcagtagaggtcctgagttgtacacccacagatcttgtgaagatttcgagtacccggaaagaatgtttccactgatcaggggaaagtaacattagccttaaaaatgccatttgtcctgggctctggagctcgcggagcgctggagcttcagat

SEQ ID NO: 35844 - DNA, 253 bp, Mus musculus
  source 1..253: mol_type = other DNA
aaaatgtatttttaaaatagcactaataaggtatatagaataaacaaggaactaaaagtatatatatatttcagtagaggtcctgagttgtacacccacagatcttgtgaagatttcgagtacccggaaagaatgtttccactgatcaggggaaagtaacattagccttaaaaatgccatttgtcctgggctctggagctcgcggagcgctggagcttcagattgggacgcaggcgggacccgtggggacgcg

SEQ ID NO: 35845 - DNA, 370 bp, Mus musculus
  source 1..370: mol_type = other DNA
gagatcaaattcctggaaatattagtaattcgtcacaactcaccaaaatgtccgtgggtttattagtgcttattaaaggcctttttaaaggtcccattgaacccctaacatttgggaatccgagaccaggctcgtttatacagtgaattccaaggccggatccatctgggggtctgaaaaccaagaggatccaacccagggtactgtgttcctaagagtgcccaggggacacagaagacatgtctatagaatgaccttctcttctctcttggagaagagagccctgggtgatgtccttggggcagactgcaaggggacacagggacgcatgcagctccgcccccttcaaccgcaagtgctcttgggactg

SEQ ID NO: 35846 - DNA, 382 bp, Mus musculus
  source 1..382: mol_type = other DNA
ggcctggtcagtccggtagcagttgaacacgtgctgagcgccggagcccgtggtgaccagcttgtgggcgctggactcacaccagggaagagtacaagaaggtatttgctactttcccaaagacaaaataaagttttctcgcagcaccaataataatagtgatagtaacgataataacagtttcatcatggttgcttgggaaacactaggctaagcctttacagccccatatagcccattatctaatgtcaaggccgtgcctggtgaagacttgagcagtggaggctgtttcccctgggtacctcgctgagtccacagtttcaggacaaggcagggcaaacgctgccggtgcctgaaagggttattctgacttagactagca

SEQ ID NO: 35847 - DNA, 227 bp, Mus musculus
  source 1..227: mol_type = other DNA
gatccaatcccagtgactcacatggtaggagagaactgactcctacacatgcatagccctgcacatgcacagcaataataatgaatgtaataataataagttaattataaatataaaattattaaggttgcccttttatcttgttttacaataccaagcatggaatccagaatctgcagcttgccttccctttcccctccttgtggcaacagggaggctgctggtct

SEQ ID NO: 35848 - DNA, 317 bp, Mus musculus
  source 1..317: mol_type = other DNA
tttatgtctgaagtcagctatagtgtacttatttataataataaataaatctttggggtctgtgcaactacagtgtactcacatacataaaataaataaatttttgaaagaaagagcactggctgcctaaagctaggatataagactatcttcccagttgcctagctggccagggaagggggtcaacccttgagcaagggcagaggacataaggccactgtcctggaagcccctgcccacaatggctgcactgtgtggccactgaactgagttggacctggtaaattgttatttacagtttctgggcatttaaaaga

SEQ ID NO: 35849 - DNA, 456 bp, Mus musculus
  source 1..456: mol_type = other DNA
ggatttaccctccacacagtaacaaatgattaggtaatattaagggaaaggtcactttcccttggctacacgagccaggaccagcggcgagggcgctcagtgcgcaggcgcttccacgcgggagtgaggccctctggccgcgcatcaacgtttccacaccgccgggggctccagaacctcccggtggggggttggccggctggagggccgagccgcgaatgggccggacgtgtggcgccgcagccacgccgagtgcgtgtgagactcggagtacgtgcggcgggctcaagccctcatgcccgccgcgcagcccagccccgccccgccccgcatccgggctccgtagaccctcggccgggccccaggttcccagccggaggctcgccaggcattccagctatgccccaagtgccctcgcccctagtctgggcaggccgagcggccgcctcggtcacg

SEQ ID NO: 35850 - DNA, 382 bp, Mus musculus
  source 1..382: mol_type = other DNA
tcagtattttatatatgagctatggaatgaaaatattaaaacaagctagaagacagatagctgttatatataaagtatagacagcagggcttccctccgtgtctgatagaggagcccgcaatggtagattgagggtgtgccagaggcagtctcactggcggttgacatttggattaaagtcttaaggactccaatgcagaaacaccttgctgaatggcatgtgctctctctccttatagtaagaaaaaatatctggcttgccatgtttcttcaacatagctgtttaaatggagccagcaatgtgctagcaaaggccagttgacctagtcaaatccaccaagcacttaaactttagaatttgttgatgaccaatgtgaaagtg

SEQ ID NO: 35851 - DNA, 356 bp, Mus musculus
  source 1..356: mol_type = other DNA
aagtaaagactgcatgcctgcacacatgtatgccctgtgcgggacatctgaaatccgtcctctgggttccagggactgaattcagatgaggtcggaaaggtttccccctagcctggcatagcccggccacctgatggatctgtggccaggggtacgtgtttatctataaacatatgcacggctatttacttagaattgaagacacaaaaatgtatgtatttcctttaaaatcagtcacgggccccggcaagtgcttttataatacatgaccatggaaaaacaaacataaactattatatgtctgtctttctttttggaactggtcccacacctagcggcgggatgcagccgtgacg

SEQ ID NO: 35852 - DNA, 460 bp, Mus musculus
  source 1..460: mol_type = other DNA
aataaataatctcctaaaaactggagattgatgttaggtttttttcaacaggcacaacaaagcttttatctctttaatattaaatagagctttggaaatttagagatgcagtgcactgagtcctgcaacatttctcacagctgacacagaattaatttgtactacaggttccttccttttaaatttacagggttgaagttaattttgtctttttccttaaaaaggtcaatgtgaaatttgtattggaagcaagaatagttgttttgttttcttttttaaaaaagaatggcagctcgtatataaactcaataaaagcaaatgcactaaatgaataaagggttcatgtgtttattttagattgtgtgtatacacaccttatgcagtcagtgccttcaggtccactggaactggagttccaagctgctttgcagtgctcagaactaggaacctagcgcaagcg

SEQ ID NO: 35853 - DNA, 266 bp, Mus musculus
  source 1..266: mol_type = other DNA
aaagatcaacctttgatcttgattctgatcgtgtctaatcacgatgtgtctgtagatgctgcagccatggaaaatgcccatgtgaggggtattcgggaaaacccacagaaatgcctcaatcattcgttaaaaatggattctggtgctttctgagcagcatggcccagctccagcaggaggacctgagcttcacacgaagcatggccgtctgtggggcgtggccgtctgtggggcgtggccgtctgtggggcgtggccgccaccaat

SEQ ID NO: 35854 - DNA, 609 bp, Mus musculus
  source 1..609: mol_type = other DNA
actcctttaatatataagtcatttaaggcaaagaacggatgaattaaaacaaatatttttttttaaaggggaatccgagtctcaccgagaacccgcgacagcttctcgcagaagctttccgggccggaccgggggccgcagcagttccaccgcatccctgggccgcagctgcaccgggaagaccgtggagccgccgctccggagccccaggctgtggagacgtgtcgtgtgcgcgccggtgcatggccccggcgagaagccgagggcgcccgcggcccgccgctcctcacgcaccccggcccatcccgggaagcggagtgccggaggctccggctccagcccaccgcccgtccgcccggcccgccaggccccttaccccaagggagcgggaccccgcggcgccctcccgcgcatgtccgtcccggctggctcagcgccgcgggcttaggggcccgagcatcgcgcaggcgcctcgccgctctctcgcaggctatgctcgcgctcgctcgctcgcagcctcgcactcggccgccgacgccggcgcagccgacgcccgtatcgacaacgtgaccaccccgcctccttcacgcagccaatccgggcgggcgg

SEQ ID NO: 35855 - DNA, 335 bp, Mus musculus
  source 1..335: mol_type = other DNA
gatcagcctagccttgctggaggccaagccaagtacagaggagcctggagtgaggcctccctgatcctgcccatcaattagtgaggttctctataagtcccgcagtgcctcacctcgatatacatacatacatacatacatacatacatacatacatacatacatacatacatacacttggatccaagtgcatctcagcgtcacttccctccccggggatggaaacaccttagtcccctcaggagacgaggctgctagcgccgcccggcgggccccacgccgcccgcccggattggctgcgtgaaggaggcggggtggtcacgttgtcgatacgg

SEQ ID NO: 35856 - DNA, 326 bp, Mus musculus
  source 1..326: mol_type = other DNA
agtttacaggttgaagctgaaataaaatgagataattaaataatttatcttatcgtagatgatagcattgctcccctcaggaggaaccgaacctgggtcctttgcaagtcctgtgacccaggggacagggtgaccaggccaatgtaagacggcttccgggttcaggctgtagcccagccaggcctcaaactgcgcaggcgcccgcagggtgggcagcgctgcgcagccgcagtagcctctattcgctcctccccccacccccaccccggggcctgggctcagccggacacgcagcctcagtgcgggtggcgcgcatgcgtgctggg

SEQ ID NO: 35857 - DNA, 228 bp, Mus musculus
  source 1..228: mol_type = other DNA
tcctgtcctgtcagggagagcacctccctcagatattagacctgccaggggactgtgagctcttaattttaaaaggctcttgagaaccaaaagagcccattgacgtctttgagagctaaagactcatccctgggagagcctgtcagtaaatactgagatcattaataattagttacttctgcttctgggccaggctgtgacactgcagcagcaaaacccctgaaattc

SEQ ID NO: 35858 - DNA, 155 bp, Mus musculus
  source 1..155: mol_type = other DNA
agttctggacagcctaatagactctccacagtgcagctcagtactgcagtccttaagtcttcagtattttaaggacacatgaaaagttcccccttcgcagctggggatttcccaggaggccctgctcagttgagtcacaggtcctgtgtttgacc

SEQ ID NO: 35859 - DNA, 427 bp, Mus musculus
  source 1..427: mol_type = other DNA
taagtttaacactgagagcctgtaggttaagtatgtatcccaggctacccttcatactcttgaaaacttgtgtgtgcacacatacaaacgtaccacatgtacactcatgtgcgtgcatgcacgtgcacgcacacacacacacacacacacgagtaggctgctaactctagtgaagccggctggccaggccgcctggggatgtctatcagtcctcctttccagccctaaggaaaccttacaggaccgagtgcttgtgatcttacatgcagccaagcacatgtgctggatctgagctttgagttaaaatttataaacttcatgatgctcagtaaatttattgtctatgaattgttactctgaaaaattacatcaatgcaaagtgattccctagccaataaattcattctaatttttttggaggggacgt

SEQ ID NO: 35860 - DNA, 573 bp, Mus musculus
  source 1..573: mol_type = other DNA
tccaacaaatacttagtgtatttttttaaagatcttattataactggaattacaggcactgccctgtacctttcgtttctgaagggtagtcctggctgtttcctcgaaaacagagcgacttgtatttctgaaaatacggttggattctacctgggttcactcacctatattggcgggtgactgcattcctgggataccggggagccccagaggcctgcggactcacaagcgccaccgggtccacttacctgttggctgcgcggaccccgccctcccgtgactgacagccccaaggccacgcctccgggaagcccggcagtagacttgcgcggcccggccctgttgtcttccaggccactccacttggccaggattggccgagagccgccctcgcccgacccgcgcgttatgtaaggtactcgggggcctttgcacccgcccacccgcccgcggttatgtaacccccgccgtgcacgacctgcaccccgccctctgaccaatgggagctcgtgttgccggtaacagcgaccaatcgcgcggcgaaggggcgggaccggatccctggcgcgcagg

SEQ ID NO: 35861 - DNA, 410 bp, Mus musculus
  source 1..410: mol_type = other DNA
ctttaattgcaacacacaccttaaaataccttagtgtatttcattgagtgaatccaccaacggagtttattgaatgaagaaccttacagttctctaagccaatcctttagggatttcaaatatttgtcatgtgagaactgagaggagacttctccctcagaaaagaactttgtctccgctgtttctaacatgagagacgggcagcagagacactgcagggagctgctgtgattccttgagcccagcccaaaggcgcaggcgccgcgctctagccccgccactcgtcagcgccggcgctacttcagcgcagctctctccgaggtgacagcccgcgctgcgcccggcggcgcgcccctggcgactaagagcgcgtcgcgggttccggtccggccaccgctcgtgacgtcacc

SEQ ID NO: 35862 - DNA, 411 bp, Mus musculus
  source 1..411: mol_type = other DNA
ccctccggagttactcccagaggtggcaggcatctgcaccctggcagggctgccgaggagctccgtgctggtcttggcagcatccctggctgaggctggagccagcatgagctggggtgaccaggggctcctgttcaggaaatccggtttcagttttgcagaacctggctttcccagagcctccctagggtagaacccaggatgctggtcttcaaagcagagtctcaggatacctgcgggtccttggaagcccagaaagtgctgagaggagagtagcctgcccactcagaactcccgggtgggtcgtaggcctgcttcccagcagctcagcaggactgagatcccacctgactgagaatctgggagcttccgggcgcttctagatctctagggccaggggcataatctgcc

SEQ ID NO: 35863 - DNA, 446 bp, Mus musculus
  source 1..446: mol_type = other DNA
gcatgctcagccaaggctgccaaactcatctgtggaagacctagctcccagagtaggctgttttaaccacaggtgagacaggcactctcgttaactgatttatatgtggatgtacatgtatgtggatgtacatgtatgtggaaatgcatgtgtgtgtgaacatgtgcatatacacatttttaaaaagtcttttcttatttttaagagacaggtcactaagcagaccaggctggctggccagtgagcctgaccccctttgggttctgagaatttccccagccctggacacagggcaggaatggtaagaattaatcccttgtggccataatctgcctcagggtacctccaaacatcagctgggttaatgactgggctccatgcctgtgaggcagtaattaacagtcgagggctggtcctatcgccattccgaggcgtcgttaacacgc

SEQ ID NO: 35864 - DNA, 293 bp, Mus musculus
  source 1..293: mol_type = other DNA
cccgggacctggggctcagccatcccgggttcgccgccacccagaacctgggccataagggtcttatgagtgtggtgcggccctacacacacacatgcttgtgtacacacccacacatgctggtacacatggtatacatatacacctcccagcttccggcctcggccgcgcgggggcgcagtgcgcaggcgcgtcccaagggctgctgtgcggctccgggccgccaggggccgctgtgacgtgggcgggaggcgcgcgggaagcgctacgcagcgccggaccctcttaaccac

SEQ ID NO: 35865 - DNA, 604 bp, Mus musculus
  source 1..604: mol_type = other DNA
ggattggctaggctagccgaggtcgagcgttccgagccctagatccgcggctgcagcctgggacaggcacctatgactcatcggctccgccggtcacatgggcgggtggccgcggggacgctgcgccggccgagggggcggggctggggcgtggtctgccgggaggtgcgcccctcccccgtgtcgggcagcgacgccccgactctcggctaaacggttcgggaacgctgtgaaccggcacgcctcggtgccttacgtatccctccggcagggccgccccccgccagcgccgcaggctgcgggatcccggagatcccagcgtgtcctccgaagacaccgggacccccacgcgccagcagcggcttccccgggaacgtccttcagctcccggagcacgcgccaatgagcgagcgccttcctcatgacggtcacgctggggggcggggcttcccacagccgttcccgagttccgggaaccccttccacagggtggataggacgctcctcccggagagtagtgagacccctggtgtccgattggtcgcgggagccgtgactggcagacgcaccaaccagtgggcgctgtgcgtgggccgcggggcgg

SEQ ID NO: 35866 - DNA, 376 bp, Mus musculus
  source 1..376: mol_type = other DNA
agctgcaatcagcttgtgggtcagccccaagtagacccttcccgtgggctttggccaggccagacaaacatcgtttacatgttctgtgtaattataaagtttatgtgtataaagcaagctgtttctgtgaaactgtatattttgtaaataaagatattgggaccatgaccccgtgtgccggagctttcaaagccacagccattagggcaccagctgggtactcaaggccaggcaggctctgtacctgtctgtaacggacaaaccccaaagtgacttcaatattcctcagctctaacttctttagggagcagagcaagtcctgctctggcgccccgagcctgcggaccccgcccctcaggctccgccccccgaggcc

SEQ ID NO: 35867 - DNA, 610 bp, Mus musculus
  source 1..610: mol_type = other DNA
gcaaatatactttttcgaatgtgtcagaatgttttctcattcgaatttaaaatcttgtagtttttaaagttatcatgtttttcctgctaaaaaattactaacgttaaaattacagccttacggtaatggtttctccgcaccggccgcctcggatcccaggaaaagcgaaactcgggaggcgcggcgttttccgtcgctgcagccctgagcacagcggcggcgctgcgctgtcccggagttcggtcccatcttccgctgtgcgcaccgggcgcccacaagtgaccccgccaggcccaacgccgcggtcgccgggaacctccagctaaacgcccgcggccgcgaaaacaagtgcgctccgccctcgcggacgtcagtggcccgcccgaggccccacgggagaaagcggagcccgggccgccgccctccgagacccaggccgctgctcgaccccgccccgcggagcccgcgggctgccgcccctcccccaccagctgggcggtgggagcccccgcacctcccccgctctgcctccgcattcgtgcgctgccgcagagcctcttgggagttggagttctgagatagtctctagacggcagcgcgccgagcgggc

SEQ ID NO: 35868 - DNA, 429 bp, Mus musculus
  source 1..429: mol_type = other DNA
cccaggaatgacggactgactccaacagcagacgccgctgatggagcttctaagttctccaagagtacgtacatatatacatacattacacgcatatactctgcagcttttcaaggtgctgccctgcccgaccttgagctggagaacactgtggagcacattcctggagtctggccccaacgacgaaaacccatcgaatttgttcgtgttttgtgggttaagtagctacccctggattctgaagttcccaggagcgcaaggaatttggattacggattcgggcgccaagctcgcctctccaccgctgggctggtgagtggttagccctcacttgtcacccgccgttctcagcggagcgtcagctgggcggctgtgactcagaccgcccgccccaacagaccccgcccacggaggctgcggctggtctgc

SEQ ID NO: 35869 - DNA, 370 bp, Mus musculus
  source 1..370: mol_type = other DNA
cacgtggcttgcaatgtggaccccacggcccaccagggagtaccagcgctcctacctgggtaaggaactgccggagggcagctacctacccgcggtcaatgtgctggcagacacgaggcgctgcggcactacctgatccgctggggctgttgaagcttgaggtgtctgggagagctcagccacggaccgcacaccaactagctggagtaggagcctagcgcccagcttggcgttactaggcgactcgggacccagcgcgtgaggctccgcctttgaggcgggacccgaggacattgcgccacggaggcgtccggttcttgcctgcgcgcctgtatgtcacatccggcgcggcggcggtggcgtctccgcg

SEQ ID NO: 35870 - DNA, 502 bp, Mus musculus
  source 1..502: mol_type = other DNA
ggctgagcagcaggtgagctgcccagaaaagcatgctggccagacgtccctctgtccagcatggctgagcacacccctgacagggaatggcagggctgtggtctctctcaggaactgggcagggccaggacgtggatggaaaccaggtggattcctgagaccccatcaggctcacctgtctcaggaagggagccctgcttttgaactaactccaggactgatagtactgttagctgatgtcagcaagagttacagattagtaaacctgaaaccaggctttgcggtgaccccattaaccttttgtacacagcatacacaaatgcacctgatttgtttaaaatgccaatcctggagggttttggttttttgttttatctgcaggaaggaaaaaaaaaatcccagatccagggtctccaacccggcagcgctgcagacgccggccgggagggggcgccagccgccccgctgctcttccgctgggggcggggtgacgcggtctcgc

SEQ ID NO: 35871 - DNA, 514 bp, Mus musculus
  source 1..514: mol_type = other DNA
cgggctttgcgtacccgcagccaggaagagcggctcggagcccgccggtgtaacacctccgactccgccatgcttgtcccggaacccctccggcgggacgatctcgcgagaccgcgtcaccccgcccccagcggaagagcagcggggcggctggcgccccctcccggccggcgtctgcagcgctgccgggttggagaccctggatctgggattttttttttccttcctgcagataaaacaaaaaaccaaaaccctccaggattggcattttaaacaaatcaggtgcatttgtgtatgctgtgtacaaaaggttaatggggtcaccgcaaagcctggtttcaggtttactaatctgtaactcttgctgacatcagctaacagtactatcagtcctggagttagttcaaaagcagggctcccttcctgagacaggtgagcctgatggggtctcaggaatccacctggtttccatccacgtcctggccctgcccagttcctgagagagaccacagcc

SEQ ID NO: 35872 - DNA, 545 bp, Mus musculus
  source 1..545: mol_type = other DNA
ccatctttatgtacctcttagaagagggttggccagggttacacagtgagtccctgactgcagcttgcaactgtaactccagttccagccaggggatctaaaagccgtctctctattgataaccccatttccataaacgattaggggaaaattctctggtgttcctgaggaaacccagtggaacctcccggactgggagggtctcaaccctggatccgcgggtggcaacggaggggtgcgtgtgccaccgacccgcgtgtctgggtgcgggaggcgcctactccttggaggcacttccggccggggcagcagccgcggcggcccagccacagtgcagtgcaggagaccgcctggaaccggggcgcagccggcgcgcgtggccatccccggagggggacggggagcggggctgggtgggacccacctgggacacgccccgtctcccgcggaggcgccgtcgggggccgccggctccccgccccccgcggccgccccgcgctccgccccccgcccacctgccccgccccgcctcgcgcgccaggcgg

SEQ ID NO: 35873 - DNA, 453 bp, Mus musculus
  source 1..453: mol_type = other DNA
ctggattgtaggtcactctatagagctatattgtggtcaagagaagtttaaggtctgtgagactgtcacaggccagtctgggtaaggtggccaccccacttcctgggggtgagtggccccacccaatccggacagggcggcttgtcgggcagtgctgagcgccctctggcggcagggagccagtgcaaaggttcattggcccagctcccaggggacagctgggcactgcccaggtcctcggcctcaacagcaggatgctggagacctcctaggatccgtctggagcccagcccctggggtggagaagcatggggttaaggcccaaaagctgggcttccaagtctactctggtctgagtagcccaggctgggagtggctggggttccgcggggtgtcaccagcccagcccccttcacccctccctggcaggaagcggggctcagtgctttgtcc

SEQ ID NO: 35874 - DNA, 245 bp, Mus musculus
  source 1..245: mol_type = other DNA
acccaaatgatcgggagggtggccttctccagatctccttgttcctatcgataagatgaagaagtgtgccacaccaacgtgagtgtgggaacccagggccctgttgcttctcacatgcagctcacctggctggctgtgcctcagctggggagggtagtaacaccacctggccttggcttccttcagggccgggacaccacccctacacggggtgggccagggtggagccaacccacacttgtgta

SEQ ID NO: 35875 - DNA, 388 bp, Mus musculus
  source 1..388: mol_type = other DNA
tttgcactttgccagactgggtggagttccaggccctggctccgaggcgcggttctataaagacttgtcttccctgttcctctgggctggagggggcggtgggacagaatcttagaatgtacagggtattccttagaattcaaggctgcacccatacctgggagatgtaggtgtcctacctaggttgccccacttgagacccagggaaaagcccctggctctggactctaagcagtgggctggagctagacccagcggtgggcttagtcaaagcctgtgcctgcttccagtatgtagtgtgcaccacaccagcggcgaggggccccgtcacgtagagggacatagcccctcagcaccctagccatcccccgaggggagttgttctgga

SEQ ID NO: 35876 - DNA, 448 bp, Mus musculus
  source 1..448: mol_type = other DNA
gctgcttcaacccagcaagatggcctctcttagaggaccacctttgtggggccccacagtggcctgagccagggtcacaagggcaggcgagctccacccctcttctccaattctctcctctctgttcctagaagtgagagtcctgagacccccggctggcgtgctcgcggctgagccagcaggtgagaggacctgataccccgaacgcccaccctcggcatcacagcatccggtgcctggcttccaggcaaggcccagccctggcccaaatgggggggggggcagcaaagccctccccgggtactccaggtatttgcatagtccagctgggtggcacaccagggtcctgagtcttatggccttggaggctccagctggctcagtccaagagggagagggccctagggagactccgcccttgtggggctgagccagaaaacctgggaca

SEQ ID NO: 35877 - DNA, 522 bp, Mus musculus
  source 1..522: mol_type = other DNA
ttctataaagacttgtcttccctgttcctctgggctggagggggcggtgggacagaatcttagaatgtacagggtattccttagaattcaaggctgcacccatacctgggagatgtaggtgtcctacctaggttgccccacttgagacccagggaaaagcccctggctctggactctaagcagtgggctggagctagacccagcggtgggcttagtcaaagcctgtgcctgcttccagtatgtagtgtgcaccacaccagcggcgaggggccccgtcacgtagagggacatagcccctcagcaccctagccatcccccgaggggagttgttctggactggtggggaagccccgggttacgcgaccccgggaggccaggaaactgtccagaacctgacctgtagccctggaacaaagcctccggggagggtctgggggagcctctcaactccgacctccctgcgggctgggtagtcttcctcgggcgcgcccttccgctgagaggaagcacaagctcccgggg

SEQ ID NO: 35878 - DNA, 353 bp, Mus musculus
  source 1..353: mol_type = other DNA
agattttttttcttctggaggaaagaaaagtatcccgcgttcgaagcctggcatagcatatggggcttgcctcactccacaaagggccctttgtgtgtctcaggggtgtacacctctacggctcctggcgtgtcgtgtttcctgtcacgtgaaccttgaccagtggggaaggcctagcggggagcacccacccggccacacttgaaacttgaggcctgggcccgagtcgcccctggctggtggcagagtcgtggggctccctgggtgatgtcaggccgactgagctcataggcgggcagcgtgcgggccgggctgtaacctgagaggaaggatcaggtaacgcaggtgtcggg

SEQ ID NO: 35879 - DNA, 363 bp, Mus musculus
  source 1..363: mol_type = other DNA
cattgtgcactcctgctgtctgcgctaggagcagaggctgaggcggcctccccccaacccccccccggtttctcagtgatacgcccctcatccaggaggagtcctccgaggccttcggacttttggctaaagctgaggagcagaccttgccaggagctgaacgatcagtttgcacaggtgagccaggtcacagaagattttttttcttctggaggaaagaaaagtatcccgcgttcgaagcctggcatagcatatggggcttgcctcactccacaaagggccctttgtgtgtctcaggggtgtacacctctacggctcctggcgtgtcgtgtttcctgtcacgtgaaccttgaccagtgggga

SEQ ID NO: 35880 - DNA, 422 bp, Mus musculus
  source 1..422: mol_type = other DNA
ctgggatcaactctagaacttctgggcagtggcgtctagttcttgatgtgtgacaaaatattttctttctttcttttttaaaataatttatttcatgtatgtgagtacattgttgctgtcttcagacacacaggaagagggcatcggatcccatggctgtgagccagagcagtcagtgctcttcatcgctgacacttgctggcttgtgtccccagcaagtgcgcaccaacccttgctggccgccggggataggggaagtgggcactcttcggggtccccgccccagagcgctgcagagctggagttgagtccccgggatcgcagagccggctggcaggctctctgcatcccgggtccgcgacggctgcacggcgaggttgctcctggagcctgggaccacccgcatgacgccccggggagcc

SEQ ID NO: 35881 - DNA, 448 bp, Mus musculus
  source 1..448: mol_type = other DNA
cccagactggagatgtaggtagttttgcgtgcgcaatccgatctgaaagcttttaagtaaactcctctttgagctcttaaaagataattaatgactgagaccacaggcatgctagacccgactgtgggggggcagggagcttgcaaagtaactccttgtagggctgagcgctcctgtccaggctgccctgggccccttccaccgtgggagcccttccaggaggggtcctcccagtaccctggacagagccctcggtctcgccttcggagcccaagactgtcccaaagttgccctgtcagccgacccagggaggggagcccgcagcagatgggcgggggacgcctgccagtttgcagcagcaacggccacgcgttgtggaggcgtgtctgggcccgctggggcccagaggagcagccggggcacacgcccaggaccgcctccactcgtc

SEQ ID NO: 35882 - DNA, 600 bp, Mus musculus
  source 1..600: mol_type = other DNA
cgtgtgcccacttgacagtagatatgggtgactggtttctaggcaaagcagaaaacagaagcattaggtgggctcgctgtctgcagccatcggggtaaaagccctgggcgtctgcacactggcaccgcgtgctgtaggcccgggtgagaccaaggtcgggcgcaggggtcggcgcgcggctcgcgggcaccgagcccgtcccggtcgggcctcccccggtgacctcatcgggtggccggccccggccggtagcgaatcgcctcgcgggcgcgcaggaacgccccgtagactcttcggcggccaccgccgccgcagccacgcacgcacgcgccccggggacgttccacgactcggcctccagcctgcgtggtgtccgcggcgggccgctcagcctgctccgcgccggcgcgtgcagtgtgcgcgcgcgcgcgcgccacccaactgcccagccgcccccgccgccgccgagagctcgccgcttcagcgagcgtctgccgccgtggaggcctctgggcaggggggcggggtggggcctgcgcgagggcggagaccccgaggggcggccgcctctgattcgccgcctccgcgcaggccccgcct

SEQ ID NO: 35883 - DNA, 361 bp, Mus musculus
  source 1..361: mol_type = other DNA
cggaggagggtcttaaagcccacgccacaactggattgcgcaggctatcctgaaattctggctctgcttcctaagttccctagcaaatgggaggacaagtggccacggagggacacgggactttccctgtccaccagagagtggaaaacaccagctctggtgcttccctgtcagaatgtgagtcagggcagaggggagcctcccaccccagtgcatctgcctcacttggcagaccagccagtctgaggtgctcaacttcggccctgcagaggggcgggcctttgtcctcctcggtgctcagcgcttggctcctccctgggaaaaagcgggcccagctagattcccttgaggaggccccttc

SEQ ID NO: 35884 - DNA, 441 bp, Mus musculus
  source 1..441: mol_type = other DNA
cattccctcctgggaccgtaagggggaccaggagcggacccagccacagtccatgagtcttggcttcatgaggcaacagcagtatctcctgagtggcttggcctggccacatcaggtagagccacagccacacccagtttctgtgaagctagcctcagggctgagtcagtcagaacctgtgatgggggtggggtgtcctgggcccacacagcccctctgcacacagggaagtctggtcccatgcttccatgatgacagtatcctcaggccaggaggctgggcatgctcagggctggtagcagcacctgccagcgtagccaaggaagggatcactcatgtgatttttcttctcttaaggtaccaaaaagagctgcaggagcagccttgaggagcgtaggtagactgcagcactcaggccccagggcctggcagggcctctct

SEQ ID NO: 35885 - DNA, 384 bp, Mus musculus
  source 1..384: mol_type = other DNA
agctcagagccccgaggtcagacacaatgacttagttttactaatatataattttatgcattctatacttgtttatatgttgtgcaaaacttattttcataactttctagccctggctgtcctggaactcactttgtagaccaggctggcctggatctttatttacatttcaaatgttattctatttcatagtctaataatttcttcaaactaagtcgaacattaatctgggactacgcacagtacgcacctgggcattaggactgtgctgtgccctgcaattctttattgtttaagagtaattgcatcaaggatcatgcacaaatgaaatctgtacagctgttgtccagggctggaacaactgttttttacaaagagctgttg

SEQ ID NO: 35886 - DNA, 602 bp, Mus musculus
  source 1..602: mol_type = other DNA
ctggagaggtcttaagggctcccacaaagaacaggacattttcctccgcataggagcaaggaggggcatatggtggtgacaagcctgtgtcccacaatcctggttctaccaattcacttggttgctcagagcctcagaggggggccagtcactctgctccccgccttgcagtattccagcagtgcccaaggcacgattaggtctcgcccctcaactccaggcggtttagaggcggtggcctgagtgacccagacccgaggggccccggcgtgggcgggtcctgtcgcacgctccaaggggcgtgcgacgcggccgggaaggcggggcgcggccagggggcggcgcggaggccccggcagaggcatgcgccctggtccgccccccgcccccggtcgcccgagagcagccagctgagcggcgggagccgagtgcggccgcggcggaggcggcgcccagggagggagggcggcggggccaagcgcagcgcagcgctctgggcatcggcagcctccaccgccaggatgccccggcccgagggccgctccgccgccagccacccccgcggcccctggcggcgggcgctcagtgccggggcgcgggaa

SEQ ID NO: 35887 - DNA, 327 bp, Mus musculus
  source 1..327: mol_type = other DNA
ggttgttggaatttgttctaaaaccaggctggccttgaactcggagatttgcctgcctccgagttccggaagtaaagatgtgcaccgctgcacgtggctcagatgctttctcttaagagtctggtccttcaccagatacctggatccccagggacgggggtgggggcctgttgtgaccctgcgggcgggctgcacgctttaactgcatggcccccacaggccctgcttgcgactggctttgagcaaccacaggcagaaaattgctacattgtcctgatggccatctaggacttattggaaggggcccctttctgtcattgacatggc

SEQ ID NO: 35888 - DNA, 270 bp, Mus musculus
  source 1..270: mol_type = other DNA
gatttatgagctcatcagctcacggtgcataagtcatatcaaagacggtctctctgaactcactctttctgagctgggccagcctggccagtgtccatacaccagcttgctggctcccgggaggggggggcttcaaatccctgcccctgtgctttttgccaaatttgagaaatggaatgaagacggcacaaagtcaccgggtcccttttcccgattaaggcaaaccctgccaggtgccttgggggggagtcggtggcctacatccccgtt

SEQ ID NO: 35889 - DNA, 389 bp, Mus musculus
  source 1..389: mol_type = other DNA
gggaagggtctgctgatccaatacagatgtacaaatacacagatgtacaaatgtacagatttaaaatgataaaaatggaggaccgcaccccacttaggaagagcgaatgcgagccctgaagcgtgtctcccggtccacggaccccgctcgcacctgcgcagtgtcccggtgcgagccagcggccggttacgccgcagagcgccgaggccacttccgggtcgcccgccccttgcgacgtcacgctgtcccgagctgaggggcggggtctgggggcggggcctgcgagacaagccgctcgctccgaatccagcaccgccgcggcagtctcgcgagacctcgccagcagcgcacagctccgggcacttgcccttcccgagccggcgtcggcg

SEQ ID NO: 35890 - DNA, 382 bp, Mus musculus
  source 1..382: mol_type = other DNA
ggtgtgtctgaatacagtgtacttacatataataaataataaattaaaaaaaaggaatcctctctgtgaacaccgacttttcacaggtgtgctgctctctggggcccccagccggccatggaggaaatggagctgtgaagacccacagttccgtctcaggtccttagctagaagagttccagcttagccagggaggcattgtcccactggctgaagatccgaccggggatcctcgtctgggaccctcaccattcgatgcttccgggcgccggtggagcagcgagactatgaatcagatttggtcctggacctgcgccatcctcactcctggtcacccagaggacccagtctggcaacctgaccttctagggctggctaaaga

SEQ ID NO: 35891 - DNA, 361 bp, Mus musculus
  source 1..361: mol_type = other DNA
cagttcaggatcctgcaggatatataatgtcaatgagctgtacacctagggaagaagatcctcaatacgcacacgaggctgatgagcatcattaagatctggggaactggggagctagcaggctccagcttgaacttaaggtctcaagctggagcgtgaagaaatatggtattataactcactatacaacccaggctggtctcaaaccagtgaggcgtcctcctgactctgcctcctagccaccaggcctggctgacatcggggacaaaagtagtccctgagtcattcgcagtgggacagcccgtctgacgattgaggcctggctccttgcgtgccctgtgcgctgcgggctcttagcgcc

SEQ ID NO: 35892 - DNA, 429 bp, Mus musculus
  source 1..429: mol_type = other DNA
ggtcacgcaggacctgtctcaggtacactccctcgagagctggtgaccccacaacttctgtgctcttaaagttgctgtccagcttcacctctaacaagcaggactggctggcagtcgccaacccttctgctaggcgacaggtgtcagaccatacagagctccagggacctggatgtgtttgagctttctggataaattatgccaccagagtgacccataagtgtgggacacattttcttggtctctcacccatccgactctcaggcccaagtgccttcgcgggcagggtggcgaccattctccctgcgcctgggctatcgagctcccgcagccagctcggccgtcgtgtcccgggtcgggcgggcacctcgacagctcctggcacccgccgatggggttgccacagcaaccagacgggcatgtgtgccg

SEQ ID NO: 35893 - DNA, 385 bp, Mus musculus
  source 1..385: mol_type = other DNA
agacagaatattctgggcaattcaggctttccccaggttgcgggcagcctggttgagctaagctggacagcaggaaaccttcccacagcacgaggctccccctgtgacccagtctccctgggacaccgtcagccagacctgggttagatcccagccatgtgcacgagccagaggcaggcagatttctgagttcgaggccagcctggtctacaaagtgagtttcaggacagccagggctatacagagaaacgatagagtgtcctccttcgagaaacacaaaggatgcctctcgtacccagaggggctgggccctcccaccagagaccacgccctggtgtgccttcacatggggccctggcgcttgctgcaccaacttcctgttggg

SEQ ID NO: 35894 - DNA, 523 bp, Mus musculus
  source 1..523: mol_type = other DNA
tgagaatccggacagcagtgtgggttggaattccaagcagtggagaaggccaaccctgcgccccagtggctggacatggactgagccaggggcctcacagtgcagcgggctggcgagcgttttcgaccccggaccgcagcgcgcaccgggcaagtcaggcccggtcctgtgccccgtgcggtgcccaggaccctgaggcctcttcgaggctgcgcgttacctaggagacgggcaccggatccacgctaccgaacacgtcccgcaccgtggatccagcgatcgggctgccggtgcccagcggaacccgaggagtcgtgggtccagtgctgaccgagggggtcacccaatccaccgccacccacgcgtggagcccgggcctgagggattgcgtcaaggccgcgcggccaatgagaacccgagtccaaggattctgactctgcgcgcgcccgccaatccacgcatcggcgggagctgcatgatttgcatgccttggccattgccaatgagactgtgactggcagcc

SEQ ID NO: 35895 - DNA, 468 bp, Mus musculus
  source 1..468: mol_type = other DNA
gggaccgcggtggccgcgacagcgcagcctcgcaggtgcccgccggggtctcccggctgcactcacctgggggcctccagctccggatcccacgggctgccagtcacagtctcattggcaatggccaaggcatgcaaatcatgcagctcccgccgatgcgtggattggcgggcgcgcgcagagtcagaatccttggactcgggttctcattggccgcgcggccttgacgcaatccctcaggcccgggctccacgcgtgggtggcggtggattgggtgaccccctcggtcagcactggacccacgactcctcgggttccgctgggcaccggcagcccgatcgctggatccacggtgcgggacgtgttcggtagcgtggatccggtgcccgtctcctaggtaacgcgcagcctcgaagaggcctcagggtcctgggcaccgcacggggcacaggaccgggcctgacttgc

SEQ ID NO: 35896 - DNA, 633 bp, Mus musculus
  source 1..633: mol_type = other DNA
actcctttcagtgaaaggggaccacagaaagcctgtctttagtgccaggttcagaactccctggctctggcatgctccaaccaaaggctgaaacttcatctgcctggagagaggccaggcccaggcagtggggagactccccaggaggaccctccccagcctgtgcagctccgcaggaggcgttcaatgggcgtacttagaacagggtccgaaccaccgtggcaacaccatccggcggcgccgggcggtccaatcggagcctgcggccctttcccaaggtggagacccggacgcggccagggatggggaaggggtgggcccggttcttctctctggcgccgcccaggccactcagagcccaggtcgccagtccagctccagcgaggtgggctggcaagctaagccgaccggccgggttgggggctccgacttgagccgggcccggcgggcggagttgggacccgttcgcggaggcgggggcaagcgcttctggaggcagacgcgcagagggaggcggccgagcggcgcgggcggctctgcggagggcgcggtgggcgcgggcggcggggcccgggatccccgcgcgcctcctccgcgcggcggcgccgccgcgcgtccccacgccccgcgctc

SEQ ID NO: 35897 - DNA, 246 bp, Mus musculus
  source 1..246: mol_type = other DNA
ctcttgttatccaagaacatgttgggtttgtcgctatgacacgcacatctgcctcagctatggcaatgtgacaggaagaacagatcttgacccatgagtgaccacccagcgttgagagcgctcagctcatcatattagagatagtagctctgctagtgagacaagtcacaccctcttgagtaaagtttgtaacaacaaaactactctgagactatttattaataaatgcctaggccataagcattg

SEQ ID NO: 35898 - DNA, 564 bp, Mus musculus
  source 1..564: mol_type = other DNA
atttgaagctaattataatatttatcatcattattattgatgtgtttataaaaagataaagacagaaagagcccatgctgaggcatcccttcctcctgagggagcagccacacgatggtatagtatagaataggacagaatgctaacaatttgttattatatttgtagcaagagtctcctctctcttcccaccatagagttcacacgtggactgtgaggtgccggcagatggcagagctaggccggtctaacgcctccctcggggtgaaggggaacccgagctgtggcctgagacccgagagcacaggcctgcagcaaggcagccgcccttctcaaacatggcggcgacgggggtcccagggatgtgcccttcccaaacatggcggccaaaacgggcgggcctccgcgcgaaggagacgtccctttcccagcgtggcgggaaccttgcccagcttccggcgctccgcccgcggctcgccgtccgtcggggaggcgcgcgctgcccgctctgcacgcggagagcacgtgacctggagacgccggcccctgacgtggcgatgacat

SEQ ID NO: 35899 - DNA, 586 bp, Mus musculus
  source 1..586: mol_type = other DNA
cagatctggatctctgtaccacaggcggctggtgttccagctgccactagggcagccacagccagcagagcaacttccaaacattttgttacaaggatatgaaaagtgtttccagttttcttttcaagaaaacgtaaatgttacaatattaattttaaggactgagagtgctttagagaatcttaacgcttaaatgctcctgttcggcggggctcgaatccgattccggacacgaagggaggcctggaacaggcactggccgcgcagtccctccaaggccaggtgtcagggagcctccgccccgggtgcctgccgaagaccgaggccacgcaggcagagcgccgcggaaacgaccaggcggggccgctgcgatgtcggcctctcggaggggtctcggtccagccgcccccaccccgggcctctgaggagggcagcagaggagcagcccgggctgcctctgcccagggcccgggccgcagctgcgctcccatagcaaccaggccggcccgcgcggtacgcctgcgcgtccgcccgccggcgcctgcgtgcgcatccaggcctcgaggattaggtcctgcagcggacg

SEQ ID NO: 35900 - DNA, 518 bp, Mus musculus
  source 1..518: mol_type = other DNA
cctctgggtcagaggctgggtgcccccatgctccttcatgctcttgctaccggggcccctttggaacttccgaactgcagctcccctgcactgggtgccaccagttcaaagggatctggagagtgcccaggctctacctgggagcacggaactgagcctgagctccagtccgactctgcgaggctgggaaggacctgtgcagcaggctgggaaaagtccgaggggggtccgcccctcctcatcaggcgcctcggccccgcccccgtcaccccagggggctggagaagcctccctggcgtgcgggcggcccttgcaagaggcacaggtgagtcgcactcggtagagaccgcggcttccctcccgcacagcccaaggaggtgggcctggcagcacgccccaccattccctgtcctccggggccagagcttccctggccggagaattccggactgggaagggttagggaggcctaaccacccaaggctgtcaggcctggaactgccggctcagctcctggg

SEQ ID NO: 35901 - DNA, 290 bp, Mus musculus
  source 1..290: mol_type = other DNA
agcattaattagttgttagctctgtcttctaaggaagaccgaagataaaaggcccgggactgctccaacccccagtactggggattgagccttaggctgagcctgttttattattttttaaatatggtctcagtcgcccaggttgacctcaaacttgctataatctcagtatagccctggctgtcctggaactcactctgtagaccaggctggaggcaccactgcccggcaccacctctccagactctctggcgagcgcgtgttctccggctcccgccggaagtgtggcg

SEQ ID NO: 35902 - DNA, 265 bp, Mus musculus
  source 1..265: mol_type = other DNA
gctgcagccagaggatcacctctgggtcagaggctgggtgcccccatgctccttcatgctcttgctaccggggcccctttggaacttccgaactgcagctcccctgcactgggtgccaccagttcaaagggatctggagagtgcccaggctctacctgggagcacggaactgagcctgagctccagtccgactctgcgaggctgggaaggacctgtgcagcaggctgggaaaagtccgaggggggtccgcccctcctcatcaggc

SEQ ID NO: 35903 - DNA, 351 bp, Mus musculus
  source 1..351: mol_type = other DNA
aaaagacacacaatttttatacttataataagcttttcaagtattagcaataagccagagttataacttgctatgttccaagcctgggaatgctaagctataagccgaaggcatctttatttctatgtgcggattctctcacagccagtctttaataggaacaaataaataatcataccgagaagtatcatgtcagtctaggctgactctcgtctttgaagtgcattcgataccctggaatgagagagggggattcccggccctggggtcagaccgcctctctttagtgtttgcatctacttccagaccctttccctaaattggaggaaatgggtgatgccacacactgct

SEQ ID NO: 35904 - DNA, 324 bp, Mus musculus
  source 1..324: mol_type = other DNA
ggttaaacagaggactctgtcttcacaccaacatccttagactctaaatccttctaggaggcctagagattcagggtgttgtgtcatgggcagtggtatccactgtatgtctctgcttcctggacttagctagagccaggacaaaaaccctgggtcgccaaggctggcggcaccatctggctccaggaccgggctgactgctcctccggagccttccctgagtggcaggtccgagtgggagtgtatgatctccaagccagccacaacacatctccgggcaagctgaggcctgccctgagttaaggaataaaggggcgggccccg

SEQ ID NO: 35905 - DNA, 381 bp, Mus musculus
  source 1..381: mol_type = other DNA
gcaccactgcagagtgcgcggccagctgcagtgccactaaggggtcccacaatctgtgcgccagagtctgcgtggtagatgagggcaccggagaccgctcacttgcccagacttcttgagccagagctatgtgcacagtttgtggtgataccctgggctaggaaacccggactgcaggccgtggcccccggggtgttgaagagtccaacccagagggtctgcgctctctcagagacggaaccccgctggtgctggccgaacgacaacggtttttctcaggccggggcgagccctggaagaggcgcagccaccccgctgagggcactcctgagcccctgggttgcaggagggagtacagggcgtcgggcgccctgtgtccac

SEQ ID NO: 35906 - DNA, 257 bp, Mus musculus
  source 1..257: mol_type = other DNA
gaagagggcaggctgggtccacccatcatgcaaggaggagctgatcctcacacaactatcttcacaaagagcccctctgagtgtttgataagtcctggactaagagtcacctatgcaggtgcctagtgggacctacccagaggcactcagaggctgtccccccttctgggacagcggtggcgggcgcgcgagtatggaccgcgcagactcgggccggggggcgtgcggcgggcgggcctgacgtctgctgcgtcccg

SEQ ID NO: 35907 - DNA, 419 bp, Mus musculus
  source 1..419: mol_type = other DNA
ggggagccttgtggggcacaggacgcggggtgcgcccaccgaggctgccgtcccggacgtcacgaggtcaacctcaaagcaaacctatatttatacttatacgtggaaaataaaacctgggtttcatatatgctaagcaatcattttgccactgtaacaaaaaatttgttatctactaaagaggtgtatcgaaatacgactatatacttacacataaatacgcatttacatgtaaataaatgtatgttcacaagtacagatagtctaagtatgccccgggtaacttttgggaacattatctgaagtcagaattcagcagatccgctatagcgcaaaggcgctcagcccctttaacgccccacaatgccgcgcggccgcttgaggctcccattggctgctgctgtacttccggccgctgc

SEQ ID NO: 35908 - DNA, 307 bp, Mus musculus
  source 1..307: mol_type = other DNA
actgttagaaaagacttttgggccacaggcacccccgtgggagcaggaactcagggacatctcgcatggcttctgtcccagggagaagctgcagggcccaagttgtagtgtgcacgtgcagcacactcctgagaagcctctatctgaggtgccccgacacagtgtagtgcgccgcacacctccgcccgaagtgcaccgtggggcaacgccctacgagcccccaagtgcccccttccgcgcgagcaggaagtggctccgcgcgtggcggcagcttccggcccaggaggggccgccgggagggcggggc

SEQ ID NO: 35909 - DNA, 502 bp, Mus musculus
  source 1..502: mol_type = other DNA
gagtctggactaaacatacctggcagagtcaggatggtcagggccgtgtcagcccagtcctgacccccccaatgggaactggggatctcaggtcttcggagggcaatccttttccacatgaaccccctaaacatgggggtcgttattacctcctcattcttgaggacagccagatcctgggagatcctggccagggctgccatgaagcagccagctgcaaagaatgcagagggcggggctttctccgcaggcccgggatttctccgaaggcttcctggaggagtagacagtacccgagggcggactcccgcccgaaccacccgcagccggcgcggccaggtgaggcggtggtggtgcagcaggtgcccagggcgcgtcccgccctccggccgcgcagccgctggcggagcccacctggccccggctccgcccgaccgctcgcccgaccgcccaccgcgcaggaagtagagagggcgggaccggccggccccgggacgcgggg

SEQ ID NO: 35910 - DNA, 456 bp, Mus musculus
  source 1..456: mol_type = other DNA
ggaggagaggaacggggtccttaggctccctcagggtagctggccttagagacaggtctgggacccttacctcccatctggggagagggtaggtcagctgtccccactgttgagagctggccagaaagactgggtcgccaaggctactttgggcccggctgcgagcagaagtgcaggtgtgagcatggggccacctgtgaccatgtcagtggggcctgtacctgcccagctggctggaggggaagcttctgctaagctgagtgcaggctgggccctgagtgcaggctgggcagggggcagtgcctgcaactgctccgccggggccccctgtgatgcctgcccagctggccgctggggcccacactgtgcccagagtacgtaaggggtcccgtcctgcaggggtggctctgacaccctggcagatctacccagtcccctggttcctcctgcagcagt

SEQ ID NO: 35911 - DNA, 358 bp, Mus musculus
  source 1..358: mol_type = other DNA
cccagctcccaggaacctgggacagcctggggaaggtgagtctggactaaacatacctggcagagtcaggatggtcagggccgtgtcagcccagtcctgacccccccaatgggaactggggatctcaggtcttcggagggcaatccttttccacatgaaccccctaaacatgggggtcgttattacctcctcattcttgaggacagccagatcctgggagatcctggccagggctgccatgaagcagccagctgcaaagaatgcagagggcggggctttctccgcaggcccgggatttctccgaaggcttcctggaggagtagacagtacccgagggcggactcccgcccgaaccacc

SEQ ID NO: 35912 - DNA, 395 bp, Mus musculus
  source 1..395: mol_type = other DNA
gcactctgagaggctgaaccaagagagcctctcatggtaggtacagcttcaaggtccctgtcaccaaagccttaagtctcaatggctgtaattccaatggccatccagaggttattgataataattagacacagggacccccgggtgcacgctctctgaagacagacggcagtgaggagaagctggagagctttgcagaggcagctaggtgaaacaccgagggtcccttgggggctggtgggaaggggccgcgcgcgcgtgcacacacacacacacacgcacgcacgcacgcacgcacgcacgcacgcacgcacgcacgcgcgcgcgcgcgaacttgcttctggggttgagcggacaggcgccccatccgcccgaggccgtgtttgcgcatgcgg

SEQ ID NO: 35913 - DNA, 684 bp, Mus musculus
  source 1..684: mol_type = other DNA
cctgggggccgcggctgcagcccaacggggcgcggagaccggagcgcagcgcacgggcccaccccggaggtgcagaggtgcaggacgccccgagacgcccaggacaagatgccggccttcgcacggccgccccccgacgcggggcgcgctagcctcagccgccgcgcccggctgaggaccgacggctccagcgccactcggcgtcccgggcggtggcagagcttggagctggcgcctcggcttgagccgcggagcccgaagctgcagccaccgggtgggggcggggggggcgggaggcccgcggggggcggcgggcggcgggggcttcggaggagccgggttagggcgcgttggccctgacaccccctccgcgagcgcggggtgcgggcggggaccgaggggaaagctttttaattagtaataaaacgcaatgcgtttgcggggagatccaaggaagtcgcgcagaaacccgctgcgggccagtcttctctacggcccggcttgggcaggagccacagcgctgcgcagcgcagggccagggcggggagacggtcacctcgcctccagggctacctgaaagtgtccagggtgcgggccccgggcgggagcgccagttccgagcaaggcctcggagagccccccaatcccgcgccgaggcggcggcggcggcggcgcgacgaagag

SEQ ID NO: 35914 - DNA, 348 bp, Mus musculus
  source 1..348: mol_type = other DNA
catgtttgctacacatggcacacgtctactacacatgtgtctgaatgacaaagccttgtgatagtttttcttactaatgcctactgatgggtcagcattaaggaagaatttcctgaaaccacctttccaaggttcccttcatcatcagggaaaagggaaactgtgtccaggctcagcccccaagttgagtgccaggtctcagagcggccatagtaggtggctcctcccagacagcacacacacgtgttacaaagaggggtcacctctgcatgagctgataacagggaagtgagatgttctccttttacaaggcaaggctgaggtgagggcaaccacccttgaaaaggc

SEQ ID NO: 35915 - DNA, 578 bp, Mus musculus
  source 1..578: mol_type = other DNA
agcccccggaccgcgcggtcgaccgggggccggagccgcgggcgcgccgaccgcgccccgacgcgcacccctggcccgggtaccccggccccgcggcccgggcccggcgacgcggcgcggtcgagcgcgggagacctcttcgtcgcgccgccgccgccgccgcctcggcgcgggattggggggctctccgaggccttgctcggaactggcgctcccgcccggggcccgcaccctggacactttcaggtagccctggaggcgaggtgaccgtctccccgccctggccctgcgctgcgcagcgctgtggctcctgcccaagccgggccgtagagaagactggcccgcagcgggtttctgcgcgacttccttggatctccccgcaaacgcattgcgttttattactaattaaaaagctttcccctcggtccccgcccgcaccccgcgctcgcggagggggtgtcagggccaacgcgccctaacccggctcctccgaagcccccgccgcccgccgccccccgcgggcctcccgccccccccgcccccacccggtggctgcagcttcgggctccgcggctcaa

SEQ ID NO: 35916 - DNA, 542 bp, Mus musculus
  source 1..542: mol_type = other DNA
atgtggagggggcatcagataactgaagcgcctcccctacaagagtcactctgagggagcaatgctgggtggcaccgggagctgctggctgtggtgcttaggtgagcacctggcggccctgctgatcacccgagcggccgccaccttcttccaggatggaccagctggggacatgctgcgggacctacaggaggccttctgcgagagccccgccggcgcacggaagcagttccaggccctgctgtccgcggaggaccgcgaacgcctgcaggcacaggcgcaggaggccgcgggcctgggctttgcccgcttcctggaggctgtgcgaagccgcgagctgcgccgggatgcggaccgcgagctcttggttcccgtgacgcgcgcgctccgcgtcctgcttcgcgtggcacctgcccgacggcgaccagcgctgggcatccgcctggccgagtgcctgctgctggccggggacgtggcgggggctcgcgcgcagtgtgagcgcctcctccgtcccaggcgtccgggggagcgcgcgggggacc

SEQ ID NO: 35917 - DNA, 341 bp, Mus musculus
  source 1..341: mol_type = other DNA
ccctaggagaatatcagctcccccagggctggggctcctgtgtcttcatgtgggggcacccacaacatcaattgagtgagtgggtgccttgcaggacaagcctggcctttgcagctcatgttccagcatgttctgactccgaatgcattagaaacccacagccaagtggcctgggtcaggtgtggtcagtgagacccccaaagtgagtcttcctctctctagagaagggactctctgggctggccgggcaggcccctctcagtgaatcctacctgcttgagctgggtgtgaggtcacacggtgctggctcccggaactccttggagatgatgatataccag

SEQ ID NO: 35918 - DNA, 452 bp, Mus musculus
  source 1..452: mol_type = other DNA
tccgtcattctgactgcagatgtaaggaggtcagctgcctccttctgacggctcaattaaattcaattgcttttgttaagcactcggccatacctaaagaccaaggtctgatcccagctctgagctgcagctggagactgctcttcttcagggcccagcccttcctgatgcccttggaggccaggagaactgtttgaaggtcacccaggcctgatcagcatatttgaaaatctggagtacagaccctgagcctagccaggctccctccctggctctagaggctccctggttggagacagaactgacgagcagtgcagccttccatcacgatgggcaggttctccaacctaccagggtcaggctagcagaccctgggtcgctttgggctctggtatatcatcatctccaaggagttccgggagccagcaccgtgtgacctcacacccagctca

SEQ ID NO: 35919 - DNA, 232 bp, Mus musculus
  source 1..232: mol_type = other DNA
agagaccgtaagggagcatcagatgccctcaagcagctagtgctggctgttcagcctcagctaggtgtcagatgcttgaacatggaacacgtggattcctgagccttggctggtcctttcactactgtaagcgcattctgcgcaggcgcaccttggctaataagcttatacatgtctctttggagagagacctgaaccccctggaggtggtgcccaccaggactggggcggg

SEQ ID NO: 35920 - DNA, 249 bp, Mus musculus
  source 1..249: mol_type = other DNA
ttttatatcattctaggtttatgcaacaaaacaaaacaaaaaagcagtaaacaaagccccgtggtcattgtttctccccatgacctcagccagtctgtgggctgaggaagagaaagataaagaaggctgctcctgttcctgaaaattcaaggtaagcaccgaggtgtttgtcctatacttccagagggtatatatacaggctgggaaaacttgctagtgaggctctgtaacagacttcagtcagagaga

SEQ ID NO: 35921 - DNA, 361 bp, Mus musculus
  source 1..361: mol_type = other DNA
aaagagcagccttctgtaggcacatccaagctagggggaaacttcccttttcccactcaatcctagcagaaagtaggaatccctggtgtatggtgaacactatagccctgagcgctgacatgcaatgatccccgaggctctgagggtgactgggggctgagcactatgtttctccccagggaagcagcttgggatgagaggccttccctgccaggcagccctgaggaggtccaatcgccagtggttgatctatgatgtgctaagcatgagccgcctcaagccctgagggtcctgggccacagcttcaaacctatcttggaggtgtcgatgaagggtgggaaaaatagaggccctccccatc

SEQ ID NO: 35922 - DNA, 748 bp, Mus musculus
  source 1..748: mol_type = other DNA
aggcatgcacgcgcgcgcccgcacgagctgagggggattaagggcagccatggtttcctaaaggaggcacggtcctcctgtttcagagatgcatgtggcacctggtgacacaagagcagtccagataccctgtgggttcaggggttcctctttgtgctaggcattatccaaagcaaattcagctagcctagaaaggctccgcgcgtggcctgcggagaagtcactcctctcaactgacagaactggcaataaagcgcctaaattatctgtttgagagaatgtggcccactttaacccactgtgcctgtgggcaacaggtcccagctggggagggtgcccactccgcctctgccagccagcggtggggagcgggagagaagggggggggagagcactccttcctgccctccccacctccccgcggcctgggaaaaggcagcatattgaggcgcggggctctcagcatcaggccccgggatgctaatgagggcgagcgcgttcccacagcccggacattgtgccgcgcggcccacctgctcctcggggagcgaccattgtgcccgcgccaattcacaggcaatttagcgtgcgctaatgggccggcgcctttgtgcggccggcgccgccattggccgccgagtgtgggaacggccgcggcgcccggaccccaggcgccgggccgctgcccgcgcctatatagggctggcgtgctggggtccaggtcgcgccagtccgggacgcctggctc

SEQ ID NO: 35923 - DNA, 429 bp, Mus musculus
  source 1..429: mol_type = other DNA
agcagaacttctacagatggggaggaggccagtgcccttgtggagtgtcctacacacaggccgggcatgactgaagttgctgggtcacctcactctcaggagccctgcctctcggaatcaatgtagatagatatatgctgcgcactgcctcagtcctgtgctccaggagcctggcaagtcagtgagcaactgcctgcagacgatggccctcttggaggacacagtgttgcaaagattgctgttaaactgccgatcttccccagctgtttaaaactactccaattaacatgggagttttagaattgaaggtcccacttctttgggaaaccaggatggtgggtcaccctatattccaaaagcttcatattggtagtttggaaaataggacggtcgggtggcctggcctccagcacaggcggacgggtgcga

SEQ ID NO: 35924 - DNA, 466 bp, Mus musculus
  source 1..466: mol_type = other DNA
attgcttctcagccccgaggcaggggctgaggactctacagacacaggagtgtgccttctctcaaccctgcctgcttacagacagtgggagatggtctacagagaggggccaggactttacttgcatcatctctgggtcccggggagaggtgacctagaccctcctcttcaagcacctgggggcgaagagcaatgacctcccgctcagctctttggagcagcctcgagatgtgggaagtgctctcggccccgccccctcctggtccgaggctccggccacgcagaggcgaggggggagggcggacgcggggcgggtgctggccccgctgtcctctcggctctgcccgcggttccacgtcgcgccccgctctacgcgcagcgcagccgagggccccccggccccctcccagcgcggggcgggcagggggtgtggtgcgggcggcacgagtgacagcgcgctcctcgc

SEQ ID NO: 35925 - DNA, 645 bp, Mus musculus
  source 1..645: mol_type = other DNA
gatagtatctgttattaagaactaagaaagaaaagccactgggggttctcaatgccacgctggaagtacagcctggagggctggacattttactgccttaatgtcaccatgccaccttcctccacgacctggggccggggggtcggggcggcgcgcgagccgcggcgggcagcgctcagcagtcccctcgcgcacccctctcggagatcggcccgcccctggcaacccctcgccaggctcaaaggcgctgcccggccccgcccgcccgccgcccgccggctcgcccgtggccttgacagcccagaggaaggcggtggtgtgccgcccgaccaggtccgcgccaccagcccactcgcagctccggtgcagccgagccgcggtctccctcacggctgcggaaggaggatggcgggcagggcggccgccagagctcggctccggatccgggaagctgcacaggcactgttccgtcccgcggcgcctccagccgccaagatggccgcggggcggggcccaagctccaaccatttccgcttccggtatggacgcagaggccgttggcgggagcgcttcccacgtcctcaggctccggatccggcgccgctgcttcggatgttaggccacgccccatggcaaccggaggcc

SEQ ID NO: 35926 - DNA, 349 bp, Mus musculus
  source 1..349: mol_type = other DNA
ttgggttaacaagctctagcagcccaagctagtagaaaagatgggctgatagctcgccatcttgggttttgtcccataggaagaatccttgagagccgctgtgcctaggatttaagcccacggagtgtttctggtcttgttcccagtttgaaaagtcttccgtcacatttgctagaagttcatgcctctgcatgagccgtgactgcctccctgggattgcccaacccaggctgagctttctcgggggtcctacccactaggtaggctccgccttcgcccgcgtggtgttcgcagcctcagccccacgacggacgcacgtcgagcgtcacaggccccgcccacgaggtgc

SEQ ID NO: 35927 - DNA, 348 bp, Mus musculus
  source 1..348: mol_type = other DNA
gtctctgtgggcaccagacagaccctggtctagacacaacttccaggatgtggaacctggaagtacacacggtgtgtgtgtggacccctgggggctgcttttgctgccaccaagtgaagcccgggtttttcactaaacccagttcctcctttaagaagaagattgggaggtgccaccggcagggcaagcctgacaggaagggagcccaggctctgcacaggctcgagtggcccgcaaactggagggcagctaggcggcagcctcaacggttgggattcggcgccttagatttccagcgccacaaagagccgccggagcggatcccggtcggagggcgggccgggctgt

SEQ ID NO: 35928 - DNA, 430 bp, Mus musculus
  source 1..430: mol_type = other DNA
aggcctcttttatcacgcagccagctctgagtttcttgccagcaagtcgcagcctgggacgggaagacagtggcatgtgctcaccagcctgacagctctacctgccccccctgacgcagggtcggctggccgtgagcctgcagcctggaccacgcctgtggagcacgcgaacgcgacggagctccagcggggagacgcagcccgtaccgtttcgcggcggcagtctcggcgagtgccgacgcggctggagcgaagcctggtagggatcgccagcggcctccggttgccatggggcgtggcctaacatccgaagcagcggcgccggatccggagcctgaggacgtgggaagcgctcccgccaacggcctctgcgtccataccggaagcggaaatggttggagcttgggccccgccccgcggccatcttggc

SEQ ID NO: 35929 - DNA, 393 bp, Mus musculus
  source 1..393: mol_type = other DNA
ccttctcaagagccactcttgagtcttgcttggctagagaaccacagtgccctgcgcagagcttatcagctgccgaaaaggggaagctttgtctggggggcttccctccgttcagcgctccactgaaggggctgttgggttccacgccatgtaccagcgtggtgaagcatgaggaactgtctgcagccagcgagagttgctcagttctctggggactttgcatcaggcaggccacagtcctcgttctgggcacaggctagccctgctgcacccagaatcccagccggggctgatgggaaggaccctagccgcctaggtgagtctgggccctccctggctgggccctggccagccctcatcctgtccggcaggctcagcacagagacgctttgt

SEQ ID NO: 35930 - DNA, 315 bp, Mus musculus
  source 1..315: mol_type = other DNA
aaagagaagaccaatttattcacttattttactatagtggggattatacttcataccacaaatattagtattggatacaacccagacctatacagtattgcagtggtatttcgaggaaagggaacatgtcctgtccactgttgagcccaccctgtgagttctaacttctgcgtaaatggtcttttaagtaagcagttgacccaagtttcaactggctttagacaagttctcgagcacctgccccagtctccaggagaatcgtctgggcaacccttccgttgccatggagctgcgcgcccaaactacgcagcctca

SEQ ID NO: 35931 - DNA, 438 bp, Mus musculus
  source 1..438: mol_type = other DNA
actaattggttttccaatatcaaatggcggttataattaggaatatatatgtatatacatatttgtatgtagcaacaattaatgaaaaaaaagttgtaatttcaaaaataaaaaagacaatttatgggacctgagcacccagattcaggtatcagagagatagtcaataatagtatctaccacttttctctcttatgagggatggtggcttcaggaacgccccctgcctaggcaacccaagcctgagacccagacacgtggaggaacttgtttgcagacagcaaggacacagtgtgcgaggctctcggagctctccggagcgcagcggagcgaccaccgggtgctatgcggtgcgcagaagcctccccgcgtgcggcagggcgtgcgagcgggggtgggggcggggcggggcggggcggggcaggctcgacgttccat

SEQ ID NO: 35932 - DNA, 301 bp, Mus musculus
  source 1..301: mol_type = other DNA
tgggagacagaaattagctgtaaaacattattgtaaaaatatatatcaacaagattgaagtttaaaaaatgttaacatttctaataacttaagtacaaaaaagtaatgattgtatattaatatccattaagaaaatggatttctgagttcgaggccagcctggtggacagtcaggactatacatgttgcaaacagatgcagaaatggagagtaaactgtccgttcactctcacctgatctgtgtggtccgggctgctgagccggttcagaaggtcagggtccttgcatgtgctctgtcaca

SEQ ID NO: 35933 - DNA, 231 bp, Mus musculus
  source 1..231: mol_type = other DNA
attcaacttatattttaaaactcaactccgatgcagtttagagaatctaaaattgacttactgactaggacatctccagtgcctgaacctgattgaactgttaagaacattcatagctcttgcaaagaactgaagtttagaatgctgtcttattcctgttccaactgggctgacacattgtgaagataacattttggtcatactctcatttaacagttatttcttcataat

SEQ ID NO: 35934 - DNA, 368 bp, Mus musculus
  source 1..368: mol_type = other DNA
agtggggggcagagcagccggcccagctctttcccccgagaagcagcagccactttttaaaggtagtccagagccaggggccaaatgggccattccccggaggtatcagcactgactgttcttacagtgtacttacatgtaataaataaataaataaatggaaggcccagcatattaatggtgtagatccccacccctttttaacctgtggctggctgaggcatcagtcagatatatgacggacagacccatgtccagaatactgctctatggtgtgtgtgtgtgtgagcgcgcgtgcaagtgctctcaaacttctacctggaccttcagctgacaaggcccaggggcggggcctcataaagctgagc

SEQ ID NO: 35935 - DNA, 319 bp, Mus musculus
  source 1..319: mol_type = other DNA
cagcaatcaggactgaacaatgacagacacatttcagcgtggtggccaggcccctaggccgttcacgcacgcacgcacgcctttcggccctcccgggctggtcattcaggcaggacacaccgccctctggcttggggcacatggcacaggagccgacacagaggccaccgaggccgataggctgccaacgtccctggaagacccttgcggacgggtcctttaagcctctcgcgcacgcggaaggaggggcggggcggaaagagcggcacgcgcacgccgcccgtgcgcggtgacgcgacgtggggtttcccgaggctgc

SEQ ID NO: 35936 - DNA, 578 bp, Mus musculus
  source 1..578: mol_type = other DNA
tgtactgttgaagggaacacttcagtagtatatcacttcagtagtatatcacttcagtagtatatcacttcagtagtatatcacttcagtagtacatcacttcagtagtatatcacttcagtagtatatcacttcagtagtacatcactgagaactgattatctcactatgtgatatagatagagtttcaggttaaagacatgtacatctctacccagcttcataaataaataatatttttttcagaccagagtgaaagttggagaaattgaaattatttttcaagacatgcaccattaaattttaaattctagtttattttttgtatgtgtgcacacagagaaatcagatgggctcaagtcaggctctgggtttgacagcagatcttgaccagaggagcgctgtgctgctgacatcacgtgaactgttctaatcgtgctgacattttatttaaagatatagcatgttacttccaatttaaatttcctgaacagcagctctaatttaaagctgacggcagatgtgggtggctggaaagtgctacctcagcacagccagagcttacctgggaggctctg

SEQ ID NO: 35937 - DNA, 157 bp, Mus musculus
  source 1..157: mol_type = other DNA
ggacagcttagtactaaggcttgatggggcccagtaaaacatttcacaatgtcattgttccttcctcagaaatggagaagtaccactagataccaatcaagtgttatataatacaatagcagcatagtgaggaagttacaaaatttaagaaatcccc

SEQ ID NO: 35938 - DNA, 184 bp, Mus musculus
  source 1..184: mol_type = other DNA
cctgagagccatatgagcgagcctggcacgaagcccaccttcccacaaagctggcccgcgttgtccacatggtcctggagacctcgcgaaagaaaagggagagaatctggtggttttctctgttttttgaaccgtaggtgcggctgcgccgctctccccacgtgccctgcagcgcatgcgtgcg

SEQ ID NO: 35939 - DNA, 291 bp, Mus musculus
  source 1..291: mol_type = other DNA
gatgtgttctttttggaaggacagcacacaggtctcaggagttcccaccagagaacatcctgactgcagcaggtatggtggtgcactgtgcacactggtggatatcaatgcacgagcatgacttggcctcgaattcctagaaatccggagctctcatctctgggattcctgagagccatatgagcgagcctggcacgaagcccaccttcccacaaagctggcccgcgttgtccacatggtcctggagacctcgcgaaagaaaagggagagaatctggtggttttctctgtt

SEQ ID NO: 35940 - DNA, 217 bp, Mus musculus
  source 1..217: mol_type = other DNA
gtgtaacacctatgttataaaaatcgaggccagcctggtctagagtttattcaacctctgttgtatggccatgcatccactcagagctggttctgacaggccatgagcctgtcagctccacacttgggctgggcctgcctgaggcagtcataacccacacatgggtcgatccacccacactacacctgccggtggcctgcgaccgcctccctgtggg

SEQ ID NO: 35941 - DNA, 415 bp, Mus musculus
  source 1..415: mol_type = other DNA
accaggctgggtgccaccatgccggctcagtgagacactatccaacaaaattcttgcgtaagtttctgagttgagtttcatttttaaaaatcgttaaaatcaacaaaatcaaacacactttggttttgataaaatcaaaacatcaatactctatgtatattcagtcaagatttaatgatctgtgcgaaaatttaaaaagcacatcttctcattgctgagacagggtctctctacatagacctgatagacttaaggttgattatcagtaaacgtttgatttgcatatggaaagggttttctagtggaattactagttttcaaccggcggccctgcaggaaggcggggcctctgaggctcgaccaatgagcgccccgtcgctatgctgctggccccgcccccatggtgctgaccccg

SEQ ID NO: 35942 - DNA, 400 bp, Mus musculus
  source 1..400: mol_type = other DNA
tacccacaggataacctgacaaaaacaagcagctggaattttccttttaggttaataggtttttagtggaatcgtaaaaacctttaagaccttcaggtggtttaagtacacgtttgagaagtgtctagacactttataggggacttcctcatcataggatgttaaccgtccaagcagcttgtcacgagtgcaaatgctgctcggcctgaggtagccctgcctggcaggtttccggtttccgcagacggcgcgcatcgtctcgaaacgtcatctctcggagacaccccaggacgcgcgtcgttggcaggagccacgcaagggcggccaaaaaaagtcgagcgcacacgcggttcgtcgtcgtcgtcgtacgtcatccttccgcggaggaagtgacgacaat

SEQ ID NO: 35943 - DNA, 537 bp, Mus musculus
  source 1..537: mol_type = other DNA
caaaagaacttcaccgaagaagcgttgttctaatgaaattaaatcttctttaagaaaaccacttacttaaaaaacatagcttacattttttaagcgttttatgagtacagaaagctacggtcggtctgtcggtctgtcttttccgaacacttaagtctaatcgttagtgtttcagatctgccagggtaacttagtttacctcagtgttttccgtaaaacggtactgttctaggatcgcgggactccggggcggggtcccacttctgagcctgaggcaagggccggctccgggggccgccaggcctgccgcctccaccgccctcagctccgtgtggagcgagactgctccgcggcagcagcgtgtcgccagccgcgattcttcaggggcacccctgcgccgctacagccgccgcagccggtcctggagtctgggaaggaacagcgcccggcgcgcgccaggattgtcgtcacttcctccgcggaaggatgacgtacgacgacgacgacgaaccgcgtgtgcgctcgactttttttggc

SEQ ID NO: 35944 - DNA, 334 bp, Mus musculus
  source 1..334: mol_type = other DNA
ggagggagaaaaccccggctcctgcgcctgctcgtcccgggatcgcagctgtgcctggcataatttcggttgccatgccgcacagcctctgaggcagggattccaggtgctggcaccggaccacgagagcaccctctggttaaagcagttgccctaaggactccccactgcggtccaggaccgaggcttccctcccaaatttcattgtggtaccagagggtttctccgaccagtgggtgcggggagcaattgatgcccctcccgagccccggcgcctcgcgttctgacagaccccccgacactgtagggtgtgttctgggaatcgcaccgggtc

SEQ ID NO: 35945 - DNA, 402 bp, Mus musculus
  source 1..402: mol_type = other DNA
tgaggaacttcatagaactgtctaatacatgtaaatcaaggcagtatactgtttataaacacaaaggctgcttgttaactttatgcctgttcccacaactctgattataaaataaattaagtcggtagtgcatgctttaatttccagcaccatgagctcgggggatcaacatagtgaggcccaggctatgttgcaatatgttgctacacgttgctacatagtgaaaccttatttcaaaaagaaaaaaaaaagccaaaagaattactttggatgcgttttcgctacgcgtcctgggaactagtactgcgcaggagacctgtgcagggctggctccgcccacacgcacttccggggcagagcctcctgggagtcgtctgtcccgcccccgggctggctctgcaa

SEQ ID NO: 35946 - DNA, 222 bp, Mus musculus
  source 1..222: mol_type = other DNA
gaatccatagtgtactcatatatataaataaactttaaaataggctagtctttgagacaattactataagcgaataaaatatacttttataaagattactgggctgtcctggaaaggagttctcagaatctccaaacaaggacaggtcaccaggcaggtaggccggctgtaagtcgacctgatttgagatcgagctctcaataggtaaactggcttccaaca

SEQ ID NO: 35947 - DNA, 343 bp, Mus musculus
  source 1..343: mol_type = other DNA
actagtctcaagtagtcaaggagacgagatgtatttattttacgtatataagtgctctctctatacatatatataagtgtgatggttgtgagccaccatgtggttgctgggaatttaatccacaacttcaggaagagcagccagtgctcttaaccactgggccatctctcctgcccgggtgggctactggtcctgagcctcttcaagagccaatgacgaaggatctcagagtgaagcgggcaggacgctctcggtggccacgaggggccagcaccgggaccgtccggattgtggcaagggcctgtcccagttctcatgcccgtgggacgcggcccagaggggg

SEQ ID NO: 35948 - DNA, 367 bp, Mus musculus
  source 1..367: mol_type = other DNA
aaaggagttctcagaatctccaaacaaggacaggtcaccaggcaggtaggccggctgtaagtcgacctgatttgagatcgagctctcaataggtaaactggcttccaacatctagaagtccactgcgcaagcgccgcgcctagcgcgtcatccgaggcgacggtgggcggctcaccgctccagttgccggcgcaggtcctgtgacgtcacgcgccggcgaaggtggtccacgaccgccggcctcggctgctctcaggctgattcggcgtcggccggtcgccctcccgcgccggctgcagtacgagcccaggagagcaccgtcggcctccccacgcgttgcgttgcgttgcgtttaccgccatcttcc

SEQ ID NO: 35949 - DNA, 282 bp, Mus musculus
  source 1..282: mol_type = other DNA
caggcacctggctcagcaggctcccaaggagcgctggcttgtactgcaaagcagcagcatgctggggtcacagcaggggtgcccggccggtcgaggggcgccagggaccccttctctagtcctcccggcttgacctgaggccgggaaggattcacagcagaagagtctccataaatgcctatagcgacaggtagaaagctgggcaaatcgtgccaccgacgccactggcgtccctatgtcagcggccaatccggcggctgagaacgtcttgaccctcctagg

SEQ ID NO: 35950 - DNA, 310 bp, Mus musculus
  source 1..310: mol_type = other DNA
ccacaaaataggtgctgctaaagttctgagaagtagggccggaccctggtgccttaacagctcagggcctgaggtcagctgtcctcttcctgctttctctgtggccagcacagggcttgggactcaatgcagcgctggaggaggcgggtgctgacacttcctgtccctctctggaacccggagaaccagaaggagggacctggtccaggccaaggcccagtccagcgcggcactgggcagggagaccgagtggagaacctcgcccctggatgctggcgcggggcggcgaagtccctccccggaggcggag

SEQ ID NO: 35951 - DNA, 481 bp, Mus musculus
  source 1..481: mol_type = other DNA
tcaaaacaaaaatgtgtcatttgttaaatctgtctcagagaggctctctcctttttaagttgacttttggcctgcaccacgtggaggcagctcccataagcggccattcaggtcacctgaccactgtgctgctaagacgtcaaggagtcctaagggcagggcctcggcccgccaagcccagcccgcgcactcacgcgagtgctccaactcgcgagccgctttggccgcacgttccaggcccgtcgggtcgttgggcgatggccggtctcccgccccgcggtcaccgccgccctccgccccgggttgagcgggcggcaagggcagcggaggccctgtgccttcgcccttggggcccttgatgccgaagagccacgacattgcaagctccgcgcgccctcggcggaccgtaccggagcgtgactcgcgaggctcctcgcagtcaccacgcgccgcgggcgcgactcactgcgcaggcgcgagc

SEQ ID NO: 35952 - DNA, 239 bp, Mus musculus
  source 1..239: mol_type = other DNA
cgggctgcagctgaatgatccgtgtacggatgctgcatgcaggcatggcaggaggtagcccacctgcatgacaccttgctccctaattcctgtgaaaagactgcatccttggcactgatcgagggcccagtgcaggtcctgggcaggaaggcagagtcagtgaccctgacagatcccggcctctagggaatcctctaggcccaggcaggacctggatggtcctgaacccagagggccca

SEQ ID NO: 35953 - DNA, 424 bp, Mus musculus
  source 1..424: mol_type = other DNA
aatggaggaagtaaaaccattgagtcccatccgtcctccctgctgagagtgggaagggaggagaaaatactataattatttacaggaaagtgcagcccttctgaagggctcaatgtcctgcactgcaggacccaagtggaggctcttcattctgtaagaagcttctcatatgttggagaaagcgtcttcaggagctttgcagagagatgggaatgtctgtcagcacacgcccacacctatatgcctttgtggttgctgcgtgtcaccgcaagtccgggaccgctatggcatgcatcaccgtgcagtctgtgcagattggcctctgccacgcgcctcccaagcaggagtggccgcgagtgggtgtggcttctccgaggtgggtggggcctgactcacggtaggagggcaagttagcagccagctg

SEQ ID NO: 35954 - DNA, 331 bp, Mus musculus
  source 1..331: mol_type = other DNA
aaaacacagaaatattataaggtagtgttttcatgctttggactgtgcacaggagattgacaaccagataaggagataatttacaacacttaaaattttttggatgtatttattttactttattttgcccaaatgtatgtatgtatgtatgtatgtatgtatgtatgtgcactacaagcatccctagtgcctattcagtggactatatgctcccatacagagcaactgcaactgctgttaatgtcatgctgtgaatcactccacaacatgaagtcaccttcctaaatggcagctattgatagagcttctgtcatcaagatctgtggagctc

SEQ ID NO: 35955 - DNA, 341 bp, Mus musculus
  source 1..341: mol_type = other DNA
gtttactccaagtaaagctggtgaataagctaaattttctttttcttttttaaaaagatttattatatctaagtacattgtaggtgtcgtcagatctaactacggatggttgtgagccaccacgcttgagttgactgcgagtcccactccgactgtcagctcacagctccaggagctcagccctcgtacctgcgggaggttgggctccatccccaggattatttatttattcatttattcattcattcatttatttatgtcaactgatgcccacagaaccccgcccgcgggcgccccggaagacagtgctcgcacacatccggcagggctggcctgtctga

SEQ ID NO: 35956 - DNA, 279 bp, Mus musculus
  source 1..279: mol_type = other DNA
caaaagcttgatgagagaagaggatatcagattcaatcacagatagatggctgcaagccatgatgtcgtgagcagtcagttctctgaactgctgagccatctcttaaaggcacatctgcccttttaatcgactgtgggagaaaagttgttctttctgccatccggcgggcccagccccacccgtgggtgcttccggcgtcggtgcctgacgcgacactgacggacacggccaacggcgtcgaggggcggggcggggcggccacgatcgtctcgagcagc

SEQ ID NO: 35957 - DNA, 523 bp, Mus musculus
  source 1..523: mol_type = other DNA
atccacagaaatccctcatgcgaggcatacgtagtttctcaaagagccagcaggactttctggtccacactgaggtgcactcttgccaaggaaagcagcagccgtattctgaagaagctgcttttaagtttgggataaaaattaacgtgtgtgtgaggatatttaaatttttcctagcacccgactgctcttccgaaggtccgaatctgactccctcttctggagtgtctgaagacagctacagtgtacttatatataataaaaaataaataaatctttaaaaaaaatttttttttcctcagggcacactaaagaaattaggacttttttctgaggcctcaagaagcagagcgacaggaggagcgccacttgtcgaaaggaaaaaaatatatatatatatactgtaaagtccgcgtgcacgcagagagcactctccgggattgtggtggcggaacgttgttgctgctggacaacagcggcaggggaagcgtcccctccaaccggaagcgatcgccttcgggca

SEQ ID NO: 35958 - DNA, 333 bp, Mus musculus
  source 1..333: mol_type = other DNA
gtacacagtgctactcgaagcttcaggactccagggtttgcctgcccactcacactctgtcctcagagatgaagagcaggtttgcctcaaactcagccattcaagcgctgaattcatggtgggggccaacatgcgaccacaatgccatcatgttgtccccagggagcccactatggtcccagagaagagcagcccaggttctctggcctggctgatcacatattaccagatgcttggcacccgctgactgaccagtgactggccgagcctctgagcagcgcagtgggcggggcccagacccggcccagggctccgtgatgtcagcgggtgctg

SEQ ID NO: 35959 - DNA, 479 bp, Mus musculus
  source 1..479: mol_type = other DNA
agatccctggaattcacttccttaaatgtggaagaagagaaatgactccatgtgtgctgtggcatatgcaggtgcacattgtgcctccaaggtagggattaactttagctaggttaatgatccacagaaatccctcatgcgaggcatacgtagtttctcaaagagccagcaggactttctggtccacactgaggtgcactcttgccaaggaaagcagcagccgtattctgaagaagctgcttttaagtttgggataaaaattaacgtgtgtgtgaggatatttaaatttttcctagcacccgactgctcttccgaaggtccgaatctgactccctcttctggagtgtctgaagacagctacagtgtacttatatataataaaaaataaataaatctttaaaaaaaatttttttttcctcagggcacactaaagaaattaggacttttttctgaggcctcaagaagcagagcgacaggag

SEQ ID NO: 35960 - DNA, 406 bp, Mus musculus
  source 1..406: mol_type = other DNA
gaagcaaaggggagaactctgcttaggttgacttcagcggatgcattcaatgcctacctctgagtcaggccatcctggacacctggtccttggtctgcagacctttggcttcaattgcagcctgggtcttcagattcttatagggcgcctgaagccgccggagaatcaggaccggcctaacctaaggacactcctctgcctcaaggatcgcagcctgttgggaatctgggctcggagagacccgaccggccaggccttctgagcccgcccagtcccaccccggttgccccgcccgtgcgcaagccgtagccccgccccgccggacccgctctgcgcgtgcgcagtcccgccccgcccgcgctgcgggcgactagtgacgtcaccggccccgaagcgccctccggcg

SEQ ID NO: 35961 - DNA, 364 bp, Mus musculus
  source 1..364: mol_type = other DNA
aggctggcctcgaactcatcaaacggttgatcttagaggtctagatctatgttttctacgatgaacaaatatactgttactgatctgaaaagcaactgctggagcagcccaggtacagaagctggccctccgcccatccgactctccggacgccgcggaagatgcttaggactcgcctcgaaccacggctccacggctcgcgtgcaccgcccgcaggagagccgcaggcagaccccgcgcgcgctcacatcagacgcccggccgcggcgagtccctccgcactgcgcgcaggcgcaaccgccgagaccgcccccttcctgccctcgcgccggaaacgcaggcgatgatcagcaaccaatgggtt

SEQ ID NO: 35962 - DNA, 541 bp, Mus musculus
  source 1..541: mol_type = other DNA
tctgcctcccaccacagtggggtgccaaaaccccgggctcaccgaatggccgggtgcttcaggtgggtgttgagggccttggccacgacctccggggagaaaggcgactgccctgggcggcgctggatgtccaggtgcgccgcgttgctcagggcatgcaccccggcatcggtgcggtgaacctgaccgggtcgacagagttcagccgcttggcagcctcctgcgggaaccgtacaggcggctgccacatcgatggccggtaggggttggagctgccgactgcttcttcctccccaaaggtgtctgtggacgctgtcccgccaggggtctcggcgcccaggcgcgtgggttcggtgcaggtggtcacctcgcggacttcccgcgaggccgagtggagaaccttgaagtcagtgccgccccgcaggagcccatatttgagcgggcggggcgcttgcacgtggcccgcggtcgacccagcccagcagggacggcgcctgcgcactgactcggtccgccccgcctgaatggagaggcgggggcg

SEQ ID NO: 35963 - DNA, 417 bp, Mus musculus
  source 1..417: mol_type = other DNA
cacagtcctaggtctcagtccttcagctctgggagtgtggtgggacagccccgcctgggcctcaaagttggcgacgcccagatgcggccaggccttcctgcccagagcctgagcctcagctcgccagctcccggaaggtgatccagctccctctgatgatcaagctaaacaggatgcacctaggcgtagcagcaagccaggtacaaatctcacctgagatgggttgtggtctctactcccgcggagggccgccccggtggtgtacagagacgtggctctgctccccatgctttcccctcaagctcggagcctgcggttgagcagaaacctggagctgcaacccattggttgctgatcatcgcctgcgtttccggcgcgagggcaggaagggggcggtctcggcggttgcgcctgcgc

SEQ ID NO: 35964 - DNA, 636 bp, Mus musculus
  source 1..636: mol_type = other DNA
gcacactcacccccgcgcgcgaggtgatcagcacaggggcgtcttttgttccggtcccccgaggccggaggcggagctgcgcagctaggggaccgcgactccggctcccgctccgtccaggtggactcggagcggtcaccacgctggacaccccttgcccgccgcgccctaccccgggcccgcagcacacctgaagcgcggcgagtccttgatgcggcgagcggtgctcactgtgcggaggaccaaggcgcgtcgagcggcatccccggcccgtggaccgtctgtggcgcccgcgccgagctgcgctccgcgcccgcccgcccgcctgcccgcctcggtctgagcccggcgcgccgcggccccgccccgcctgtcaccgctggggagcgtcgccaaagtcagcctctgcctgcgccacccgctgtcacctccggggagcgtcgctaaaagcgccgctgcatcccctcgcctgtcgctgcgctcgcccacttcaggcatcacggcggtggtgaactcggctggaatgctgccgacggacacactccgcgacggcggcgggcgcccccgcctctccattcaggcggggcggaccgagtcagtgcgcaggcgccgtccctgctgggctgggtcgaccgc

SEQ ID NO: 35965 - DNA, 479 bp, Mus musculus
  source 1..479: mol_type = other DNA
taggggttggagctgccgactgcttcttcctccccaaaggtgtctgtggacgctgtcccgccaggggtctcggcgcccaggcgcgtgggttcggtgcaggtggtcacctcgcggacttcccgcgaggccgagtggagaaccttgaagtcagtgccgccccgcaggagcccatatttgagcgggcggggcgcttgcacgtggcccgcggtcgacccagcccagcagggacggcgcctgcgcactgactcggtccgccccgcctgaatggagaggcgggggcgcccgccgccgtcgcggagtgtgtccgtcggcagcattccagccgagttcaccaccgccgtgatgcctgaagtgggcgagcgcagcgacaggcgaggggatgcagcggcgcttttagcgacgctccccggaggtgacagcgggtggcgcaggcagaggctgactttggcgacgctccccagcggtgacaggcggggcgg

SEQ ID NO: 35966 - DNA, 372 bp, Mus musculus
  source 1..372: mol_type = other DNA
gtgtgtgtgtgtgatgttatctcaccaacataagaacaaacattggagagctggagaagtctggatctctatcccagatagtctggccgtaccgcctcccctccccagggccaggaaggaggcggagggagagggtgtcctcgcggctgttcccggggctgggggtctgccgcgggcttggagtgcgggatacgcctatgcccatcattggctccgtacacggggatcttcgtggctcgggagcactgcgggatttctgcagccacttactggttcctggagtgccggccagacagtacgaaggtgcgcacgcgtggtcggagcgcttccacccgcggacagcgcaccggaagcggaagcggaagcgggcct

SEQ ID NO: 35967 - DNA, 318 bp, Mus musculus
  source 1..318: mol_type = other DNA
ctccagtccctcgttggaaccacacctggctgtttgtagccacggcttttaccagttggaggctatctggctacactgagctcaaggtactcattggcttggagcagagatgtacagggaccagttcccccttgaagtgtagcctgggcctgtgctaacctcttagaagacagttgaagagtcaggatccctagctgggagggctaaagtctgggagatttgcacacaacttcctaaaggaaaggaatcacgtggattcgcttcccgactgggctggggagacgcagcccagctcctcccaacccaagtggtggaagt

SEQ ID NO: 35968 - DNA, 589 bp, Mus musculus
  source 1..589: mol_type = other DNA
gccccgagcctcagatcccccgcggcagtgagttccggagggcggcccgcggggtcgagccggctcagacctggcgcgattcgaacgctacccgaatggcgcggggccccggcttctgatgcgccgggtctgggcgcccgccaagtcttacgcagaactcggctcaggcatctttcttatgggcggaagcagcctctgcgacctggatatcagctccggggagtcgaaacccccagccacggtgcgcctcggggctcggccgcgccagtctccgagtcgcgcaggcgccttccagcgtccgagtcgagtcgcgcaggcgccttccagcgtccgagtcgcgcaggcgccttccagcgtccgagtcgcgcaggcgccttccagcctccgagccttccagtctccgagtcgcgcaggcgccttccagtctccgagtcgagtcgcgcaggcgccttccagtctccgagtcgagtcgcgcaggcgccttccagtctccgagtcgcgcaggcgccttccagcctccgagtcgcgcaggcgccttccagcctccgagtcgcgcaggcgccttccagcgtccgagtcgcgcaggcgc

SEQ ID NO: 35969 - DNA, 801 bp, Mus musculus
  source 1..801: mol_type = other DNA
gcagggcgggcagcagcagcaggtccccgtgctgcgcctgctcgagctcaagagcgcgccgctcctccgcccacggcgaagcgcgcccacacgtcctcgggtccgccacgcctctccggtgccagccacgtgctgcgcactgcggtgcggcgctcgaccgcgcggggcgcactggccaccagcaccgccaggaaggccttagcgcggggccgagcggctccggaagcggagggcgtctcgccctcggaagcgcagcgcgccaggtgccgcagaacgccaggccgcctaggcccagcgccacccggtgccgccaagcgcgccggaataccttcatgctgcgggcgagaggccgccgaggagcgcaggcgcggacgctggaaggcgcctgcgcgactcggacgctggaaggcgcctgcgcgactcggaggctggaaggcgcctgcgcgactcggaggctggaaggcgcctgcgcgactcggagactggaaggcgcctgcgcgactcgactcggagactggaaggcgcctgcgcgactcgactcggagactggaaggcgcctgcgcgactcggagactggaaggctcggaggctggaaggcgcctgcgcgactcggacgctggaaggcgcctgcgcgactcggacgctggaaggcgcctgcgcgactcgactcggacgctggaaggcgcctgcgcgactcggagactggcgcggccgagccccgaggcgcaccgtggctgggggtttcgactccccggagctgatatccaggtcgcagaggctgcttccgcccataagaaagat

SEQ ID NO: 35970 - DNA, 850 bp, Mus musculus
  source 1..850: mol_type = other DNA
cacgcgcgcaggtactcgcggctgaggcgcaggtaatgcaccaggtccggtagtagtcgcagagttgccaggctgcttctcgccagcgacctcccggcttgacgcgcccgcgcccggaaaagaagccccagtagaggcgccggcggcgtgcgggctcccgtgcgcgtaggtccaccaggatagcgtccaggcgcgcaaaggagtcgtcgtccgccttgagcacgaactcgaagtccacgcgctcatccagccaggtcagcatggccaggaccttggcgcgcagggcgggcagcagcagcaggtccccgtgctgcgcctgctcgagctcaagagcgcgccgctcctccgcccacggcgaagcgcgcccacacgtcctcgggtccgccacgcctctccggtgccagccacgtgctgcgcactgcggtgcggcgctcgaccgcgcggggcgcactggccaccagcaccgccaggaaggccttagcgcggggccgagcggctccggaagcggagggcgtctcgccctcggaagcgcagcgcgccaggtgccgcagaacgccaggccgcctaggcccagcgccacccggtgccgccaagcgcgccggaataccttcatgctgcgggcgagaggccgccgaggagcgcaggcgcggacgctggaaggcgcctgcgcgactcggacgctggaaggcgcctgcgcgactcggaggctggaaggcgcctgcgcgactcggaggctggaaggcgcctgcgcgactcggagactggaaggcgcctgcgcgactcgactcggagactggaaggcgcctgcgcgactcgactcggagactggaaggcgcctgcgcgactcgga

SEQ ID NO: 35971 - DNA, 247 bp, Mus musculus
  source 1..247: mol_type = other DNA
gggatcagacatcacagagttaaaaataaatctctttttaaaaatctaatgttagcgcttaggctcttagcattattgtttttgagacaaagtctctcttatacaatagtgcgttcttgcagagaaccaaagttcagtttccagcactcatgatggtggttcaccaaaaaagaaataaaattaaaaataaatttttttcttaatgcctgtcatgggactctgcatacgcctgtgccaaatacacagg

SEQ ID NO: 35972 - DNA, 327 bp, Mus musculus
  source 1..327: mol_type = other DNA
ccagtagagtctgttgtctccacttaagcctgccttagtcagggatctgggagcccagcccggtctctagacagctgccaggagcctggagccaccagctgtggctgggaactgagatggcctctgagccgtgcgtgcgtgcgtgcgtgcgtgcgtgcgtgtgtgtgtgtgtgtgtgcgtgcatgcacgcgcgcgctcgctctcgtggttttcgggaagaacgaattgcagcaagactttcctcctgctggactaggccaagcagagctacagggtagcagcttgtttctcatgcggttttttgactggtcaataaagttaccggtg

SEQ ID NO: 35973 - DNA, 331 bp, Mus musculus
  source 1..331: mol_type = other DNA
ccctggctgtcctggaactcactctgtagaccaggctggcctcgaactcagaaatctgcctgcctcgagtgctgggattaaaggcggcctgtcagagccatgctggccatgttcaagaaaatgaggctcacctggggagagccaagctggaactgccaaggctagacctgggcaggccacaccgaggaatacctactttatgatgatcttcttcacaggtggcagcagtggcacatgtgaatgggcatccttttcctctgtagcctagccaggtccagaaaggggatagctctgctctacacttcacagaaggtaacacctcagatgtctg

SEQ ID NO: 35974 - DNA, 348 bp, Mus musculus
  source 1..348: mol_type = other DNA
ctaactcagtgacatctgtacagatttctatactccaggatatggtcctgattgtgatccttgcaaggctctgaaagatgacaggaaatccatatgtggcctcaaagccactttgagcccgagcactgactgtaacaggatttgatatcctcatctggtgtgtctgaagatagctacagtacactcacatatataagataaatcttttaaaaatttcatatacatcacacacacacacacacacatatatatatatatatatatatatatatatatatagttcatgggagcagctgctagtaacagttgcctggagacagttgccaggtcaccactgttgtatcccag

SEQ ID NO: 35975 - DNA, 254 bp, Mus musculus
  source 1..254: mol_type = other DNA
accttcaagtctgcagatgtgcacggccagaacagtcttggccgaacagcccaggacttggggaggcttccttccccacccattcaagggctgggacatcgggctgctcgaagaccccgaaggggtatagggctgaggtgccaggtgaatgcagaggggccctgggactacacatgccctcaagtcagggcctccagggagagggctggttgaccatagagacttgagtcacccatgatgtcatcatagacatt

SEQ ID NO: 35976 - DNA, 263 bp, Mus musculus
  source 1..263: mol_type = other DNA
cctcctggactccagttaggccatcagagcagcgatgccgtcagtgcctataccaatgggttcggggacctgagcctttaagaacaaggaatcgggagccccacccagtatcagcctagatgactcttccgggggaaaatgttactcattaagctgacagcgagtgagcagatgactctcctgttttagtcccaggtcctagaagccaaccctggccttgcccagatggggaggcccataccagacatggttagatctggatg

SEQ ID NO: 35977 - DNA, 296 bp, Mus musculus
  source 1..296: mol_type = other DNA
agacctcgacggcggagccctgcatgcagcaatggagccgcctcctgatcccagcctccttatccaaggtagggctatggggaggctttagggagagttcccccaaaccaggcacctctggggtgagaggctcctcccattgccctgggggcgccccctcccaatgccctgggaattaggacagtcaacccaggcaggtgctgccaccacacctggcaggtgtacgctgcgctagtgggggcacactgagccaatgtgtcactgtccccttgctttggacaaagcagaccgtatgc

SEQ ID NO: 35978 - DNA, 308 bp, Mus musculus
  source 1..308: mol_type = other DNA
gtttcgtctggtgcatatacacaatatatgactgctgtgctcctagatggggaaaggagctgctgccgacagctgctcccgtggcctgggcctaggtgattagctgcccaggcaccatgtcccaaaggtgggggcaggaatgtgtgggcctcccgcccccttgcccaggcaagagcccaggccacactccctggaggggagacagtcattctttcctgtgacgccccagctacaacgcctgagtctgagtcctgctggtcgcccagccctatccaccactgctgacaggtatatggggtgatggatgc

SEQ ID NO: 35979 - DNA, 410 bp, Mus musculus
  source 1..410: mol_type = other DNA
aagaaacaaacatgtctggtagagtcatggggattagaaggggactcaatggtttcacccctagactactagggaaaccttgcaccactagtctgattgttactggtcttgaacccagggatccacctggagtgctgaggttaaaggagaacaccattatgccttgctttatactaagaattctatagtcgctttgtagtcctacttcaaagaaggctctagtaacacctatgacctcgtttcgtctggtgcatatacacaatatatgactgctgtgctcctagatggggaaaggagctgctgccgacagctgctcccgtggcctgggcctaggtgattagctgcccaggcaccatgtcccaaaggtgggggcaggaatgtgtgggcctcccgcccccttgcccaggcaa

SEQ ID NO: 35980 - DNA, 398 bp, Mus musculus
  source 1..398: mol_type = other DNA
agtgtacttacatataataataaataaatctttaaaaaaaaaaaaagtacagtgcctcctccttgtgttattctgtgaagaagcctaagtacccgaggcctccaaagtgagaggccgggggtcccgatttttacaaaagaatgaatttgaactttgtcttcatcttgaaatggggctagccaaatcacgaactatagccagttaaatatttcaaaggctaccaaccaggctggcctcgaactcaaaaggcgtgcgccccgacacgccttgcttagaaccaaggccggccacctaacaaggacggcagcgctgggaacgttttgccctcgccacggcctgggcgggggcgggccagagactagagacgctcgcggggcgcgcgcagggcggccggtacg

SEQ ID NO: 35981 - DNA, 177 bp, Mus musculus
  source 1..177: mol_type = other DNA
ggagaatgggcacgctccccaagtttgcggatacctgggctgggggtctttaccagcaaggccgggaaaggagccccttccctgggcctcggtgaatccagtgctttccccagtggaggtgcgtctctgcccacacagcagtccctccctgtggacgctagagtccccagagacatc

SEQ ID NO: 35982 - DNA, 275 bp, Mus musculus
  source 1..275: mol_type = other DNA
aaactgagtactaagtatataactcaattgttagagtacttacgggttctgttcccagaactgcaggccaattttaaagtgagtttgaaggggtcttaataaactgttctaggacagaaatgcttcaaactattgttctaaactaataaccaatagcagttgtctttgggcaattctgattggtagaatacaaacgacaaatacattttctattatttgtgaaggacctgaagggcgttaggaaaccgaaacagaaaatagctctggtttctgga

SEQ ID NO: 35983 - DNA, 426 bp, Mus musculus
  source 1..426: mol_type = other DNA
agccctggctgtcctggaactcactttgtagaccaggctggcctcacttagccaggccaagctgtctgggcgtcggcacagtcaccgctgaccggccatcggcagggggcgtggcctgtggtggcaccgggacagccgcggggccctctgcgcgcagccctagcgtcaggctggggaagggaaggtccggctccgccagcgtctcctgtgcagaccgggcgagccccttcaggcggacgggggaggggccccggcgcgacgcctccccctcccccaagacccggccgagcccccgccccagctcggcgggcgccgcagtctccgggctttgttcgctgcccgcgcgggtcgcagggagcggggggcgggctgagccctcagggggcggggcggggccgccagtccccgcccagtccccgccccgtc

SEQ ID NO: 35984 - DNA, 209 bp, Mus musculus
  source 1..209: mol_type = other DNA
aatagcaaccattaaaataataatggccctgtttttcttattttcctttggaaaaaaaagacagggtctcacttaaaggcacgtgcggctgtgcctatcagttgatgtcacttatcaggtgaccaggaccagaaacaaggagcctcagtgtcgaaatatcctctaaccggagagggcgggcggcaggccgggctggaggctggctgctc

SEQ ID NO: 35985 - DNA, 487 bp, Mus musculus
  source 1..487: mol_type = other DNA
tttaaaaggagaattttatttttgattggttaaattaaaagttggttatttttttccaaaaaaaaaagaattatttgtttattttatgtatatgattacaggcagttgtcttctaacacaccagaagagggcattgggccccattacagatggttgtgagccaccatggaagagcagtcagtgctcttaactgctgagccatctctccagctgccctttagaaaggtttcctagtgcccgtcttagagaggttagcaaggagctcagcacagatgctagttgctctgctcagggtcagtacctatgtggggatcccttcagctgcaggcttagcaatgcctaggaggctccacgggagacctgcctagtgttaatcatagggcagtcgaccttagctaatgccaacccccataccaggaaaatgtccttcatattgttggagtcctatttgtgctgagactggcacgagtttgcattaagaagtcta

SEQ ID NO: 35986 - DNA, 372 bp, Mus musculus
  source 1..372: mol_type = other DNA
aacttgaacaataaacatgtttcttgggctccatgggcctgaggctgaatgtccatctttctctggacaacagagtgaaggtctacaggcaagtgtgcagccagactcaaacgctaccttaacgtctttctgcattcaagtggaacagagactggctgtcctcattcttctctccccgacagtcaccagtgactcagacagctgggactcgtgtggcaggatgtgtgcaccctggcaggtacatctaccccaaggctcattgccttgggcctaggaaacctgggcccccctaaaggggccaatccgggcccagagaggagcctccccaggtaggggcagggcgtcctgtggccacgcccaccagcgggaggc

SEQ ID NO: 35987 - DNA, 593 bp, Mus musculus
  source 1..593: mol_type = other DNA
gaaaaatatcttttttttttttaaaaagtaaagggctgtcccgaccgcacgccttttatctccgcgctcagagacaagcgagctcgctctgtgctgtctctgagatcaggaggactggggtccaattcccagggtctacgaagtggatcaccaatgttgacacgtaatttatatagtacacccgtacacataaaaaaaaaatatatatatatatatgtgtgtatgtatatatatatatatatatattatgtgtacgggtatatatatatataatatatatatataaacatatatatatattttttttttaagtcaaaggacacccaattccttggcgagcctgggtgtgacaagaacaaatatgcatgtataggggcgctgaacctttgcacgcgcttgtgcacaggaggcctgagggtaaggggggggacacacacttgcaagtgtcccgctcagtcacagggcgctcctgggaggagagcggggacgcacgcgggtggcagcggctcctgcaaccttgcgtgcggcagggcgggcggcgccgagaaacagggtctgcggcgacgggcgagcgcccgagtggagcgagcggc

SEQ ID NO: 35988 - DNA, 429 bp, Mus musculus
  source 1..429: mol_type = other DNA
ccacctgccctctgggcctgtggtgctggggtgaggaggacgccgcatctgggcccctcggggatgtctgctgagccagcccttagcccggctccagtcaccctgggcaggagctgctgtcacaggtgggccacaggctgctgtcacagggcgcgtgctgagtgccgggcaccgctgtccctgcccacatcctctcctcgatggggctctgtggatgaggattcagctgactcagcctgcaaatgagcagaagtcttgtcattatccttattttaaagaatgctgccagacccggcagtatgtaccttctctgcaggctgccttcaaagacctgcaattgggtctaagtgccaggtcctcgcacgtgtgctctgtcactcgtcagagcagtgcagcacactcggtgcataaggcagctcacggcccggc

SEQ ID NO: 35989 - DNA, 566 bp, Mus musculus
  source 1..566: mol_type = other DNA
agcgggacacttgcaagtgtgtgtccccccccttaccctcaggcctcctgtgcacaagcgcgtgcaaaggttcagcgcccctatacatgcatatttgttcttgtcacacccaggctcgccaaggaattgggtgtcctttgacttaaaaaaaaaatatatatatatgtttatatatatatattatatatatatatacccgtacacataatatatatatatatatatatacatacacacatatatatatatatattttttttttatgtgtacgggtgtactatataaattacgtgtcaacattggtgatccacttcgtagaccctgggaattggaccccagtcctcctgatctcagagacagcacagagcgagctcgcttgtctctgagcgcggagataaaaggcgtgcggtcgggacagccctttactttttaaaaaaaaaaaagatatttttcccccgggcgtggtaggcaggctgctgtgagagcctgagccgagctcgccgccctcccgcccggggaccgcggccgcggcggctcgagaacccgaaagccagcagccaaggcat

SEQ ID NO: 35990 - DNA, 474 bp, Mus musculus
  source 1..474: mol_type = other DNA
ctgattacaatggattgaaattcaaaaccaaagataaacagatatttgggtaaattaaacagtgttccaaataactactgaatcaaaaaagaaatggcaatacttatataatacttgaagattagttaaagtagcgataaaaacatatcaaaatttaataaaatgagtgaataaatgtctgtattttagataactctatagtgtgtgtgtgttcatatacatatatgtgttgtatacacacatgcacgtattatatacatatatatcaacacaaataataatcccccaaaccagttggtttctttgatgagttccttcctatattaaagaaataataacaataccaagttttaaaaatagaatattcagaaagatatagactaggagcaaatcttttctgtcttattctgtgaagtattatgctgccttaatcaatgagttagtagaatttactcaagatggttaaatcaaacc

SEQ ID NO: 35991 - DNA, 465 bp, Mus musculus
  source 1..465: mol_type = other DNA
cggggagggggcgcccgaccgcgcgcgtgggacctagcctctacagagcgactgtctcagctaccgacattcagccgcccaggataccgggcggggattcggaagtctcgacacaagggcagccccttgctagcaaagtcccgaagttactttttcaggacaggacgagtgaaagtgtgacgtagaggtggggagcacgacactactcccagatggtctgtcctcgctgagtttccaccagggaggtcctccgaatcggaggcagaattgtgagagcgagtccctttcaaatgtctccctgtagaagcatcgggttacagggttctaggagccccaaccccgttctgcggccccacgtgggtgaacccccggtgctaccaggcccctggagtcaggcgcccggcgcgcgctccgggcacactctgggctgctcggcacgccccctctcgtcccgctgcgtcccgc

SEQ ID NO: 35992 - DNA, 550 bp, Mus musculus
  source 1..550: mol_type = other DNA
gattaaaactgtgttctaagtgctgagtcataccacaactagaaacaactgttttttagtaaataatacaatctcaggtttcacagtgtgatcacatactttacacaatgtctaagttacccagatagacttggacttactttgttccctcacctcatatccatgaggtctggggaaaggctaaaggattttcttcagtataatgaaagtcccatatttccattttctaaaatttcagaaaggattctgatcgattttattcctgatgcattcatgttgacatgaatccataagtcactttttctaagcctgtgaatagtcagagaatatggtgtattaattagtctctagagtctagaccactgtgtttattgagttaataaacacaccccttaaagataaggattatgtcttaactatatttgacttgatacccaggaactgagtcctgctgcagctcctgggaaccgcaggcggtcgctagcgccgggctgtcctccgcaccaccagggggcgccgtggcgcatacggtctccccggattggcgggg

SEQ ID NO: 35993 - DNA, 416 bp, Mus musculus
  source 1..416: mol_type = other DNA
aaatgcatgtaccactagtaataagaacaacttgtttcttaggaggcttcttaaattttcctgcttaaaagttacctaatgtatggctaaaaagtttgaaggatatcttttcttttttttaaatttattaattatatttatatgagtagactgtagctgtttttaaacatagtagtcagtgccacatgccagaaaagcctattgggtcatttgtcacttttcttgactactcctgatagacataaggtggttatgttagttccatggttatgaaaatatgtaagctaataacatgggtgatttttgaacgaattttacaaacatggcacatcttttaaacagtggcactgtaatagttagctcacactttagtgccctaagagatatccagtatgtgaggggaagttgccatggcc

SEQ ID NO: 35994 - DNA, 590 bp, Mus musculus
  source 1..590: mol_type = other DNA
atgctaatatactttattttaaacgttaggaaggtataatgtattgcttgttcaactgtgtaatacaaaactgtaacgttttaattatagtataactcatgagaaataattgataggaattcttctgcaacagcactgttacattgacccaggtaaaataaatcattgactaataaattaatctcatatatgaatttctaatgttagtatgccaagcaagaatgttaaattaagtttcacagtgtaggtgctaatactggatctagtcttattccagccctaacacacctagctttttacgtgagtactgggggtcaaactcaggccataagcttgtgccaagtcaaattaattaattaagacttttaaaagggtcttgatcaataaggctacatttatcaaatgaaaacacaggataagtatgagtatcatataactactattacatgggccactctcactagtcatttgaaattcacttttaacgggaaattttatggcagggccacttccggccagtaggcggggtttccggagcccccggccccgccccgccccgccccgggagctccgcccatcgccggaagccc

SEQ ID NO: 35995 - DNA, 356 bp, Mus musculus
  source 1..356: mol_type = other DNA
atttggtaacagtgaatgattcctttcagtcaccagaaagaatacttgaagtcatttcaaactcttgtatattgcatctaggattttagatttcaaatactctaaccccatgaatacactcaaactaagagagtctatttctgctcacaggaaaagtggggtgtgaataattccatcaccttggttcgaagtcctccggagcagggagagcttaacctttcgcacaggttggaaaccttggtaatcgcaggataatgctttgtctgaggatacactagccgtggtgtggatgcacacgctgccactccacgccatgcccgcagggggccctcgctcacgcctaaggtgtcagctga

SEQ ID NO: 35996 - DNA, 355 bp, Mus musculus
  source 1..355: mol_type = other DNA
aaatgtggtacatttacacaatggagtactactcaactattaaaaacaatgaattcatgaaattcttaggtaaatggattcctgaagctaaggaataccaaagtgtggatactttgtttcttcttagaatggggaacaatatgccagaaagattttgctgacaggatcctgatatagctgtctcttatgaggctatgtcagtgcctggcaaatacagaagtggatgctcacagtcatctattggatggcctagtcggccatcaaggcccttggtcttgtgaagatcctatgccccagtacaatttgaaatgtaaatgaagaaaatatctaatttaaaaatgtctctctcttcctg

SEQ ID NO: 35997 - DNA, 506 bp, Mus musculus
  source 1..506: mol_type = other DNA
ttgattttcattatgattgacaaagtgcccacagcaggggtaattactcctttgtgggtcagtgagtttgtttacaataaagacacgctagctgaaatcttgaggtcggccaaccacatcaaacaatcgataagctgtcactgtcctggcaatgacaacactgcctgggaagtctttcccagctgcttttgcccaaaaagagacgccggtgacttttcggtaccggcgtgtaagaaacaacacgccttgatgcagagcctcccgttggctccagccggcgtgtttccgccaaggaaacgggaaagactcacccgggcgggcggcggatcctctcccgagccgctacatcgtgggtggggcggcagtcgaaggatggcggagccagcccgtcaccctgtggcaggaagcaaagccgccccgcgagttcgggtctcagggcacctgttggcgccgggctccggggttacgcccccaaggcccttccgggtcggcccgcggggagccgc

SEQ ID NO: 35998 - DNA, 593 bp, Mus musculus
  source 1..593: mol_type = other DNA
tccacggagttagtggaatagcttgcaaattcgcgaggctcgagactgcctcggccagagccgagccgcgaagcagaaacttacggttacttctcccggccgggaccgggctcgcgtcgattccccccagatccggccacctggctctcgcgccgagcgggtgacctctcgggtccactcggcgccccacccacccgccggcggcggcggctgcgggagccggaggatgcgcgctggaggcccgcgggaagcgctgcgcgagcccgacgcgcccggcgagctcacactgggcgggcgccccccatcttctcccgctgcgcgccgccgctctcaggctatggaggaggggggcggtggcgcctgcctccgccgctcgctcaagtccagcgcatggtcgtgccgcgtgcgcacgcagccgcggaggccgacctcccccttgctatagctagcgtcgggctcggctgccgccaaaccccgcgagctcacggtcgcccgctcccagacagctgcggccgccgcgcgaagtggcacggaccggcacgaacggcggctccccgcgggccgacccggaagggccttgggggcgtaacccc

SEQ ID NO: 35999 - DNA, 465 bp, Mus musculus
  source 1..465: mol_type = other DNA
ctgtaccttgaacactattttaaatagaagtagagaatggccagccgtcatatgttttcactgtgaactgtatttactcataactgcccaaatttcttcagttgatgagtgagcagacaagtatatccatatatgcaataggatgctactcaacaataaacaattgatgaacattatatgaatatgaccacgaatatgaagttccagttcactgcattccttttagggaaatagcatgtgacaaaattcagttggatcagagtctatacataaattttaaacacatttttaaaaaagaagtagtttttgtacaagtttgaaaacttttttaaaaatgtgtaagtacccaaatttacttaatgtctagtcaaagaaaactattagataagtgtgtgctgtccttgccccacagctggccagagaaggctgctgggcagctgaatgacagcagacattcgcgcgcgg

SEQ ID NO: 36000 - DNA, 424 bp, Mus musculus
  source 1..424: mol_type = other DNA
ttatgtttgaaatataagatttctaaattacaggtactagaaacatttttggtgtctgatagagctaattaacactacttctatgattaaactaatatctttagttcttacctgctaatttttcagtccaaacctatgttaaaacaaatttataagcacggctcaataaaatgtaacaaagtttattgggcataatctttcacagtagccatttcaagaaatagaaaggacaaaggtttgagtgttttcacattccatagctgttttaaggtctttaaagttcaaagttaacatagtggaaaacctccagccctttacctgaggtaatgtctacctcagagttcccaacttagattccgaattcgagttccttaggaacacagttgccgtaggctgctcttccagcgcaagcccgggttggagg

SEQ ID NO: 36001 - DNA, 444 bp, Mus musculus
  source 1..444: mol_type = other DNA
tttaaaagcatcattacatgtcaccatcctttcaaaaaacaaatggtgtttgcatagcaacacaactttcatacaaagttgtcttgaaagatgatatcgttgtcttgctttccgcaatactggtgaaggtaagccacacaggcaaggaataagctgtgatcagtagtttcactttctgggtaaactgattattaataatttaaattcccaaatagaaatctttattcttcaaactgaacctgttctttggtacaggcagaatctcagccccagccagagggaagccttggcgccgccctgtggtctcgaaccagcccagagcccacagccgccccctgctgggctcccgcggtcaggcggccgaggattaggcacagcgcgccgggctagtgacgtcacctctgcgccaggccgaggccggaagtcagccgttacttccgcact

SEQ ID NO: 36002 - DNA, 499 bp, Mus musculus
  source 1..499: mol_type = other DNA
tttataagcacggctcaataaaatgtaacaaagtttattgggcataatctttcacagtagccatttcaagaaatagaaaggacaaaggtttgagtgttttcacattccatagctgttttaaggtctttaaagttcaaagttaacatagtggaaaacctccagccctttacctgaggtaatgtctacctcagagttcccaacttagattccgaattcgagttccttaggaacacagttgccgtaggctgctcttccagcgcaagcccgggttggaggggggaggttccgccctcgccctttccactgcggctgaggccgcggtcgctttggaattggaaatgcagcgcggcgtgttccgagcaccgggtccccggagcagtgggtgtcgggccgccggaccctgaccctccctccgccccggtcaagccgggcgcgcacaagcacctgccgggccacgctcgcggctgcgccggccgcccgcccgcccgctccgccccgc
